United States Patent Application Publication US 2026/0103690 A1 - sequence listing, part 60

SEQ ID NO: 291101 - protein, 342 aa, unidentified
MKGYNYVGLDVHKKTISYCVKQADGTILDEGKIDATRKELYSFADRLPRPWAGAMEATLFTGWIYDFLKPHADELKVGQSYMLRAICAAKKKNDRLDARKLADALRCDWFPEVYMPPAQVRELRMALRYRNKLTREETRMKNKTAGLLMEAGAEYNKKKLHGKRYFDTLLDELDYVPESVREMARMSHESVKYFEAQQKRLVWELRENPALKERVERLMSIPGVGEITALTWALEIDDPHRFSNRKKAISYCGLCSGQDESGGKTRRNPLSKQRNKHLQTTLIEAAKIATQWNPQLGFAYNKAKERGANKNEATIEVARKLVAYLLYVDKTGKEFHLKENLN

SEQ ID NO: 291102 - protein, 346 aa, unidentified
MTYSTTVGVDLAKNVIQISVVSSRGKELSNRSLTRTKFAEFLGKQKPSLVAFESCATSHYWARAAKRHGHEARIIPAKAVAPFRQGHKTDSNDALAVAEAARRPKIKEAPMKTVEQQGLQAIHRSRELLIQECTALSNHVRSLLMEFGIVIKRGFASLLRAVPEILEDGENELPDLYRPTLQRMFTRLLELREDIEAMTAEVECLAKGHPICSKLMALEGIGPVGALLLYATMGSGVAFSSGREFAAYLGLAPKQYSSGGKTTIVGLSKKIGNSRLRSVLILGARAYVYKLKEPKSSKDRWLKAIIERNGESRAAIALANKNVRTAWAMVTQGTEYQRREQLPMAA

SEQ ID NO: 291103 - protein, 363 aa, unidentified
MGFDRIIALDLGKFNSVCCTTDVATQQHRFGSIATTPQAMHDFLVARIEAGDAPSRTLVVFESCDVAGWLHDLAVALGFEVKVANCCHEAWKWNKVKRKTDKDDALKLAKMATLDQLPVVHMPSPQMRQRRRLVLQRRTLVQRRTQIKNSIRSIFSQQGLTQLLPRGKKAWSKAGIAQLREQAKDLAGCEIDDLWRGGLHVEIELLEALSTQVAIVEKKLDQIGEADEQVKLLQTVNGVGPRLAEAVVTTLDDPHRFQGAAEVSSYAGLVPRLIESGTMSRVGRITRRGPSLLRGMLIEVAWVVWRKNPWAQVFVRKVSRGMKSRKKIAIVALARRLLVKLWAMLRTNTPWHEFGPPRAQAVT

SEQ ID NO: 291104 - protein, 418 aa, unidentified
MTATHSIAPTLLVAIDISKHRHEVLIGIPGKTRRRRLTVMNTLEDFKRLSAALASYDLPVRIGFEATGNYHRTLAHHLGRAGFDLKLVSSVALARTREALHNSWDKNDPKDAQVILHMLEIGAVQFFHDPMVVGTADIQELSKTHEIVSRSKTELWHRILTHYLPLYFPEAERFHRSARTDWFLAFLEKYPSPHMISAMGRDAFIADAWDVVGRKVSKEQLLSDVYATAAGSVGLPVHPDSDAIRMFRLVLAEGRSLVRQRDEIEARAVELLSDLPDYHLLTTIPGIGPINAMSILAEAGDLRRFRHHRQFLKFCGMDLATVQSGMFRGQSRISKYGNARLRRTLWMAGQTAVLKRTNSFRDKFERYISKDRHNAHLRRKAYTAIAAKMARTVHAVVNHGEPYRPFFEGVSPGGRTSL

SEQ ID NO: 291105 - protein, 321 aa, unidentified
MANVSKIIGIDISKEKFDVCFLFGDNGCRQSNYSYNNKGIKEFLKEVPNDCTCIMEATGTYHLRLAYALYEHSVFVSVVNPLSVKNFSRAVMCRTKTDKADARLLAEYARRMEPSKWKPVSDNYIRIQQMYRSIEMFQMNINQAENQIEAICNSPVCDKRLCNTLGRHIKQLKKHIDKLEKQIEDLIAEDDATVVEHICSIPGVGKKTAIALLTATKGLHGFDNYKQMSSYFGLCPRIYDSGKSVHGKAHICKMGMGWIRKLLYMCSISAIRYNKACMTLYLRLREKGKPVKLAMIAVVNKLLKQIFAIVKNDNVYSENFI

SEQ ID NO: 291106 - protein, 340 aa, unidentified
MNSISIIGLDLAKNVFQAHGARADGTVAFRKKLRREQVLSFFSAQPTCVVAMEACASAHYWAREISAFGHEVKLIPPIYVKPFVKRQKNDAADAEAIAEAASRPTMRFVAVKSAEQQAAGMVFRTRDLLVCQRTQTINALRGHLAEFGLAAPSGRVNCSRLEEAIEAPDCDLPAPVIELARLLLAQIAQLSRKIAILEQEIRVRSQGESVASRLTSIPGVGPITAAALEAMAPPAETFSKGRDFAAWLGLTPRQHSSGGKERLGRISKMGQRDLRRLLIIGAMAVVRWASRKGVPEGSWLARMMAKKPRMLVAVALANKTARIAWALMAKGGVYRDPAAI

SEQ ID NO: 291107 - protein, 341 aa, unidentified
MSEASTIGLDLAKRVFQAHGADASGRVVFRKRLRRDQVLTFFAGLPACVVAMEACSSAHYWARAIGELGHTVRLIPPAYVKPFVKRQKNDTTDAEAICEAAQRPTMRFVSVKSEAAQANAVVFRARDLLVRQRTQTINALRGHLGEYGLVVAKGPSHVAQLIAHVEDPVADLPEAARTVLRVLTASLQFLAERVALLDREIARRAREDKEVRRLTTIPGVGPVIATALAALAPPAGAFRRGRDFAAWVGLTPSQRSSGGKQKLGATSKMGERTLRRLLIIGASSVVRKAIKYGTPSGSWLARMLARKPRMLVIVALANKMARIVWALRATGEIYRAPIVAV

SEQ ID NO: 291108 - protein, 345 aa, unidentified
MNITTVGIDLAKNVFQLHGVNDHGKAVLRRQIHRGQMRGLFFNLPPCLIGMEACASAHYWARTLESYGHTVHLIAPQFVRPYVKTHKNDATDAEAICEAVSRPHMRFVPIKTIEQQSALSLHRVRQGFVRARTAQACQIRSLLAEFGLVLPQGIANIKQVPKLLQVAGRELPAPFCRLIERLLAHLTELDRQAKELEEQILDWHERSEPSRRLAKIPGIGPITASALVASISDVRSFKSGRQLAAWLGLVPRQHSSGGKPVLLGISKRGDRYLRTLLVHGARSVIVQARKRADETKSDWLKKLLDRRHVNIATVALAHRTVRTVWALLAHDREYCPNYRSLPMAA

SEQ ID NO: 291109 - protein, 355 aa, unidentified
MKYYTSTTEFNCGIDLHAHQMYVCLLDRQGKKLVHTNIRNNDFEYFLKLIAPYRHDLTVCCECMFGWYWLADACQAAGLKFVLAHALYLQAIHGGKNKNDRVDSEKLAHLLRTNLIPPAYVYPAQQRPLRALLRQRLYYVWSRADLLSRIQSHQLAHNRPVLKQTRPNRDPWEQQLLAHEDHPLRQLALQNDLAMIRHYDTRITALEEQLHRLTQQTAPRDYTLLQTVPGIGEHLGLTLLYEIGDIARFPTVKDFLSYCRLVKGTVASAGKIKGLRGAKLGNPYLRWAFGEAALIAKRDPQVIGPLYQRLEARMNGNKFKANTVLAIKLARAVYYMLRQHTVFDPDRLVAVLARN

SEQ ID NO: 291110 - protein, 416 aa, unidentified
MDLDEVVYTTAGGLDVHFAFVAACLVTTGPKGKPKVEEREFPTNQKGLRALREWLSAGGCEAVGMEATGVYWMPVYAALEGGFELVVGNPQHMKNARGRKTDRMDARWIAGQMRHDRIKPSFVPPPEFRDARELARARRQLIQERTSIRNEIQRLLARAGITLGDLVSNVFGVSGMNILEALAEGKSIQEELPGCLRSTLKSKLTPIAAALEAPLSAISQYLLGVALRRLEAQEVLVDEMESKLFKHLAPHKAKVDLLLKVPGISRISAHIILAEIGVDMTVWPTEKQFSAWAGVAPGCNQTGGKSKRAKTRKGNPYLCTILMECAGAAIKTKSCHLKAKYNKLSAQLGSKKKSRMAIAHKLALIVYKIIGENIVYFEPKPKPQTERTKRKILQKSVRDLERLGYKVNLEPVGAVS

SEQ ID NO: 291111 - protein, 346 aa, unidentified
MEHFAGLDVSVKETSVCIVDETGKIVREVRVASEPDALLEVLKSHAYRFNRIGLEAGPLSQWLFSALAEVGVPVVCVETRHMRAVLKAQINKTDRNDARGIAQMMRVGLYRPVHVKTLRSQKLRMLLTHRKLLQSKAIAIENDLRGTLRNFGLKVGMVGTVKFEARIGELVENVPDLAALVEPLLVVRRAIREQIAILHRRLLAIVRDDEVCRRLMTIPGVGPVVALTYRSTVDVPARFRNSKAVGAVFGLTPAQYQSGEIDRTGAISRCGDEMMRVMLYEAAHIMLVRSTKWSWLKAWAMQIARRRGMKKAIVALARRLAVIMHRIWVDGTEFRWTREQHAAAGA

SEQ ID NO: 291112 - protein, 369 aa, unidentified
MLESDQLQPRELPIVTTSTRIKCHLYIRLHDLPTIAQEELFTVDAILERCAGLDVHQDTIVACFLSGPLDQRPSKEIESFGTTTKELLRLQDWLQDRECTHVAMESTGVYWKPVWNILENTCELTLANPTRIKNVPGKKTDYSDAEWIARLHRSGLIEKSFVPNEEIRDLRDLTRYRRKLLQNVTQEKNRVHKILQDANLKLTTYMSDVFGVSGRALLESIVNGEVLDAEQVRDMVKSTLKRKVPELIEALNGRLRLHHRKMIRRHLEHIAFLEREIQELEAEIEQLLAPYQREKELLETIPGIKQDAAASILAELGPDMSHFPSDAHLASWAGVCPANHESNGKKNEKRTNVEIKDLKPCSVNVAGQP

SEQ ID NO: 291113 - protein, 377 aa, unidentified
MKSIKFVGLDVHAETIAVAVAEQDGEVRSLGVISNREESIRKLIKKLGPVEQLRFCYEAGPTGYVVYWQLTALGAKCEVVAPTLVPVKSGDRVKTDRRDALKLARNYRAGELTAVWVPDAAHEALRDLVRAREAAKKDQLRAKHRLSKFPLRHGRRPPTGVKLWTLNYLAWMKKEVRFEQPAQEATLLDYLHEVEHAEARIDRLDLAIEEAVKSTPPKMRAVIEALQALRGIAQVAAVTIVAELGEISRFPGARQLMGYGGIVASEHSSGESTRRGGITKTGNAHLRRVVVEAAWASRHRPNVGGALRKRQELVSEEVREIAWKAQHRLHTRYRKLTARGKNKGKVVTAIGRELLGFIWAIGVKVETAQKETERRAA

SEQ ID NO: 291114 - protein, 337 aa, unidentified
MGLYCGIDLHSNNHVLTLADEADRRVYERRLPNDLAITKATLEPYRAELVAVAVESTFNWYWLVDGLMEAGYAVRLVNTAAVRQYEGLKHSDDEHDAFWLAHLMRLGILPTGYIYPKSERGLRDLARQRMRLVQHRSSLITSVQNQVWRSTAVRLRSDTIKGRGKQPWPEISDPDLALSIKAGRAAIDTLTVQIERLEKLILKRVDRSPQFRMLKTVTGIGPILAMTIALEVGDIGRFTSVGEFASYCRCVDSQRLSNGKKKGEANRKCGNRYLAWAFMEAAHFAIRNLPAAKRFYERKRRQRHALLAVKALAHKLARACFYVLRDQVPFAPERLFT

SEQ ID NO: 291115 - protein, 429 aa, unidentified
MAAGQAVMCPGRTLLVLESSHAAVVAAADPVFVGVDWGNSHHQLCIVDAAGGIVDQGRFAHDVAGLHLLEGRLRRHADIVGVSIERSEGLLVDAPQQQGYRLFCVSPKMSARARERYRLAPVKSDAFDAFVLADSLRHEHRHWRSLAVPSPLLAELRALTRDRERLIWNQRDVENQLRAVVQAYHPTVLHLFSSLDRDISLAFLRDYPTPAHAGRVGPARMAAFCARHGYSGRTKPEVLVERLRDNLLSASSGTTAGKALSAVLFVDQLDLLNSQVRTMSKRIRERLTAHPDAQIFLSFPGMGKITAATMLAVMGEDRMRFPTADVLLAEAGAAPVTQASGRTRRVRFRYAANKRMRHAIDWWTFVSVRENDWAREAYRQARARGQQHNRALRGIGARWTRILWRCWTDHSRYNPELHLNKQPTRPVSG

SEQ ID NO: 291116 - protein, 414 aa, unidentified
MSQEKPVSSATFRACPTRFIGLDVHKHYLVAIGVDAELNQVLGPRRVQLRHLDDWMSKTLTRQDAVVLEMTTNAFQLHDDLQPHAHSVTLVHPPEVKLITRAQVMTDKKAALILARLHAKGLLPSVWVPPLEVRDQRALVAQRAKMVRLSTQAKNRLHAVLHRHHLLSPEGDLFTPNKHDWWFSLDVPPVEHVRIQSNLETLAFAQSQVALLEETLAALAAQDERVLLLIQLPGIGLIVAVTLLAAIGDISRFPTAKKLVGYSGIGSRVHDSGLSRRTGRMTKAGRRDIRAAMIEAAHVASRTHPHWKAELARLEPRIGHNKAIVAIARKLLVTVWHVLTAGCADRFAEPDRVARKLLRHAYRLGKTNRPDGQTAAEYVRQQLDRVGIGADMTTIRVGSKTILLPPSRLISADD

SEQ ID NO: 291117 - protein, 374 aa, unidentified
MERLKSKMMGWPRPHKAGMHKESKNPLQEAIPMKTITTIGIDLAKNSFSVYGVNAKGAPVLHRTLSRANVVNFFAHLPSCLVGMEACASSEYWARVIESLGHEVRRIHPRYVKAYLLGAKNDANDAAAICEAVQRPKMRFVPHKSSEQIDIQCVHRIRQGFVRSRTALVNQIRGLLGEYGIIMRQGVSTVRNRLPELIADETNELSPIMRCNLTSLYEMLCFLDERILDQEKLLKGFVRENEACKRLMQVPGIGLLTATILLSVAGVASNFKNGREFAAYLGLVPRQHSTGGKTKLLGISKRGDSYTRTLLVHGARAVLFSLQTGRTPQARQNAWLAELVARRGTNRASVALANKTARIAWSMLAQGTEYKLAA

SEQ ID NO: 291118 - protein, 354 aa, unidentified
MKRTTKYVALDVHQATTVASVREEGGRVIARTILPTEAGPIVEYVRGMRGAIHVAFEEGTQAQWLHELLVPLVDRVVVCDRRGQPQQGNKGDQIDADQLSELLRRGGLRAVYHGSVQRAALKELTRTYGNLVEDATRVMLRLKAVFRARGIPTPGKRVYHPTARAQWLAHLPDRGARFRAEALYAELEVLRELRPKAKAAMVAEARRDPAWALLQTIPFFGPVRVALLLATMQTPWRFRTKRNLWAYVGLAVVTRSSADYVLVGAQSVRRRRAPLTRGLNQNHNRVLKDVFKGAATAATTQPGPLQDWYQGLIARGMREELARVTLTRKLAAITLRLWKKGERYDPTQLTQQAR

SEQ ID NO: 291119 - protein, 356 aa, unidentified
MTIVAHARPFVVGVDTHARTHTFAILVAGTGELLATEQFPATTSGMGRAVDWAGRRTGGDLATLWVIEGVATYGARLAGAVAQAGYEVVEAARMDARAHRGAGKSDPLDACRIAAAVLSFEPVDLRRPRSDEGVRAALRILVTAREHMTTERTATINALIALVRVVDLGIDARKPLTATQVSQIIRWRARVEDLATGTARAEAVRLAKRVTDLDADLRANQNQLTDLIRASKAAPMLDKTGIGPVTAAVVLAAWSHSGRVRSEAAFAALAGVNPIPASSGNTVRHRLNRGGDRRLNRALHMAVITRMTHDPTTRAYVERRRAEGRTTKEIRRCLKRYLARHLYRTLNALHKTIEST

SEQ ID NO: 291120 - protein, 423 aa, unidentified
MTVVYPICCGVDVHKTFFVATLITSEGIQPKYQKRRFSTFNSQILAFKAWLLGNNCRDICMESTGKYWIPVFNLLEDSINVTIANPKWVKTVKGNKDDAKDSKWIGDLFRIGLVPGSFIPSKDIRILREYTRYRFKLVSCKSSEKNRYQNVFTVCNVALDAVVSDMFGVSASSITDYIVNSDTFDPEHCVSLLKRSLKKKADDVVASIEGFQMSAPQKERAKFVKEHYDYLVSQIKKINMAIDILAKPFEPAINLLCTIPGIRRDSAITLLSEIGADMSQFDSSKRLCRWAGLTPGNNESAGKKKSVRITRAGVYLKPALVEIAHAAVKSKISPYYRIKYERISKRRGKKRAIIAIARMILTAVFHMLSTGEVWNPVDLNQIDMPPELREKEVQKSLRRAAKLLIAHGLISPETIQIPQTVPA

SEQ ID NO: 291121 - protein, 399 aa, unidentified
MRGNSFIPRDYDVFTGLDVSKKSMSVTFTNHQGFIRSLNMPHKAEHLLHYVRKHFPDQKIAFVYEAGPTGYGLYDGLAAQAYPCLIAAPSMIPRAPGQRVKTNRLDSKVLSENLRGGQLKSIHIPSPTYRHLRHLTQLRDVLVSELAGMKQRIKSLLLFEGIEFPPAPPGSQWSFMVKDKLRKLPCSGTVRFKLDQLLDSLEFNEKQVLKTITEIRRFCRNDPELSQCMQYLMSLPGIGWITASKLLARIGDWRELNNIRQLAGFLGLVPTEHSTGERIDRGSITRTGDERLRSKLIQGSWSAIRQDDELREFFRSVCRKHPREVASRVAIVAVARKLSVRISVVLMKQRSYEVREKVHSAPLTQEETSPQGTTRRLREPGEKLMTVRPLRQRSRGFVP

SEQ ID NO: 291122 - protein, 438 aa, unidentified
MSALPVIDPKAAAIDIGSEQMHVSIAGGEPKVFGSTTAQLHALRDYLLSQGASSVAMEATGVYWLCPYEVLEKAGLQVVMVNGKYVKNLPGRKTDMKDCQWQATLHAHGLLRGGFVPQEHIRRLQDYQRLRADHIAEAASCEQHMQKALERMNIKLHDVISDLTGVSGLKVIRAILQGEHNPVALLALCDCQIQKKKAERVCESLVGTWKEEHLFGLHQALAAWEFYRGQIGECDQALEQVLKEVTDDKPAPPDKLPSWGRRSGANSPQIPQMREMLWKLCGGKDPTAIPGISDYTLLQLVAETGTDLSSHWKTDKQFTAWAGLAPGARQSGKRRGSQKRSRNRAGRIFCLIARAVGRTSDKALGGFYRRLRARRGGLVANLALARKLAQMFWWAMVHGLAYAEHGIKKYEDKVQKTEQAWLRKLARKHGMVLQPAPA

SEQ ID NO: 291123 - protein, 320 aa, unidentified
MSDSLVIGLDVDSKELVPAVADCKAGDRIPNTKAGIARWLKTLPPRCRIGMEATGKHYELVARMAIQAGHVVYVINPRWIKNYGKATGARGKTDAMDAQVIARYVKKESDRLREYVPRSDEQQQMHDLLRKRQTLVETRARLEQSFEVTKSAPGELADILQAMASTLSELESQLQQLCRDGEHGALYKRLLTIPGIGPAVAAHLVYYMTRWPLANANAWIACTGLDPRPNESGGRTGRRRLSKQGAPVLRQMLYMAAMGLKRCRGGQPLYDDLSGRGHPSTAVFNILARKLARIAWGVFKSGKDFDPALLKVGQARFQQA

SEQ ID NO: 291124 - protein, 409 aa, unidentified
MTATDITASTLLVAIDISKYRHEVLIGIPGKKRRRRMTILNTLDDFQRLSATLASYDLPVRIGFEATGNYHRTLAHHLGQAGFELKLVSSVGLARTREALHNSWDKNDPKDAQVILHMLEIGAVQFFHDPMVVGTADIQELSKTHEIVSRSKTELWHRILTHYLPLYFPEAERFHRSSRTDWFLAFLEKYPSPHMISAMSREAFIADAWDVVGRRVSKEQLLSDIYATAAASVGLPVQADSDAVRMFRLVLAEGRSLIRQRDVIEARAVELLSDLPDYQLLTTIPGIGPINAMTILAEAGDLRRFRHHRQFLKFCGMDLATVQSGMFRGQSRISKYGNARLRRTLCMAGQTAVLKRTNSFRDKFERYISKDRHNAHLRRKAYTAIAAKMARTVHAVVNHGEPYRPFFEG

SEQ ID NO: 291125 - protein, 319 aa, unidentified
MREPEVVVGIDVAKVRLDLGVHPSGESWTVEHDEAGIATVVERLVAARPTLVILEATGGLEVAVVAALVAAEVPVQVVNPRQVRDFAKAIGQLAKTDRLDALLLARFGAAIRPTPRPIPDAALQEVRALVARRRQLQAMVIAEKNRRASAPKRLHTQIDEHLAWLRRAVAALDRDLGTTIRSTSAWQTAVSRWRSVPGSGPVVSATLLADLPELGTLTRQQIAALVGVAPLNHDSGAHRGTRSCWGGRAHVRTALYMGTLVATRCNPAIATYYQRLLAAGKPKKLALVACMHKLLTILNALTRNGTRWQAHLPSVNTAA

SEQ ID NO: 291126 - protein, 387 aa, unidentified
MATVVIGVDPAKRSNTIEVIDSDENVLLMARFENSSADYRKMRGLVKRWPERKWAVEGATGVGLNLAQRLVSDGEHVVDVPSKLSTRVRAIDTGHGRKNDPSDAHAVAVVGLRTAGLRVVTVDDEAVVMRLLSQRRRDLVRSRTQAVNRLHQALMQLIPAGARKKLTAAKAKEKLATVRPRDAAGKARRQLAADLIDDVIVLDRKLDAIDKRIAEAVKASDTTLTDIVGVGPVTAAAILGEVGDVARFTTADRFASYTGTAPLEVSSGDVVRHRLSRAGNRRLNNALHIVALSNKRHDPRGKAYYERKLAAGKGKKGSLRCLKRRLSDVVFRTLVEDRARANPGGQMGATLTASAVDQIPKANTSDKPQPGFVTEATPTRPPAKAAS

SEQ ID NO: 291127 - protein, 471 aa, unidentified
MPARKTRSRKPPPPTGPPPLPAPVADPPPGRLAAGIDAGDRTHWVCVGHTPDGGDTAREFPAHTPGLRQLVAWLRQCGVTTVAVEATGAYAHVLFLTLLEAGFDVVMTPPHFTKQVKGRPKTDRLDCQWIWRLHHHAMLPSVFQPDDATQTLRDYVRQRANLVRLSAQHVQRMQKALLLMNLKLTAVLGDVTGVTGLKIIRAIVAGERDPHALARLRDRRCKHSAADIATALDGRYRPEHVTELRLCLKMWDAYRDAIAELDPVIAAHLRTMRKQTALPPLPPQTRVRGRKPHDPKFDVRAALYLATGVDLTAVEGIDAVHALTLVGELGCDFSKWPTVKHFTSWLGLCPNWKKTGGKVQSSKTRRGKNRAAGALRLAAWGLIRGKSYLGAYLRRQRSRLGTPKAVTATAHKLARVVYHLVRYGAAYVKKTEDEYAAQVRGRVERAFHRRAKELGYEVRKVEPPAPPDAAG

SEQ ID NO: 291128 - protein, 428 aa, unidentified
MDETNGNRVERFRQFKREIRGSEEYLLVGIDIAKEKHHAFFGTANGKTLLKRMIFDNSREGFEKLLIQVEALKVHHGLKRVVMGMEPTANYHKPLGEYLIRKGHEVVLVGGVAVKKNRELLDNRWDKHDTKDAANVADLISQGKCLFYEYPCLALRELRDLLSLKRRHKKQEHGYQVRIRNHLLAQYFPEMDPYYEQSKVGSLGIVKWCLSPLKISEMGFDEFVRLVSCRRVGGVQERRLQKIWEKARESIGCEAGETVAFGASLMVDGLRQTREALKAIERKIEEICKGFSEYECLLSIPGFGPDISSKVLGAIGDPFRFNNGKQVLKLSGFDLSADRSGKDSEEGLPVISKKGKSDLRYALYQAALIASVKNRDVMIYYTNKLRGRERERGIHIKMRVKLAAKLLLVAWTLMKKKEKFDPAYLNID

SEQ ID NO: 291129 - protein, 354 aa, unidentified
MGEFENKRGLVRGKEVYIGVDVHKESWYVTARVDEEEVFHGRMPSQYHALRRLLDQFQECKIKVAYEAGPCGFGLYDKLTEDGIETLVVPPSLIPIESGNRVKTDKRDSRKLSKLLENKMLKRVRVFTEEERMHRELLRTRHQLVLHRSDVARQIKSKLLFHGIASPFPGRHRWTLKYVQWLRNLSLCSQYLKESLEVLIDLYEYLSKQLMRVNRKVVELSRTDNYRGRARLLRTVPGVGLLPGMEILVELQDMGRFRSSEEIASYMGLTPSEYSTGEYTRQGRITRSGNWRVRTALIESSWILITKDPWMRSKYMRLKSIKGSKRAIVAIARRLIIRLRSMLLHNVPYRMTKP

SEQ ID NO: 291130 - protein, 390 aa, unidentified
MEARTVNNLPPAASHDDDAVRCVLAIELSKKSWIVAVNTPLSDKISRLTLKPCDGKELLDLCERIRTRVARETKQRVEIVSCYEAGYDGFWLHRLLEAHGIRNYVIDPASLQVDRRARRAKTDRVDAERLLRSLMAYLRGEPKVWSVVRVPSVAEEDDRRLHRERGRLINERIQHVNRIKGLLAIHGIYDYQPLRRDRMQPLDRLRTADSRTLPPRLKAEILRELQRLELVIGMIKAIEAERDAIASAKAQTEHTSAKKIQGLAKIKCIGPEFASTLVGEVFYRSFDNRKQLASYVGLTPAHFQSGATCHDQGISKAGNAKARTVMIELAWLWLRHQPDSPLSVWFRGRVGKLKGRIRRITIVAVARKLLIALWRYLETGLVPDGAALKL

SEQ ID NO: 291131 - protein, 380 aa, unidentified
MTDRTSNTRTQDCYVALELSRRTWLVGAILPDSPKVRTMAVPGGDTSALLACLEQMRARAVQACDCDANLCVCFEAGYDGFWIARFLIDQGIDTIVLDATSFLVSRRGRRVKTDRVDVEAMCNTLKAFLLGDKSVCRPVVLPTPEEEDSRRICRERTQLTKERTRHVNRIKALLNLHGIRDFAGLQTGVLKNRLTDLRTGDGRSLGPHIRRELTRQMERLELVNRQIKALEVERGEAVADAEIPQSRKVEMLTRLRGIGEIGASTMVTEVFQRKFQNRKHLASYLGLSPAHYASGDRSRDQGISKAGNKAARVMMVELAWCWLRYQPNSALTQWYRKRFCTDAATSKKVGVIALARKLAIALWRYLEHGLVPEGAVIKTS

SEQ ID NO: 291132 - protein, 350 aa, unidentified
MMIIGCDYHPGFQQIACVNTETGELSERRLSHREEAEQFYRNLKGRGLTVRVGMEASGHARWFERLLTELQFELWIGDAAVIRTKRVRKQKTDRQDAQLLLKLLMEDRFPRIWVPDAENRDLRQLLWHRHRLVQMRTRIMNQLHVVALNEGVRRKKALWRPAGRSELESLVLAPWARRRRKDLLDLLDQLTPKIHELTRALEEEVEKRPAARRLMTHPGVGVLTALAFELVIGTPERFHCGKQIASYVGLVPAEESSGDRRRLGHISKQGNALVRFLLVEAAQVTVRSQPQWRSKFFHLAMRRGRKIAKVAMARKLAVHLYWMWRGGWDYEQWEKLGSHAGEPGNRRGVQ

SEQ ID NO: 291133 - protein, 466 aa, unidentified
MENNYILYVGMDSSKGKADAAILKVSDRRSVKPKFLRKKLSFKFVKSEVTSFLETVRSYSDDNCTSICFALEVTGIYSTNVYNFIKDNLNDNESIKFLNTDFVNQWRNAHNIAKSDPLDAQTISTIIGTDSDVQYVNDNVFENKNGYQDLKALVHRHYQIKKIYSQEINRLIAQCDCLFPELQYVFEPKSAAFIAVLSSYPTTHDIINASRLEVFNVVYEATKHRCSMDKIDKLFDLCHDTLVPDNISSYGRSIILDLVENIKNIKGQLKMIERYIRDVASLNPAYKLLLTITGCGPLTAATVIAETGDIKRFKNADCFVSYSGTSPRNKRSGTSVETMGKISKRGSRYLRHAIYMIAEFARRHNPVLKHQFERIKNGNKKRHKLANIAIANKIARYIYSIMKNESGFVIFHEHIMRLPEETQNTFFNSISLDFPENTRKQIYQYSDIDGEVHKFVYTKLEETMII

SEQ ID NO: 291134 - protein, 451 aa, unidentified
MGNSKTRANQSIVVKQEATQRIINVAHVSAIGIDVHLDLLVCAYQASTEGEIITEVRNFGTSYSQLKSFASWCAERQPEIVLMESTGVLWQSPYAALEAHGFTNDRLALVNARDVKAAMGRKTDREDAIRLAEFARIGRVRKSFVPKPVFREMRLLARLFQKAKNDLARKSNRYQKLLNAAGCRASTVFSDVVHGKAASRILDAFLWQSPELYAIVQKESKRLRASPEEIMDALHAQVPPVLVEQLREERLAINHEADYCDCTMGRLKNLQKPYEPFIKLLCTIPGIQETSARLIFAELSDDLEQHFRDSEHFASWMGLCPGNHLSAGKSYSSKTPKGNKWLRRVLTECAHGIALSRKGALWARFTAYKLRRGTKRAIIALAHKLALIIYSCMTSGECYVERETTALRDVCKNRLANAHKLYQMHGQEVRKQAVRPAISRRDTGATQVAVC

SEQ ID NO: 291135 - protein, 387 aa, unidentified
MPQPNDLSRSLVALDQNSTIIAVLEMSQSSWLVAGMLPGIERQPRKKLEPSPERLVAVLHAWRDEAVRAGRTITRIALAFEAGRDGFWLARWLEARGVEAHVIHASSVAVSREHRRAKTDRLDTELLKRGFLGWLRGERGHCTMARVPTIAEEDAKRPNRERECLVGERTRIVNRIKSTLARLGIRNFKPTLRKASERLATVHTPEGMPLPPNTLAELQRDMARLGFVMSQIREIEVARQKRLEQQPETGPHAMVRLLARIVGVGVETADMLVHEVLSRPMRDRKAVARYAGLTGSPDESGAQRREQGLARAGNARVRRGMIQLAWRFLMFQKESALAVWYRTRTADSRIGTRKTMIVALARKLVIALWRFVTTGETMEGVILRPAG

SEQ ID NO: 291136 - protein, 351 aa, unidentified
MLIIGCDFHTRFQKIAMMDTTTGELVTRRLEHGTGEAEKFYAALAAPVRVGIEATLATQWFEKMLRHYGHELWIGDAAEIRAAMVRKQKTDDRDALHILDLLMQNRFPRIWVPSPAERDVRQLVRHRHKLVRFRTSVMNQLHALAMGQGLCLRKKLWTTVGRQKLESLTLDPWASRRRRELLELLDQLDPSIGELDRAVISEAESRPTAVCLMQQVGVGPVTALAFVLTIGPVSRFPNSKKLVSYLGLNPSEESTGGRQRLGAISKQGNTMLRCLLVEAAQTSARLDPELRRNYQRLKLRRGNSGVAKVAIARKLAVRLYWKLREADRPNTAARMQGSPVTPVVGESLSAN

SEQ ID NO: 291137 - protein, 408 aa, unidentified
MTIFVGDDWAESHHDVHLMNEAGERLATRRLPEGLEGIAKFHELVADHVEDPGQVVVGIEVDRGLWVTALAGAGYEVYAINPLAVSRYRDRHHLAGAKSDAGDAKVLADLVRTDRHNHRAIAGDSAEAEAIKVLARGHQNLIWARNRHTNALRNALREYYPAALVAFDDLADRDALAVLGRAPGPGTGARLSIAQIRSALRRGGRQRNLDRRAEEIQSALRGDQLAAPTVVAEAFAATTTAVVGIITQLNAQIAALEERLADDFEQHPDADIYLSQPGLGDVLGARALGEFGDDPHRYASAKSRRNYAGSSPLTVASGKKRAVMARHIRNRRLYDAVDQWAFCSLSTSAGCRAYYDQRRTAGDLHHQALRALANRLVGILHGCLRTRTLYDEDTAWAHRQADSDRLAS

SEQ ID NO: 291138 - protein, 339 aa, unidentified
MEQQRQYVGIDLHRRRSVIVRMAADGTVLGQARIDNEPTALALVLADAGPEPEVVLEATYGWYWAADVLEGLGARVHLAHPLGIKAFAYQRVKKDESDARILADLLRMGRLPESWVAPPAIRELRELVRYRHKVVEARANAKAQVHAVLAKEGVRVPMTDLFGVAGNALLNDLALADAYLIRVESLRDLVAVHTRQITMLDRLIARQLGGDKGYEAIQAIPGVGKVLAAIFVAEIGDVGRFERPEQLASWAGMTPRHHESDTTVRRGRITKQGSRLVRWAAVEAAKVPRSHSWLKADYRRIAARRGRKIAAVAVGRKILTLVFYGLRDGEIRRLAQDVA

SEQ ID NO: 291139 - protein, 423 aa, unidentified
MAGVMIGIDPHKGSHTAFVIDGREKPLGQLRVRASCEQAEALLGWAGRWRQRTWAIEGARGLGQLLAQQLLAAGERVLDVPPKLTARVRLLESGQINKTDENDARAVAIAALRARQLPQLTVEDQTIVMRVWARRYHDLGRLRTQAVCRLHTVLCELVPGGVRKQLRTSQAIAVVDRITAESPVAQAKLELAHDLVADLQRLDAQRREVKRRVSRAVAAAPTSITEVYGVGPIVAACVLGYVRDIRRFPSRDRFASYNGTAPIEVSSGDRKIYRLSRRGNRQLNHAIHIAAVSQISHRGSEGHAYYQRKRAKGMTGKCALRALKRKISDTLYERMLHDIRPRKDPGGHSGNDAVSSAAGSHPDGPALRTSHSRATANSKTATTNQRPLTSPPAPDKRRTSRSGTGVKLQPRPRPRRGRGQERA

SEQ ID NO: 291140 - protein, 314 aa, unidentified
MPEPIVYLAVDVAKATLDPFCCDQHYPTMANTLEALAQLVSQVQKGHPHRKLHLVCEASGGYERKVVEFAMSNRLLVSVVSPSRVRNYAKACNQLAKTDRIDAEMIARFAQSVHPRPLQEQEAWGADLQALVMAKLQLKENITRLGNQLENLSHAQLGRCLQRLLRAHEKELKNLDRLMEKLLKQHQDLNQKVSRIESVQGVGKATALGVIALMPELGSLGDNQAAALAGLAPFNRDSGPSKGYRSIRGGRRKVRTLLYMPALTAIRLNPVLKKVYQRLRNNGKKPLVAITAVMRKLIVLFNRLLANPDFSLAS

SEQ ID NO: 291141 - protein, 348 aa, unidentified
MQIAVLGIDLGKNSCSVVGLDATGRIVLRRRMSRDGVIKLALRMPACVMAMEACCGAHHLGRALQSIGHQVRLMSPEYVQPYVKAQKNDERDAEAIAEAATRPTMRFVELKSETQLDIQSLHRARSRLVGDRTALINQLRAVLLERGITVAQGRRRLEQYLALVLDRADSPPLPLSSRVRLLIDDMRAQWRELDRRITAFDAEFVAAARSDETARRLATIPGIGVMNATALVAAVGDARAFARARDLAAWLGLVPRQATTGGRPRLLGITKRGNKYLRTLLIHGARAALPSLSTTEGSLGNWLRGLSARAHRNTVIVALASKLARIAWAVLRSAATFNATIGVQRAAS

SEQ ID NO: 291142 - protein, 324 aa, unidentified
MIDGVLGIDVSKNTIDVSMSGSNKVRARSFANSADGWRHLLAWLISQKIQRVHACLESTGRYSIGIASALYEAGHVVSIVNPAQIRDFARTKLGRNKTDGVDASHIREYCELFKPQPWAPPSEAHRRLGELQTIRAGIIAGLTEWKNRKNSGMIDAVAQSLADVTISHFTSQLGAVDEAIRQTIDNDPVLRRKRDLLMTISGVGETLAGVVLAELPGPNVLRSGAEVVAYAGLNPRLHQSGTSIDRMTRISKIGNAVLRAALYMPAMSAMQHNPAIVALVARLKSRGRLKPKQIVVAAMRKLLVLCFGVLKTGKPFDPAIAMGC

SEQ ID NO: 291143 - protein, 385 aa, unidentified
MAPPARPRVVIGLDVGKSAHWACVVTREGELLASRPIPNRENAIDGLYAQYPGALVVVDQVRNIGSLALSRAKLAGMPRAYLPGLAAHGASRLFAGDAKTDERDAMVIAKTALGIPDALLAVADRPPEVEAARSLAAQRDFLTCENTRSKNRLRSILLESCPEFEAQADLSDPATLKLMAAVGGPWSISEASPQSVGALTRGCRRAKVAALAGSVESSSRPRPAAVACEDRAVRLLARRISENDAEIGSLTSEISALLSADETYRCLLTVPGIGPRTASELVISIDIADFPSHDRLASYCGLAPRNRRSGTSISSVSASRQGNKRLKNLLIFSCNCLARSRNRWGEYYARCRDRGMPHGKALKAVARKRLKVIYAIMRDKVPYAA

SEQ ID NO: 291144 - protein, 395 aa, unidentified
MDFLKYAIGIDVGMEKLVACISLITTQQQVIVKAQCSFNNDKKGFALLYAWAIRNIKFDIPTIFLMEATGIYYEQLAWFLNDKGCIVSVVLPNKAKKYKDALGLKSKNDHIDAKGLAQMACEQKATLWKPFSKDIYMLRLITRQIQNISKQYNIISNQLHALQHAMFRDKTIEKMHTKQLVLLQKNKKDLQKRVELIVNNDEVLKQKFQNICKIKGLGLQNLAVIVAETNGFAAFENIAQLVSYAGYDVIENQSGKRIGKTKISKKGNAHIRKCLYFPAFNSVRLEVRPFKNLYERVYEKSKIKMKAYTAVQKKLLAMVFVLWKNDQPFNPDYQDNVSKDAEPEPSLASASKKPLTAGSNSIEQKEVALAKTKATQDKHPSTHRRMPSLAYLKIT

SEQ ID NO: 291145 - protein, 325 aa, unidentified
MTTGTIELYAHKTFANTAKGFAILLAWVQKQTSADMHVHFVMEATGVYHEQLAYYLDEQDCTISIVLPNKISNYFKTLEVKTITDKTSSEAIARFGLERKLEQWKRPKAIYRKLRQLTRERDQIVQERTIVKNQLHAEQTEALPHKKTIKRIEQRIALLDKQDKEIQAELQEMMTKEDKEMRAMIVILCSIPGVGLLTAATVLAETNGFDLIRNKRQLASYAGFDVKEKESGTSVKSIPKISKRGNKYLRKAMHLPALAAIRHDERFKAVFVRLVSKHGIKMKAAVAVQRKLLELMFTLTSKKEKYDKNHFVNQQQKQECKAIIS

SEQ ID NO: 291146 - protein, 355 aa, unidentified
MNVKKYIGMDVHQETISIAVMAGDGELVMESIVETKASTILQFVQGLHGDLHVTLEEGTWAAWLYDLMKPHVTELVVCDPRKNALLKEGNKSDKIDARKLADLLRGGYLRAVYHGENGLRTLKELARSYLTISQDLTRVMNRVKALYRSWGIACGGQQVYAPRHRSEWLNKIGEAGVRRRAEFFYQQLDAVRGLRQAVRRDLLAESRKHGATKLLRQIPYIGPIRAALLVALIQTPHRFRTKRQLWTYSGLAIETRDSAQYRYVAGQLQRSKKPQQLRGLNENHNHDMKAIFKSAAAMASRREGPFQDFYLALITKGMKPAMARLTLARKIAAITLILWKKGAHFDAEQLKPQAA

SEQ ID NO: 291147 - protein, 370 aa, unidentified
MSVRRILAKTINTDLEYEAIGIDLAKNCVSVALLTTDGEVVCIDRLDYSELEKSAQVLCPTTFAMEPCTEMNYLVQKLEAWGHRCLVIGGKNVQNYVENHYSGQKTDLNDAQALAFLAQDTQLRTIKAKDMEQQKYASLTTLREQYIKQYRQTIVSLKGICQAWGLNISKGISGKARLKDLIENHAAFPEELKESLVDMVTHAQTAQKALNKITKTLELLAKNDKVCQLIQTIPGLGPICSCRLRATIGDIRRFKNPKDFPAYYGLVPRSIATGHNEKKGKITHRGDKTMRSLMVQGAGSVINMATKGKLKSKQLTKWILKKQKEKMPWGKLVCAVAAKLLRIVRAVLISRKAYDPKLAGVAKCSLPKAT

SEQ ID NO: 291148 - protein, 387 aa, unidentified
MPSAISPPKAVLGIDVGKSSHWACLVTREGEVALNRRVRNSEGDLDGLFSQVACDTIVVVDQCRNIGLLAISRARLAGLGVAYLPGLAAHQAARLFAGDAKTDERDALVIAKTALGIPDALLPVPEPDEALEAARSLAAQRSHMVTCATRDKNRLRSILLESCPAFEAPADLGDRHWLNMLEKLGGPWGCIDAGKPAFGAVTKGANRARMDAAWNAAMASTRPSKRRVDAENPQVRMLARRIREALEEADRIDREITALLAGDGTYECLVTIPGIGPRTASELVIGINIEDFPDHDHLASYCGIAPRNRQSGTSISSVSASRQGNRRLKNLLIFSCNSLVRSENRFGEYYRACRGRGMCHGEALKAVARKRLKVIYAIMRDKVPYSA

SEQ ID NO: 291149 - protein, 349 aa, unidentified
MHFIGMDIHKNYSSVAVTNERGDLVGRCRVNHRHREELIGYFNQFPSRTQVVMEATCGWGWLSELLQDLGLEVKLANPSKVKIIAESQIKTDKVDALALAQLLRTNFLPEAYLAPPEQREARDLLRYRIGLVYLRSGVKNKIHALLTRLGIYHTYSDLFGKEGRIFLSSLELSQVHRQALDGYLCLIDTTNELIGKAEVKIRKVVKENEDGKRLLTVPGIGFILAYLVLVEIGDINRFSSHRKLCSYAGLVPSVYQSGEKSYHGHISYKANRYLRWGLIEAAQRAKAIDPFLRKKKERIERKKGASVATVAIAHQLLVAIYHILKEKTVYRSPKLKRRLSGKPVLTLVA

SEQ ID NO: 291150 - protein, 366 aa, unidentified
MQEGTTYVGLDAHQESTNGAIILASGEVVEDRFATTPEGIRRWARRLKRRCEGRILCCYEAGPLGYALQRTLVSLGLECIVIAPSLIPLKPGDRIKTDRRDALKLAELLAAGLLTEVHVPTPEQEAIRDLCRARESVKGDQKRIQHRLSKFLLRRAIRWTHGRKMWTRAHREWLHGRRLEHVADQDILDDHLLALEQNAGRLAALDEKLAHWATEEPYTEPVAWLRCFRGIDTLTALSVVAEIHDWRRFPSPRALMAYLGMVPSESSSGGKTQRGRLTKAGNRRVRRLLIEAAWHYRHRPSVGYRLAKRRVGQPAEIIAIADRAQQRLHSRYVRECTRKAPQPGHRRDRPRTRGLLVGGHAARRGV

SEQ ID NO: 291151 - protein, 355 aa, unidentified
MQKYKVSFKGQNIYVGIDVHLKTWHVTTLTESGCKYSFAQHADAKELFDRLNKKFHEAHFKSAYEAGFCGFSVHYALTELGVENIVVHAADIPTTGKEKALKTDAVDSEKIAWALKRDELTGIYIKDRRYMDDTNLMRLRQRFIMDLSRQKNRTKHLLYTQGVTYPERFRNNRTHWSRNFMKWLREEVELLSEQKLSLMLLCEQVENTRKAILKVTREIRRLSTTDRYKENFNLLMTVPGLGLITSMSMLTELDNDIMRFPNERSFVSMLGLIPTCHDSGDKKVNGEKINRGNKHLGPLIVEACWVAIQRDIELSAYYSNCCLSMKPHKAIIKVARKLACRAYTVLKTKTRYALP

SEQ ID NO: 291152 - protein, 382 aa, unidentified
MREHYATEVDTAVRRQATTLFVSLELSRAKWLVTSSAPGSEKLSKHVILGGDGESLLRLLHRLQASATRHTGTPISVMVIQEAGLDGFWIHRLLVQNRIESHIVEPASIAVNRRHRRAKTDRIDGALLVRTLMAWARGERRVCSMVRPPTPEEEDRRRLTRERAILLKERIQHTNRIRGLLFGQGVTDYDPVRRDRRTRLEQLRTGDGRPLPDHLKAEILREIERLELTLVQLGVVEHERDAVVAETTASESGIAPEALLQLRGLTSQLWLEGLFRHFDNRRQIAAYAGLAPTPWQSGGTDREQGITKAGNPRIRRAMIELAWLWLRHQPGSDLSRWFMARVGDGRGRIRRIAIVALARKLLVALWRYVTQGVVPQGAVFKA

SEQ ID NO: 291153 - protein, 369 aa, unidentified
MPHVTSIGLDVHARSVAAAAFNPFTGEVVHRDFGTDAAEIAEWALGFEEPRACYESGPTGFHMARELRALGLDCAVAAVSKMQRPAADARRKNDRRDAEFIARMLATHNIVEVPLPDAAVEAARDLDRALDDATAEYRRARQRLNMFLIRLGHVWDERNADGTRKGSWTRAHWRWISGIRLEGPQRDVLEYYVTAARCAESDRRQLEKKVLALARTNRWRPAVEALSCIKGIDTLTAFRLAAEAGSFTRFRTAPAFASWCGLVPSERSSGETERRGGITKTGNRLARTALVESAWHYLTCTPRPKAPAPGADVPAAIRARADDCTARLCRRREALAAAGKSSCKANAAVARELACWVWEIGCRAEGTLG

SEQ ID NO: 291154 - protein, 343 aa, unidentified
MGEISMIGLDLAKHVFQVHGVGASGGVVLRRQLRRSAVEKFFAQLPPCTVGMEACGGAHHWARVIGRYGHQVRLMPPAYVKPYVKRNKNDGRDAEAICEAAGRPTMRFVAVKSVEQQAVLAVHATRALLVRQRTMIANSLRAALSELGIVAAQGIKGLRELMAKLETANEEIPEMMRGALLVLARQWQALDADERALERHIVQAARTDREARRLMEVPGVGPIIASTVLAKVPDAKVFRTGRDFAAWVGLTGRDHGTGGKHRPGRISKQGDRMLRALLISGASAYLRHQRRRGVSDPWLRELLARRPYKVVMVALAAKTARILWAMLVKGEPYRDRASASAAA

SEQ ID NO: 291155 - protein, 421 aa, unidentified
MPAERDPTNHVRSFGAFTADLHGIADWLRECQITTVAMESTGVYWIPLFELLEREGFEVILVEPSQIKKFRRKTDVLDCQWIQTLHTFGLLTGSFRPADDIIVLRGYMRQREMLVKHAAQHVQHMQKAMEQMNLKLTEVISDICGVTGLAIIDAILAGERDPQKLARHRNDRCKNDEATIALALQGSWRDEHLFSLKQAVELYRYYHEKIAEVDECIERYLGSMEDKSGGKPLPKLPRSKQRSKRGNDPKFDSRSLLHRLTGADLTTIDGIAEHSALQIVSEIGLDMSAWPTANHFVSWLSLCPELNKSGGKKQKKGKSRTHRSGNRVAQALRVSAQTLIQSKCALGAYVRRIKARDGAPSAITATARKLAIIIYTMLKEGREYRDIGAEAYDARYRERQVNSLRRRAEHLGFDISPSPAA

SEQ ID NO: 291156 - protein, 423 aa, unidentified
MKGSSPSIYDDFELLIGVDWADKKHDICEYDACSQQYKFSVIPHTPDAIQAWLLSLQERYPGKRFAIACELTKGPLINALQACEDVVIYPLNPSMVARYRKAFASSGSKSDPVDAKIQVEILQYHRDKLTPLKTQSDSIRQLNQLVLFRRKLVQDRVSLSNKITGILKQYFPQSLLWFKEKDTVIFCDFLMRWTTLEQAQAARKTTFLAFFSKHNSHYPDVNEARFTQLKAAKPLTRDEAIIKPNSLMISLLVPQLKQLLLAIRTLDEEIKELYIQHDDHIIFDSLPGAGPCYAPRLLAAFGEDRARYQSASDIQKYAGIAPVIEASGQKAWIHWRYHCPKFLRQSLVEWAGQTVRYSYWAKAFYEQQIGKGKSHNVAIRALTFKWIRIVWRCWQDRKVYDESTYLNALRVKGSQLLKYAVDN

SEQ ID NO: 291157 - protein, 359 aa, unidentified
MLVLGDSALSKGADAMTFVGCDLHTRMQQVAVLDTGTGEVSERQLPHDGMAVEEFYAALPRPVTVGIESTGYAVWFHALMQRLGHTVLVGDAAKIRAMVVRKTKTDRRDALHILDLLRHDRFPTVWVPDPATRDLRALLTHRMRLVRIRTMVKNGLHAIALNYRLARGSKLLRQAGLAQLHALALPPHTAQRRDQSLELLAGLSAQIRELDEAITTAALAHPDAPRLITHPGVGALTALATVVVLGPVARFHDSKHVVSYVGLAPALNASADKYHLGHITKQGSPLLRFTLGQAASHAARMDADLKRTYFTLVHRRGRPKAKVAVARKLLVRLFIMLRDQIDYDEFRRRGRLAPASASA

SEQ ID NO: 291158 - protein, 340 aa, unidentified
MKLYSGMDLHSTNTYIAIMDENRRRVIDRRVPNQPKVILGFLEPYGASLEGIVVESTYNWYWLVDLLQGNGYRVHLANPSAIQQYSGLKHTDDRHDAFWLAELLSLGLLREGYIYPKEVRPIRDLLRKRAHLVRLRTSLVLSVQNIVVRNCALKVGAEEIKKLTADVLSPHLQESEGLCLSGKISKELIDAFTRQIKSIEAWIMKRLQVQELFVNLLTLPGVGQILAMTIQLETGSIVRFSQVGNYVSYCRLVGSQRTSNDRVKGKGNDNNGNKYLAWAFSEAAEHARRHYPMCRAFYNRKLRQKNSKVAHGALARKLARAAYYILRDQEVFKEEKMFSY

SEQ ID NO: 291159 - protein, 347 aa, unidentified
MRFYNRQHRHYCGIDLHVKTMYLCILDAAGQVLVHRNVPSTPEAFLETIAPYRDDLVVAAECMFTWYWLADLCAAEGIVFVLGHALAMKAIHGGKAKNDRIDSHKIVSLLRGGLLPQAYVYPAAMRSTRDLLRRRLHLVRKRGQLLAHIQNTRAQYNLAAFERRLAYPANREGVADRFSDPSVRKSIEVDLVLVDTYDGLITDLELTIVREAKRHDADAFHRLRSVPGIGKVLALTILYEIHDIARFDRVQEFASYARLVKCGHQSAGKKLGTGGAKMGNVHLKWAFSEAAVLFLRHAAGGKKLLAGVEKKHGKGKALSILAHKIGRAVFYMLSRGTIFSMEKFLAA

SEQ ID NO: 291160 - protein, 406 aa, unidentified
MRLFIGDDWAEDHHDVEVMDAGGRVLAKKRLPEGAAGMARLHELIGIQLGEDAQDAEVLVGIETARGPWVAALVAAGYVVFPVNPLQASRYRERRGVSGAKSDGADAHMLADMVRTDWHQLRPAAGDSAEAGAIKALARMHKTLIWDRTRQLQRLRHQLREYFPGALEAFDDLAAPDALELLAKAPDPARAARLTRAQVSAALKRARRRNIADKTVAIISALRSAQLGQPPAVTSAYAATVRSLIAVITALEEQVTVLQVQVEAHFGQHPDAEIYLSQPGLGSLLGARVLAEFGDDPHRYASSKARKNYAGTSPITRASGKKKTVMARYIRNDRLIDALMAQAFTALNASPGARAFYDQQRADGAGHNDALRRLANRLVGILHGCLKTRTLYNEAAAWSHRGKLAA

SEQ ID NO: 291161 - protein, 391 aa, unidentified
MSMYFVGIDISKYKHDCCIISAADQQIVSKFTVKNDKDGFEHLLTTLNSLSNPEDIKIGFESTAHYALNLELFLENAHHSFMEVNPVLIKEYKKSTTLRRTKTDSVDCESIARWLMTVEYKPHSKGFYHSYSLKSLTRLRDRLIRQRSFYLVKITNVLDHTFPEFKPFFNERLSKTAIYLLENYGSAEKMAHMNSASYDKLRCASRGKFSIQQFLHLKELAANTVGVNNSIFDIELNSLLTLYNSLCKEIKTLEAEITKLIEEVHPHYMSIPGIGPISAAVIYAEYGDISNFSNPGQMLAFAGIEPGINDSGTESHGGRMVKHGSSQLRYVLLNACLPLIRFDITFATYYAKKRAEGKKHRVAITHVAKKLIRVIYALERQDVDFNIQKLR

SEQ ID NO: 291162 - protein, 427 aa, unidentified
MNEVDAIRVEEFRQFKKEIRGSREYLVVGIDVAKEKHHAFFGTAMGKSLLRRLVFENNLEGFRKLLEQAEAFQVQGDLSKVVYGLEPTGDYHKPLGEHLIRCGKLVVLVSGVALKRNRELLDGRWDKHDVKDAANVADLVAQGKGMFYEYPDAKLRNLRVLLSLKRRLRKQEHGLRVRVRNHLVAQYFPELDRLWGHSDSESLAIVRWCLDPSVIAGLELEDFVRRVCGRDRGTRQRVRLEKIWKVAVDSVGCEVPEAVCVECKLVVEGLRRLREDIGEVLEEIERICLQFPEYPCLLSIPGFGPQISAQVLGAIGDPNRFGNASEVVKMAGLDLSANRSGKNAETARPVISKKGKAHLRYMVYQAALIASIRNRHFMNYYTQKLVGRQQERGIKTKMRVKLAAKLLVVAWTLMKKKEHFDPGHLLD

SEQ ID NO: 291163 - protein, 368 aa, unidentified
MGQKSSKLYVGMDVHKESIDIAVADEGGEVRHHGQIGGDMNALWRAVRKLESQGRELVFVYEAGPCGFGVYRGLIARGHACWVVAPSNTPRRVRDRIKTDRRDSLKLAGLARAGELTPIYVPDVRDEAMRDLVRTREDAVVMQRQARQRLAALLLRNDVRYAGKTAWTAAHRRWIADLKLPQPAQRLAFEEYVQAVEEASARVQRLSQCIEQELATWRWRSVVAALQACRGIQLIHAVRIVAELGDLSRFSHPRQLMAYLGLIPGEDSSGEHRHQGAITKAGNSSARRALVEAAWAYQYGAKVSALIARRQADVPKAALDIAWKAQVRLCARFRRLAARRINRNKIVVAIARELAGFVWAIAQHVKPI

SEQ ID NO: 291164 - protein, 399 aa, unidentified
MARVFIGVDPHKLSATIEVVDDRERVLATGRFGTDKAGYAAMRKRVAAFPERVWAVEGSNGAGRPLAQRLLADGEHVVDVPAKLSARARALDTGHNRKTDPHDAHAVAVVAVRTPTLRVLAYDVQLEALRLLVDRRAELSRSRIQCVNRVHRLLSELVPGQSKRDITTAQAKRILATVKPRDVAGKTRRRLAAEQIAELVVIEKKTKALTKELKEMVLATGSTLMDLPGVGPVVAARTLADTGDVTRFADRNRYASWTGTAPLEASSGEVVRHRLSRAGNRRMNHMIHIAAATHIRLDTEGRAYYRRKIAAGKSRREAMRCLKRRISDALYRQLRADARAAVDAGPGGHSGASLNSSAAGSHPHTGTSDQPLPGPAPTTVPAPSATRKTSISRPLEPAS

SEQ ID NO: 291165 - protein, 345 aa, unidentified
MKHCNVIGIDLAKNIFQVCIINKEGKILFNKTMKREPLKNWLANQTQALVAMESCGSSNYWGRFAKSLGHQVMLIPPRQVKPYRNGQKTDANDAVAIAVASQAANIQPSRLLNIEQQNLQTTERMRDMVNKQKLQISNQLRGLLLEYGIVINKTEREFRARIPAILEDADNDLSAVVRENLYCLWQLYLRLDEDYNGLDRSLRKLAEQDDECQRLMKLESVGPISAVRLKVQLGHGEHFKSGRQASACVGATPKQHSSGGKVKLGAVGKASCDRPLRSCLFLGARAVVSKLKKREPKNAKEAWLKALIERRGVNCSAMALVNKTIRTAYAMLKTGSEYRTPESIV

SEQ ID NO: 291166 - protein, 342 aa, unidentified
MQVTTIGLDIAKNVFQVHGIGAKEKVVLRKRLRRSQVIAFFSALPPCLIGMEACATAHYWARELRKLGHEVRLMPAKDVKAYLKRNKNDAADAEAICEAVRRPTMRFVQIKSAEQQGQLMQHRTRDVLIRQRTQIINALRAHLAELGIVAAQGDAGVKELRAIVADDRDERLPIDARASVIVLAAQLEALQTLIGSIEKRIKMQHRSNETSQRVETIPGIGVLGASAIVATVADPTIFRSGRDFAAWIGLVPRQDSTGGKQKLGPISKRGDRYLRRILIVGAIAVLRRAQENPGKYPWLTQLLARRPFKVVAVALANKMARTAWALMAHGGTYRAPELAEAA

SEQ ID NO: 291167 - protein, 405 aa, unidentified
MEVIYPHCCGLDIHKKTVVACVITPEEKEIRTFSTMTEDILAMVDWIKSKRCTHVAMESTGSYWKPIYNILEIEELNPMVVNANHIKNVPGRKTDVKDAEWIAGLLQHGLLQGSYIPSREQRELRELIGYRWSLIEERAREINRMQKVLEGANIKLASVTTDILGKSSRAMIEAIINGEEDPTILSELAQKRFKNKKEELKKALNGLIGPHQRLILKAQLEHIDFLDEQIALLDEEIKRRMLPFEEELERLDTIPGVGRRTAEHIIAEIGTNMDQFPSAAHLCSWAGVAPGNNESAGKRKSSRTRKGNEKLRSVLVEAARAAAHTKDTYLSAQYHRIAARRGVNRVAVAVAHSILTIVYYLLKRKERYNELGVNYYEERKKEIIVKQSIKKLEALRLKATVENAV

SEQ ID NO: 291168 - protein, 352 aa, unidentified
MDATTVAVDLAKDIFQVALANRAGRVVERKRLTRAQCSRFIDGLDAGTDVIREACGTAHDWGRRCQAGGLRPRLLPVQYVRPYVRRNKTDRTDTEAMLEAARCGDIRPVPVNTIEQQTLQALPRVRTQWQAARTARINVVRGLLREQGLPVPVGARTILARVAAILEDAEVALPDLLRHTVALVVDEIRGLDHRIATIDRQLAKVAAEHPVAPRLQQIPGVGVLTATAMVGAVSHIHAFRRGREFASWLGLTPRESSTGGRRSLGRISKRGDVYLRCLLTHGARAVLLSAQRTSRTAPQRLTRLQAWMVATAARRGHNKTAIAVANTLARIIWVVWHKEVDFQSQPRVTHVA

SEQ ID NO: 291169 - protein, 478 aa, unidentified
MKDHRIEGSRGKLSKKKRRRVAPALLERIQPDAAGIDCGATSHYVAVPRDRAPRPVREFRTFTADLQRLADWLMECGIKTVAMESTGVYWIPIFEILEERGLEVVLVNARDVHNVRGRKSDVLDCEWLQELHSVGLLRPSFRPSAEIVALRAYVRQRGTLIEEAATCIHRMQKALSQMNVQLHHVLSDISGVTGVAIVRDILAGVRDPQALAAHRDRRCQASAQEIAGALTGNYRAEHLFALRQNFAAYEFYQRQIADCDTAIEGQLANLAGTRQPPKTALPAARPRKRLSKNEPRLELRSPLHRITGGIDVSQLDGFAPYGALQIIAEIGTDMSRWPTEKHFTSWITLAPHNKVSGGRLLSSRTQPSANRAAVILRRAAMSLSRSQTALGAYYRRMAYRVGKAKAITATARKLAVLVYRVLRGDITYHDPGAAAYEEQHRTRSLGTLRQRARQFGFALVNIQTGEVLGQPVAQNQVS

SEQ ID NO: 291170 - protein, 343 aa, unidentified
MITIGIDPHKRTLTAAALDPHSRLLSQLRLPASSMAATQLLAWAAAWPERRWAVEGASGLGRPIAQLLVAAGEQVLDVPAKLAARARLLGTSNARKTDLADAASVASAAIHHRRLRSVALEDQTVIFRLLSDRRDDLVAERTRILSRLHVLLADLQPGGAARELSATRAATLLRQAHPITAVDAERKRIAHQLLAEVRRLDRQVKTASQRIRTAVGEHGTTLTQVFGVGPVLAAKLLGHAGEVTRFPTRDHFASYTGTAPVEASSGDVRRHRLNRGGNRQLNTALHIIAVCQIRDPSPGQVYYRRKLAEAKTPEEARRSLKRHLANVVYSHLVTDHRRRTRAC

SEQ ID NO: 291171 - protein, 355 aa, unidentified
MNDSKFIGLDVHKTSISAAVLDHDGKLVMQSIFATHAAAILSFIHGVRGSLRVTFEEGTHSSWLYDLLRPQVSEVLVCNPRKNALLKSGNKSDQIDARKLAELLRAGLVSPVYHGQTSTVTVKELGRTYTALTEDTTRVMSRLKALYRSQAIATEGKKLYTKRRREQWLKELTQAGRRYRAERMFEQLDALQGFRRQARRDLFVECRKHAATAILTSIPFLGPIRAALLIARVQTPFRFRGKRQFWAYCGLALETRSSADYRLVEGELHRAKKPVFIRGLNLNHNHDLENIFKAAATTASACPGPFRDYYETLLGRGMKPEMARLTLARKIAAISLIVWKKGERFDPEQLKAQAA

SEQ ID NO: 291172 - protein, 395 aa, unidentified
MISVGIDVSKGKSTVCILKPGGEVVKPPFEMEHAVEILDSLVSLINSFDEETRVVLEDTGHYHIPVASYLSSHGIFVCCVNALRMKKFCAQSIRRAKTDKIDAVRIASFGITYWSELTKAYDAPDTYGELRFLARQYYQITSILVKAKVNLSNLLDQVMPGISNLLQNQKDNHKLTEFVDRYIHFQTILDMGEKKFTADYCKWAKKKGYRCNERKAAEIFALAQNGIPSLPNSQSVKIAVREAIKMIHSTEESRNTILAQMQEICKTLPEYSVVRDMNCIGDVLAPRIIAEIGDVRRFKNKHSLIAYAGIDAPPYQSGAFNASERKISKRGNSYLRKTGYEIMQSLIKHKPINDPVYDFIQKKRSEGKCGKEAMIAGLNKFLRVYYGKVMELYSE

SEQ ID NO: 291173 - protein, 406 aa, unidentified
MRVVYKHCCGLDVHKKNVTACVLTPKGKEIRTFGTMTDDLIQMADWIKSHRCTHVAMESTGVLWKPVYNILELEELQVLVVNAQHIKAVPGRKTDVKDAEWIANLLRHGLLQGSFIPNREQRELRELVRYRRSLIEERSREVSRIQKVLEGANIKLSSVATDTLGVSGRAMIEAMIQGIDDPKELSELAKRRLKTKKDDLQRALQGLVGPHQKLMLDAQLKHIDFLDEQISKLDEEVKLRMLPFEKDLERLDTIPGVGRRNAEQILAEIGTDVKNQFPSAAHLCSWAGMAPGNHESAGKRKSGRTRKGNKKLRHALVEAARAAARTKNTYLSAQYHRIAARRGANRAAVAVGHTILTIAYYLLTRQQNYVDLGADYYDQRRKDIVIKQSIKRLESLGVKVSIEQPA

SEQ ID NO: 291174 - protein, 438 aa, unidentified
MWRNSQWLLSIFQKGALPVKVVYQTCCGIDVHKSFLVATIIKTTSGVQPSYQKKRFSTFNNSILEFKQWLLDNSCRDVCMESTGKYWVPVFNLLEDEINVTIANPKWVKAVKGNKDDTKDSKWIGDLFRLGLVPGSYIPCKPIRILREFTRYRYKLTSCRSSEKNRFQNALTVCNVALDSVVSDIFGKSATSVIDYLLKQPDNSINHEEISSRLLRSLKKKSESVIESIEGYQMTDAQKYRMRLVHAHMDYITSTISDIDSMIDSLVEPYENAVQLLCTIPGVDRSSAITILSEIGTDMTQFSNSKRLCCWAGLTPGNNESAGKKKSVRITRAGVYLKPALVQVAHAAVKSNKSPYYKAKYERIMKRRGKKRAIIAVARMILTAVYHMLSTGEAWNPTDLYKIDMPEPLKNKQKEKAVKQAMKLLIAEGIIKEPLLAS

SEQ ID NO: 291175 - protein, 353 aa, unidentified
MAIVVALDVHRKQITYKTLDRETGEVERGRIAPAARGEVRAWLARFAGCEAEFALEGTTGWRFVVEEIERAGHRAHLADPAETAAKRGRKRRAKTDSADCDLQLRLLCAGELSESWIPPAHLLELRTRVRMRKTLIDQRTAWQQRLQAQLFHQGVPAGLRPRTRAGREALARAELSPAGRELVSLALRMIEAIDRELAPLDRDLHAFARRQPGCRALIARLYGVGPVSATAILAELGDARRFARSDDAVRHSGLDVTVYQSDQKRAPGHLSHEGPELLRWALFEAALSAARAGSPDHAYYLQVAERIDHNRACLSVARKLCRRAYHILCELGDEALAPVESDPHAEEGIAAAA

SEQ ID NO: 291176 - protein, 337 aa, unidentified
MIHVGVDLHQRFCYVTVMDARGKILQQRAVGNEAGELRRWARSLPGPAQVVMEACSFWPAFQKNLSGEVEKMVLVHPARVKAIADAKLKNDRVDSETLAHLSRCDLLPEAWMADEATRQARQRVRLRVALGQQRARSKNLLQAVLHQEGQRKPVTDLFGKKGRAWLDEVELSTAGRESVNTYGELIAHYDRLIGERQQKLEQAAEQSAEARWLATIPGIGPYLAMVILAEIGDIARFRDKKALANYAGLVPRVRESAGKRHYGGLTYQGSKLLRWAMVQAAQGATRGSPAVRAWYEKRRQRKRPQVARVALARKLLTCVWALLRHGVGFEESVFATR

SEQ ID NO: 291177 - protein, 332 aa, unidentified
MNLVSTLGIDLAKNTFSLHGVNASGEVVLRRSLSRAKLSELVAQLPPCLIGMEACSGAHEWARRFAVSGHTVKLMAAKFVTPYRKSGKNDGNDAEAICEAVGRPNMRFVPVKSLEQQSDLSLHRVRQGFVEERTATLNRLRGLLAEFGHVLPLRAVEVHRGVPQLLGKLPTRVAACARDLLEHAARLQAKTLEYEHEIRSHVRSNALARRTQTRMGIGPITASALVATIGNGRDFKNGRQFAAWLGLVPRQYSTGGKTRLGHITKRGDPYLRTLLVMGARAVLQRAASLTDPLSQWALAVRERRGYHRACIAIAAKNARVAWALLAREPAAA

SEQ ID NO: 291178 - protein, 463 aa, unidentified
MSKKKGRSPVPVAALPVIRSNVAGVDIGSREHWVAGPQSDPSTPNVRVFSTTTDGLNELVDWLVSIGVTSVAMESTSVYWIPLYEILESRRIEAVLVNARHLHNVPGRKTDMRDCQWLQVLHSCGLLRASFRPPEEIARMRAIHRQLGNLVVERTRTVQWMQKSLDQMNVQVHRAVADLTGTTGLSILRAIVGGERDPNKLASLRDHRCSKSEAEIARYLTGTWREEHLFNLTSSLRFYDFVEGEIARYNRQLDEELGRVESPEHRDQPLPTNPDQAKEKTIIREGKADRRDKLFRATGVDLTQIAGIGVEAATTIVDELGTELSAFKTEHHFVSWLRLCPNKAYSAGKPLPKKRKNGAGSNRVAAILRMAATTLARSRTALGAYYRRIAQRKDGSVAVLATARKLACIIYRALHYGQAYVDTGANTYEQAYAARRLKSLEQVARGLGFGLVPIATDAAASPG

SEQ ID NO: 291179 - protein, 481 aa, unidentified
MKPKTQEKNEKITKPRTNHWKKMNRKQRRELTRKIQSQDLSLEVVHPDAAGIDIGNESHYVAVPSTRDSQPVQRFGCTTGELKAMAEWLKQCRIRTVAMQSTGVYWVAVYDILEQAGFEVYLVNARDTKNLPGRKSDVQESQWLMKLHTYGLLRNSFRPSQEIRMMRTYWRQRNDLVQSAGRHIQRIQKALTQMNLQLANVLSDVSGVTGQAIIKSILRGERDPQKLAALRDLRVKASEEQIAESLEGNWQPDLLFVLKQEQDGYEFCQKQIAECDHQLSQYLQQRKDRSQGAPLPEEERKGRRRKKKGNTPQFDLREGLFRMSGTDLTRIDGIDVMTATTVISEAGWDMSKWQTEDHFVSWLRLCPDNRISGDRIIGKGRLPTNNRVTIALKIAANGLRLSNTYLGAQFRRLRTKLGDPIAIKAMAAKLARLVYRMLRYGMKYVDQGALFYQAQHRQLQIKQLKWKAIKLGFRVVQADAA

SEQ ID NO: 291180 - protein, 418 aa, unidentified
MEVVNPRCCGLDVHKKTVVACVVTPEKKETRTFSTMTGNLLKLKEWLAECSVTHVAMESTGVLWKPVYNLLEEDFTVLVVNAFHIKTVPGRKTDVKDAEWIADLLRHGLVRGSFIPDRAQRELRELTRYRRGLIQQRADVVNRIQKVLEGANIKLSSVATDVVGASGRAMLEAMVRGTDDPKVLAALAKGRMRNKTAQLEEALHGLVGPHQRMLLASQLRHLAFLDEEIERLDTEVAERMRPFEETMERMDDIHGMGRRSSEEVLAEIGIDMGRFPTAAHLASWAGLCPGNNESAGKHKTGRTRHGDNWLRSILVQVSWAAARTKNTYLSALYHRLAARRGAKRAIIAVAHAILSIIYSMLRNKTTYQDLGQNYFDQINRKSIVARTVRRLESLGYIVTLEATPPQAPRSMPEPVFSR

SEQ ID NO: 291181 - protein, 391 aa, unidentified
MTKPKTKTVNDFSRCLDPLDMDATVIAVIEMSQSSWLVAGIVPGVERQPLKKLAIDEHALLNLLNRWRAEAEKQGHQITRIAVAFEAGHDGFWLARWLAAQGVEAHVIHASSVAVTREHRRAKTDRLDTELLKRAFLGWLRGERGHCKMVAVPTLAEEDAKRPSRERETLVGEASRIITRVKAAFVRLGIRGFNPKLKAAATRLETLRTPEDEPIPPNTLAALKRDLERHQIVKKQIREIEQTRLDVLKQAPEKGPHAMVLLLARVIGVGVETADMLVQEVLSRTMRDRRAVGRYAGLTGAPDESGAKRREKGLARSGNARVRRGMIQLAWRFLLFQKDSALAQWYRQRTADAPSTRKTLIVALARKLLIALWRLARDGVVPEGVRLRPAA

SEQ ID NO: 291182 - protein, 385 aa, unidentified
MKEQNFVPYEFDIFGGLDVDKKSIAVTFMNHEGVLQSFSVPYRAEHLLSYVSKHFAGQKVAFAYEAGPTGWGLYDRLTAEGHPCVVAAPSMIPKVPGQRVKTNRLDSQRLSEHLRGGQLKSIHVPTEPYRQLRHLTQLRDTFVKDVVAMKLRIKGLLLFEGLEFPPAPAGSQWSYLVRGKLKQLPCSGSVRFKLDRLMESLESSEKQALETIREIRRFCQQDAELSQAIKHLKSISGIGEIVASHLLARTGDPDQITNVRQLGGFIGLAPREHSTGDRIARGGIMRTGDGRLRSKLIQAAWSAIRHDPELREFYRSVSQRHPRDRAARKAIVAVARKLTTRIYAVLKQKRPYVVREKVNSAPLTQEETSPQGTTRRLKEPGEIIS

SEQ ID NO: 291183 - protein, 314 aa, unidentified
MNPHPVHPVRYLGVDIAQDHLDLHGEILGLPTRIPNTQSALKKLLSRLRDQGEVHLICEATGGCERLLVSACHQANIAISVLNPRQVRDFARAKGQLAKTDAIDARILCLFGRTFAPPPSQPLDPSQIKLAALTARRRQLLTLRTAENNRLLRADPLLASSYRSLLRTIDRQIKLIDAALARTVASCPRLHAKVSLLSTVKGLGPTSATALIASLPELGSLSKNQAAALAGLAPFNRDSGRFRGQRTILGGRLHVRSALYMPALVASQHNPVIKAFYLRLLSNGKPPKLALTASMRKLLIHLNSLLKYPPLAHA

SEQ ID NO: 291184 - protein, 347 aa, unidentified
MSEYIGIDLHKAKSFVTRVDQRGRVLEQVELRHATGEMQRYVEKVPGDTRIVVEATGNWMWLYELIEERHPDLVLAHPLKTKAIASARIKTDKIDATTLAHLLRADLVPAAYIPPRAVRDTREILRFRASLVRLRTQVKNKIAAILSKNGLTPPTKTAFGVKSRQFLATVAVRPCYRLALDGYLRQLGHLTDEIDQVAQTIEAQAQADPEAQLLCTMPGIGAYSALLILSEIGDVHRFPDSRHLCSYAGLVPSVHASGGKTRLGRLTKQGSTWLRWILIELSMHAIKGAPQFRQLYQRVARKHGRNAGRTAVARAMLKTIYAMLKHQEAFRPIEQGRTGQRLGAMAG

SEQ ID NO: 291185 - protein, 310 aa, unidentified
MEQIFVGIDVAKDRLDVHLRPAGETFVVMRDAAGVAELVGRLEALAPSLIVMEATGGFEVTVAAALGSAGLPLAVVNPRQIRDFARASGKLAKTDSLDAAAIAHFAEALRPEVRPIPDEQARLLGELVARRRQIVEMMTAERNRRRQLTSKRLIKSIERLLDALQRELSELENELDDTIRGTPAWRDAENLLTSVPGVGGTVARTLLAELPELGRLDRKAIAALVGVAPFNRDSGTLRGRRTVWGGRASVRSTLYMAALVASQHNPTLAAFYQRLVQAGKPKKLALTAVMRKLITILNAMLRDNSPWQSA

SEQ ID NO: 291186 - protein, 371 aa, unidentified
MSRFSTYVGLDVHKKSIVLAFASADSSESAVSLGSVPADYKRLKTKLLQLGLPRTIKICYEAGPTGYGLYHKLRADGFSCDVVSPAKTPRMSSDRVKTDKRDARKLAAFLRSGHLTAIRVPTLEEEGLRDLLRTREAFKKSHTNLKRRLSSLLLRQGRIWPKKSTWTLEHREWIRKQVFEHLGTKLGFRRYLEELVHLDALILELDAEIETVAKTMKSYDLIRALQAFKGIKLLTAAMLVAEIGDFRRFPSAAKLMSFLGLTPSEHSSGERQRRGRITKAGNARLRTLLVEATWAYWRSPHVSKILLKRSTGVSAEIREQSWKAQRRIYKRLHALTASGKSGRVALIAAARELVGFVWAVGQETHLTEATS

SEQ ID NO: 291187 - protein, 341 aa, unidentified
MKKFIRIGVDLAKNYFQIHALASESGPAVTRKLKRSKMVEFFSQIEPCLVGMEACGSAHYWARELKKLGHEVLLMPPDYTKPYVKRGKNDAVDADAICEAMSRPGMRFVPVKSAEQQATLMLHKTRELLVKQRTMSVNALRSHLSEFGIIAAKGIGRVDELLELAESDATLPAATRAAVEVLALHLEGLDKSIDDLEDTIASAHAQSEMSRLLDEVPGIGTLIASVIAASVPDAGVFKSGRDFAAWLGITPRQNSSGGKQTLGAITKQGNRYIRKLLVLGATSLLRVVGKRKGALRDWIVGLLAKKPARLVTVALANKLARIIWAMMKTGESFRTEMFAKA

SEQ ID NO: 291188 - protein, 332 aa, unidentified
MTYIGIDVSKDTFVVAYSPEKTSRTRTFKNTTKGIHEFIQTVSKDKHHCVMEATGNYSALLVYLLSEAGITTSLENPLKVKNFARVMLSTVKTDDVDARLIALYGEKMNPAPYVMRSDAILTLKQKRTVIRQLKKQLIATKNLKGSMEVLPFFDSKCRKSIEQTIAFLEKQIKHLEEDLSDLANSEYKKQMDLLTSIKGIGVTLAAALIMATGGFTYFDNARQLTRYLGLSPTYQQSGTSVNFKGHINRNGDSSLRSQLYVAAFASLRCNTECRACYDRLRSNGKPGKVAVIAVANKLIRQAFAVVTQEKPYVDGYVSTLRLAPAYSETGEG

SEQ ID NO: 291189 - protein, 311 aa, unidentified
MNESLIWCGVDVAKNSLSISLNQQLFEVANSTSGRQRLVERLRGMAAPVQVVCEASGGYEQPLVKRLQKAGFAIAVVEPARIRAFAKAAGIRAKTDPIDAAVIERFGRLIGPLAAPIPTEVESRLRELTRRRAQLRDLLTLESNQLAHLQDSLLRRQAKQLCSKVEKQIVQIEQELKKLVAEHQGLQTKAQTLEEVSGVGFLTAVTLLSEMPELGSIARGQAAALAGVAPYNQQSGNWEGARRIRGGRSAVRRALYMAALVGSRSNPILKAVYQRLRDNGKPPKVALTALMRKLIIHLNALLKNLRLDLAG

SEQ ID NO: 291190 - protein, 401 aa, unidentified
MKVSGLDVHKDTIFCGIYNGKNLSEVKEIPTFTENIREMGYILRKQGVKKIAMESTSTYWIPVWNILEDMGFELMLVNPYLIKQIPGRKSDVKDAQWIATLLHKGLLRGSLVPDKQIRELRSYSRRYVKLQEMITRSFQEMERILEMCNIRITSLVSKNNSLTVKKVIQGIIEGKDSPEELACFIHGRIINSKKEKVRLALEGFITEHHRFNLKLVWQQYRLYEEQLNKVENEMNQICHKHYKDQMKLLQTVPGIKKQAAMQLIAETGNNMDAFENSGKITGWAGLRPKNDESAGKFKSTTITKGNKYLRRILVQCAWAASRTKGSYYKSKFEQLCIRKSRKKALIAIARKLLTVIWNVLKEKHEYNPTLEPVFSSEKIKNKMNYHAKELEKLKTLGYSMS

SEQ ID NO: 291191 - protein, 457 aa, unidentified
MNRKTTKSKIDRTMPMVHPNAAAIDVGATMHMAAVSADRTPEPVRSFGTFTTDLHRLVNWLKECGVETVVMESTSVYWIPIFEILDARGFTVFLVNARDAKHVPGRKTDVSDAQWLQRLHSYGLLRASFRPKGQIAELRAYVRQRERLLEYAASHIQHMQKALTEMNLQLHHVVADITGATGLRIIRAILAGEHDPKELAHLRDYRCHASAETIEKALTGSYRAEHLFALEQALALFDAYHEKVSACDVRIEAVLKELSTGRGRGSGLLPSSRRRTDQTNAMAFDVRAALFALLGKDLTQIDGLGPYLSLKLIAECGDDLSAWPSAKHFTSWLCLAPSNKISGGKVLSSRTRRSGSRAAALLRLAAATVGRTDTALGAFYRRLSARIGKAKAVTATARKIAVLFYNAVRHGMEYVDPGASFYETRYRKRVVDNLHRRAKAFGFVLHPAEPTPSVAVS

SEQ ID NO: 291192 - protein, 412 aa, unidentified
MEQLIERCAGLDVHKKTVAACVRTPGQDGQRQQHTRTFQTTTKGLLALRDWLASQQVRVVGMESTGAYWKAVYYRLETTMDCWLLNARHLRNVPGRKTDVADAAWIAQLVEHGLVRPSFVPPPPIRELRNLTRYRKTVIQERTREAQRLEKLLEDAGIKLSCVASDILGVSGRAMLQALVAGVRDPQLLAELAKGRLRAKLPQLQEALVGRFGPHHGLLVGEMLARIDAADATIERLSAEISRVTTLYTAILELLQTIPGVNRRTAEVILAETGGDMRQFPSAAHLASWAGLCPGNNESAGKHHSGRTRKGSKWLRGALVEAAHAAARTKDTYLAAQYRRLGGRRNDKRAAVAVAHSILVIAYHILDRGQPYAELGGDWLLKRESASAHAKRLVHQLERLGHKVTLEPADAA

SEQ ID NO: 291193 - protein, 319 aa, unidentified
MNTTPVGVDIAKNKFDVAVLLSNQKYKTKKFANTPSGCRDFVNWLSRFDDCHICMEATGCYSTELATLLADSGFRVSLENPARIHAFGNTELTRNKTDKSDAALIARYCALYQPAPWFPAPLNERQLTALVRHLKNLEEMRQMEVNRLEGADDVIVASLNELIATLDALIAETKKKIRQHIDDNPDLKRDSELLKSIPGVGEMLSASLLAFAGNLRRFHSSKALVAYAGLNPRRCESGLWKGKSRLSKVGHAELRSALYMPALTASKHNAVVKVLTERLKEAGKVGKERVCAAMRKLLQLAYGVVKSGRMFDAEIPLAG

SEQ ID NO: 291194 - protein, 440 aa, unidentified
MGDLRVLERPERFYLGLDVGRRQHTVCAIARSTFEAGDARWQAAPTLKVDVNRTGYQRIATLLARLTDDPTRHVVAGLEPTGGYYARTAYAFLHGLGLDVQWMKNNAVHDARDAIYGKKTKTDPVDARLIARLLFLREAVGHEYALSTGFDQVGAYATLRLLVNNRWKIRQAQARAGNQLTQVLDVVFPEIADCFAEPASSSAVLALLRQYPTPAAIAAAGRDEIYRIVVFESHAPRKAAAVPKLVDAARNTIGISDGVADLVAAQAFLIGQLQRLGDELSMLDSRIADVLKLTPEAEILLSFPVVKQTRAATILAAMGVPVTSFPNAKALRRHLGWAVEQEHSGSSIRRERLAVSGNRHSRRELRLWALGLVNPRSPWTPFRAHYQRLTGPPSPKRPNVALGHLAGKLTSVIYACTSRNEPYDQEKLAKTMGIEIPAAA

SEQ ID NO: 291195 - protein, 366 aa, unidentified
MTKKLLKQVVGIDIAHKEIDVYLGNMDQEAATHLYAYKTFKNNEKGFAALILWVKKHTQADMPLRFVMEATGVYHESLAYYLSNKAYTVSIVMPNKITNFFKTLEGKTVTDKSMSAAITQFGLEKKMTNWIPPQKAYKELRQITRERDQLIQERSMNKNQLHAEETEAYPNEKTLKRIKARLVMLNKQIKEIMTEITEINNNNSEVAAATKLITTVPGVGLLTAVTVLAETDGFSLIHNKRQLTSFAGLDVKEKESGTSVKGKPHISKRGNKHLRKAMHLPALAAIRHTERYKATFTTITGKTGIKMKGTVAVQRKLLEMTYTIYSTKKPFDIEYLQKETKRKQELKDALKIENSPLGLLSMQADI

SEQ ID NO: 291196 - protein, 341 aa, unidentified
MQITTIGLDIAKNMFQIHGIDAAEEVIVRKQLRRGQVMAFFEALAPCLVGMEACATSHHWARELTKLGHEVRLMPAKDVKAYVKRNKNDAADAEAICEAVRRPTMRFVRIKSAEQQGQLMLHRARDLLMRQRTQVINALRAHLAEFGITAAQGREGIRELLAIVAQEEGSRLPSDAHASLTVLATQLQAVQTMIGSLEKRIVAQHRSNEASKRLETIPGIGVIGATTIAAVVPDPRVFRSGRDFAAWIGIVPRQDSTGGKQKLGPISKQGDQYLRRILIVGAHAVLRRARQQPETYPWLTQLLARRPFKVVAVALANKMARIAWALLAKGGTYRPPQLVAA

SEQ ID NO: 291197 - protein, 442 aa, unidentified
MAMRKREDSPEVFPNAAGIDIGGSSHWVAVPKGAAEEPVREFGTMTDDLHEMADWLLACGVDTVALESTGVFWIPVYEVLEQRGLTVWLVDARQMKYVPGRKSDVMDCQWLQKLMSLGLLRAAWRPGDEVCVVRAVARQREVLLTEQAGWVQRMQKALVQMNLQLTEVLTDVMGVTGQAIVRAIVAGERNPKVLASHRHGRVRASAAEIERALTGNWRDEHVFVLGQALAMFDSLGERILECDAKIEALLKPLGVHEVELSGPGKRGGKNTPHFDARTALARWAGVDLTRINGLSVTTVMTILSEIGPDLSRFANVKHFCSWLGLCPGTKISGGKVLSARTRRSTNRVRQALKLAAMSLSRNDSALGAFYRRLCARMDKPRANTAVAHKLARMVYFMLTRGEAFVDEGQQRYEEQQRQRNIAALRRRASALGFEITPAGQVA

SEQ ID NO: 291198 - protein, 336 aa, unidentified
MYSGIDLHSSNSVVAVIDDADRVVAQKRLPNDLAKVVGFLSYWKDELAGVVVESTYNWYWLIDGLQDAGFHVHLANTVAIKQYDGLKHSGDETDAQHLAHLLRLGILPTGTILPREHRAVRDLARKRMQLVRSCTTHVLAVENIMARQLGGRMTCNQIKRLTVDAVDKLPLAADVGLAIKANVAVIAALQVQIELLEKRLQERVKPRPEYGLLTSVPGIGQALATVIFLETGPIDRFAGVGNYASYARCVDSVHTSNRKKKGEGNVKNGNKYLAWAYVEAANFARRFCAEARRFHERKKAKTNNVVATKALAHKLARACYHILKEGKPFDATRCFA

SEQ ID NO: 291199 - protein, 376 aa, unidentified
MERIAYIGIDVHKDTNASCLFFRDQKGNPSFYEIGTIPAGVENMIKAIRKAVKNLDIEDYELLAGYEAGPTGYGLCKGLQKKGVNCIIMAPTTIKKSPGDKTKTDRKDAKMLSIALATDAYKKVHLIDEEDECTREFTRARTALKGHLKKSKQQLLSFLLRVGITYPDTGNYWTKKFFAWIGTLHFADPKLNYAFNTYLTQVKDLTDKIRIMDAQIEAIAKEDRYKDKVDKLVCFGGIETHTALSIVCEIGDFNRFNTAKDFSSYLGLVPGQDSSGKQTKYTGITKTGNSRVRFLLVEATKGIRRASPFSKSWRIKKRQLEKSPEIVAYADKGTKRIKAKMNSLVHSRGKNANVATAAGARELACFVWGMMTDNIG

SEQ ID NO: 291200 - protein, 392 aa, unidentified
MVCVGIDVAKDKHDCFILSSEGEVLAEVFTIANNLDGFQALMQRIRSCARPADNIKVGLEATGHYSYNILGFLLEKGLATFLINPLHTNLYRKSLSLRQTKTDRIDARTIASMLMSDVDLKSYTDTAYHNEELKSLTRYRFEKVQERGKLKTSVSRLVNILFPELETLVPTLHMASVYAVLDEFPGAKQIATAHLTHFKTILSDASKGRYDRDKAIEIREAARHSIGAAMPAKSLELQHTIRLIRELDKEINETESAIKAIVDEMAPPILTIPGISYRMGAMILAEIGDFSRFDSPDKLLAYAGLSPSTYESGKLKANGAYAHMEKRGSRYLRYALFNAAKFVCIWEPSFAAYLAKKRAEGKHYNVAISHAAKKLVRLIFALQKSGKAFLPA

SEQ ID NO: 291201 - protein, 358 aa, unidentified
MKEYISFDSHKHYTLVEQENRETGRARQCRVNHGPDAIRSFLEKFCEPGTPVAVEATGNWYWIIDEIEQAGLYPLLVHPRKAKLMMGMINKTDKLDVHGLNRLQRNKVLPTVWIPPGDLRDLRELTRTRMVLVRQRTRLKNRITSTLAKYNLQLRDVSDTYGRRARPALVRSIEQLPPQTRAVTELLLAQMDSTNEQVNQLEKWIRELVRETPAMMRLKTLPGIGDILAATIALEIGDIGRFASAERLASYSGTTPRVHSSGGKTRYGRLRPDVNRYLKWAFVEAGNSTALNHRRLPDRHISRLYLRIRQRRGHAKAIGAVARHLAEASFHVLSKKEAYRDPSLPKRSSQGSVSANLS

SEQ ID NO: 291202 - protein, 401 aa, unidentified
MEGPIISIDVSNGCSHFRCFIDRNKAFGKVHKIKHDVDGFQYLLDCMERLNEKTNEEVCVVYEATGVYTKPLTRFLNKHKVRHYMVNPLQAAKMRKTDLHSKKTDKNDPNSIAKVYYDKDLYEYADEEPIYHTLRVMNRNYEDQLDHLRKYKVTFQNILSIVFPGYGSLFKNPYCDIALAILKKYPHPDMIRNKKPETVANYIEKHTCHHKDSCLKWAVKVIEYANKTYPGCDKDEIEVIELLRIIKELEVCIASCDTQLNEMVQLAEQLPNYFLILSIDGIGPNLACRILAEIGDIKRFGNTKQLISYAGIDPHISQSGDVDGLHLSISKKGNKRLRCLLYLAVTCNLRLKKENDPIQQFYKKKKQQSVPLKPKAARVACTNKLLRIIYGMCNNGCSYQK

SEQ ID NO: 291203 - protein, 458 aa, unidentified
MSRNKSTDRVRRTMAVVHPNAAAIDVGATMHMAAVNADRTPEPVRSFGTFTTDLHRLVDWFAECGVDTVVMESTSVYWIPIFELLDARGFAVFLVNARDAKHVPGRKTDVSDAQWLQRLHSFGLLRASFRPKGQIAELRAYLRQRERLLEYGASHIQHMQKALTEMNVQLHHVVTDITGATGLRIIRAILGGERNPAVLARMRDRRCHATVETIEKALAGNYHAEHLFALEQALALYDTYQQKASACDARIEAVLKELSARRGREAGPLPSPRQNRSRQQNSLLFDVRTALFALLGKDLTQINGLGPYLALKLIAECGDDLSAWPSAKHFTSWLCLAPSNKISGGKVLSSRTRRSGSRAAALLRLAAVTVGRTDTALGAFYRRLSARIGKAKAVTATARKIAVLFYNAVRHGMDYVDPGASSYEIRYRARVIDNLHRRAKAFGFMLQPMAPTPEMAVS

SEQ ID NO: 291204 - protein, 346 aa, unidentified
MEQIIRIGMDTSKHIFQLHGVNAVEEPVLRKKLPRKAMVKFLEKLPASVIAIEACGGSHHWARLLQSFGHRVKLIPPQYVKPYVKRGKNDAADAEALCEAMSRPTMRFVPVKTAEQQGALMLVGVRDRLVRNRTQLTNAIRGYAAEFGLTAAKGMCRIAPLLERIAVDEALPAMARELFALHAKEYGQLQAQLGEIEAKLMAWHRADACSRRLAQIPGIGPIGAAMLVMKTPAPETFRSARHFAAWLGLTPKDHSTAGKVRLGVITRAGDEALRSVLVVGATAVLWHVRSKRGSGSPWLVELLKRKPPKLAAVALANKNARIAWKLMVSGENYRAKTTPSVLMRAA

SEQ ID NO: 291205 - protein, 320 aa, unidentified
MPASCGVGIDVAKDTLDVAWSTESEARWRTTNDEAGWVALIDRLRALQPTVIVLEATGGYETGVASALSVAGLPVAVVNPRHVRDLAKALGRLEKTDALDAGILSEFAVRIAPVPRPLADDALADLQALVTRRRQLVDMLTAERNRVPLARGAVRKNLRAHIAWLENQVRHTDRDLRRRIEASPIWRVRDRLLQSVPGIGPTTAASLLAGLPELGTLSHREISKLVGVAPLPDDSGTRVGYRRIQGGRADVRRALYMATVTATLHNPTIAVAYHRWRAAGKLPKVALIAAMHKLLIHLNAMLKDQTTWQPTPGPPSTTPS

SEQ ID NO: 291206 - protein, 456 aa, unidentified
MKQRRRKSAPQSKSDHSSFPLINKDAAGIDIGSEEHWVAVPEDRDGEAVRSFGCYTADLHAMARWLKACGVTTVAMESTGVYWIPCYQILEEHGFEVKLVNARHVKNVPGRKTDVLDCRWLQRLHTYGLLSGSFRPDDQICVLRSYWRHRANLVRYASDHIQHMQKALTQMNLHLHKVLSNLTGVTGMNIIRAILAGERDGRKLALMRERGVKNSPEVIAKALEGDYRQEHLFALKQAVELYDFYHRQIEACDREIERYLHTFETKGDVVENPLPKQKRPKQMRYQSFVDLRTELYRVSGVDFTQMPGLDVVSVQTILSEIGLDPGRFPTEKRFVSWLGLCPNNRITGGKVKSTKTRKTMNRAANAFRMAAQALANSNTGLGGFYRRIRARLGSPKAITATAHKLARIFYRMWTTRQSYTDAGSDYYENRYKERVLRNITKRARELGYNAVLQPIE

SEQ ID NO: 291207 - protein, 386 aa, unidentified
MHDGTNLPVPERTGIPGDCATLFVSLELSRSTWVATSLAPGSKKMSKHTLVGDDGRKLLDLLARLKTRAEQRIAAPVKVVAIHEVGLDGFWIHRLLEANGVESHVVDPASIAVPRRHRRAKTDAIDGETLLRTLMAWQRGEPRVCAMTVPPSPSEEDCRRVSRERATLLRERIQHTNRIRGLLFGQGITNYNPLHKNRRECLEELRTGDGRSLPTHVKAEILREIDRLELVLRQISEVEAERDEMLRLSKASSPAALLMQLKGIGAEFATVLYLEGLFRHFENRRQLAAYAGLAPSPWKSGSIDHEQGISKAGNPRLRTTMVELAWMWVRYQPASALSCWFRQRVGSERGRTRRISIVALARKLLIALSRYVTHGEIPAGAVVKAV

SEQ ID NO: 291208 - protein, 323 aa, unidentified
MQGKVSPERSAATGVYVGIDVCKGWLDVYLHPIGQGFRVANDRIGLKRLKRELALHEVALVAVEATGKFHRLVQRHLHAAGLAVAVTNPLRSRLFCEAIGQLAKTDAIDARLLAIMAESLNPRATPPPPEIVEELQEIVRARAAAVEDRTALLNQKAAARVGLLKSELARRIAAIERCLVRLEKAIQAIIARDAMLARRFEILLSIPGIGPIAAVGMLAGLAEMGARSGKEIAMLSGLAPVACDSGETNGQRRIRGGRSHVRTAISFAALSASRYNPDLARVYRRLIAAGKKPKVALIAVMRKLVVLANTLVRQDRLWQPNPA

SEQ ID NO: 291209 - protein, 407 aa, unidentified
MEKIEKRYIGLDVHKDYLIALGVDENLEVVMPARRVELSNLESWMKKNLTKQDEVVLEMTTNTWQLYDELVAYAGSVTVVHPPHVALITRSQVMNDKIAASILARLLAKGLLVGIWVPPQEVRELRGLVAQRQKMTRLSTQAKNRLHAVIQRHHLKPPEGNPFAKTNNGWWESLSLGRLEKMNLQSDLETLQFAEKQEVRLQEEMTGIAAEDEEIGRLLHIAGFGVITAVTVYAAIGDIGRFVEPKKLVGYAGLGARVHDSGLTTRTGKITKAGRRDLRVSLVEAAHVAANNHPHWKAELARLEPRLGYNKAIVAIARKLLITVWHVLARKVADRFAEPEKVSKKMLHFAYEVGKENRAGKSAAQFTRERMDTLGMGQDLTSIPWGSKKPIPLPPSKLKKESAVPNK

SEQ ID NO: 291210 - protein, 358 aa, unidentified
MKYVGIDVHKKMCQAAVLGEDRSLLDELRFPNDPEGIEEFAGKLTTLRDEVKAVVESTGNLWIPIHDRLEEHGFDVALSNPSKTRLIAEAKVKTDKVDARTLAGLLRADMLPTCYVPGEELRSRRELLRHRLNLVKNRTEVKNRIHGLLDKHGLRMPGTTPFSKDNIAWLRGLSLGFMDDAILRSDLAVLEAVDGQVTLIEEKIAALAAEDRRVRLLMTMTGVGYFTAMLVVSEVGDVGRFRGDKEFASWMGLVPSVHQSGERTRIGGVSGPGNKRLRWALVESAQAAVRYDPRLGGMYERVSRRRGSGCAMVAVAHEMVRIMYFMLVREEPYRGEDRGLTERKLKGMGKKAFNGLRN

SEQ ID NO: 291211 - protein, 422 aa, unidentified
MFAESTDDEQTIARVAALDIGKAELVCCVRVPAAGGGKRRQQEVTTHSTMTRSLANLANHLVDLRIERVVMEATSDYWKPVFYLLEAHGLGPWLVNAKDVKHLPGRPKTDVLDAVWLCKVAERQMLRPSFVPPRPIRKLRDLTRYRVDLIEVRTAEKKRVEKLLEDACIKLSVVASDIFGVSGREMMATLIAGERDPAVLAEMARTAMRRKIPALREAFTGHFDDHHAFLLAQMLGRIDGLDADIARIEEEIETMIAPFAQAVERLDEIPGIGTTSAAIIVAEVGLDMSRFPTPGHLCSWAKVSPGIKSSAGKTKGSGSTGHGNRYLARVLGETAVVIGRSDTFLGERYRRIARRRGKKKAIVAVSRSILVIVWHLLADPDARYIDLGSGFFARRVNTDSKKRNHIRELEALGYRVTLEPAA

SEQ ID NO: 291212 - protein, 413 aa, unidentified
MRNLLEVCCGIDVHKEILVACMLKGGIEEEPEPIIKEFSTLLSGLDEFKSWLIEHKCHDVAMESTGVYWFPIYNVLESIFYEDGHMNIIVANPHHMKNVPGKKTDIKDSHWIATLLRAGLLAPSYIPPKEIRELRDWTRYRDVLIKELVGHKNRIEKHLQQCGFKLSTILSDIFGMSGYELIRKLCEKGKLTALEVEGCLHGTLRAKSGEVQQAVAGRLSAHDRLFLTNLVQVMEHCRKEIEEAECHITVYAQQYEPTLQLLETIPALQRRASTIIVSELGIDFSMFPTAGHLCKWAGLCPGDNESAKKKKTMRITKGNPRIKSVMVQCAWAATRCKNFFLRDWFYRLRARRGTKKALIAVARKLLAMVWYILTTGENYEETRYEQTKKNQEDRRKQRLKTEAAKLGFKLVPA

SEQ ID NO: 291213 - protein, 312 aa, unidentified
MNSYTIGADISKDHIDLHRLPDGARSRITNNKSGFKAFVTWLGTNPVERIVFEPTGPYHKAFETALSGHMLAFSKVNPRRVRRFAELVGKRAKTDRADAEVLARFGQMLEPRIQQPNDETMNELKALHVARNGLVKDRTAARNRSKMQTIDLLKHQNTQRLKHIEAQIKAVDAAILQRIQASVPLKARFDILVSIPGISTISASALLIEMPELGTLDEKAAASLAGLAPITRQSGKWNGKSFIGGGRAMLRQALYMPALVATRFNPDMERKYQLMIKAGKPKKLAITAIMRKLVVLANLLIRKQRKWTPKSA

SEQ ID NO: 291214 - protein, 459 aa, unidentified
MTRKKKMELDIINPNAAGIDVGSRSHYAAVGQSLEDVKEFGVYAEDLTALCLWLLSYGITTVAMESTGDYWQNLYAELMKHGIDVILCNGKFTKHPKGKKTDVKDCRHIQKLHALGLLTSSFLPDETTEKLRTYCRQRSNLLSSAAGASRKMQKYLKFLNFRLDVVVKDVCGLTGMAIIEDICKGNLDPESLSKHRHYNCRKSKEEIAKALHGNNREDFLFGLKQEYQAYRFFQKQIDACDKQIDKFIKEELRKSPEKSKLKTTDKPYKRQNKNAISIKNFNQVAYQYFGGVDLMAIEGLSHATVLSIMSEIGPDGFIKFDTSKQFVSWARLAPNNKISGGKVLSSKIPKGSNRLKIALRQAANAIGNLKDTHLSDFFKRVAFRKGRQAAVSATARKLGVIIWTMVTKQVPYNPPEQYLFLDQRRKMGIAKRIKKQMAKFDIKPEEIGIGNSLIPNYNF

SEQ ID NO: 291215 - protein, 430 aa, unidentified
MGDKNSIDVMGSCKAPSARHVRAYEAWARRKAATVDSLNQREDTMSKSTIAALIQRTASAQVLMLAFELGEEGWQLGFSTGFGQPVRRRKIASRDTKALLEAVSWAREKLHCREEARVVSCYEAGRDGFWLHRFLVAHGIENLVIDSSSIEVNRRKKRAKTDRLDVVKLVGLLARFLAGEADAFSIVSVPSVAEEDLRQVGRELKLLKKDRTRIGHRMKGLLANQGQVLDLKRDLGEQLERMRLWSGEPLPPQLRERLEHYAEDFAYHTKRIRRLEQKRRDLMRARESVAVGKAWRLFSLRGLGIESSWMYGTEFFGWRQFANGKQVGSLAGLTPMPYDSGTTTREQGIGKDGSRWIRGVAIEPAWAWLRFQPESALSRWYQARFGHGSKRLRKIGIVALARKLLIALWHWVEHGVVPEGAVLKTNLRLA

SEQ ID NO: 291216 - protein, 388 aa, unidentified
MIYVGIDIAKLNHFASAISSDGEELIKPFKFTNDNDGFQLLISKLAPLDKDSLIIGLVSTAHYGDNLVRYLVAKNYKVCVLNPIKTSTMRKNNIRKTKTDKVDTYIICKTLMMQESLRFVTFYDLDLMDLKALGRFRQKTIKQRTRLKIQLTSYVDEIFPELQYFFKSGLHQKSVYALLKEAPTPEAIASMHMTHLAHLLKVNSHGRFDKEMAQQLRVLAQKSVGASDSSLSIQVTHTIQQIELLDSQLERVEAEMTEIMKFNDSVIMTIPGIGYINGGMILGEIGDIRRFSSPNKLLAYAGLDPSVYQSGNFQAKKTRMSKRGSKVLSYTLVNAAHNVVKNNATFKAYYDAKMAEGRTHYNALGHCAGKLVRIIWKMMTDNLEFNLD

SEQ ID NO: 291217 - protein, 363 aa, unidentified
MKIMTGIDLHSNNALCGLMDESGRRLVHKKLPCELPAILQLLEPYKDRIVTVAIESTYNWYWLADGLQDHGYPVVLANPARMKPYDGLKHTDDVSDAYFLTELLRLGILPTGHLYDRKHRPVRDLLRRRLLLVRQRTSLILSFKSLNERTLGQRVPLARVKTLSAEEARARFTEPADRLLSGQQIELMGQLQQAITKIEEHVLGVAGEWSSYQRLQELPGIGKILGLTIALETGDAKRFAGAGNFASYCRCVKSLRQSNGKKKGENNRKCGNRYLAWAFVEAAHFACRYDERCRRFYDRKAKQTNPIIATKALACKLAKAAWHVMQADVPFDADRVFGPGGKNDFGETGREPANGSGHTSHRD

SEQ ID NO: 291218 - protein, 368 aa, unidentified
MSTVPFVQVILRGCGIDVHKGVVVATISGEGLKTETRSYKTFSSSLTELKEWLLSNGITHVTMESTGVYWKPVYKVLGCPVMKVWIVNARHIKYVPGHKTDKKDSTWICKLLLTDLLKPSYIPEREQRELRDLTRYRNKLIQHVASEKNRIVRILEDCNIKLSCVMSHLDGVVATKLIDMLIEKGHVTMDEIACVYHKRLEASPELLYQACEGFIEPHHTYMLQTIRKDMAQTEAIIADLTYRIKVVLSSYKNVIELLQRVPGLSRKTVEGLIAEIGVDMEAFPTEKHPASWVGMCPGNNESAGKKKRKNHAWQQTVESRPYGSCLGGNSYQEYLLQRTLSPVGSPQGQEKSFDSSRTLDPEIGMAYT

SEQ ID NO: 291219 - protein, 342 aa, unidentified
MLRNPSLPTSAGFLGIDVSKASLDVMLLRDQRREGQHFTNTPTGFEKLDHWVNRRLKGETVHVCLEATGCYSEAVAENLIARGYTVSVVNPFRIKKFGESQLQRNKTDKLDAALIADYCRRMQPHPWVPPTPEVRGLQELVRHLEDLLLARQQAANRLEAARAASSVATHLQTQITLLDAQIAETKRDITAYLDDVPELKQQKTLLRSIPGIGILTIARLIAACRDLRAFTDAGQLVAFAGLNPRQKQSGTSVIGPTMISRMGSASLRAALYMPAISALRHNPVIRAFAARLRERGLRGKAVVVAAMRKLLHLVVGVLKSGRSFDPGFVASLQPSGDTGCAG

SEQ ID NO: 291220 - protein, 365 aa, unidentified
MNECTHIGLDVHKDTIAVAVLRPVTGEIDERVVPNTPEAVRRLLGRHDPGSTRVCYEAGPSGYDTHRLIDSLGFACDVIAPSLIPRRSGSRVKTDRIDARNLARLHRAGELTSVRVPSAAEEAVRDLIRVREEVKRDRRVARQRIRSFLLRYGKRYPNGPDRWSQRFEVWARSVTFAEELATEAFRNLLGAYFVRDAQLAEMGRRIEELALTEPFAEDVARLSALRGIGTLSAMTILAETCDFARFGDAGSYMGFTGLTPSEHSSGASRHQGSITKTGNRHVRRVLVESAWAYRHAPAVRGKLRERLEGQSPEVAAYSWKAQVRLNGTFRRISARKGAHTAVVATARELSGFVWGLMTDNLGPAR

SEQ ID NO: 291221 - protein, 403 aa, unidentified
MWTLGIDIAKFKHNATLLDEDGNKVFANFSFTNDQAGLTQLLDKITAAGQAPDQVVVGMEATGHYWILLFEHLVKEGFEVKLINPLVTRARRNITIRGSKTDALDSLLIARLLRDEALKVSAVPDAEISRLRTLTRLRYECAQEATALKLRLIALLDVVFPEYQEHFTDIFGAASREILSQFPTATELAQVDVRRLTKLMNHASHGRKGRRDAQMLQQAAQNSFARDCTNRNLALEIRIIVERLNLTLEHIKELEREMQNYFVDLQNLLKSIPGIAEVWAPTILAEALPVFDPNRRDGGTAFVAIAGIDPRLRKSGKYAGKAKMSKRGSKYLRTAVIQAAGVAANISHDPLFKSIYDKHISKGKSHLEALSHVANQMLHVIFSVLKNKKPYVPIINHNVINIC

SEQ ID NO: 291222 - protein, 410 aa, unidentified
MKVAGIDVHKKVLMVVVVDASAPEEKLARRRFVTLPSELQRFRIWLQEQGVEEAVMESTAQYWRSVWLELEPHMRLHLAQAFSNRAPRGRKHDFKDAERLVRRLIADELILSFVPNGEQRIWRSLTRMKVQLTRDRVRLQNQMECLLEEMRIKLSIVVSNLLGASGLRILQALAEGETDPKKLAQLGDERLQCTEEQLIDALTGRVQPMHRGMLALQLQRLQLIDQQMAQMNHMIAQAMKSHQDAVIRLAEVPGLGVDSAQQIIAEVGAQAGTFPSAAELAAWVGTCPGKDESAEQNQSSRSPKGNKYLRRVLNQAAHAAVTKKGCYFQALFRRLLPRLGYKSAIWAVAHRLCRLVWKILHEGVRFVEQGHEVGPREKKQRAQMLARALRKLGYEVTITPINQLAAKPAI

SEQ ID NO: 291223 - protein, 413 aa, unidentified
MERLLERCAALDVHQASVSACVRVPGEGDQRREFNERFGTTTPDLLALCDWLRGHGVTHVAMEGTGVYWKPVYYALEGEFELLLVNAAHVKQVPGRKTDTKDAAWLCQLLECGLLRASFVPPKPIRELRDLTRYRKTLIADRASEANRLHKVLKDAGVKLSSVASNVLGVSGPLMLEALCQGANDPVELAELARGRLRSKLPALRRALEAHFRDHHAFLVAQILAHLDYLDEAIAACSARIEEQIAPFASALTLLETVPGVGRRNAEVIVAEIGTDMSVFPSSRHLASWAKLAPGNNESAGKRKSGSTGKGSPWLRSALVESALAATRTRGYLRAKYWRIRQRRGHQRAVIAVAHAILEISYQMLTTGELYRELGDDFFERRDNERATRRHLHALERLGYRVTLDAVPGAEAA

SEQ ID NO: 291224 - protein, 404 aa, unidentified
MESPIVSIDVSNGNSHYMCFIKNNKRFGKVKKIDKIDHDIEGFKRLLEDIQKLEAETNEKVCAVFEATGVYTKPLERFLSKNSIKTYIINPLESARKRKEEIHNKKTDKLDPISISKVYYDKEEMMELKKKDETHNWLRKKNRLYEDQLNHLRKYKVTFQNQLSICFPGYLDLFKDGYSDIPMTILKKYPHPDLLKNKKAETVARYLEKNTCHNHKVSLEYALKIIEFAKKTYPGCEKDDVEVEIFKILLDKVIETQRECEKTLNEMITVASTLEEYRYISSIDGIGPNLAARIIAEIGDIEEFKSREALVAYAGLDPHIYQSGDQDGKHLKISKKGNKYLRCLLFLAVGCSIRGAKDNPVNRFYQKKKQQSNPLNSKAAKTACTAKLLKIIYGICKNKTTYER

SEQ ID NO: 291225 - protein, 310 aa, unidentified
MQNKCGVDISKQWLDSFIAPDHFERFENTIEGVAKLAEFVRQHKADLVVMEASGGLERVPFYLLWQEAIPCAIVNPRGVRDFAKAMGYLEKTDKIDAKVIAHFADVKAIQPTPAPSQNQQRLSDLTARMRQVVSDLIVQKQRLHTTHNHQARDGLLAMIALLKRESKSLSETIAGLIDADPLWAELNTTLRSVKGVADRTVAILMADLPELGTLSNKAIAKLAGLAPLADDSGKRQGKRRIRGGRATIRTIMFLVADIAAKFDETLQAFKQRLIQKGKPKMVIRIALAHKLLTRLNAKARETRKAYTNLA

SEQ ID NO: 291226 - protein, 425 aa, unidentified
MTRPQLTPPAGVLVAIDVAKARNEVLIEVPGSSRRRRVSVLNTRGEYDRLIALLSELGQPVTCGFEATGNYHRPIAWRLLQAGFAVRLISSVGLARTREALHNGWDKNDPKDAQVMLHMIRIGASQVYHDPLAAGINDVQELSKTHDAVSRAKTEVLHRILTHYLPLYFPEVDRFRHNSRSDWFFAFLDRFPTPASITALSKEAFIDAAWDVVGRKVAKAQLLGDIYETARSSIGLPVPPDAPAVSMFRLVIGEVRGLIRQRDAIEAAAETLLSESADYKLLRCIPGIGPINALTILAEAGDLRRFSHHRQFLKFCGLDLATQQSGTFRGQTKLSKYGNARLRRTLWLAGQVAIRQRENGFRDKFERYIARDRHDADLRRKALTAITAKMARVVHAVIKTGADYRPFVEGPVPGGRTPLSRAVRA

SEQ ID NO: 291227 - protein, 315 aa, unidentified
MYIGIDVSKKNLDVGGGIFKGVERFKNDDKGIKKLLKRFDKSKPLLVVMEATGGYERLVSKALQAESIKLAVMNPWQTHNFAKSLGKRAKTDKIDAKMLAQYGEVINPTPTVVLNDREHEMKQLVLRRVQLVRQRTQEKNRLEQASPIIAKSIQRMIKHLSAEIGEIADKIERLVVADSEMSAKAAALQSAKGVGLISAYSLCTLLPEIGNLNRRQIAALVGVAPFNRDSGEKSGQRSIVGGRSEIRSVLYMATLAASRSNPKIKSYYKKLLKRGKKKKVALVACMRKLLVCLNAMLKSNQCWKERGDFANLTEP

SEQ ID NO: 291228 - protein, 411 aa, unidentified
MRLFVGDDWAEDHHDVEVMDEAGRVLAKRRLPEGVAGIAQLHELVGRYLPEDAEDAEVAVGIETDRGPWVAALIAAGYTVYPVNPLQASRYRERHGVSGAKSDTGDAHMLADMVRTDSHQLRPAAGDSPEAAAVKVVARTHKTLIWERTRAVQRLRHQLREYFPAALEAFEDLDAPDTLELLGKTPDPARAAKLTRAQIAAALKRARRRGIAEKTDAILAALRGEHLGLPAPLTAAYAATARSLIAVITTLNEQVKILEEQVREHFGRHPDAEIYQSQPGLAAILGARVLGEFGDDPGRYADAKSRKNYGGTSPITRASGKKKVVIARFIHNDRLIDALMAWAFSALNASPGARAYYDQLRTKGIEHNDALRRVANRLVGILHGCLKTRTLYDEATAWGHRENLGQSRVAA

SEQ ID NO: 291229 - protein, 358 aa, unidentified
MSKHAVRGGGVSRLLERFSQLREKAQARTGKVFPLIVIQEAGLDGFWIDRVLQNEGIESHVVDPASIATSRRRRRAKTDKIDGETLVRSLLAYKRGEPRVCSMVKAPTPEEEDQRRLCRERKVLTAERVLHVNRIKGLLFCQGICGYEPLRRDRRDRLEELQTGDGRPLPPHLKAQVERELDRLELLLKQIKTVEGERDELLAVAITSMPAPAAMLLDIKGIGPEFAAVLWSEGLFRHFDNRRQVAAYAGLAPTPWQSGAIDREQGVSKAGNPRLRTTLIQLAWLWLRNQPRSALTIWFHERVLRNRGPPTQDNGRGAGAKAAGRVLEICDRRCRHRRRHDEGPLTNMANRIPSSSRT

SEQ ID NO: 291230 - protein, 347 aa, unidentified
MAHFVGLDVSVKETAVCVVDEVGEVVLEQKVPTEPDDIITLLTSIGEAYGRVGIEAGPLSQWLVNALAAAGLPVVCVETRHMQALLKGQQINKSDRNDARGIAQMMRVGLFKPVHVKTLVAQEQRMLLTSRKLLQRKLLDIECDMRGTLRNFGLKVGTVSTRGYEARIRELVEGFPKLAAIVEPLLTVRRVMRQQFAVLHKMLLDTVRHDPICRRLMTAPGVGVVVALTYRATIDQPQRFVHSRAVGAHVGLTPKRYQSGEIDYDGRVSKCGDTMLRTMLYEAAQSLLTHSRKWSWLKAWGMRVAQRRGMRRAIVAVARRLAVILHRMWVDGTEFRWSNGPAVAKTA

SEQ ID NO: 291231 - protein, 414 aa, unidentified
MDRVNPRCAGLDVHKDSVWACARVDGGKPLVEKFGTTSRELLRLGDWLAGHGVTVVAMESTGVFWKPVWNLLEDRFALMLVNARHVKQVPGRKTDVTDCDWICQPDWLCQLLEHGLLKASFVPDRPRRELRDLTRQRTQLLGDRARVVNRVQKTLEDANVKLASVATDITGKSGRAILDALAEGKLPPEQMAELVHKRMEAKKPALREALAGKVTDHHRFMLKQLLEQVDHLDRMVGSFDARIEEVMSPLGREAVRRLDQVPGFDVRTGQNVLAEIGTDMSRFPSPHHLASWAGICPGNDKSAGKRRSGRTRKANRWLKAALTQAAWGASRTRRSYYSAQHRRIAARRGAKRATVAVAHALLVTAYCLLSDPRPYADLGAGYFDQPQSPQRQAERMVRKLQRLGYSVELKRPAA

SEQ ID NO: 291232 - protein, 450 aa, unidentified
MIRGVQCTGPLKNQGGLKMKYKQNEKILQLTEETLIIGIDIAKHKHVARAQDFRGIQFGKPLTFENSHAGFTSLMNWVHLIQSKQEKTAIIFGMEPTGHYWLPLAYWLKHKNIKVVVVNPAHVKKSKELDDNSPSKNDVKDARVISRLIEEGRYSEPNLPEGIYSDLREGMNLYDQLMTDLQAVQGRIHQWLDRYFPEYINVFGSWEGKASLQVLRMGLFPDELLERTEEEILLEIRKEVKRGVGIKKILQLFEVARNSIGIKEGRSLARLKLHTLLAQYDLIKAEQKKVWNEVEEILTQIPGVEEMVSIKGVAKITVAAFFAEVGDLQKYESPEQIIKLAGLNLKLATSGKWKGKTIITKRGRPKLRTLLFKVVLPLIAQNPAFKALHQYFITRNENPLKKKQSIIALCCKLIRILFTVGKKRVAFSPEKMLKDIPHFQGLEQSIKKVA

SEQ ID NO: 291233 - protein, 350 aa, unidentified
MPKAPLQHVATLGIDIGKNSFHLIGLDARGAIVLHQKLSRGQVEQRLANMPTCLIGMEACVGAHHLSRQLLALGHDVKLIPAQFVKPFRKSHKNDFRDAEAIAEAVQRPTMRFVSTKSVEQLDLQALHRVRARLVSQRTAVLNQIRTFLLERGIAVRQGLRSLRQALPDILSQRTDVLTPRMVRLIEGLVQDWHHLDERIDTVTGEIEDLVAADEACQRLMSVPGVGPIIASAMVAAIGNGAAFSRGRDFGAWLGLVPKQTSTGDRTILGRLSKRGNTYLRSLLVQAARVLLLWPAKWRQHSFGSWLTAASTRLHHNVLAAALANKLARIAWSVLSQNRVYEPRTAAAVG

SEQ ID NO: 291234 - protein, 313 aa, unidentified
MTAALAAGVDVGRDYFDVAFAPSGRAFRVSNAPSGIAVIVDRLRRAGVRKVVMESIGHYGARLVRALAEAGFDVGVVDPRRIKALRLAEGKRAKTDRLDAELIARFALTMQDAARPVPSAQAFQIRGLSTRRRQLVEMAAMEKTRLKQVIDPLQADSCRVIIAALTAERARIEAELGAMLMGDPVNSRRDALLKTIPGVGPSISATLLSDLPELGHVDRRAIASLAGLAPHPNESGIRSGNAHIQGGRPCVRAALYIAALTAARSDKGFKAEYQAMRAAGKPAKVALIAIARKLVVAANGMLKADRPWQANQP

SEQ ID NO: 291235 - protein, 344 aa, unidentified
MLIIGCDFHSGFQQLAIFDNLTGEIQEKKLLHPGEAMEFYRGLAGPVLVGMESGAPCQWFRRLLAECGHELWIGDATKIRAAEPRKQKTDRRDAELILKLMRQERFPRIWVPSEEERDVRQLLMDRHHRMRSRTQVKNQLQALALNQGLQKGKKLWSEAGREQLRELPMMEHAGRRRDRLLRAVCELDAQIGELDVLVRRQAEGREDARRLMTHPGVGPQTALAMVLTLGEVSRFENAGKVASYLGLIPGEYSSGNKQRLGHISKQGSSLMRFLLVEAGQTAVRGDEQLRRAYARLAAKKSRAVAKVMVARRLAVRLYWMLRNEWTYAELARHAGEPGSFRGAK

SEQ ID NO: 291236 - protein, 386 aa, unidentified
MEKYVGLDVSMEETSVCVLDGGGNIVFEGKTSSQPDALSKLLRAKASDAARIVLETGSLASWLWHELRGRNFPVICLDARHARAALSMRVNKTDRNDARGLAELARMGWYREANVKSTESRYTHSLLAARAKLVDLRRDVENQMRGLLKGLGLPPGKAGIKALLGKIVVIMREAPHPRTLFNPMMLAHSALVTQVEFYDVQILKLAKCDETTRRLMTVPGVGPATALAFRSTIDDPNRFKSSSDVGAYLGLTPRRYQSGELDRTGRISKRGDRLTRLYLFEAASVLLSVVKRWSVLKAWGVRLASASSRPRPLSPASSLSFCIASGSTVPSSNGARRKHDSLTSDQSSSATAKNTSSLPGRRRWRSRSSSPRIFENRVLHIETSRH

SEQ ID NO: 291237 - protein, 465 aa, unidentified
MKNNRRRPNHPRRSPAVLDRLNLNVAGIDCGSAEHYVAVPADRSPSPVQSFKTFTSDLIRLADWVVACGVTSVAMEATGVYWIPIYDLLEARGVEVLLVNARHLKHVPGRKSDVSDCEWLRDLHSVGLLRGSFRPAEGIVALRTYLRHRHSVVESAASYIQRMQKALVQMNLQLPLVVSDITGVTGLKILRDIVAGHHDPAQLARHRDYRCRATPAEITAALTGSYRPEHLFVLQQNLELFDACQRQLAACDGAIDAHLQRLTATQEVPTTPLPAPRVHRRPIDNDPTFEIRTPLHRLTGGIDLTQIDGIGPYTALKLIGEIGTDMARWASAKHFTSWLTLAPNNKISGGRLLSARTEPSANRAAAILRMAAMTLGRGSTALGAFYRRLAGRIGKPQAITATARKLAVLVYRALKGELVYRDPGADAYDRQQRSRVLRRLRRTATTLGFDLVNRDTGEILHAASL

SEQ ID NO: 291238 - protein, 348 aa, unidentified
MLIIGCDYHPGFQQIAFVDTETGECGERRLTHREEAEQFYGMLRERSVRVGMEASGHARWFERLLSDLQFELWIGDASEIRTKRVRKQKTDRQDAQLLLRLMIEDRFPRIWVADAENRDLRQLLWHRHRLVQMRTRVMNQLHVVALNEGLRRKKALWRPAGRNELESLILAPWASRRRQDLLDLLDQLSPKIQELTRALEDEVEKRRVTRRLMTHPGVGPLTALAFELVIGSPERFHCGKQIASYVGLVPSEESSGDRRRLGHISKQGNSLLRYLLVEAAQVTVRSQQHWRSKFFHLAMRRGRKIAKVAMARKLAVHLYWMWRQGWDYGQFEKLGSHAGEPGNRQGVQ

SEQ ID NO: 291239 - protein, 371 aa, unidentified
MQSRITMSQEIKKRTSQKLEDEYLKYSIGIDLSKDKFDACISLMNKGQHVKVIATRAFSNNPNGFKVFYEWYLHKCKLVLPAVFTMEATGIYYEKLAWFLHRNNQYVSVVLPNKAKKYMQSVGIKSKNDKIDSIGLARMGAEQKLLKWETPKEIVMELRDITRYRESLQESKTRFNNQLLAYKCGEFVDESIVKGLEEIIALIDKQIEETEKMITEKIDSDEEIKARVKNIIEIKGISIISIATILAETNCFEMFTNQRQLVSYAGYDIVENQSGKHIGRTRISKKGNAHIRRILHMPSLNVVANGESVFVNLYERVYERTKIKMKGYVAVQRELLCLIYTLWKKNEKYQRHYKNEHPEMQSRSSSFRMAS

SEQ ID NO: 291240 - protein, 400 aa, unidentified
MDVFCGIDWAEDHHDIALADRDGKLLARRRISDDAAGLALLLGLLTEHGDSADDPVPVAIETPRGLLTACLRATGRKVYPINPMAVARYRDRHSAAGRKSDHGDAVVLANILRTDRHVHRPLPADTELAQAIAVLARAQQDAVWARTGAHNKLRSHLREYYPAFLAAFADARGGITRPEARAILAVAPAPAAGAALTLTQLRALLRKAGRRRSIDAEAARLRETLRAPQMRQLPLVEDAMGRQALALLRQLDAACAAADDLEQAVIESFNQHPDAGIITSFPGLGPLTGARVLAETGDDRSRFADAKGLKAYAGAAPITRASGKTTAVLHRRVKNQRLAATGYIWAFAALTASPGARAHYDRRRNDGDRHAAAQRNLFGRLLGCLHHCLRGSPQTVDTLI

SEQ ID NO: 291241 - protein, 369 aa, unidentified
MKKGSTLHVGLDVHKDSITVAYASSDGGDPLHLGAIGTRHCDIDALVRKLQSKSPQLVFVYEAGPCGYWLYRSLTRKGLACVVVAPSLIPRKPGDRVKTDKRDALTLARLARSGDLTPVYVPEVADEAIRDLARAREDALGDLNAARRRLKALLLRNDIRYTGRANWGDAHRRWLARFVFPTPAQQIVFQESVRTITERTELLQRLDAALLEQAKTWRMSPVVDALQALRGVQFTVAVITIAELGDLTRFDRPPELMKYLGLTPSEYTSATRRRLGGITKAGNGHARRALVEAAKAYRHRAKVSEQIQARQQHLSQAICDIAWRAQVRLCGRYRKMLARGKHPNTIAAAVARELIGFMWAIAKEQPLAA

SEQ ID NO: 291242 - protein, 350 aa, unidentified
MKVAKPERSVGLDLGDRFSHYCVLNQEGEVTEEGRIQSSESVLRKHFAKEAVMRIAMEAGTHSPWVSRLLKRLGHQVLVANPRKIRAISGSESKNDRNDAEQLARFAAFDPKLLSPIEHRSEQRQQDLNLIHARSTLVRARTMIVNVVRGLVKSAGGRLPSCSTESFAERTRAAIPAVLSEVSMPLLKQIGLLTAQIDLMDKQINKLDRKYPEISLLKSTPGVGPLVAACYVLTLDSPEVLGDNRQAGAFLGLRPGQSQSGGSDPQRRITKTGNNYLRSLLVQSAQYILGRFGPDTALRRWGLKLAASGGKRGKKRAIVAVARKLAVILHSMWRSRIPFQAFPPQATVVA

SEQ ID NO: 291243 - protein, 324 aa, unidentified
MTQTVCGVDISSQSFDARIGREGAYAQFPNTAAGIASLACFCHAHQVELVAMEATGGYEQRALALLSEQGLPVAILNPRAVRQFAQSMGQLEKTDRLDAGMIAFFAQTKKSQPVVLCSARQQQLRALVTRLRQLTEVRTAQKNQSRLVTDPAVQGFFKRLLDVVNEQIEELETSIAAMIAEDPLWHQLDQAFRSIKGVADRTVARLMAEMPEIGSLPNKTVSKLAGVAPLAKDSGKYQGQRAVRGGRASVREILFIVASVVGRYEPDFMAFQQRLTAAGKPRKVIRIALAHKLLVRLNAKAREVRQRQSAARSPLAGALEMKNA

SEQ ID NO: 291244 - protein, 374 aa, unidentified
MKEFSKYVGMDVQKETIAVAVAEARGGEVRYLGEIANSSEAIQKLVKQLRKGDAELSFCYEAGPCGYGIHRQLTELGWDCQVVAPSLIPKKAGDRVKTDRRDSLSLARLHRAGELTAVWVPDDAQEALRDLTRAREDMKHLQRQAKQRLLAFLLRHGKSYDGKSNWTQAHHRWLEGVKFSQPVQQIVFQEYVDTVKMLSQRVAALDQQMADAAGKSVLWPVIEALMALRGVSLLTATTIVAEIGDLKRFASAPQLMAYLGLVPSEHSSGGSKSRGGITKTGNGHVRRVLVEAAWTYRHPARKTACLQRRAERTPEAVQDIAWKAQKRLCARYRSMEGRGKLKVQACTAVARELAGFIWAIGQALPQPATQAKGQ

SEQ ID NO: 291245 - protein, 441 aa, unidentified
MAMRKRDDDLVFPNAAGVDVGGSSHWVAVPRHTCDEPVREFGAMTDDLNAMADWLLACGVDTVALESTGVYWIPVFEVLTQRGLRVWLVDARQMKYVPGRKSDVQDCQWLQRLMSQGYLRAAFRPDDEVCVVRAVTRQRDVLVADQASWVQRMQKALVQMNIQLTEVLSDVMGTTGQAIIRAIVAGERDPKVLARHRNGRVKASEQDIAKALTGNWRDEHLFVLRQALAMYDDIGRHLGECDAKLQGLLTQLGQSKVDLGRAPRAGSKTRAEFDTRQILANWAGVDLTRINGLGLAVVMKILSELGPDLSRFANVKHFCSWLGLCPGTKISGGRVLSAKTKRSANRVRQALKMAAMSLSHSDSALGAFYRRMSGRMDKPRANTATAHKLARMVYFMLTRGEAFVDHGQQRYEEQQRQRSIAALKRRAAALGFAVTPTPTPA

SEQ ID NO: 291246 - protein, 459 aa, unidentified
MPQEGCYISAMEGRAKRRQAQRLKSAHMNTPEQQPGGWLEQRGFGGLDWASQKHSVVVVDAQGKVLEDFEIEHSALGWKKFRERLQPYGSIPFAIETSQGAAVEQLLEAGMQVYPLNPKSAQSYRQRKAPSGVKDDRLDAWSFSDALRVDGHGWKPLRPEDPLVKELRLLCRDEVALIEQRTAFINQLRHALAEYYPTLEAFEDWGSLSAWMFVQRFPTPQALKEAGKRKWENFLHSRHLWRAESAPRRLELFARATEFCGSAPMTNAKSQLALSLVSILFALEKQLGIYRQRIEELFKRHPDHDLFGSLPGAGPKIGPRLLSEIGDDRARFGNEPEALQCLAGTAPVTRRTGKARTNPPRWPCHQRWACDKHLRHAMHLFAEQTLSRCAWAEIYYRHHRQKGRSHADALRRLGQRWIKIIYRMWTDRKPYDAMLHNQNQLRHGSWVLRFNSPKETYRW

SEQ ID NO: 291247 - protein, 391 aa, unidentified
MISVGIDVAKDKHDCFIINAEGEVLADVFTIPNSMDGFHRLLQRIRDCASPQDKIKVGLEATGHYSYNILGFLLDNGLPTYVLNPLHTNLYRKSLSLRKTKTDRVDARTIAAMLLSDVSLKPYTDTAYHNEELKSLTRYRFDKVKERGRLKQSIARLVCILFPELEKLVPTLHMVSVYALLEKFPGAKQIAGANLTRLKTLLHDASRGRYGRDMAVDIREAARKSIGSVMPAKSLELCHTIRLIRELDAEIDEIESAIQTIMNDLHSPITTIPGVGTRMGAMILAEVGDFSRFSSPDKLLAYAGLSPSTYQSGQLKNCYAHMEKRGSRYLRFAIFNAAKYVCHWNPVFAAYLAKKRAEGKHYNVAVSHAAKKLVRLIFALEKSGKPYHLTA

SEQ ID NO: 291248 - protein, 402 aa, unidentified
MNAVGIDVSKGKSMIAIMRPFGEIVSTPFEIKHTASDIRSLVELINSVEGESRIVMEHTGRYYEVLAHQLSEANLFVSAINPKLIKDFDNDSLRKVKSDKADSVKIARYALDKWQNLKQYNVMDELRNQLKTMNRQFGFYMKHKTAMKNNLIGILDQTYPGVNTYFDSPARSDGSQKWVDFASTYWHVDCVRKMSLNAFIDHYQNWCKRKKYNFSQSKAEEIYGKAKELVPVLPKDAITKLIIKQAVDQLNSASTTVESLRTLMNETASKLPEYPVVMAMKGGGTSLGPQLMAEIGDVSRFTHKSAITAFAGVDPGVNESGTYEQKSVPTSKRGSSDLRKTLFQVMDVLIKTHPQDDPVYQFLDKKRAQGKPYYVYMTAGANKFLRIYYGRVKEYLSSLPES

SEQ ID NO: 291249 - protein, 419 aa, unidentified
MYNTRTKNPSEYQVIIAIDWADQKHDLRILKDCEEECKVISSDLLTLKNFFDTLILETVNGSIAIVIESCQSALMNLLISFTEFDIYVVHPTTASKFAKTFHLSGAKSDRADTKSLLELYLKHPDKVQKVDSSFSKGKLKRLNIKRRDLVDDRTRLTNQLIALLKIYYPNALKVVGNHLYADMFLDFLDKYPSPQDVINAHQIGITKFFNKRSTNHSKTKERVQILRSSVIVVNDEGELDYYIFEIQQFCHRIRSLNKVIKAYDEKIEQAYRSNEDYEMFQSFPGAGPSIGPRLMAFFGDDRDKFKSVNEVLKISEIAPVTIQSGKMNIVRRRFLCDRFTQLSFVEFANNSIRSSIWAHEFYYHKKALNIPHFTILRALAYKWIRIMYRCWKTRTPYNEKTYLEVLERRRPAWFQKFVN

SEQ ID NO: 291250 - protein, 338 aa, unidentified
MKNASSINVFRDCLSVGVDVSKAELAIVGLTPDEHYLKRIGNQMKTIKAFLRQLQHSGYRGKIICESAGHYHLKLALVCHELGLELIVLNPLQSSKHSKARIRKTKTDPQDALTLATMALTEPKLPQPTQLTRAKALIRLKMGQLASVEKQLQQFNQSRAQYEETYAELGLPLSPQQLALREHSTSLKRLRKQLEKELEGLLAQALADDDRLAELRQIPGYSNVVAGLVASLDRQVKRADSWTAFVGLDVSVRQSGKWTGHGKLTKRGNAYMRKRLFQAAWGACLNYDYVRAYYDQLKAQGRKHVEAVCMIARKLLRIAYHVVTNKIQFDPNIAFAEH

SEQ ID NO: 291251 - protein, 343 aa, unidentified
MTLVGCDLHTRKQQVAALDTKTGEMCERELVHDGSVVEEFYAALPRPVTVGIESTGYAIWFHALMHRLGHTVLVGDAAKIRAMVVRKTKTDRRDARHLLDLLRHDRFPTVWVPDPATRDLRALLTHRRRLVRIRTMLKNGLHAIALNERLVCGSKLLRHAGVVQLQALPLPPYTAQRRDHSLELLEHLHTQIQQLDGAIATAALAHPDAPRLLTHPGVGPLTALATVVVLGPVTRFADAKHVVSYVGLAPSLNASADKYRLGHITKQGSSLLRWVLGQAAPHAARLDADLNRTYGTLRRRRGRAKARVAVTRKLLVRLFIMLRDQIDYAEFRRRGRPPVSVAG

SEQ ID NO: 291252 - protein, 288 aa, unidentified
MRIIGCDLHARQQAVAMLDTETGELVNLTLTHEGNNVREFYSQLPRPVRVGIEATGSMQWFVNLMEELGIECLVGHPAEIRAAEPRRQKYDRRDADLLLKVLVENRFPAIWLPSKELQDLRSLLRHRHQWVRMRTRIQNALQSIALANGLRRGTSLWSHDGQNTIASLPLAQHTAYRRSELQALYAKFEAEIEKLNQRVEEQASERPGARLLMTHPGVGPVTALATEVFLGDPARFADSKALASYVGMIPREYSSGGRRQRLGGLTKQGNPLLRFLWGEAGAHAGIRS

SEQ ID NO: 291253 - protein, 345 aa, unidentified
MSCYAALDVSQEMTAICIVDETGRIRAEKKVVTCPEAIAAYLNQKAPDLVRVGLETGPLAVWLWNELAARQLPILCIDARHANAALKMRPVKTDRNDAAGLAQIMRTGWFKEVRIKSRDSYQVRSLLVAREMLVRIRVKIENEIRGLLRTFGVLFGKRVGGFTGRADEIIAGELDASPEMRLIAEALMKARASILNQIKVLDRRLMSVARANPTARLFMTVPGVGVITALSVASSFDDASRFSRSSSAGAYLGLTPRRYESGETSRNGRISKQGSVMTRKHLYEAATTLLTRNLRFSTLKAWGLKLAKASGFKKARIAVARKMAVILHAMWKTNTPFRWSQEEAA

SEQ ID NO: 291254 - protein, 361 aa, unidentified
MTNTSREQQLTAGLDLGDKYSYLCVLDTDSGELLEDGRLRTTPEDLRRRFDFEKKLRIAIEVGTHSPWVSRLLEACGHEVVVANPRKTRLIYGDKRKTDELDAQKLARLARADPELLYPIEHRGEDSQAHLALIHSRDALVRSRTQLINHVRGMVKSFGARLPKCSAESFHKKVADALPSELAEALGGVVETITSLTERIRDYERRIERVCKESYPQETGLLRQVPGVGAITSLTFVLTLEDPDRFEKSRAVGAYLGLVPGKDQSGESDPGRPISGEGDKMLRRLLVSSAHYILGPFAPDCDLRRHGEKIAERGGKNAKKRAVVAVARKLSVLLHRLWITGEAYEPLRNARLSRALGEEVA

SEQ ID NO: 291255 - protein, 386 aa, unidentified
MRPTLFCNGGSVAYASSFNPRMAFGQSVAQPEPRTPCAPNSNRCQSDGYHRQLEYVRMSPNTIITMQTVPVTVYAGVDVAKATLQLHLQGRQAEFANQPAGLAQLCQQLKTIPHVHVVCEATGGYERLLVQAMHQAQILVSVTNPAQVRAAAQAQGKRAKTDRIDAALLTDYGQRYQPKPTPPTTSSQDQLVALTQWLTQLVQAQALAKTQAEHHEAAFVRARHTKLMAHFKSQIAAVEKQIRALLAQDAQLQQRVDCLDEIKSVGPRTAWLVLAHMPELGQLNRQEVAALAGLAPWTRESGTMKGMRCIGGGRPEVRLALYMAALCAARCNPVLQPFYQRLRAKDKPAKVALTAVMRRLLVYMNHQLKALHATQAATKTQHVEIS

SEQ ID NO: 291256 - protein, 448 aa, unidentified
MSKPQVIDDEEHERVYEKVAAIDVAKKDGMVCVRGPHLSRPGQRQSMVWTVTATTNEVRALAGQLTGLGVQKVTLESTSDYWRIWFYVLEAAGLDVQLVSATQARQISGRPKTDKLDAQWLARLTEKGLLRPSFVPPAEIRVLRSYTRARTNLTGDRTRCVQRLEKLLEDALIKVSSVASKLTTVSARDMIEALIGGERDPVVLAGLARTRMRAKHDALVEALTGMFADHHGEIARMLTDQIGFCDARIARLTLLISEQLAVLCDGWGVDTDGATGPGAGTSDDAPVLSAAARLDQVPGISAELAASIIAETGLDMTRFPTAGHLVSWAGLCPRAHQSGSRTRDGKKHGNSYLRGYLGQAAIAAARTPTFLGERYGRIARRRGNAKAQVAVARSILVIIWHLLNDPQARFADLGPGWHDNKINNNRVARGHIRQLQALGYTVTITPAA

SEQ ID NO: 291257 - protein, 409 aa, unidentified
MNTGTITAVGIDVSKHKSTVAARRPGGEVVLLPFDVEHTAEGLKKLITKLRELDGEIRIVMEHTGMYWRPIAMTLKEAGFYVSVVNAILIHNFSDNSIRKVKTDRADAMKIANYGLTFWIDLQEYAGEDENRQLLKIQSRLYERTATTAGMLRNGLISLLDQTFPGANKLFRDDSRNSKGHVKWIDFVLRFWHKECVAALSLAAFTDTFQKWCKRTGYKFSASDAERIHAIARNAVATLPKNDSTKLLITQATNSLNAIYDSLQAIRTEMDRLASMLPEYELVMGMEGIGKVTGPQLMAEVGDVRRFSHKGALVAYAGVDASPYQSGSFDSKSRHVSKRGSPHLRRVLFVIMSMTLIRANTANPVFCFMDKKRAEGKHFYVYTVAGSAKFLRIYYAKVKEYLNALEDTA

SEQ ID NO: 291258 - protein, 329 aa, unidentified
MKVPYIIGADLSKKTIDFVSHSFQTHIQLSNSSKGFKGLLNWMTKQKLNTSDVVIVMEHTGLYSCMFEEFLHRSSIAFAKVSGLAIKRSMGLVRGKNDKIDAQRIAQYGFEKQKMLRLEPAPSETLKELKLLYSTRAKLVSQRAGLKVTIQEYRNVLELKKSDLALSSQLRIIKTLDLEITRLEHAIKAIVETDEKINNNYRLQQSIKGVGEVLALAMIIKTGNFTRFANSRKFASFCGTAPFEHRSGTSIRGKTKVSHLADKSMKTLLELSARSAIQYDKELREYYLKRIAAGKPKMSTINIVRNKILHRIFAVINRQTPYQPILIQP

SEQ ID NO: 291259 - protein, 345 aa, unidentified
MKKVMAGIDLHSNNVVIGIMDTDGKRVTSAKLPCELKEIARFLAPFKKRLEQVAVESTYNWYWLVDGLQALKYPVVLANPAAMQQYSGIKHADDTNDAFFLAELVRLKILPTGHIYDAQLRPVRDLLRRRMTLVHQRTALMLSFKSLYTRTTGQEMTLSQLKELEIKEAQDLYAHPANQMIAGMQIKHIEQLTESIDKIEKVVMASARELPAYGKLTTLPGIGIILGMTITMEVGDIKRFASPGDFASYCRTVQAQRTSNSKKKGENNSKCGNRYLAWAFVEAANFARRFDEQCRKWYDRKAAKTSKVLATKALACKLAKAAWFLMSEGTEYDAQRMFGQPVTTK

SEQ ID NO: 291260 - protein, 446 aa, unidentified
MPLKPDTLPTVPPAQALLVGVDPHRATHTVCIMNQDGHELCARFRVPNNRRGVQLLARRLNDLAQADGYTQVRLAIEATNWYWLGLCYTLPKVCALPVESRAINPRLSANFKKVLMNDEHTDSADAFAIAERLRMGRDLPPPFSPDALYLPLRLLTRYRFHLVQRLISEKAYAANLIYLKASDYTAPDTQPFSDVFGATSRAVLTEFASFEQILDMSLDDLAAWLAQRGKRRFTDPMATARKLHAVAQASFVLPAPFQRSLQIALDLSLQHIAALQAQLKRLDVAITQQLAALNIPNTLTTIPGIGPVLAAGLIAEIGDVHRFNCDDDKVAKLAGFKWRRHQSADFVAEDTPITQHCNRYLRYYFCEAAQLVRIHEPEYAAFYQKKYTEASRHHHKRALVLTARKLVRLVVHLLATRQAYRPPEVDSHSRATSRRQAANPTEQLNR

SEQ ID NO: 291261 - protein, 413 aa, unidentified
MQTLVEHGCGLDVHQATVVACLLRIGKDGRVQKQLRTFATTTRELMQLRAWLLSEGCTHVAMESTGVYWKPVYAVLEGSELEIVVANAQQVKKVPGRKTDVKDAEWIADLLCHGLLRSSFVPPVLIRELRDLTRYRRKLVESRSAERNRLLKLLESANIKLASVATDVFGLSGRLMLDALIAGQASLSEMAELAKGKLRSKIPQLELALEGKLQEHHRFLLQLQQNRLAAVETELKVLEQRIQQKLEPYATQLLLLQEIPGVDHTLAAVIIAELGVDMNVFQTVSQLASWAGVCPGNNESAGKRKNSRIPKGNVYLKTALVEAANAAARAKGTYLRDKFYRLKARRGYKRAAVAIAHKILVSIYHMLSQNVSYNDLGDLYLDKLNTHHVTRNLVRRLERLGYSVTLVPKQAAA

SEQ ID NO: 291262 - protein, 320 aa, unidentified
MMAQNDLVVVGIDVAKDKVDACIRALALRQACPSTSHGHRKLVAWLRKHQVNKAVMEASGGYERAWARVVREAGIEVRIVDPKRVRNFALSAGRLAKNDAIDAEMIAWFAETFSDAPGQKHDAAREELQTLVKARLSLIDFRMRLVSQSEHAAPGLVQKAHAHILKSLISEIARLEAAICAKIKSMPDFAERAEIIESVPGFAETSSANLVAGMPELGQVSDRIAAALIGVAPYDDDSGKRRGERHIKGGRRWVRNAIYMPCVGAATLNNPVLKAYYQRLIAKGKEPKVAIIACMRKLIVILNTMIARRQKWDPGRYALS

SEQ ID NO: 291263 - protein, 341 aa, unidentified
MSNANTYIGVDLHKKTCFITIMNGLGKIKKQTEIATDTDKVSKFFKKYNGVNVAVESTMNWIPFYENLESLGCSVVLSNPLQTKAIASARIKNDKVDSKILADLLRTNLLPTAYIQPREIRDLKELVRQRMSYVEWRTRVKNKIHSVLFKNNLKHDFTNLYGQAGMEWLKQLALRDVYQQELDRYLITLNLLDGQIEEISNRIMETAKADYDCKLLMTIPGISYFTALVIKSEIGDISRFANARKLCSYAGLIPSTYASADKVRHGRITKRGSKWLRKSLIDAITSGAKHPSRLCFTYRRLKKSKGTGKAKVATARKLCTVIFAMLSDKQPFREFAPVKQR

SEQ ID NO: 291264 - protein, 368 aa, unidentified
MRMDVIGFVTFIGVDLHKCTVTLRAVRADGELLGQLKCDTKCIERIAEWIKSLPGPKWLAVEACPFVEWFIDRFTPCVDRLDIADATELSMRRGKRRKNDPNDALDIALRLARGECPLGYIADPQLMQLRKFGRHWRQLSRSLGKAKQGMKSMLNAANIRGPQFDGPRAHRWFLTFGGLLQPAQRLAFGNYLDQILLIERQREILRREMLTAARSPQFAATEQLLKSVPGIGPIWALIIASEIGPFDRFPNADALEFWAGMTADLKESAGRTQSGNITKAGSATLRWALCQAAVTLCQSDAKQEATRQRFIARMPRAKANVVMGRRLLRTLYAMVRDGKPYQCGERRDRTKAANKAKAKRKARTVQPA

SEQ ID NO: 291265 - protein, 344 aa, unidentified
MEITTIGLDLAKNVFQVHGINSAGKVVVKKTLRRSQMRGFFERIDPCLVGIEACGTSHHWAREITRLGHEVRLMPPAYVKPYVKRGKTDASDAEAICEAVTRPTMRYVAIKSPEQQAALALHRTRDLFVKQRTQLVNMIRGLLAEFGIEIPRGIGQALTLAKRIAAGEVPDTPRLAAKVIAGLAGQALDLQARLREIELELLAWLRSNDIARRLATIPGIGTVCATALAASVTDPHQFRSGRQFAAWLGLTPLQHSSGGKERLGRISKMGDKYLRRLLVVGMTSLIRRAKYKPEAVDPWLADLLSRKPARLVTVALANKAARVVWAIMVRGGVYRMPAGVTTPA

SEQ ID NO: 291266 - protein, 411 aa, unidentified
METIVDRCAFLDVHRDTVMACARTSDGSSGRREEVSQFGATTSQLLLLADWLVERRITLVGMEATGVYWKPVHWVLEDAVDEVWVINARHMRNVPGRKTDVADSQWGAQLLEHGLVRPSFIPPKPFRQLRDLTRYRRVVIEERGRESQRLHKVLEDAGIKLSSVTSKVLTKSGRDMIDALIAGQRDPAVLAEMAQRRMRSKIPQLHDALAGRFDEHHALMCKAMLARIDQADVTINELGDAIDALLDPYEAAVTLLVTIPGVARRTAQVILAEIGADMSRFPTAGHLASWAGMCPGNNESAGKHRSGTTRHGSKWLRIALIEAAHAAARTKNTYLAAQYARLKAKRGPSRASVAVGHSILVIAWNLLSTGETYNDLGGDYFENRRNSPARQRRLVAQLEAMGHHVTLAPAA

SEQ ID NO: 291267 - protein, 340 aa, unidentified
MKLYGAIDLHSTNNVTVVIDEQDRVVYQKRLPNDLALVLNELSVYQSELHGIVVESTYNWYWLVDGLMEQGYKVHLANTAAIQQYNGLKYTDDNSDARWLAHLLRLGVLRQGYIYPRADRPVRDLLRKRSQLVRQRTTNLLSIQNLMTRNTGSSLNANRVKGLDVQQVDELLPHGDLALAVKANLSVMLSADEQTKILERTVIERVQLRPQFCFLKTVPGIGKILSLTIMLETGDIRRFASVGNFASYCRCVGSQKISNSKKKGQGNTKNGNKYLAWAFVEAAHFAIQFNSTIKSFYQRKKAKTKGVVAIKAVAHKLCRASYYIMRDRVPFNITKAFGQK

SEQ ID NO: 291268 - protein, 347 aa, unidentified
MNFYTTPHKHYCGVDLHARTMYVCVLNQQGVVLLHRNMRCDAQMFLLAIQPFREDLVVAVECIYSWYWLADLCAREGITFVLGHALYMRAIHGAKAKNDRIDSHKTAALLRGGLMPRAYVYPAEMRATRDLMRRRLHFVRQRSSLLAHIQMTHHQYNLESPGKRISYRSNRDGLGAGFEDVSVRDSIAADLALINHYEVVIAELELAVLRQARVHDPNAFRLLKTLPGIGKVLGLTILYEIHDVRRFPSVQDFASYSRLVKCEKSSAGKSLGTSGAKIGNAHLKWAFSEAAVLFVAKCVQGKTLLSRLERKYAKPKALSILAHKLGRAVYFMLARNQAFDIERFAQS

SEQ ID NO: 291269 - protein, 405 aa, unidentified
MNAVGIDVSKGKSTVTIRKPGDVVLIPPCDIPHTQSAINNLIKQIKSLEGETKVCMEHTGRYYEPVATWLSDSGIFVSAVNPILIRDFGDDSLRTPKTDKADSKKIARYTLDRWAKLKQYGIMDKTRNQLKTMNRQFGFYMAQKTAMKNNLIALIDQTYPGANDFFDSPARSDGSQKWVDFIHTYWHVDCVRSKSLNTFTKHYQNWCKRKNYNFSAEKAAKIYQISSDLIAVFPKDDITKMLIWQAAALLNTASETVESLRSKMNELASTLPEYPVVMDMNGVGATLGPQLIAEIGDVSRFTHREALTAFAGVDPGKNDSGKHIQNSVRTSKKGSPYLRKALFQIMDSLIKRSPVDDPVYAFMDKKRSEGKPYYVYMTAGANKFLRIYYGRVREYLSNLSNKKNI

SEQ ID NO: 291270 - protein, 342 aa, unidentified
MSEITTVGLDLAKNVFQAHGADVSGRVLFRKKLTRDQVLSFFSQLPPCTVAVEACGGAHFWGREIGKLGHEVRLIPPAYVKPFVKRQKNDAADAEAICEAATRPTMRFVPVKSEETQGAAMVFRIRELLIRQRTQAINALRGHLTEFGLIVPQGAANAARLIAIVEDPDNGLPAEAVATLTVLVATLSHLEAEIGKLNAEIEHRAKEDAVARRLMTVPGIGPLIATAIAVLAPPPTMFRKARDFAAWLGLVPRQHSTGGKQRLGATTKMGERSLRRLLIIGANSVIIKRHVHASARPGTWLDGMLMRKPPMLVRVALANKMARIVWALMARGSVYQAPVRAA

SEQ ID NO: 291271 - protein, 316 aa, unidentified
MDNKSRVFGIDVSKARLAIGDYEGVVRLNIDNVPTAIAQWLSGLAPGSIIAMEATGAYYQGLAALAHAAGMRVFVLNPRTLKHYAEAIGQRGKTDPIDARMIARYAMHEQAKLFAWEPPPAATDRLGQLLQRRERLVHATQLLAQSLAGVSALKSAREELLASLKRMIKNVQLLMRAELAHTPTLAALHQRLSSIVGVGFVVAMQLVVALTRLRFARVESFVAYTGLDPRPEDSGQRCGRRRLSKCGPRLLRCLLYNAGMAAAHSKLFKPTYLKLRARGLRSTEAIVILARKLARIAYALYRSGETFNPTRHLQTA

SEQ ID NO: 291272 - protein, 372 aa, unidentified
MKKNTIFVGLDVHKDSIEVAFADDGRDGEIRSYGSIGGDLESLHKLVRKLQSKGATLRFVYEAGPCGYEIYRSLKKKGFDCIVVAPSLIPRKSGAQIKTDRRDALNLARLHRSGDLTAVYVPTVEDEAMRDLTRAREDVVKAYRIARQVLLAFLLRHGKRYSGATYWSKAHWNWIGSIKMPHRAQQIALQEYVHAIHEQKARVERLTEQIREEINQWQLAPLVSALQSLRGVSIIVAATTVAELGDLTRFQSAKQLMAYLGLVPSEHSSGNTVKRGSITKTGNGHVRRALTEAAHAYRYEARETRVLLARLEGLPQEVRDISWKAQVRLCGRFRRLMGRGKNRNTVITAIARELAAFMWAIAHAPRQTCEVT

SEQ ID NO: 291273 - protein, 337 aa, unidentified
MVYVGVDLHRKSSHVAVLADDGEVLASRRIASQPHEFLRVFGELEEEPVGVAFEATYGWGWFADLLSDVGIPAHMAHPLATKAISSARVKNDRVDAKTLAHLLRTNLLPEAWAAPPEVRDARRLARSRISLARISSRLKCQIHALLADQAITPPLTDLFGPGGRRFLQTVQLRPIPQARLEANLRLVDLIAPELASADAELRALFRGDHRIRRLIPIPGIGFTTAAVITAEVWDVSRFPSPRQLCSWAGLTPTERSSAEHTHRGHISKQGSRWLRWAMVESASRPRLNDPSLRRFRDGIARRRGAKVAKVALARRLLTLCYYALRDEDGCRAYPVQP

SEQ ID NO: 291274 - protein, 409 aa, unidentified
MATDPPNVIVGVDTHSDTHFVAIIDEHGKHLAAEEFLAVSSGYRKILAFITHFGLIIGVGVEGTGSYGAELSRVLRTAGLPVHEVNRPNRQARRLRGKSDPLDAYQAAESVLAERGTSTPKTKDGPVECLRVLRAARSSAMKARTIAINQIKGILVSAPEHVRSRFRPLTTAQLIPALERSRPMGNLTDTEIATALTLKKLAVRYRFLEREILDTDAVMAEILRDCAPLLRNVPGVGIEVASQLLVTVGDNPERIATEAQFAALVGVAPIPASSGKTSRHRLSRGGDRAANAAIHHVVVSRLATDSRTRDYAARRTAQGKTKKEIMRCLKRYVARELYRQLTNPQAAPSITDLHTAREDLHITLREAAGHFNTWPGTLSRIERGLSRDDNLASQFRDWLHEQKAVQNIN

SEQ ID NO: 291275 - protein, 376 aa, unidentified
MTTIAREHATHQAQNQARNQTGDPIGDQGGGQGGDQAGVIGGVDTHQDTHTAAVIDSAGRLLGHHQFTADRSGYAALLSWLHSFGPILMVGIEGTGAYGAGLARHLDDDGVALVEIDRPDRRTRRRAGKSDPIDAEAAARTAWTRARTGTPKDRHGQVEALRNLRVVRRSAVDQRADTVRRIKSLIITAPDGLRARLRTLTKHHLLAACAALRPDPTRIGDPDHAVKAALRSLARRHAALSAEIDELDTLIKPLVTDINPALLDLPGVGPDVAGQLLVTTGQNTTRIRSEAAFAMLCGVAPVPASSGRTQRHRLNRGGDRQANAALYRIALSRLRWDPRTRAYRDRRLTEGHSNKDVIRCLKRHIAREIYSVLTHP

SEQ ID NO: 291276 - protein, 355 aa, unidentified
MESTKFVGMDVHKDAITIAVMNSAGKVIMESIIETKAVTILQFIQGLRGDLHVTFEEGTWATWLYDLLKPHVTKVVVCNPRKSALLTDGSKGDKIDARKLAELLRGGYLKPVYHGDHGLRTLKELSRSYLTISKDLTRVMNRIKALYRGWAIPCGGTQVYALCHRSVWLSKIPEAGVRRRAEHFYEQLDALQGLRKQVRRDLLAESRKHNATKLLRQIPSIGPIRAAELVALIQTPHRFRTKRQLWNYSGLGLKTHDSAQYRYVDGQLQRSRKPQQLRGLNQDHNHDLKKIFKGAATMASISAGPFHGFYEALLAKGAKPTMARLTLARKIAAITLIVWKKGVNFDAKHLKQQAA

SEQ ID NO: 291277 - protein, 394 aa, unidentified
MATDNKPWRNRKERKEWARRLQAEDPGLEVVHSHAAGIDVGNGAHYVAVRPDSDPQPVRRFECFTADLHRLADWLESCGVKTVAMQSTGVYWIPLYEVLEERGFKVYLVNARHTKNLPGRKSDVQESQWLLKLHTYGLLNNSFQPPAEIRILRTYWRQRAEHVRGAATCVQRIQKALTQMNVQLANVISDVSGLTGQTIVRAIVAGERDPVKLAELSQPGIQASREEVAKSLEGNWRPELLFVLQQEIEMYDIYQQRITECDQQLQKQLAGFAGTVPLHPPKAEPKRKRIKPAKNAPRFELRAELQRITGVDLTRIDGIDVMVAQTLVSEVGLDMGQWKTEAHFASWLGLCPDNRTSGDKVLKRGTRRVVNRAATALRMAATSFRSFLRMLRAS

SEQ ID NO: 291278 - protein, 387 aa, unidentified
MVMDAVDQPAAPAPRRPWGVAGIDPHKRTFTAAVLDERGGLHGVASFDTSEQGLAVALAWLGEVGFDLDRVGVEGSAWLGHQVAASLAAAGYDVREVPASRTAERRRRRRRAKTDAEDAQAIARETLAHPDLPPAGKQHAPDPDWEELVALRNQRRSLIAQRRRLLNEAESVLVGLPLVVRAVLPDTSQVRPRLRALAQGAADQLELTGADRVHLAWLAASAADIGRLDQRIGQLDQRIPAVLARHCCTLTEEVGIAAVGAMELLVEVGDPTRFTTEARFARWCGAAPVAVSSGEGDGEPERHRLDLGGNRRVNSVLHTMHITQARCHQPAKDYLGGKRAEHKTAREARRAHKRLLANVIIRRMWADHQRRRSPTLNLSNPTTPNAA

SEQ ID NO: 291279 - protein, 416 aa, unidentified
MKLFVGLDVSSEKLDACFMTDDSTCSVLKEASYGNSQLGASQIKEYILEFSQKFEIESLVIGMEATSLYSFHPAMFFKEDLELNQLNLMVSVEQPNKIKKYRDIFEENKNDQIDAFYIADYFRIQRQVNSIIKEEEYLALQHLTRTRYQLIKQLVRTKQHFIENIYYKCNTLSKELKAEGGSVLSATLVTLMTEDYTMDQLAELSLEEFANLIQKLGKYRFKNPEGIAKAISKAIRSSYRLGKVHQDSVDIVLGVLAKEIRSLEKLIKDLDKAIDDLVVVLPEYQCLTSIPGIGPVYAAGILAEIGPINRFSDESKLAKYAGLYWRQNPSGNSEYENTPMAKRGNRYLRYYLVEATNSVRRYEPEYHAYYKKKYAETPKHKHKRAIVLTARKFTRLVDTLLRNHQLYMPPRSVIDK

SEQ ID NO: 291280 - protein, 436 aa, unidentified
MRGCRCSMIMGFTTPIEHFNLQRKKVITMNTLYVGIDVSSKSNVVYLMLPNGDKHSNFSVANSHEGSTLLVKKIYSALTSHSLDTVLIGLEATSVYGDNLVYFLREDATLAPFNRKIHVLNPKQVKKFHDTYNDLPKNDYVDSFVIADCLRFSRINKEVYMGDYRYKALQNLTRARFFAVQNLVKEKQRFMNVLFKKYSTMTQEKVFSDAFSTTALAVYDEFESAEALANMDLHELTDFIIEKGKNRFPDPDAVAKAIQKAARSSYRLPKTVNDSVNQVLSISITSMKALESQIKEFDKAIIALMELLPNVLISIPGIGPVYSAGIMAEIGDINRFDNQASLAKYAGLAWKQHQSGGFEAEVTRLIPSGNRFLKYYLCEAAFSLVRCDKEYSDFYHLKYKEVNRCQHKRALALTARKFVRLVFRLLKDNRLYCPAK

SEQ ID NO: 291281 - protein, 391 aa, unidentified
MIYIGIDVAKDKHDCFITNSNGEVLFKAFTISNNQDGFNVLYQRIESVMEDVTKVKVGLEATGHYNYNLLGYLIDKGLTTYVINPLHTNLYRKSLSLRLTKTDKIDARTIAYMLMSDVNLKSYSNTSYHNEELKSLTRYRFDKVKERAKLKTSVSRLVCILFPELEKLVPTLHMASVYALLSEFPGAKHVAGAHLTRLTNLLSDASKGRYGKDTAIAFMEAARASIGSNMPAKSLELKHTIKLILELDSEIEEIENEIKIIMDEINSPILSIPGINYRMGAMIIAEIGDFSRFDSPDKILAYAGFSPSTYQSGQLDSAYSHMEKRGSKYLRYALYNAAKYVCHWDSKFAGYLAKKRAEGKHYNVAISHAVKKLVRVIYHLVKSNQQYIKVA

SEQ ID NO: 291282 - protein, 355 aa, unidentified
MTSTKYIGMDVHKESISIAVRNDAGKVVMECVIETKASMILQFIEGLRGDLHVTFEEGTAATWLYDLLKSHVTRLVVCNPRRNALLKVGNKDDRIDAGKLSELLRGNQLHPVYHGEHGLRALKELVRSYLTISKDLARVMTRVKALYRSWGIPCSGTQVYSRLYRVVWLSKITEPGVGLRAAFYFQQLDALRELRQEVRRELLAESKKHTAWKRLCQIPAMGPIRAAVALGILQTPHRFRTKRQLWSLSGFAIETRSSADHRQVNGQLQKVKKRVSIRGLNQNHNHDLKNLFKGAAVLASSKPGPFREFYAGLLAKGMRPEMARLTLARKIATIVLIVWKKGVCFDAQYLKPQTA

SEQ ID NO: 291283 - protein, 458 aa, unidentified
MYRELQPFREALSRELKASLFPAVAGVDPNKLLETYLDRLTMYTGVDVADQTFTALALDAGREILGYLEECPNQPDGFQRFLAWARALRDQHGLRIIAVAGETTGIYYWALWDFLGEQADVARVLYNPRTTEHMGEVLSKKVRNELVDALLLAEQLRLGSTPEVLLQEDADLLTARYYSRAARDLAKQINRRKNQLRALLRAYCPPLSQVFPGSKLHHPAVYALLQEYLFPDEFVQAGVQALTTTLSAHCRDAFGLTEAQQLVEASRQALIRPVRRDAIHCLVQAHIQDITTFQQRKARYLKSGYALIKHRQEAKLLRTVKGAGVSNTLALVSEIGDVQRFSDGDQLASFLGLTTSKHISGATLFQSKRITKQGSRNGRYAAVNVALHLSHRVPRYQAMYRRIKDRKPDRKGHFIALVAVARDFVSNVLYDMWRKQRPFFLEVSDYRAYRRKHQPAND

SEQ ID NO: 291284 - protein, 364 aa, unidentified
MEQNEVILGVDTHLDTHVGAVISDTGKLLGTLSVTTDTAGYLDLLTWANSFGQLRRAGVEGTGTYGAGLARVLRDHEIEVLEVNRPDRAMRRSRGKSDPTDAENAARAVLAGRATAIPKEQSGAAEAMRAVSVARRSAVKAKTQAINQLRALLVSAPQEIRDRLLKAKVAECVEGCARLRSLGKTPMLQTLTTTLRLLAKRWLTLAEELKALDTMLDSLTSEHAKRVRERFGVGPQTAAVLVAVAGDNPERLKSEAALAALCGTSPLQASSGKTVRHRLNRGGDRSANNALWTIAMVRMRSDPRTRAYVDRRTKEGMSNKEIHRCLKRYIVRELYRSSWPIWPIRRPLLDIGASTRRRKVCGVR

SEQ ID NO: 291285 - protein, 353 aa, unidentified
MNQELRRVIGGVDSHADNHQAAALDERGRLLGSKSFAVSAAGYRELQAWLASFGLIDRVGVESTGSYAAGLTRHLLAEGVRVLEVNQPHAHSRRRRGKTDAIDAELAARHALSLASAVTPKQSSGIVESIRQLRVARDSAVKSRSAAIVQLGDLVRTAPSELREQLAIRSTVKGKAALCRRLRPDSDRLSEPANAAKLALRSLAGRIAGLDEEIAELDRQLAPLVATAAPRTTALLGISTGHAGQLLITAGQNIDRLHSEAAFAALCGASPIPIASGKRGRYRLNPGGDRQANRALHMIAVCRLRHCPKTRAYAHRRSSEGKTKKEIIRCLKRYIARQTYATLREDLRSLAIA

SEQ ID NO: 291286 - protein, 320 aa, unidentified
MRNAVGLDISKLTFDATAIVGNAEYSAKFDNDSKGLDQFSDRLKSLGCQNLHICMEATGNYYEEVADYFAQYYSVYVVNPLKISKYAESRFKRTKTGKQDAKLIAQYCRSAQESELVKRQKPTDEQYRLLRMTAAYAQIKSECAAMKNRHHAAKDEEAAKAYAQIIKAMNEQLEVLKEKIKEQTEKPNCKEGVKRLETIPAIGRMTAAVLFHHLTSSKFETSNKFAAFAGLSPQQKESGTSVRGKGKLTKFGNRKLRAVLFMPAMVAYRIRAFPDFIKRLEEKKKPKKVIIAALMRKLAVIAYHVHKKGGDYDPSRYKSA

SEQ ID NO: 291287 - protein, 338 aa, unidentified
MIVIGVDVHKQSVTAVAVDEAGRMLDERTVPVGSEELIGWASALDAERLWAVEDCRLLTPWLERQLLGLGEELVRVSPKLTVPERRAGRVRGKSDPIDALAVARAALREPDLPRPQPEERVHRELKLLVDHRDDLVDERRRTQQRLRWHLHELDPTLLVPLRRLDRASHLERVGRWLARREQEVQVRIARELVARCRSLTRAIDELNQELEQRAAAVAPALLELPGCAGITAAKLLAEIGPISRFETDAQLARHSGVAPLEASSGRLQRHRLDRGGNRQLNAALYRIAITQSRYHPAARAYLERKQAEGKTRREAIRCLKRQLARVVFNTLKASPALT

SEQ ID NO: 291288 - protein, 323 aa, unidentified
MTVYLGIDIASKKFDVAELCDGNYRCKAFENTSAGFLALYKWLGQSTMPDIHACLEATGDYGTSLATFLYENKIKVSVVNPARIKGFGASELSRTKTDKADSKLIARFCKAAVPDGWKPTPAPLRKLQALVRRISALNGMLRMECNRRENADANIQASLDRIISLLKTEIEVVRQEIKDHVRSDDELKKQDALIQSIPGIGAVSSNLILSFMSGKGFRKAKEVTAYLGLNPRHHQSGSSVRGKTRMSKMGDARLRSALYMPALVALRYNPDIKAFGERLLLAGKPRMLVVGAVMRKLIHIVFGVLKSGTAFSSRIAAHSVVTS

SEQ ID NO: 291289 - protein, 361 aa, unidentified
METIIKQCVGIDCSKDELANCFGQLFLSLQEKHKATSLVSNTPKGFKELLKWSDKLSEQGVEVEFVVEATGVYHEKVTNFLFDAGKKISVILPNHARHFAQTLKTRTVNDKESSKMLASFGLQKQLEGWKKPDPVYAKLKGLTREYSQLKDELTMIKNQYHAEEHSAFPVKETLTRIKKRIAFMDNQIDQIKNDIDSIIKSYPELEKKIEKVCSAPGVALLTAVKVIGETNGFNLIRNKKQLTAFAGYDVITKDSGTSVKGKPRISGKGNKHIRKALHFPALTSVKFDKHNQDLYNRLEAKHGIKMKAYTAVQRRLLVLIYTLWKKDEYYDPDYHTKKNDKYKLLEQPITAALNELDQVRS

SEQ ID NO: 291290 - protein, 365 aa, unidentified
MPVKKLSVKVIKQNVGADISKDDFKVCFYCLDQNGRKFIKGTRTFKNTLAGFLAFEKWIEKKRINSLPVRITMEATGVYYESLSYFLTDKGYYVSVVLANKSSEYAKSINLKTKTDKADAKALGQMGIERDLSKWQPISGKMRLLKQLTRDRVTLLAEKTAISNKLHALNHSFEPNKGVIKRLKQRLNLLVKQLKQVEKEIAQTVKKDELLHAKISNICEVKGLGIITVATIIAETNGFVLFTSRGQLVSYAGYDVVRKESGTSVKGKPRISKKGNSYIRRALYFPAITMVKHEPQFKQLFDRVLDRTSIKMKGYVAVQRKALILIYTLFKNNTPYDPNYQNKKKDIEKEVIQICRQDTYPAYSG

SEQ ID NO: 291291 - protein, 341 aa, unidentified
MKNLFIGIDFSKEKVDVAIISAEGLVETSVRVFNEFKNSVSGYKQLVKWVDKNANGIDPSMWLFCGENTGDYSKPLCNHLYGKGYDMWLENAKCIKDASGIRRLKSDRADAAMIAEYAMRNHDKAVVYEPLSESLAQLREYYLYRQMVVRHRCSFEVRRGEKRLMTKKSAAKTVIAQSGRHIVSELNKEIAKINSKIASLIESSDELSEVYNIVTSVPGIGTQNAVCLMVYTDNFRRFNYDARSIACYYGIAPFGEDSGTSVHVDPHVHYMANRHIKAMLTQAALAAVRFNPIIAQYYQRLIGRGKKMPVAMNNVKNKLIHIVTSMVKNKQVYNPEYRLSA

SEQ ID NO: 291292 - protein, 416 aa, unidentified
MRRVVMEAIYQCVAGLDVHRKIIVACRRRLLGEGQVESEVEKFGTSTRELRRLAAWLSEWGVRQVAMESPGVRWRPVWNVLCDQFELLLVNAQHLKKVPGRKTDVTDSEWIAQCLQCGLLRGSFVPNEQLRQWRDLTRQRTKLLDQRTAIVNRIHKTLEACNIKLSAVASDVMGVSGRAMLQALSEGEQEAEKLAAMARGRLKSKSAELVESLEGRVSEHHQWLLKHMLSQVSFLDEEIVAYDLRIEELMRPFEAALERLDTIDGVGLRTAQVMLAELGPAMNQFADDEAVSCWAGMCPGNNERAGKRKSGRTAKGNRWLRRALVEAAYAASRKKDSYLAAQFARLARGGKKRAAVGVGHTILVAAYHILKEEVEYRDLGGDYFQKRSEEKTTRRLVRQLEQFGYQVELKRLAEAA

SEQ ID NO: 291293 - protein, 314 aa, unidentified
MSKPFVGIDVSKAYLDVFIRPTEERTRVGNDDVGVAQLISQLADLQPALVVLEPTGGLQMPLVAALVVARIPVAVVNPRQVRDFGRSTGKLAKTDALDAAVLAHFAEAVRPEPRPIADEATLELDGILTRRRQLVEMITAEQNRLAASRIKVVRADIKTHINWLRHRLSDVHKDLDGAIRNSPVWREKDDLLKSVPGVGRVVAATLIAELPELGRLNRKKIAALVGVAPLNRDSGTLRGRRVTWGGRASVRSALYMATLSALRYNPAIAACYQRLVAAGKAKKVAIVACMRKLVVVLNAMVRARSPWQSRALAA

SEQ ID NO: 291294 - protein, 323 aa, unidentified
MTVYLGIDIASKKFDVAELCDGNYRCRAFANTSAGFLAFYKWLSTENKQDIHACLEATGDYGTGLATFLYERNLKVSVVNPARIKGYGASELSRTKTDRADSKLIARFCKAANPERWKPMPAPVRKLQALVRRISALNGMLRMECNRRENADANIQASLDRIINQLKKEIEAVRQELHAHIRSHDELKKQDELIQSVPGIGAISSHLILSFISGKEFRKAKEVTAYLGLNPRHHQSGSSVRGKTRMSKMGDARLRSALYMPALTALKHNPDIKAFGQRLLLAGKPRMLVVGAVMRKLIHIVFGVLKSNIAFSSRIALDSVTTS

SEQ ID NO: 291295 - protein, 415 aa, unidentified
MEIIYPRVAGIDVGKREVAVAVRTPGEGPGQRRQQIRKYRTYYQVLREMVAWLVEQGVTHVTMEATGVYWKPVFHALCEAEQIEVLLVNARHVKNVPGRKTDVKDSAWLAQLLECGLLRGSFIPPKEIAAIRELTRYRKKLIEERTRELQRLSSVLEDGGIKIDSVASSVTTLSARDMIEALIAGERDPRVLAELARGRMRNKIPDLTMACAGRFGDHHALLARMHTDQIDHLATMIGVLDHRIEEVTDPFAEQLKLLQSIPGIGDRAAQVIISEVGADMARFPTAAHLASWAGLCPGNNESAGKHKTGRTRKGNAEVRTILTECAWSAGRTGTYVGAQFRRLHRRFGKQGGGKAAIAVAHTLIVIIWHVLHDRASYLDMGSDYFTRYHNPEARKRRLLHDLQSMGYEVTITPAA

SEQ ID NO: 291296 - protein, 418 aa, unidentified
MNEDLFARLSRRYLALDIHKHYSVVAGVNFEGQVILEPVRIEHADLEGWLVKNIQPRDYVVIESTTNAWHIYDLLEPLAEKVLVANPIKVKQIASARVKTDIRDTLILARMLAANMIPAIWVPPVHVRNLRYLLSQRRHLVGMHTQTVNRMHSVAHRHHLSHPRGKRFNEKNTEWQQDEELSDSEKFQLELDMGTKKHLEEQAGKITEKLARMSHQKPWAESMLYLMPLPGFGVITGMTVLAAIGEITRFESFKKLSSYSGLTPGVEQSGTKKRGKGITKEGRKDLRWAMVEVAQRAVKSDPLWKHRFNELQRRMHRNQAIVVIAHRLLELVWFVLTRKQAYRHFSHERIAYKYLTWSWQLSEKDRDGLTRQQFTRYYLMRLGIGHDLERIALNPRYPRRLASEAELLALRPELNRTE

SEQ ID NO: 291297 - protein, 444 aa, unidentified
MKYQKVLRMLENIPYLSVGLDVGADFSWMSIMLPNGTLIGKPFKIVHSDSHSRELAVAKIKEAQETYSLESRCFLESTGIYHIPLLCFLRDKGFDCSVINPIITKNSTNMNIRKLHNDKFDSKKAAKVGLDASLKTSIIPDDEVIDLRNLVRDYYYYKDLQSAIVLKLTAELKVSFPAYQKVFSKITTLTSLKLLDTYPLAQDFLTAPKELVVEMIRSTARFGEKYALAKYDAICTAAKDAAVFGRALQSNALRIRLYIKTYREYQEHLDSILGALHKVVDKLEGTPVYDRILLLQSLRGVGFLSSVVLIAEMGSFDLFPSQKKLYAYFGLDPAVKQSGKFNGDKVHMSKRGSSLARRILHMVALNNLKVDKGAKTPVNPVIHRYYADKCKSKKKNVAVGAVMHKICNIIFAMLRDNKPFEIITPQEHCERYLAAHPDKVQNAA

SEQ ID NO: 291298 - protein, 328 aa, unidentified
MAERRYLARFAELKRRAEARSGTYFPIIVIQEAGLDGFWIHRVLEAEGIERYVVDPASIATSRRRRRAKTDKIDGEALVRALLAYKRGEPRVCAMLRVPTPEEEDRRRIARERKALTNERTRHINRLKGLLFALKTGDGRPLPVHLKRQIGRELDRLELLIDQIKAVEVERDAMLAAEQAVSPAPAMLLALGIGPEFTAVLWSEGLSRHYDNRRQLAAYAGLAATPWKSGAIDHEQGVSKSGNPKLRTTLVQMAWLWVRISRARRSPMVQGAGEAEQRPAEEDDDRGDRPQAARGAVEIRQRRRCHRGSDHDSCLMRHTHRILPSSRT

SEQ ID NO: 291299 - protein, 373 aa, unidentified
MGIDLGDKYSQVCVLGDAAEVLEESRVRTTVDALRRKFEAMEPCLVAFEAGTHSPWVSRLLEGLGHESLVANPAALHRKGQRKNDKVDAKKLARWARADPEMLNPISHRGEDMQADMGLLYARRALVEARTKLINTTRGLVKAYGARLPACDARSFPNQVKDAVPEALRPALEPLLRSIEQLSEEIYALDRRVEALAEEKYGFQTGAMRQITGVGAQTSLTFVLVIRDPYRFSRSRRVGPYLGLTRREDKSGESDPEMGISKAGNQYLRQLLVGCAHYIMGPFGPDCDLRRWGLHKAQGGKNAKKRAVVAVARKLAVLMHRLWLTGEVYEPLQEAALAASGVDKTATHGSLPARTGSLTGRRAMQPDAVLSTR

SEQ ID NO: 291300 - protein, 343 aa, unidentified
MKLMRVGIDLAKSVFQVHGVDRHERMVWRRKLTRANWLRVFLETVEPDCEVGMEACGGAHHWARLLQARGYSVKLIAPQFVKPYVKSNKNDANDAEAICEAMSRPNMRFVAVKSVAQQDVQAVHRVRAEISKQRKAKGNQIRGLVSEYGLVAPKELVHLRAAIPAWLEDAENGLTGRFRRLLNALWHDLHALDQRMIELDHEIAQIASADPVVKRLQQLRGVGPLIATALVATVGDAKQFANGRQLAAARGRTPRQNSSGGKERLLGSSKRGDAYLRTLLVHGARSALRTAQNKEDRLSRWVSRIATTRHHNVAAVALANKTARIAWAMMKDGTDYAPDRAAA

SEQ ID NO: 291301 - protein, 328 aa, unidentified
MIMLGIDVSKTKIDCCIFPQGLTGKRKNKIFTNTESGFGSLLKWLITLKIEPDQVTAIMEATSVYHENLGYYLYDAGVKVCVANPSRVRAFAKGMSMLNKTDKADSEALSRYGYTAKLIIWQPEPKNVRLLKALLGRRDVYLGSLLQEKNRLEKAQSTHTSVVVIKLLEENIEYLNQQLEHINKLINNHIDQDPTLKQDLKLLQTIPSIGERSGLLLLGLFHSHKFEKASQAAAYVGLVPVHQLSGSSVNKQSHLSKAGDSKIRSVLYMSALTAIKYNPHIEALYQRLLSQGKNKMCALGAAMRKLIHLCYGVLKHQTAYQRDYLLVE

SEQ ID NO: 291302 - protein, 352 aa, unidentified
MSIIVIGIDLAKNVFAVHGVDENGKPVLVKPKVARADLLPLIALLPPCLIGMEACPEPVEVACSGAHHWARLFRQHGHTVKLMAPKFVAPYRMTGKRGKNDAADAAAICEAVTRPAMLFVPIKEEHQQIILTLHRTRQGFVEERTASYNRLRGLIAEFGIVLPQKITCLRREIGAHLEDLPGYANLCVGDLLAHTAELDTRIAEYDRLIAQAAKEDARSKRLMQLPGIGSVTASAMLASIGNGHDFKNGRQVAAWIGLTPGQHSSGGKARLGRITKAGDGYLRSLLVMGARSILAGLGDKQDGFSRWARSLVERRGYWKAVVAIAAKNARLAWAVLHYGEDFKLKPSAASAA

SEQ ID NO: 291303 - protein, 322 aa, unidentified
MSEPVLGIDIAKQKFDAALLIGGKLKHKSCKNSTEGFELLSQWLRKQGVARLHACLEATGSYGDELALYLHEAGHTVSIVNPARIKGFAQSELIRTKTDKIDSGIIARFCLAMKPQSWIPPSPEVRALRALVRRAESLIDMLTQEKNRLGTAHESVIPLIKEHIDYLKKEIEEVRRQIADMIDRDPNLKRKKDLLASIPAIGKVTIASILAEIDDLGRFTHVRELVAFIGLAPKETLSGSSIKGKPRLCKTGHPRLRRALYMPALVSLQCNPLMIAFYRRLKEKGKNGKVIVCAIMRKLVHVIFGVLKSGKMYDPNYKPAFA

SEQ ID NO: 291304 - protein, 401 aa, unidentified
MGIDIAKDRHYAFFGTATGKTLLKRIIFSNDHEGFRKLLDQAEALRVRHGLKKVVYGMEPTANYHKPLGEYLINLGRRVVLVSGVTVARNRESLDGRWDKHDGKDSANVADLISQGKCLYYEHPSAEIRGLRGLLSLKRRLKKQEHGYRVRIRNHLIAQYYPEMDRDYERLGAEGLSIVRWCLPASEMVQLDVEPFIERVTSRRIRMEKRQRLEAVWEKAAESIGCDGVPGVEHEAKVMVEGLRQTREMIKETEDRIEELCKEFPEYKYLLTIPGFGPDVSSKVFGAIGEADRFQNGKQVLKLGGLDLSADRSGKNSDKAIPEISKRGKADLRYALYQAAFIASMKNPYFLRYYTNKLRGREKEKGIHTKMIVKLSAKMLLIAWTLMKKKEAFNPAYLNAE

SEQ ID NO: 291305 - protein, 364 aa, unidentified
MEEKKKAVTRYVGIDLGKKTYEVAIVGKGGKVSKSNGQTYPAARQAFYKKLQPTDKVALEAGNLAFIFAKEIEKTVGCKVYVLNPSNLALIYGSMKKTDKEDSLKLAHILEDFNEERLPVVPVPSDKEFRRRKILSSYRRAQQERNRDINRLHALFVSQGITTKVRADLADSESRKEAIKELCDIERDEAEHLVAILDLCEKRIDKLDRQIAEEAKGDEVIERLQSVPGVGLITSFAFASHIAASRFENASQVSNCLGLVPRVYISGQTVKYGQITKRGNGYLRALLVQAAWALVRSNNGGKLKELYQYMTIEKSKSKKKAIVAVARRLAELLYLIMKDEVRYVKMPFFREIKESEKTTELLSA

SEQ ID NO: 291306 - protein, 328 aa, unidentified
MSKNVFYVGIDVGQEELVVCMEGCKPRGFKHNTMGIRKMLEWNRKMACDTELHFCLEATGVYGYSLATSLVSRFGVRVSIVNPAQIASFAKAQLRRTKTDNIDARVILAFAQSQHPPRWKPESKTQRQLCHLVTQADRLRRMLRQLSNRDHSFKYVPDLPEEVKKSQQSLRRSIERQLANIEKAIEKLRTEDQGLKEQVDLLCSIPGIGNHSAVRILAYSKNAIEERGSKALTAHAGLAPSQKQSGISIRGKSRIAKQGDRRLRNALYMPALVAAHHNPTLKVFYRRLVDNGKPKLLAIVAVMKKLLLLIQAILKRKIPFNPDYLPLT

SEQ ID NO: 291307 - protein, 409 aa, unidentified
MLFVGDDWAEDHHDVELVDEAGTVLARRRLPEGQVGVSRLHALIAEHLPDPGADLNPSPPVVVGIETERGPWVASLVAAGYTVYAINPLSAARYRQRHSTSGAKSDAADAHLLAEIVRVDRAHHRAVAGDSALAEGIKLAARTHQNLVWERTRHVLRLRSTLRDFFPAALQAFPELDATDALQVLAAASDPDTAARLTRHTILAALTRARRRNREERADQIMAALRAEELRQPAPVQAAYAATVRAQVALIATLNTQIEALEQVVAEHFGQHPAAEVLTSLPGLGTVLGARLLGEFGDDPDRYLDAKARKAYAGTAPITKASGTKKIVMARYARNKRLGDAAQQWAFSSMRGSVGARTYYQQLRARGTGHQAALRQLANRWVGILHGCLKTKSLYNEDTAWSHILTPAA

SEQ ID NO: 291308 - protein, 344 aa, unidentified
MKVSVLGIDLGKNVCSIVGFDETGAVVLRRRAKRETLIGLAAKLPPCIVAMEACRGAHHLARLFANQGHDVRLMSPEHVRPYIKARKNDDRDAEGIAEAATRPTMRFVEVKAQEQLDIQTLHGSRDRLVAERTALINQLRAILLERGIIVPRGKRKLEQYLTALMEGQDPNGLSQRIRTLIADVRGQWLELDRRIAVFDKEFAAFAKENEDARRLTTIPGVGVTIASALIAAVENAETFEHGRDLAAWLGLVPRQSTTGGKPRLLGVSKRGNRYLRKLLIHGARAALPHIAERDTALGRWAKNLLARVHKNVAIVALANKLARIAWAVLRRGEKFTAKGLPLAV

SEQ ID NO: 291309 - protein, 321 aa, unidentified
MEPTIVGIDVAKKKFDVAVLLGERVKSGTFHNTADGFAVFGRWLTKLGVENVHACMEATGTYGDELATYVYSAGHVVSVVNPAKIKGFAQSELSRTKTDKTDAALIARFCRAMRPEAWQPPTPEVKELQSLVRRLEALNDMLTQERNRLPITEGRASASIERIIRHLETEIETTRRLIREHIDQDPDLRSRRDLLESIPGIGPATSAMILAEFGNVARFGEARRMASFCGLTPRHRQSGSSVRGKSMLSKTGSSRIRKALYMPALAAIRYNPVIIAFRARLLANGKPKMVVVGAVMRKLVHIIYGVLKSGKPFDLSIAAAA

SEQ ID NO: 291310 - protein, 412 aa, unidentified
MKMFVGIDISLKDFKARMFDAEGEEVAKRIRCKNDDPGAESFVKYLIEICSAKNVDSLRIGLESTSVYGWHLQMHLAGEPSLVPFHPQVYVFNAKIIANFRKQYVDAPKDDWFDCLVIADRLRFGRLPESCQVDFRYLPLQRLTRFRHHLVQTITREKNYFLSNLFFKFNTICQDKVLSNTFGAASEAILTEFLSPEEIAARPLDELIDILMEKGRSRFTDPEATAKALKTAAGKAYKLHASLLEPINLVLATSLQTIRSLEQQVKGIDRAIEKELSHFPNTLQSMPGLGPVCAAGMIAEIADIHRFDNEKALAKFTGLTWRKHQSGEFEADDTPLTKTGNVYLRSYFVLAAECVRKHDPKFAEFYARKFKESTTHHHRRALVLTARKLVRVVDALLRSNQLYLPQGQRKAV

SEQ ID NO: 291311 - protein, 353 aa, unidentified
MHTHQKSSDPIATIGLDIGKNTFHLVGLDKRGAIAMRIKVLRNQHVRRLVNLPSCLIGLEAGSGSHHIARQIEPLGHDVRLIPAQYVKPFLKGHKNDFRDAEAIAEAVQRPTMHFVAIKTPEQSDLLSLHRVRSRLVRQRTAIINQIRGFLIERGITVRQGPVPLRKVLPEVLSSPPEALSPRLLRLIAELDEDWRRLDERLEALSAEIEGLSEHDTACQRLMTVPGIGPIISSAVVAAIGTGSGFKQGRDFAAWLGLVPKQESTGDRTKLGRISKRGNKYLRTLFVQAAHVVIERRPAAAIRALWPWIEKASKRLAHRNLLAIALANKLARIAWAVLARGRDYEPRITTNAA

SEQ ID NO: 291312 - protein, 320 aa, unidentified
MSAFSVVVGIDVAKAHVDVSVLGAKLDAQRFDNEAEAHSALAGALKPLGVALVVMEATGGYEAALACALQAAGLPVAVVNPRQARDFAKSMGRLAKTDRIDARMLAEFAAVLVHRDDLASLIRPVADAQQQALAAMVTRRRQLVTMMLSERQRLQLAIAVVRPSIEAMIEAIRKQLDDVEAQMVSHVQAHYAELDKLLRSASGIGPVASATLIAELPELGRLNRREIAALVGVAPMANDSGNSRGRRRVQGGRFEIRRVLYMATLTAARHNPAIKTFYDRLLAAGKLPKVALVACMRKLLTTLNAMVKTNTPWDKSLHGA

SEQ ID NO: 291313 - protein, 380 aa, unidentified
MDKVCGLDVHKDSVFACILDEQGKKIFEKRYGTLTPDLTKLRDTLVEKGCGRVAMESTSIYWMPIWHVLESDFELTLANPYFIKQLPGRKSDVKDAQWIAECLQKGLIKSSFVVDGVLRQMRQYARQHRRLTKHRVRLEQQIDNQLQRCNIRFSNYVSNQGSNVSMRKVIKALIKGERAPASLCRLVHGRTQNRHGKQVITDSLDGVIQQVDIQMLIQCMDQIDLIEKQQATCLNHLEELANEHFAKEISLLCTIPGIKTLSALFILAEIGNDMSAFSNANSLVGWAGLRPRNDESAGKIHSRKTLHGNKYLRQILVEISWSAARSQKSFLGKKYTALAKRMKSQKALIAITRKILVIIYNVLKTKQPFDHKKNMQAVIA

SEQ ID NO: 291314 - protein, 361 aa, unidentified
MPVEHYIAMDTHGHSTDICVKTRANAPGRRWRVATTIPALREVIGSIKKPRYLAFEEGPLASWLYRNLKADAERVTVCDPRKNAWIAKGGDKDDPIDADKLADLFVGGYLKAVHHSDEVDRDVFKQLVGSYHERVGHRVAESNKVIGALRRWGVVVRESAFKDKSARVGLLAKLPEGAELAPTRLALKLLMEGYDHAVKQEKRLRQELTRLAKKEEVVVRLTELPGVAWVRAATLFVYLDTPWRFASKQALWKYIGIGLVRQTSGDGPEHLGVNPAANRALKSMILGAAESAILQGDNPFAEQHRRWRDDGLSPRNARRNVARSLAAVMWGMWKNGGVYDPKQVDAKAPEKVESNGSRSDR

SEQ ID NO: 291315 - protein, 377 aa, unidentified
MTTTSAVDCHVAIELSRRSWLVGALLPGTKKVITTSVPGGDADGLIAVLAQFSEHGSATAGEPVRLRVCFEAGYDGFWLARFLIDRGIDTTVLDASSFLVSRRGRRAKTDRLDVEAMACMLKAYCLGDNSVCRPVRIPTPDEEDAKRLTRERTQLVKERTRHVNRIRALLNLQGIRDVKGLHGGKWREWLVTLRTGDGRALGPFLVRELTRQFERLEFLTSQLRALEVERHDVCAQVSKVPSGRKITALAQLSGVGEIGATVLVTEVFHRTFASRRHLASYLGLSPTPFASGGTARDQGISKAGNRPARVMLVELAWCWLRYQPQSRLARWYREWFSDRGGRSGKVGIVALARKLAIALWHYVEDGIIPDGAKLKAM

SEQ ID NO: 291316 - protein, 362 aa, unidentified
MGDITTTADQGKLTVGLDVGDRYTQICVLDEDGTVMEEGRVATSPRAFRQRFAAMPPARLVLEAGSHSLWAHRLLEQVGHQVIVANPRMLRFIYGNTSKNDRADAGYLARVGKLDPDLLHPITHRSEESQTHLALLRSCEILVRTRARLVSHARGLVKPFGFKLPHCSTTAFGTKVQDHIPEVLAPALGPVIGIISTLSEQIRELEKKIETLAQETYQETALLTQVPGVGSLTALAYMLTIEDPGRFPRARAVGSYLGLRPRQDESGAQKPQLHITKAGDKFLRHLLVECAQYMLSSRGADSDLKRWGLALSERGGKAAKKRAVVAVARKLSVLLLRLWTTGEIYEPLRVATRRGDLVVPSS

SEQ ID NO: 291317 - protein, 371 aa, unidentified
MKQNNTLERSPKRGAKSPRRRLTIGLDLGDKSSRYCVLDEHGEVLREASAATTKKGLCQAFGAQPQCRMALEVGPHSPWVSRLLSQLGHEVIVANARQVRLISHSSRKDDRLDARLLARLARADPQLLRPIRHRSAQAQQDLTVIRVRAALVEARTALINAARGLPKALGERLPACGADSLRADKMADLPQSLQHTLQPLLEQVESMTAKIHALDKQLEQIAREQYPETALLQQVHGVGTLIALTFVLTLEDPQRFSNSRDVGCYVGLRPRRSDSGQSQPQLRITKEGDVYLRKMLVQGAHYILGWRGPDTDLRRWGLKLAQRGGKNAKKRALVAVARKLAVLLHRLWVTGEVYEPLRNSPARPRSRHAAA

SEQ ID NO: 291318 - protein, 356 aa, unidentified
MELLAYSAGVDISADDFDACIEGVYDTRATKVIATRKFKNTAAGFKQFDKWLFRKAKQKTLLQIGMEATGRYHEGLAYYLFAAGYRISIILPNKIKHFAYSVNQYSKNDALDARLIAAYVSKHVPGTWQPISESMRDLRELSRERQALIKQRTQTKNRLKALKAGYAPLKKTVARLTEQVDFLNRQLKQVDAEMAQITERDETLSDNFNLLVSIPHIGAVSAYTIMAETDCFNLFVNRNQLIKYAGLDVIEKQSGSSVRGRTKISKRGNAHLRSAPYAGLNAIMRTQSVFVDTYTAALERGMHPKQARTAVVRQLLRVAFGVVKSGRPYCEADHRNRSVKEVGEHSGSPTVTDLVA

SEQ ID NO: 291319 - protein, 368 aa, unidentified
MRIIKYIGLDVHKNSISISTADEGRDAEVRYYGKIGNNMDQLMKVFRKFISKGFELRCVYEAGCCGYYLYRFLTGNGVECVVVAPSKIPRKSGDRLKNDTRDSITLARLHRAGELTEVYVPTEEDEALRDLVRAREDAQNAHKKAKQQLVAFLLRYHIVFSGKSRWSKAYFNWLTTISMKHPGQQITLQDYIDTIHGCDDRVKMLTEQIRQLSEQSRLYPLIHALQAMRGISLIVAATLASELGDISRFEHPEDLMGYLGLIPSENSSGDKQNRGSITKAGNGHVRKALIASAQAYRLPARKTREILKRQEGVPKEIRDIAWKAQLRLCARYRHLTGRGKNPNVAKTAVARELSGFVWAIAKELPLAA

SEQ ID NO: 291320 - protein, 402 aa, unidentified
MFYCGIDIAKRNHEASVIDAEGKPLLDSITITNTQEGCEKLFALFERLSIAKSDVTIGMEATGHYWLSVYEYLTEQGCDVRVINPIQSDAFRKMYIRQTKNDSKDSFIIAQVMRFGQYSETTLSDENIVAMRQLTRFRMALVDNCGDCKRRIIALLDQVFPEYASLFSDTFGVTSKELLLQFPTPDDLLAISTRKLTNLLNKASRGRFGEEKAKEVRAAASSSFGVGFAKNAFAFQIRQLIEQLMFTETQIEELDEQISHLLKQVNQAITTIPGIGDTLGAIIVSEIGDINRFDAPNKLVAFAGLDVKVTQSGDFTGTKQHISKRGSPYLRRAIWLAANRAAFCDPILSEYYQSLKARGKHHLTAIGAVSRKMCNIIFTILRENRPYEPTPPKKNQTNITEG

SEQ ID NO: 291321 - protein, 350 aa, unidentified
MDIVGGFDVHRKQITFDYIEIESGEVHRGKIHPADRESLREWLDEFTERFLGKQIAIALEATTGWRYVVEELRRAGVEPRLAEPAETKSLQGRKKRAKTDRLDAGHLRDLMVINRLPESWIPPDHIQEIRTLMRLRHSLIEERTTHKQRIHAQLFHNGYPRQSNLDSTEGRANLEDMELPAAARKVVDLSLAMIEHINEELEPVEKELRAYARSQAGCKALMMSHYGVGELTSVALLSELGDTRRFSSSKKAVRYAGMDITVHNSDDKRAAGKLSRQGPPVLRWAAYEVAKRAWRKNSPDHEYYLQNKERIGAGRATLSIARKLIRRAHHTLGELGEEAISEPVLTSNSG

SEQ ID NO: 291322 - protein, 424 aa, unidentified
MNNTQNRKIAQVTDKTLIVGVDIGGEKHFARAIVARGFEVSKKPFPFMNTEDGFDSFVSWAYNLADSHKLTKIMVAMEPTGHYWFTFVAFLKKYDVQVVLVAPQHVKHSKEMDDNTQEKDDRKDPIVIARLVPEGRYLIPYIPEDVYAELRAAFNRRCELVEEQVQIVNRMTRWFDIYFPEYRKVYGRIDAKTGIIILKKAPLPADILCIGVDGIRQIWKDAKIRGYGSKKAKQLFAAAEHSVGMEGCTSVRWNLWQLLEEYELVEKQLNDILQLIEGCLYQIPGADKLLKVPGAGVVTVAGFLSEVGDIKRFSDPKQIQKLAGLAVVENSSGKRKGLPGISKRGRSRLRWVLFQLARSMVMFNPEMKAYHQYYTTRKDNPLKKLQSLIAIAARIARIFYGMLKNGTEYDPTMVMKDFNKAVMA

SEQ ID NO: 291323 - protein, 325 aa, unidentified
MTYIGIDISKATFVAAFPLGKGHRTETFPNDAKGIRRFISKLDPDIHHCMMEATGNYCFLLLYLLDKAGIKASLVNPKKIKNYARVMMSVTKTDSKDACLIADFGERFKPEPYKLPSEQIMILKQKKTVLRQLRKQMTATKNLLSSLEPLPVKDKKCVHSLRQTITFLEKQIKYMQQEMEAVVTDVFDKQLKLLTSIKGIGVTLATALIISTGGFTYFDNAKQLSRFIGICPTIEQSGTSINIRGHINRNGDETLRSMLYVAAWSASQHNEACRECYRRLRGKGKSGKVAMIAVANKLVRQAFAVVSSNKSYIDGFVSTKPDAAV

SEQ ID NO: 291324 - protein, 342 aa, unidentified
MKIIGCDFHPSFQQIAMVDTETGEHTEKKLTRGEAAEFYRGLSGKVIVGIEACGNTLWLERLLGELGHELRMGDAAKIRAMEVRKQKTDRRDAELLLTLLVQDRFPQVWMPSLEQRDTRQLLLHRHKLVSVRRQIKNQRQHLALNQGVQRKWKLWTQKGRQLLEDLPLTGWTAKRRADDLQLLDELNRSIAELDTAVQQAAAQDRIALLLQTHPGVGPITALAFVSTLGQIDRFAHSKKVVSYLGLNPAEHSSGGRQRMGSISKQGNPMLRSLLVEAGQSSARLVPELKRAYQRLKHRKHSGVAKVMVARKLAVRLYWMWRTQQPYTATRMQGSPSHLVGER

SEQ ID NO: 291325 - protein, 398 aa, unidentified
MAQSTPLFVGLDVHKDSIAVAIAPQNSTEVRRYGIIGGTLDAMDKLLKRLSQPNIELRLVYEAGPCGFVLCRHLRSKGIHCDLVCPSLIPKKASDRVKTDRRDADQLARLYRAGELSPIHVPDQEDEAIRDLIRARTAAVGDQRQARNRLKGFLLRLGFRYTGKTSWNDAHKRYLSGLLMPRPAQQIVFQECIHAIDDASERVARLTQAAEDALAGWKWEPVVRALMSLRGLQALSAMTVIAEAGDLSRFGNPRSLMHFFGLTPSEHTSGDKRVLGGITKCGNAHCRRVLTESAWHYRLKPLVSEAMQKRQEHQNKEVRLIAWKAQQRLHKRFKQLAVRKKSVVAVTAVARELVGFVWAIACQVKPAQQPPAPEVIRTCRGKVYRLDPEKKMPKARNS

SEQ ID NO: 291326 - protein, 352 aa, unidentified
MTVTIVETPTHARAITGGVDTHAGVHVAAALDPIGGLLGVAEFAASPAGYAYLLEWLGGFGTVCLVGIEGTGSYGAGLARHITAAGIRVVEVDRSDRQDRRRRGKSDPLDAVSAARAALSGRAAGTPKGRDGQVEAIRALMVAKRTARSERIQTINQARSLIVTGPDDLRARFAGHSADDLVAELASLRPRPGSMIRYHTLLSLRELGRRVAFLDGQLQRLDALIVPLVTARAPGLLALYGVGHDTAAKLLIAAGDHPERLRSEAAWAHLCATAPIPASSGKVTRHRLNPGGDRQANHALYRIVITRMSSHPPTRAYVDRRSKEGLSKKEIIRCLKRYVARQVYPHLRPGSG

SEQ ID NO: 291327 - protein, 343 aa, unidentified
MHKSSAEEFLACGIDVSAAQLVVALQSENGGYGQRIFPNRASGHRTLIVWLQKAGSKVRVCLEATGLYSLDLALALHAACGIEVAVLNPKLVNRFAATLCRSKTDPADAQVLAEYARRMPFQLWQPPRAPALELRAITRHIAALTQQHTRESNRLHAASASSAGARCVQHDLKRSLRDLQHRIDKLRAQALALVQQDPELRSCLALLLSMLGIGEVSALNLLGELALLAPGLTVRQWVAHSGLDPVHHQSGTSVHQRSRISRAGNRYLRRALYMPALVAVRHDAHLRAFYQTLLQRHKAKLQALIAVARKMLHAIFGMLRWHNVYDGSRLLPNIKLPAADAVA

SEQ ID NO: 291328 - protein, 343 aa, unidentified
MQAITTIGLDIAKSIFQIHGVDAAGNVIVRRQLKRRYVLPFFEKLPPCLIGIEACASSHHWSRELKAFGHTVRLMPAAYVKPYVKRQKNDAADAEAICEAVTRANMRFVATKTLEQQSCLMLHRTRHLFIRQQTAVINAIRAHLAEFGIVAPVGRNGVEQLLDVVADPDDKRLPDVARACIAALGAQLRMLKARILEFDRLIIAWHRSSEASKRLDEIPGVGPALATALVASVADPKAFRSGRDFSAWIGLVPKQHSSGGKDKLGSISKQGNRYLRSLFTAGALAVIRYAKIHGTKHRPWLTALLARRPTKVAAIALANKIARMAWALMARGDHYKEPVALAA

SEQ ID NO: 291329 - protein, 429 aa, unidentified
MRTESTPGARGPVFCGVDTHADSHWLCVLDWRGRKVLSRQFPADAAGYEALAGAIAAAGEPACVAMEGTSSYGAGLTRHLASLGMPVREALSPARMQRRRPGQGKCDEADAERAARAAMSGSKLGTPKSQDGWVDGVRCMLAARSGAVKARTSAINTARSLLTTAPEGLRSRFRGMAGPRLMEELPSVRAEGALGAALGALADLWSAARDAALDMERAIEASLEENCPALLAMYGCGPVSAAKLAVAAGDNPDRLRSEASFAAICGACPVPASSGKTVRHRLNRGGDRQANSALYEIARQRVMRDPETAEYAERARGRGKSDREVMRCLKRYVAREAYRALMHPHEVRRPEDASELVAARRAARVSQVRAATILGTSERCISMLERGQRELKPIRRAYEAWVEAGLPLDWDRQAFEAERKMDSKKGLAK

SEQ ID NO: 291330 - protein, 291 aa, unidentified
MIIIGVDFHPEFQQIALMDSDTGEFQERRLAHREEAERFYRELAAAGQKVRVGMEASGHARWFERVLAELQIELWIGDAAEIRTRRVRKQKTDRQDAQLILKLMLKDDFPQIWVPSWENRDLRQLLWHRHRMVQARTRIMNQLQAVALNEGLRCKKRLWREHGRQQLEAFRLAPWASRRRRDLLELMDRLNPTIAELSQAIEQEAEKCPEARRLMTHPGVGALTALAFVLIIGKAERFGSGKQVASYLGLVPLEDSSGNRRRLGHITKQGSSMMRFLLVEAAQVTVRSVPE

SEQ ID NO: 291331 - protein, 369 aa, unidentified
MKKIVKYIGLDVHKNSISIAIAEDGQKRKVNFYGVINNDMDQLHKFLRRQISQGAETRCVYEAGPCGYNIYRSLKDKGINCVVIAPSLIPKKSGNRIKTDRRDAETLARLHRADELTPVYVPSMEDEALRDLVRAREDSVNMLKRAKQQLGAFLLRHHVCFSGKSKWSKAYFNWLADISMSHPAQQITLQEYIDMVQDGKERVERISEQIRQLSGQTQLNTLNMSLQSLRGVSQIVSAVVVSELGDLTRFESPSKLMAYLGLVPSQHNSGDKKRPGKITKTGNGHVRRALVEAAQAYRLPARKSRAIAKRNEGLPQEICKIAWQAQVRLCGRYKRLVFRGKNSNLVKIAIARELAGFMWAIAHAIPKTA

SEQ ID NO: 291332 - protein, 389 aa, unidentified
MKIFVGIDIAKLNHFAAAISSDGEIIIEPFKFTNDADGFQLLVSKLESFDKNSIIIGLESTAHYGDNLVRYLVAEFYQVCVLNPIKTCQMRKNNVRKTKTDKVDTYVIAKTLMMQDDLRFITFFDLDMMDLKALGRFRQKTIKQRTRLKIQLTTYVDQVFPEIQYFFKSGLHQNAVYALLKEAPSPKEIASMHMTHLANLLKVNSHGHFTKELAKELRVLAQKSVGANDSAISIQITQTIQQIELLDSQLEKIEAEMTDIMKFNDSVIMTIPGIGYINGGMILGEIGDIHRFSNPNKLLAFAGLDPSVYQSGNFQAKTTRMSKRGSRVLRYALVNAAWNVVRNNATFKAYYDAKRAEGRSHYNALGHCAGKLVRVIWKMLTDNVEFNLK

SEQ ID NO: 291333 - protein, 262 aa, unidentified
MSEEAFVGIDVCKERLEVAIRLQGTSFSLPHSEEGLEELLTRLRELSPALVLLEASGGLEAAVAATLATGGLPVVVVNPRQVRDFARATGRLAKTDRVDAQVLAHFAQAVRPSPRPLPQEQQQAIVSLVTRRRQVLGMLVAERNRRERSPLPIRRRIELHIRFLEGELKELEGELDDAIRGSPLFREKVDLLRSVPGVGPTTACALLAYLPELGQVGRKAIACLAGVAPLSWESGRRSGRRRITKAAGPGLGRPSTWLPWWP

SEQ ID NO: 291334 - protein, 341 aa, unidentified
MSLSGTSVGIDYHQHSLQVAVMSSDGRLLGNKRLSNDVGDVISYVAKFGSVQSVAIEACTGSANFAHDLRNQSTWEVRLCHPGYVQRMRHNPDKTDKSDGFLLSDLNRVGYLPEVWLAPEETQDLRTMVRYRKLLVEQRKEVKLRIRAILRQHRIKKPSEIRCWWTKGALKWLGKLQALPAHTLWVLRKHLGEHERITTAIGEAETRLSETTTRDMIVRNLKQIKGVGLVGACTIRAEIGTVSRFRTGKQLARFCGVTPRNCSSGERQADAGLIKAGNPGLKTAVIEICNSLVRHNTHWREFALRLSNAGKPYGVVVGAVANRWVRQLYHELKRVEQQPPA

SEQ ID NO: 291335 - protein, 408 aa, unidentified
MNAVGIDVSKGKSMVAALRPMGEVALLPQEFLHTGVGLEQMAYAITTLGEDTRVIIEATGRYHEPVAAALHKYGIYVCVLNPLYIKQSGGGSIRKVKTDKADAMKIAKYGLDNWVDLREYTPMDTVRQQLKLCSRQYNLYMKTVVSLQNNLISLTDKTFPGVNELFSSPERADGHQKWVDFVMTFWHCDCICRVSEKAFTERYQKWCKRKGYHFSTEKALDLYAGSCGHFTTLPKNDNTKLLITTAAQQLLAGKMTLAALRAEMTRLAMQLPEYNTVRAMYGVGETTAAQLMAEIGDVRRFPRRSSIVGFAGVDPGVDDSGKHSAKSVPTTKRGSPHLRKTLYQIVCTYLRKAPANELVYQFLEKKRAEGKPYFVYMTAAQNKFLRIYYARVKECLAAFDAQQDTTQS

SEQ ID NO: 291336 - protein, 397 aa, unidentified
MRTMKFIGIDIAAEVHVVAVVGDDGGVVIKATPFHEDVDGYQKLFALLGGSEQALVVMEATGHYWQNLFAALTANGFAVALINPLRTRRFAEEDLVRAKTDAIDALSLARFGAQKRPPATRLPDETTAELRELVRLRDRYVQDLGDRVRQLHRIVDLGFPEFTRHIKELEGALATTLLRQYPTAAAFQKVSPRQLAKLVYDGHHRVGEELATALVQAAKVSVGRHHGAAYRLQAEHACDDIAVLKSRIKQLERDIGGTIDKHDIGALLLTIDGIGKTTAARIIAELGDPSAFHSPAALAAYVGVTPGTSQSGKRRPIRAPIGPVGHAQLRAKLWMPVLTAVRRNAWLKAFYDRLIARGKLPKVALVAAMRKLLAAIYSVAKNRRPFTPMLSAAEATA

SEQ ID NO: 291337 - protein, 394 aa, unidentified
MKLVGIDVGKNSHHFCVMDKETGEFNVAPSSFSNNKEGFDFLINSLKPYSKKSILIGMEDTGHYHVALLKFLLSNGYTVALINPKTTDLARKMEGGITKNDKLDTITICDVLDTPERKKQYRITKVDRFDLYEQRQLTRHHHNLKEELNVYCNRLQKSIDLVFPEFNTLFSSKYGIVYMNLLKTFGSAEAIASTDIRTIRKCFEIKGRGNRISLTPEKLKECAKNSIGISSEVETIQIKHLVSQITLIKEQIAEIDKKIEEFSITNNSPILSIPGISHFSGTSILAELGDIGNYSKPSQIIKFAGVAPYHYESSQYNAQHTAITKKGSKYLRKTLYQIILTVINNNPVFKKYYLLKISQGKGHRCAQGHCIRKLLRIIYHLLETGQSFDPALLR

SEQ ID NO: 291338 - protein, 352 aa, unidentified
MRKFYGCDAHKKYSVFAFMDEEGNHGPFLRVENNRDEFNFFLETLPPGSLIAVETVGNWYWMIDEMEKVGHKPKLTNAGKAKHMMGQINKTDKLDAQGLALLLRNGTLPSVWIPPGEIRDQRELPRLRMALVGTRTKLKNRIHAALAKYAIQITEVSDIFGVRGRKLLQRRINELPLYTRRSVEVQLKLLDQVEEQIQECEKDIKEVIEETPAMKLLTTLPGVGPILAIVIALEIGDVERFPRAEKLASYAGTVPRVKESGGKVRYGKVRPDVNRYLKWAFIEAANSAVINQTRWADRHVVRLYLRIMRRRGHGKAVVAVARHLAEATFWMLKKNEPYKEPKRMEKVSSTRE

SEQ ID NO: 291339 - protein, 453 aa, unidentified
MARKIRKLKMKKIQPLHTLQPNAAGIDVGATEIFVSVPQDRDVEHVRCFTTFTDDLHKAARWLKKCEIKSVAMESTGVYWIPVFQILDAHGFDVMLVNAHHVKNVPGRKTDVEDCQWIQYLHSVGLLRGSFRPGQDICSVRSLLRHRGNLIKIASTHVQHMQKSLTQMNVQIHNVISDITGVTGLTIMDAIVDGQRNLNKLANLKDPRIKASKDTIKKSLKGDYRPEHIFTLKQALQSYRHYRQMIYECDIEIEKHLKDLESRIEPDQPARPPGDIKPRGNAPNFDLKHHMHRLLGTDLTLVDGIDVGTAHTIFTEVGPDLSCFPTPAHFCSWLGLCPNNKISGGKILSSKTKPGSNRVAQVLRMASISLLRSRSYLGEFYRRMRAKSGAPKAITATAHKLARIVYHLIKYQKAFDQSVFNKEQEMHKIRMEKNLRKQAKYLGYQIVPAATMS

SEQ ID NO: 291340 - protein, 392 aa, unidentified
MICVGIDVAKDKHDCFILSSDGEVLADVFTVSNNLDGFETLLHRIRSCALPTDIKVGLEATGHYSYNILGFLLDKGLATYVINPLHTNLYRKSLSLRQTKTDRIDARTIASMLMSDVDLKSYTDTAYHNEELKSLTRYRFDKVKERAQLKQSISRLVNILFPELESLVPTLHMASVYAMLCEFPDARQIADVHLTHFKAVLFDASKGRYDREKAVEIRDAARRSVGSAMPAKSLELQHTIRLIRELDKEIDEIETAIKTIIDEMAPPILSIPGISYRMGAMILAEIGDFSRFDSPDKLLAYAGLSPSTYESGKLKASGAYAHMEKRGSRYLRYALFNATKFVCHWEPSFAAYLAKKRTEGKHYNVAISHAAKKLVRVIYALQKSGQAYHIPA

SEQ ID NO: 291341 - protein, 343 aa, unidentified
MQIHSVGIDLGKTTFHLVALGAAGKVLVKKKFTQRQLLTFTANLQTSLIGLEACAGAHFLGRALQKQGHDVRLIPAQFVKPFVKSNKNDFVDAEAIAEAVERKNMRFVPIKTDDQLDLQAIHRVRDRLISRRTAVINQLRAFLLERGMVFAQTPAKLKAAMADVLENADANLTPQIRNLIDILWSEWKTVEQQIKELTEQLERISDADAGCTRIRQIPGIGPIVATAIVAAIGNGAAFRKGRDFAAWLGVVPRQYSTGGKAKLLGISKRGNIYLRKVLIHGARAAVLRIKRDRAAIGAWLDRLDARAPKNVVVVAMANKLARIAWAVLSSGQDYRPSPIISAA

SEQ ID NO: 291342 - protein, 316 aa, unidentified
MVGIDVASMHVDVATIGAELPAALGRVNNDADGHSALADGLARLRPALVLLEATGGYEAALACALQAAGLRVAVVNPRMARDFARAMQRLAKTDRIDATTLAEFAGVLARRPDCERFIRPVSVPEQQDLAALVTRRRQLVTMQLSERQRLRLARPVTRPSIEALLEAIARQLDDVDGEMARHVEQHHAQMAKLLQSVAGIGRVAAATLIGELPELGRLNRRQIGALVGVAPYANDSGASRGRRRIVGGRFEVRRALYMATLTATRHNDAIRTFYERLVAAGKLKKVALVACMRKLITHLNAIARDHLNAQVRPINT

SEQ ID NO: 291343 - protein, 379 aa, unidentified
MEAQVKKIDFTGQNIYVGFDAHLKSWKVTIMAEGIVYKTFTQPPQPEVLNNYLKNNFLGGTYHTAYEAGFCGYWIHDKLLSFGIKSIVVNPADIPTTDKERVQKEDKRDSRKIARSLSSGTLMPIYVPSIHAQRDRSLLRTRSMLVRDLARYKNRIKSFLFFYGISIAPSFSNPQSHWSNRFMLWLESLEIDNGSGKEALRILINECKNLRISILSVNKQIRQLSNTERYKDNVKLLKSVPGIGLLTAMIILTELEAIERFSNIDKLCGYIGLVPSTKSSGEKERTGDITPRGHNVLRTAIIESSWTAIRNDPSLMHSYLTFIKRMESNKAIIKIAKKLLSRIRYVLMNQKPYVCLTEKETYKNKNMSETVTCPLQSLN

SEQ ID NO: 291344 - protein, 460 aa, unidentified
MAQSKKQKQKKKNRKKGMQPLPIMEPNAAGIDVGATEMYVAVPPDRDPDAVRCFQTFTRDLNELADWLQRCQISSVAMESTGVYWIPIFQILDEHGIKVCLVNAKHVKNVPGRKTDVSDCQWLQHLHSVGLLKASFRPADQVCALRTVLRHRDALVKLSSCAVNHMQKALDQMNIQLHHVISDITGVTGLAIVDAILAGQRDPKVLAELRDKRIKASEEVIVKSLEGDYRKEHLFTLRQSLEGYRWHLQQIQECDQQVRQMLQEFDSQVDVTANPLRPPMRRPHGVSNPGLKAYDVRTEMYRVFGTDLTAIPGIQALTAQVIFSEIGCDFSKFSTAGDLVSWLGLCPNERITGGKVLNAHTRNVKNRVADVLRLSAQSLEYSDSFLGRFYRRMKAKLGPPAAIVAAAAKLTRVIYALVTKRQAYDDTRFAECEQKHKVAKEKKLRAQAKALGYELVPIAA

SEQ ID NO: 291345 - protein, 373 aa, unidentified
MILPKRNLQKNYIEEKRKEIPVNHSGIDLHKDNCFMVTTDDAGLIKGQGRIPTEKEEVIKYFKNIPGEHRAVVESTSSWYWLNDLLSEAGIELQLAHSKYLKAISYAKVKTDKVDANTLSKLLRMDFIPQAHKISEERRAQRDHIRRRLSFVEKRTSCYNSIHRIGEKFNCDKEINIERAKIPEDLPEENKMHLKFLFQQVELINLQIYEIEKSLQSKLMPDVDMRKLLAVPGIGPITAYSLYLEIDGIDRFESVKNFFSYCRLVPGAKNSNRTKKQKSGCKDGNRYLKVAFTDAGVHAVRYSPEIKSFYNRQLRKHNKPIARTLVAKELAKVVFYILKKKEEYKGFKGKPNINPKKQYWPRLASPIALSGTS

SEQ ID NO: 291346 - protein, 403 aa, unidentified
MAAVMIGVDPHKGSHTAVVVSASEEPLGELRVRACAAQAGELVAWAAAWPERTWAVEGAGGLGRLLAQQLVAAGQRVLDVQPKLACRVRLLQAGDTNKNDPNDALSVAVAALRSRACRQVTADDYPAVLKVWSKRHRDLGRTRNQVACRLHAVLCDLVPGGHSKEISAAQAAKILEQVTPSGAVARARAELAAEFLADLRRLDAQLRGTRKKLAAAVKDSGTTLAQVFGVGPVVAGTIIGDVGDVARFPGRDHFAAYNGTAPVEVSSGNRKACRLSLRGNRRVNHAIHMAAITQIRHRHSDGRAYYDKKIAEGKTHKEALRSLKRRISDAIFARLQADARQVSAKGPGGQPGNGSDSSAASSHPERQLFGPATPGPDTTIRPGTTAGTPSPSKPTSKKTRPAT

SEQ ID NO: 291347 - protein, 325 aa, unidentified
MSKIIGIDISKSTFDVSYLEKDKWEHKVFKNQSTGFEQFKKLIDSADWIVMEASGPYYLQLATFLNTSSYNVCVLNPLIIRRYSQTRLYRAKTDKKDAKTIAEYGAQYDLKKWTPDSKESTEIKQLYTALELVKKQRQQTKRQLESFESTGLLDSSLRKELKQIGVLLTRRIDKLGKKIEQIGELTYKDTIEKVRTIPGVGLKTAIMMCVITDNFTKFENHKQLTAFVGFSPRLYQSGTSVKGKGHICKMGKPQIRKLLYLCSWSAKRVNKNCIEMYTRLKEKGKPERVIKIALANKLIKQIFAIAKNKQVYNENHQNLHRLTIG

SEQ ID NO: 291348 - protein, 419 aa, unidentified
MERSRSKVCGIDVHKRFLVATILERNGLKKTEKFQNNLEHLLKIREWVITEECQAVAFESTGEYWVSLYEVLQGYVEIIVANSYHIKWIPGKKTDTIDSEWIAELALNDLISPSRILSREKRDLRALTRLREKLVNERTNHKNRVHKVLDSACIRLSAYFTDLFGKAGLNILKCILSGVPPEEIVRKLPKRLHPQSDAILDAIRTQLSTHQLIQLQTSVTMIDLLNEKIKALELTILNDIQKERRKLQILMSVPGIGTIGATTLLAEIGDVNDFSSPDKLTKWVGITPRVYQSADKLHTGSITKQGSKHIRWILVEIAHSCIRTKNTALRIFFDRIFNRSGYKKAIVALARKILKLVWHLLTNDELYQEKNTLFSKSSRLPNSREPVSFSVSAAIELLIKAGFQIIGGDEHTTKKDLGT

SEQ ID NO: 291349 - protein, 338 aa, unidentified
MSVALLSIDLAKNIFQLYGVDERGHPELSRRVSRNKLLEAVVCLPCCRIVMEACGGAHYWARRFTAMGHQVQIIAPRFVKPFVKSQKNDRNDAEAIVEAASRPTMRYVAVNSVEQQDIQSMHRIRSLLMRDRIAQINQIRGLLTEYGVVIAQTPLKVRTQLPTIIDDEHNELTGLTRTMMRDMYERLALLDKQISRYDELIHQVHKASPASQRLEKIRGVGPLIATAVIAAAGSAKEFSNGRQFAAWLGLTPRQHSSGGKDRLFGITKRGNGYLRMLLVHGARSVVQQAVKHTDTLSRWILEVQARRGTNIAVVALANKTARTIWVLLARGLEYVPPA

SEQ ID NO: 291350 - protein, 341 aa, unidentified
MEHVAIDLGSSKSQVCVRSATGELLHEARVPTLDLSAFLRSRAPSRVVLETCAESFRVADAARQAGHEVRVVPATLVRQLGVGQRGIKTDKRDARALSEASCRVDLPSVHIRSQLSRDRLSRLGMRHALVTARTQLVNTVRGWMRTELTKVRSSTACFPANVRKALVDRPEGMPVYVEHVLTSIDTLTAQIAEADAELEKLTKEHEVCRLLRSVPGVGPVTSMAFVAVVDDVQRFTTAAGLESYLGLTPGENSSSNRVRRTAITKAGPALLRHTMTQAALTLWRVRPLDPACLWADRVKARRGSGIAIVALARKLAGILWAMWRTGTPYDPQRAATPAPAQ

SEQ ID NO: 291351 - protein, 341 aa, unidentified
MEQYVGLDVSMRETSVAVRQNGKRVWRGKCPSDPKAPADVIRQRAPDAVRVVLETGPLSTWLYHALKAEALPVVCIDARHAKAALDMAPNKTDANDADGLAQIAEVGFYREVRVKGYAPMLARTLVGARGQLLRISIQLSNQIRGVMKTFGLIVPKGAGRVFETHARALLGTNEAVARVVLPLLEAWRAVRARAAELDRQLIAAARTSPACRRLMTIPGVGAVTAASFVAAVEAPENFGTSRAVGAWLGLTPRRYQSGEADYDGHISRRGDGHLRALVYEAAAAVLTRTRTDSALRSWGLELKEKVGFKRAAVAVARKLAVIMHAMLKTGAAFDPAPSTTA

SEQ ID NO: 291352 - protein, 318 aa, unidentified
MTHTTQTTALYVGIDVSQNTLTVAIYPTDEVWTLVNDPHSHTALVQHLAQLPVQRVLLESSGGYEKAVVSALQQAGLPVVVVPAQRARYFAKSMRGDLKTDRADARMLAYFACCYPVQPVAPCSPVQAELKELWARREQLVQQVEREKKRLHTVQSEAVRASLERMLAVLKDEIAQIEARVAELIASDADLSQKAALLQTAVGVGRVVAYGLVAELPELGQVSHRAIAALAGLAPVRCESGAWVGRARVRGGRPRVRRLLYQAAVVAATHDGRWRAVYEALVGRGKAKKVALCAVARQLLVVLNAMVRDGRAYERVQE

SEQ ID NO: 291353 - protein, 403 aa, unidentified
MVYVGVDWAEAHHDICVVDETGHVLAKRRVPEGLEGVGKLHALVAEHAEDPASVVIGIETDRGLLVGSLVAAGYQVYAINPFASSRYRDRHATSGAKSDSGDARVLADLVRTDRHKHRPLAGDSNFAEAVQVLARAHQGLVWTRQRQANQLRNALREFYPGALNAFDDLDAADTVAILERAPTPVLGRALSQAKIVSALRQSGRARNLETKAAQIQAQLRLPQLEAPALIAEAYGHSVAATVAVIKQLNLQIAALERELAANFEMHPDAEIYLSLPGLGLVLGARAMAEFGDDRTRFLNPKARKNYAGTAPITKASGTRKVVLARVARNRRLADACYLWAFSALTHSAGARHRYDVLRARGQTHHQALRALGNRLVSILHGCLTNRRLYSERPAWLPRMEVAA

SEQ ID NO: 291354 - protein, 372 aa, unidentified
MENDTTVFVGLDVHKDSITAACIGARPSDHLIELGTVGTQQYAIDRLIKKLSGRGRLQFVYEAGPCGFWLERYLRDRGEECLVAAPSLIPKRPGERVKTDRRDARNLALALRAGTLTAVHIPTPEQEAFRDVVRAWQQSKRDITAAKQRLKSFLLRNDIRYTGRATWNAAHRRWLSELVLPRAPQQIVFQELVDAINERERRRDRLEHELDALAPSWAGYRLAQALLAFRGIRKTVAYTLIAEVATLARFSHPNRFMAWLGLVPSEHSSGATRRQGAITRSGNRWARTLLIEAAWSYRYSPKVSGVIERRAQDIDPAIRDLAWKAQLRLTHKYRRLIAHGKHKNVAVTAVARELAGFLWDAARIVERSSTQV

SEQ ID NO: 291355 - protein, 370 aa, unidentified
MLKIVYPICCGIDVHKGFIVACIASTNEQGVTTYQSKRFSTFTNDLRRCAVWLAQNHCKDVCMESTGKYWIPVYNILEATCTIVLAHPKYVKAIRGKKTDQKDAKWIADIFKHDLVSGSFIPPADIRQLRDLMRYHWKLTNFTTGEKNRAQNCLTVSNIKLDDVFSDVFGKAASAITTRLLESSEPFDVTPYLTKNIKAPVEKIQAAVDGEMCAEQAEKLRIIRSHMDALELCKLNLQSLILTTAEKYFPQINIVATAPGIQAFSAIGIISEIGVDMSVFPTSKHLCSWAGLTPQNNESAGKKKTTRISRAGAYIKPLLVQCALSAIKAKHFPEVRRRYLAIKKRRGPQEGGYCHCKDAAHCHLQYAQEK

SEQ ID NO: 291356 - protein, 318 aa, unidentified
MAWIGIDVAKAELVVSGRPLLAAPETWTVANDASGIDALVTRLAPLPLAGIVLEATGGYERAVVAALAARGLPVIVVNPRQVREFARATGQRAKTDRIDAALLALFGERVQPAQRPLSDAAVTDLAALVLRRRQLTDMLVAEKNRLGLARPAVRKSLKKHVAYLERELHLTDADLRDAIEASPVWRVKDDVLQSAPGIGAVTAQTLLATLPELGTLTHKRIAALVGVAPLADDSGALRGKRAIAGGRGAVRAVLYMATLVATRYNPVIKAFYQRLLTVGKPKKVALVACMRKLLTILNAMVRDHRPWSVPSPSAVPQP

SEQ ID NO: 291357 - protein, 359 aa, unidentified
MRGQRNEISFRGQKIYIGNDVHLKSWSVTVLSETSVLKKFSQHPSPEALHGFLARSYPGAEYHSVYEAGFCGFWIHERLTALGIDNIVVNPGDVPTKSSEKLRKSDAVDSSKLARSLRANELKGIYTPDSASLEMRSLIRLKNSITKDTTRQKNRIKSQLRYLGIGIPQEFLEPFSNWSKRFIAWLKEVETLTPSGRQAFDIQIRHLEELRRQKLEMTRALRTLAKTDRFREPLRLIMTVPGFGQATGMAFLSEICDIARFRNAEQLAAYIGMIPMCHSSGEKDGTGDITVRRNAVMRCNLIEAAWVAVRQDPAMNLFFTEQCKRMPKSKAIVKVARKLVNRLYFVLKHQTDYVNSVMS

SEQ ID NO: 291358 - protein, 459 aa, unidentified
MLNLQEVIMSSRSIKPAGLPVIHDHAAGIDIGARFHVVAVPPDLCDQPVQTFQAFTGDIERMADWLVSIGIKTVAMESTGVYWVPAYEVLQSRGIEAIVANAREARTVPGRKSDVNDAQWLQRLHACGLLRASFRPAPDIAALRAYLRLRERHLDYAAAHIQHMQKALTLMNLQLHHVVSDVTGVTGMKIIRAILGGQRDPQALSTMRDVRCKASTETVRAALVGNYQPEHLFCLGQALALYDFYQARVEECDAQIERTLADLNADKSSPVAPLPKPRHKAKQPNAVSFDTRPAMYQLTGVDLTQIHGIGPYMALRLVAECGTDLSRWPTVKHFTSWLTLAPGCKISGGKVLSAHTRKTTNRVSAHLRLAAVTVGRTDTALGAFYRRLAARVGNAKAVTATARKIAVLFYNAMRFGMNYQDPGADHYESRYRERVVKQLHRRAAQFGFTLQESAPQSVS

SEQ ID NO: 291359 - protein, 316 aa, unidentified
MPDQRENAVNVGIDVGKHQLDIAIYERDLHFSVPNDAQGIRKLLGRLARYTLARVVVEATGRREYELVLAAAQRGFPVIICQPIKVRRYAGAIGLLAKTDKIDARLLADYAATLQPEVRPLALGNIRKIKDMIARRRQLIEISTMEKNRLDVMPRNLMADIRRHVRHLQAQIEKLDHLIAELVEQVDEWREKRDLLLSVPGIGTQVVNTLLADLPELGTLTNKQIAALVGVAPFNRDSGAMRGKRRIRGGRASVRTILFMAMLTSVQHNPVIRGAYQRLVAAGKHKKVALTACMRKMITILNAMLRDQVPWRVEHA

SEQ ID NO: 291360 - protein, 402 aa, unidentified
MNTEDIEVFIGIDVGKSEHWATALSREGRKVFDKALPNDEERLRALYKKLADHGHLLVVVDQPATIGALAVAVAQDMGITVGYLPGLSMRRIADLTPGSAKTDAKDAAVIAGAARSMPHTLRAINASDEDAAALSMLTGFDLDLARQVNQSANRIRGLYTQIHPTLEQVLGPWLEHDAVLEVIAAWPTPADLKRAGKARIDARLKKHGCRRHATWAGQIVSALEHQSVVVAGTDAAAVVLPHLARQLISLHAQRADVAAQVEALVEAHPLYEVLISMPGIGVRTAAVFLAETLGKTFDTGAQLASYAGLAPVTRRSGSSIRGEHVSHGGNKRLKRAMFLSAFASLRSDPVSRAYYQRKRDQGKRHNQAVLALAHRRILTLHAMIRDGALYDPQPATKLPAAA

SEQ ID NO: 291361 - protein, 412 aa, unidentified
MQDILTCAMGLDVHRDVIVACLARGELGTEPEIEIRSFSTLIPEMRKLRDWVLEVECRHVAMESTGIYWQPIYEMLEPCFDGQINILVVNARHMKNVPGRKTDMRDAQWIATLLRAGLLKGSFIPDKTFRELRHLTRYRKSIVHDITAQKNRIDKFLQSSGFRFTAFLSDAFGASGRNIIRHLMEYGDISREALDKCLKTQTRKRIDEILVALNGSLSEHQRSFLRMIFEHLESLERHRHTVEDAISEEIVKHEAALNLLCSIPGIDITAAVSIIAEIGTDMSAFPDSQHICSWAGLSPGNNESAGKRKSAHINKGNPYLKSMLCEVGWVIAGKRTLYLSGWYWRIKQRKGAKRATIALARKLLALIYTMLKTGTPYNEECFEIRRKQSERKRASRMVNELQKLGYFVVAPD

SEQ ID NO: 291362 - protein, 337 aa, unidentified
MVYVGVDLHRKRSHVVALDPTGQVLVSRRIGNAPAEFLRIFGELEPQPIQVAFEATYGWSWFADLLADAGIPAHMAHPLATKAISAARVKNDAVDAKTLAHLLRTNLLAEAWIAPPAAREARRQVRTRAGLVRMRSRVQSQLHALLADLGIIPELTTLFGPAGRRWLAELQLPVGARGRLDAGLRLVDAITVEVGRGDADLRTAFAGDSRTRRLLPIPGIGLVTAATVVAEVWDIQRFPSPERLCSWAGLTPGERTSDAHTRRGHITKQGSRWLRWMLVEAATTAVRDPQLGRFTAQIAQRRGTKIARVALARRLLTLCYYALRDDGGCRAYPVKAR

SEQ ID NO: 291363 - protein, 334 aa, unidentified
MENIALIGIDLGKNSFHIHCQDHRGKAVYRKKFTRPKLIEFLATCPATTIAMEACGGSHFMARKLEELGHSPKLISPQFVRPFVKSNKNDFVDAEAICEAASRPSMRFVQPRTESQQAMRALHRVRESLVQDKVKTTNQMHAFLLEFGISVPRGAAVISRLSTLLEDSSLPLYLSQLLLKLQQHYHYLVEQIKDLESQLKRKLDEDEVGQRLLSIPCVGTLTASTISTEIGDGKQYASSRDFAAATGLVPRQYSTGGRTTLLGISKRGNKKIRTLLVQCARVFIQKLEHQSGKLADWVRELLCRKSNFVVTCALANKLARIAWALTARQQTYVA

SEQ ID NO: 291364 - protein, 458 aa, unidentified
MKAKRTSAKNHSGMLTVHANAAAIDVGATMHMAAVGADCTSDPVRSFGTFTGDLHRLADWFAECGVKTVVMESTGVYWIPIFELLNERGVEVFLVNARDAKHVPGRKTDVSDAQWLQRLHSHGLLRASFRPKGEIAELRAYIRQRERLLDYAASHIQHMQKALTEMNLQLHHVVSDITGATGMRIIRAIIAGERDPTVLALLRDTRCHAGVDIIEKALTGYYRAEHLFGLEQALALYDEYQQKVSACDMRIEAVLMSLASLRGHRGEPLGSPRRRMPRQANGPAFDVREALYALLGKDLTQIHGLGPYLALKLVAECGDDLSAWPSAKHFTSWLCLAPSNKISGGKVLSSQTRRSGSRVAALLRLAAVTVGRTETALGAFYRRLSARIGKAKAVTATARKIAVLFYNALRHGMDYVDPGASYYETRYRERVICNLHRRAKAFGFILQPDTVASEVAVS

SEQ ID NO: 291365 - protein, 303 aa, unidentified
MNHIGMDSHITTLEFAVVNEAGRLVKADRVATSVNGFIEFVRTVPPPRTIYMEEGTLAAWSLETCVRFGEKLVITDPKKNHWIGSSGQKDDSIDALKLAHLGRGGYIKEIHHPVGQRRRFRELMIAYHDTVKSTTRIKNKIKARFRQNGIPCTGTTVYSETYREEWKAKLPQEATLLLILDGLWRQLEQSEQSEKELLAAARAPAKRYPEIKHFQALPGIGFIHAATISAILETPYRFADKRKVWMYSGLGIMRRSSGGKVYSEKLSTDYNRLLKYSIKQAAESAIQAKDNPFRPFPSGLLPA

SEQ ID NO: 291366 - protein, 358 aa, unidentified
MEIVVGIDVSKDRLDVHVLPSGEAFSVGNDHAGVEELARRLAAFSPTAIGLEATGGYEQLAVATLASAGLSVVVVNPAQIRAYANALGKRAKTDPIDAAVIAAFIAATKPELRPLRDAETRTLADLVTRRRQIVQMIVAEENRARTVNARQAQKSIKRLLAALRRELESLDADLDDHIRKSPLWRVREKLLSSVPGIGPTVARTMIAEMPELGSLDRRQIAALAGLAPWTRQSGTWRGKSFIGGGRSRVRAVLFMAALVAIRHNPVLKAFRDRLVEVGKPKIVAVVAVMRANHSQRHHPRPKTMANSLTAKTVALPVKDGEKGGPQPRRSFCDAPGGETINASAFLPVLHGEKCPAGQ

SEQ ID NO: 291367 - protein, 406 aa, unidentified
MERVPIHKRVIGLDVHQAQITACAILEEADGETRIEQRQFGAFKKDRRALAAWAAALDPDEVVMESTGIYWKSPYAALEAMGIRATVVNARHVKQVPGRKTDVGDAQWLATLARAGLLRGSFVPPAKLRELRVISRQRQKLVSLLTAEKNRMHKVLTDAGIRLSVVVSDIHGQSARAMIKGILDGQAPHEVLNLASRRLKASREEWHDALQGELTASHGFVLDELLRPIEELEARIARFDARLLGELASEKNALALLQTLPGVDVIGAAMLLVEIGSDMSVFGTPDRLASWVGLCPGNNESAGKRKSGHIRKGNPYVRRLLCEFAQAARRTKSAFQSKFQSLIVRRGYQRAIVALAHKMLRTIFFMLKRGEYYRDSATHYEQLSAQRNASRWIKALTRFGFIPAAA

SEQ ID NO: 291368 - protein, 375 aa, unidentified
MKTYAIDWATRKDLAIYDGKKVKKISNTIGEFEKFLDNIGGGAKRHLPKRASGEMSAPVLLFEFGGADTYKIMAYRAGFTVLQVPGKKVHDYRESLGIEKTDANDAKLIYDFYMKECGDSATNDMPQSVTGLLPIPENKSGESAAMELPQSAIQIMPLPSSFTPFTEQSADIAEVKILFRRHEDLKKVMVREKNKMFALKRQYELTNIDKKTIKGLLLDAEYSIVGKEREIERLKKVLKSKIAKFKVWDSYLKDVKGVGEFIASGLIGELGGRQFDSNDSLKHYAGMVKKSAHTDYNRYIKAVLFQFAEGIIKARTPKWRELYDNMKIYYQKKHEDWSKGKVNNYAKKFIETKFLCEFWKQWNRKEAMLGGPCKS

SEQ ID NO: 291369 - protein, 362 aa, unidentified
MSAFGGIADVNHCVGECPLLNEVITIGLDLAKNVFQVHGVGDAGAVIISKRLRRRQVIPFFKKLPSCLIGVEACATSHHWARELGALGHEVRIMPANYVKPYVKRNKNDATDAAAICEAVTRPTMRFVAVKTKEQQSLMMLHRTRSLLVRQRTMLVNAIRAHLAELGIVAPVGLRGMKALLAVIADAKDQRLPPLGRTCLDSLVESLMNLEQEIAFAERHIHAWHRSNAASRHLESIPGIGPIIATALVASVSDPSIFKSGRELAAWIGLVPKQNSTGGKERMGRISKQGDKYLRWLLVAGAMSVIRHGRKTNFKNNPWLADLVYRKPAKVAAVALANKNARTAWALLANGEVYRQPAAAKA

SEQ ID NO: 291370 - protein, 350 aa, unidentified
MVLHAGLDLSRKRLDYCLLDERGGRVEVGAAAPDADGLDGFARRVERRYGPMVEVCAAIESMTGARFVHDTLERCGWEVEVADAIKVKGLAPLACKTDKIDAWVLAELSRRALVPAIWLPDFAVRQERERARWRLHLVKHRSMLKHRVHAQLMQFGHACPVSDLFGRNGRELLERLDFPDPWRADVLTAVALIDDLDRQITESERALRRLGADHPYVALLQTVPGIAWVLGYTIAAEIGDITRFPSPKKLCGYTGLCPKVRQSGTMDRRGPLAKTGPKYLRWALMEATTHACQHPVYRERYQHTKTRLGRQRGAKVAQIEIARRLAEAIWHMLTRNQPFAPAGAAIPLAA

SEQ ID NO: 291371 - protein, 538 aa, unidentified
MSRTCTRRSSARRPDADTASARPAPGAAMDPADATPQPTLPVNGLASPGITPIGVGIDTSRYGHYATFLRPDLQPAAADLAFVESAQGYAQLRQRLGGIAAKYGQVHFHFRVDVAGRYADNLLAFLWALPEPKTVSCGDPQRNKNYRAALFGHKKSDPVESAAAARYALTEKPQPMPVVSPQIRLLGHLASRLEAQARQVTRLVNQLHNLLARAFPELALVVADISAGWVLELLDRYPTAAKLARARRSALERIPYLPDQHIPHLLDSARISVASLSGPVAEELVRAQVRQVREAHVRQKSLEKMLAKAYRQLPEPNQLDTSIGFGEVTAAILTAKIVDPQRFVEPGKLVSYFGIFPVEAASGIDREGKPRAPKRMVMCPRGNDLVRRYLYMAALSAAQHNPAVRPLYQRARAKHPNHPGIAVGHAMRKLLHLALAVWKTGKAFNPEHYPWDQAAHLEGSAQPEPATAAATSTQAAGHNPETVPESSVVTAACATANVAAQPVVGNFTSAEADSASAPADGPALPPADAASPWIDFDH

SEQ ID NO: 291372 - protein, 457 aa, unidentified
MASKVASKKKRSSQSFPTVHTRAAGIDIGSRFHVVAVAPDLAEVPVQTFNGFTGDLHLLADWLMAVGVTTVAMESTGIYWIPLFEILEARGLEVLLVNARQVKQVPGRKTDVNDAQWLQQLHQFGLLRGSFHPAQDVAALRAYLRHRERLVEYAAAHIQHMQKALMQMNVQLQHVLSDITGATGMAIVRAIVSGTHDPAQLATLRDVRCKASTETVEAALTGHYQPEHLFALRQALALFDTYQEKRDECDVAIEAALSRLEPVEEASRETLPKARHRTRQPNEPRFDVRSSLFTVLGFDLTQVHGFGPHTALRMVGECGTDMSRWPTAKHFISWLTLCPGNKISGGKVLSSKSRRSSNRAAAILRLAAVNVGKTQTALGAFYRRLGARVGKAKAVTATARKLAVLFYNALRYGMAYQDPGVAYYEERHRKRVLIGLHRRAKQLGFVLAPIEAGDGVS

SEQ ID NO: 291373 - protein, 348 aa, unidentified
MTTVAERFDHVVGIDTHARSHTYCLVDTRTGAVVDTATFPTTTAGITRATSWITRHSNRTSLLAAVEGTSSYGAGITAALAATGIGVAEIRPLSRPSRARTGKSDPIDAEGAARAVIGEHLDRLAQPRRTGDRAALRVLLAARSLMDQQRTANRNALTALLRSTDLSVDARRPLTDAQIAVIAGWRTGRDDAPVRVFREEARRLARTVLDQTELLRINHRQLAQLTEALAPGLQSIPGVGAVTGAILVTAYSHHGRVRSEAAFASLGGIAPLPASSGNTTRHRLSRSGDRQLNRAIDVVVRTRLSCDPATRVYAARRRAEGLSRREIRRCLKRYVCRALYRELRTRMA

SEQ ID NO: 291374 - protein, 394 aa, unidentified
MILIGIDIAKNQHTFSIIDKETGEILSNPSVFNNNHEGFLLLIKKLSSYAKSNLLIGMEDTGHYHFALLKYLLDNRYTVALINPTTTDLTRKLQGGITKNDPLDSLTICDVIGSNQRKKPYRITKVNRFDLYEQKQLTRHHHNLKEELNIYKNRLQKCIDIVFPEFNSLFCSKYGIVYMSILKTFSSAKKIANSDIRTIRKCFEYNGRGKRITLSAEQLKTAAKTSIGIPSVAEEIQIRHLVCQIEMIEEQLSEIDKKIEEFSLQNNSPILSIPGISHFSGTSILAELGDICNYTKASQIIKFAGVAPYHYESSQFTAQHTAITKKGSRYLRKTLYQIIFPVINNNKVFTAYYNKKLAEVKGHRCAQGHCIRKLLRIIYHLLSTGQTFEPALLI

SEQ ID NO: 291375 - protein, 454 aa, unidentified
MEKIFKKEKLSGLPVINFHAAGVDVGSVLMVVAYTDSQGSQWLVRTGCFTKDLKELTALLKSEGVKDVAMEATGVYWMSLYEMLEDAGIRVTLIHPGHYNRSSEPKTDGKDSLWMHQYHSCGILRNSHIASELYRELRHYIHERNVVQHQKSETLTRIQRILTLMNIKLQHWISDIEGVGGLKMIRAIASGVTDPEQLVNLIDVKRFKASREVLVSSLEGIYKEHFVTLLKMKLQEYDFFVSQMRHYEIFIEETLKKITAKVEKPATVVSKPLVVTKSKYVRKNQYKFDAKEYLYQLLGTDLTKAEGMDEKMLLDVISVTGADMSKWPTEQHFTSWLNLSPRRMESGGKYLGNKKRRTTNPATQAFRLSAQSVGTKSKGPLGKLYRRLVAQKGKKTATKAVARKLAVTFYTLAKNKQEYNPLFSAKRMEEQEAKKISNLKKLAKKLGYSMQKIS

SEQ ID NO: 291376 - protein, 330 aa, unidentified
MLAIDLGKQSFHLHGIDTNGVVVSRKVSRTKLTEIVNELAPETIAMEACASAHHWGRLFTTAGREVRLINPRFVKPFVRGSKNDAVDAEAIYEAATRPTMRYVPVKSTDQQDLQSLHRIRERLIVQRTSLINHTRGLLAEYGIVLPQGAWRFAAQAPTAIEQTGLSGLGRELFEELLDQLCDANARLAKLDARIMEICRQHDDCRRLATLPGVGSIIATALVASIDDARHFRSGRELAAWIGLAPRQYTTGGKPRLGGIGRRANHYLRKQMIHGARAVISRLANRDDPRSAWLRGIVERRGFNKALVALANKTARIAWALLTKKEIYAAA

SEQ ID NO: 291377 - protein, 343 aa, unidentified
MEYYVGLDVSLKQTSICVVDQTGSVVREGVVDSDPEAISVYVRSKAPDAVRIGLETGPTSTWLWTELKQLGLPVICIDARHAKAVLKMQINKSDRNDAIGIARIMQTGWFKEVHVKDIDSHSVRALLASRALLVKIKRDLENHVRGLLKNLGLVIGRAKFNVFAVRAEELIEGRPELIAAIRPLLEARNAVGQQVSELDRKVMKLARHDAQVRRFMTAPGLGPITALAFKATIDDPARFARSRSVGAYVGLTSRRHASGEVDWTGRISKCGDAMLRSYLFEAAGVLLTRVPKWSAVKAWGVRLAKRNGLRKAKVAVARELAVILHRMWIDGTEFNWSKKEIAA

SEQ ID NO: 291378 - protein, 355 aa, unidentified
MNQEKYIGMDVHDATISAAVKNAQGKLLMECVLETKAATILDFIQGLRGTLALTFEEGILAAWLHDLLKPHVSRLVVCDPRKNALMRDGNQNDRADARNLAELLRTNQVKAVYHGKHGTRALKELGRSYLTLTKDSTRVMNRIKSVYRSWAIPCGGTSVYSRRHRAEWLAKLVEPAVRIRAEHLYQQLDSLEPVRQAARGELLGESRKHAAVKLLRQIPAIGPIRSALLVAILQTPHRFRTKRQLWAYSGFAVQTYDSGEYRMVRGKLQRNRERITVRGLNRNHNHDLKNLLKGAAISAIQRPGPLQDFYAALVEKGMRPSMARLTLARKIAAITLIMWKKGVSFDPKQLQRQAA

SEQ ID NO: 291379 - protein, 439 aa, unidentified
MHFSGEVEEREERLNKQKVVAWVGIDWADEGHEVWEYTVQTDSATCYAIKHTAESLQEWVNQLRIRHGGKPVAVVLEQARGGLIYALMNTGFMEIYPVNPESLAKFRKALYPSGAKSDPTDAELLGQMVRQNPGRFRAWVPGDEQTRSLQLLAEGRRKLVEDMTALTNQLTSVLKTYYPQALNWAGDLSSEQACSFLEKWPTLADLQKSRPFRIRDFYEKYGRPPRQVLDERVSQMEKAQPLTADPAVVMAGKMMVNAVVAQIRPLRAAIEKYDVEIERIFRQHPDRAVFESFPGAGKVLAPRLLAAFGADRDRFEAALEVQQFSGIAPVTERSGKTIWVHRRLACPKFVLQTFHEFANQSRRFCVWSKLYYQQQRARGKQHNAAVRALAYKWIRILFRCWKDRRLYDDSRYEKSLIKRGASLAPLLNVLDCGNGVQEL

SEQ ID NO: 291380 - protein, 442 aa, unidentified
MATKLVNPNAAGIDVASNEHVVAVREDKSKDSVRTFKGFTRDLHQLAKWLLSCKVETIAMESTGVYWFDLYTILLDYGFEVYLVNAHHVKNVPGRKSDVSDARWLQQLHTFGLLRASFQPDNLTRSLRNHVRLRKSIVQQMSRQTQHMQKAFDQMNIKLNNVIRDLNGTTGTKIITAILEGERDPKKLAQHRDRRIKASEQTLIKSLEGNWREEQVFNLQLAYDHYIFLQQQLKQCDAESEKIIQKMTSGNSPKSRTKKIQKSKNNPDFDVAQYLHAALGVDVTQIYGIKEVTALTIFSETGANLKEKFPTEKQFLSWVNVVPNNKITGGKVISSKVKKKKNVAGQAFRDGASALWRAKNPIGDYLRRKKAKSGAKKAVVATARKIAAIYYKMVTEKVEFNPLELTKGKEQYLQKRLKQLEMAKEQTQMLLSDFQQQNSLVI

SEQ ID NO: 291381 - protein, 441 aa, unidentified
MPQLWAGIDAGKTEHHCVVIDGNGTKLLSQRFKNRESAILTLMGDVASLPGGTDVAWATDLNHGGTGLLQTLLHSHAQPLFYISGRVVHHASGAYRGEAKTDAKDAVIIADQARTRRDVTLMRQADEVTAELRLLSARREDLVHDRTRAVNRLRAILVHYFPSLEGAFNYATTRGPLVLLTRYATPGAIRRMGESRLAAWLKGQGCWKSAAVAKTAVEAAREQTSVVVGEGAAARLVSRSARDLLRIRDEVAELDGEIEAALQDSRSADLLVSIPGFGRRLAADFLAATGTDLAAFETPDRLASFAGLAPVPRDSGKISGNHHRPRRYDRRLLNACFQAAFIASRNCPVSRSFYERKRREGKSHKQALIALARRRINVIWAIFRDQTHYEPVPAEQTGSVAAAVADAPAVCRPGANELEKVRCGTLAGTVEPISGEDRQRS

SEQ ID NO: 291382 - protein, 360 aa, unidentified
MQTKVNKNLFDGQSFYIGIDYHKKSWKVTILGEQYEHKTMSQNPDPDLLASYIKRNFPGGNYQAVYEAGFSGFTSCRRLKELGVNCMVIHPADVPTSQKEKLQKTDKADSRKLARSLRSNEFEAIHVPDQSLEADRALVRQRFRMMKDVTRTKNRLRSLLYQFGIDIPERFTSAQTRHWSKVYMNWLKELPIKHESLKKTFDNYIRIGESQRKELLLLNRQVRNLSQRDAYRDNYNLLISIPGVGLMTAITFLVQIGNIRRFKRLDDLCNYIGLVPRMYGSGDKMQTGKMVKRGRKELKIMLIEASWDAIRMDPALMAKFNELTKRMNKNKAIIRIARKLVNRMRFLLLNQKKYELGIIE

SEQ ID NO: 291383 - protein, 352 aa, unidentified
MAEHNTICAGIDIGDRYCQIAVLNEEGEVTEQSRIRTTPAAFKRYFQGKSPMRIAMEVGTHSPWLGLLLNDLGHEALVANACKLRLIHRNDQKSDEVDAELLARLCRFDPQLLYPICHKGKEAQAAWAVIRTRDALVRSRTLLINHARGIVKPTGHRLPKCASRYFSKIGDELPESLRPVLEPILQTVDHLTIQIQAYSRQIESIGQDQYPQAAFLQQVSGVGPITALTFVLTIGDPWRFAHNRAVGAYLGLVPRRSQTGQSDPDLPITKAGNGYLRNLLVQCSHYILGPFGPDSDLRRSGERIASRGGKNAKKRARVAVARRLAVMMLSMLKTGEPYDPLHGSDDDEVSAA

SEQ ID NO: 291384 - protein, 344 aa, unidentified
MLFYCGIDLHAKESVLCIIDTQDTIHFRDKIPNQINRILEVLDAFTPRPKVALEATLNWYWLVDGLQEAGFEVKLAHPFGLQVIKKAKVKTDNRDAFHLARLLRLDALPESYIYPKETRPLRDLLRKRQKIVSLRAAEYTSLHRTLLQHGIVDIPATQAKEFKAKEIEQYFEHPVIQCRCAMELERIRFYTRQVEILEEIIFGNAMEHQDFLLLQTIPGVGKLLASIILYETGDVNRFPTAKQYCSYSRVVPGIAQSSNTIRRGKGSKQGNPYLKFAFMQAASLAVRFDGPIRRFRLKHMGRRRSKARKLISVSIVAHKLAVAAYQILKDKKVFQVENMFAPYV

SEQ ID NO: 291385 - protein, 420 aa, unidentified
MENVTDHEEIIARVAALDIGKAELVCCARVPAEGGRGRAQEVKTYSTMTRSLQTMADRLVELGVSRVVMEATSDYWKPPFYLLEAAGLEVWLVNARDVKHLPGRPKTDVLDAVWLAKVAERQMLRPSFVPPSPLRLLRDLTRYRAALVSDQAGEKNRVEKLLEDAQVKLSVVATDIFGVSGRAMMAALIAGERDPQVLAQMARTAMRRKIPALEEAFVGRFSDHHAFLLARMLARIDALAADIAALDARIDEQIAPFADALDRLDEIPGVGRTAAQVIIAEVGLDMSRFPTPGHLASWARFAPGVKQSAGRNKGNASTGHGNAYLARVLGEAAVGAARTSTFLGERYRRIARRRGSKRAVVAVGRSILVIVWHLLSDPTAHFEDLGPGYYDARAGASRARRNHVRQLEALGYKVTLEPAA

SEQ ID NO: 291386 - protein, 412 aa, unidentified
MEVLYACCCGIDVHAKMLVACLMKQGKKDVRTFSTMTQDLLHLLDWLTQTGCTHVAIESTGVYWRPVFNILEGAMEVILTNARDAKGYKARKTDVIDAEWLADLLRHGLLKPSFIPPLPIRELRDLTRYRESLVREQTALANRIQKLIESANIKLGQVASDALGVSGKLMLRALAAGETDAEQMSHLARRTLKRKQPQLQQALEGRFTQAQRWILGQLLDQYDHVEAALQRVEERIGQEVASSADPFVPEAVKLLDTIPGVGETVAQILVAEIGVDMERFPTANHLASWAGMCPGNNESAGKRKSGKTTKGSRYLRAALVQAAWAASHQKGSYLAAQYKRLVKRRGKKKALIAVGHSILVMVYHVLQNRTQYQELGGDYFDRRNVDKQRKRLIRQLESLGLKVTVEEVKEAA

SEQ ID NO: 291387 - protein, 272 aa, unidentified
MHYLYYVGLDVSKETFDASLVAFEDANEMAHRKFANSRKGICSCLHWVEKRHGIRLDDVIFCAEDMGSYISEMAVCASDRTLNFNFSLISPLVIKYSMGIARGKTDRVDARRIAEYAITHYRKIALYLPAEKELCQLRTWLILRAHLAKQRVAKLVLLEKLDYKEKFADVSIQRSMLQEEIAYAETHMKTIEREMKELIAADSNICRNYKLLTSIKGVGPITAIVMLCSTLNFTKITDHRKFACYCGLAPFEHSSGTSVAGMPHIEHGESRH

SEQ ID NO: 291388 - protein, 447 aa, unidentified
MSTSVRLQASPTLPGPTSGPQRVRAEDRKGWTVEVIHQRCAGMDLSKRDAKVCLRLPGRRAGSYAKTTATFGSVTADIMGLRQYLIEARVTLVVMEASGDYWKPFYYLLEDGPFELMLVNPAHARNLPGRKTDVSDAQWLAELGAHGLVRGSFVPPQPIRELRDLTRLRTTLIRDRVREINRLERVLQDAGMKLSSVATDILGVSGRAILDALLAGQTDPKALASLARMSLRNKTAQLVAALDGRFTDHHAFLVRLHLQVIDQLAANIAQLDTRIDQAVAPFRAILTLLRTIPGVSDRVAVTTLAEIGADMSRFPTSAHLASWAGVCPGHHESAGRVRNIGTRAGNNHLKAALGKAAIGAARTKNSYLQARYRRLAARTSGLKALVAIEHAIITAIWHMLATGTTYRTLGADYYQRRDPAKTMRRIIKQANEIGLTVRFDPIAQAAT

SEQ ID NO: 291389 - protein, 403 aa, unidentified
MNNVVGIDVSKGKSMVSVLRPFGEVVAKPFSVGHTGSELKELADYLKSLDGETRVVMEHTGRYYEPVARFLHDEGVFVSAVNPKLIKDYGNNTLRKVKTDKADSRKIARYGIDNWAELRQHTPMDTIRMQLKTLNRQQSLYSKTKTMMKNNLIALLDQTYPGVNALFDSPVREDGSQKWVDFATTFWHVDCVRNMSLTAFAERYRKWCKRHGYNFSQSKAVEVHAGAQDLIAMLPRDALTKTMVRQAIDALNAISASMERLKAEMQALAAQLPEYPVVMAMHGVGDSLGPQLMAELGDVTRFTHRNAITAFAGVDPGADQSGTHEAKSTRVSKSGPPELRRALFLVMDCLLKTQPQDDPVYRFMDKKRAEGKPYLVYMTAGANKFLRIYYGRVKEYLASLEGN

SEQ ID NO: 291390 - protein, 428 aa, unidentified
MNNEGIIRRERFCQIKSEIRGSSEYLVVGIDVAKDKHHAFMGTATGNSLLRNLVFENTLEGFCKLLERSEAIRIQNALSKVVFGMEPTANYHKPLGAYLIRSGHHLVMVTGKAVKNNRELLDGRWDKNDIKDPANVADLICQGKCLYYDYPPASINQLRQLLSLRRRLKKEEHSLRMRIRNNLLALYFPELDRFYSACETESLAIVRWFLDPSMIAALEFDEFFSLVTRTKRGIAQKQRLQKIHRLAAESIGCPMGPAAEFEAELLVVKLKEVREQLKKNADLMQDYCMEFTEYSILLTIPGFGPYIAARVLASISNPWRFERSNQVIKMAGYDLGANRSGKKSDGAVPVISKRGNSELRYALYQAAHVASTRNPYFIRYFTRTLRGRERERGIKTKMKVKLAAKMLKIAWTLMKKNQGFDPDYLTTE

SEQ ID NO: 291391 - protein, 339 aa, unidentified
MVRIITGGVDTHADQHVAAAIDHNGGVLGTESFPADVAGYEALLAWLVGHGEIDRVGVEGTGSWGVGLARFLHSHEVVVVEVDRPNRQHRRRVGKSDATDAVSAARAALSGAAAVTPKTRDGAVEEIRILLVARRSAREQRIQTLNQLRHLIFTAPEPIRCRFKDRPKAGLVTDVAKLRPRLGSDPITYTTQLTMCGLARRIKHVDAEMRLIDSRLKLLIDETAPALLELHGVGLDTAASLLVTAGDNPDRLRSEGSWAHLCGVSPIPASSGKTTRHRLNRGGDRHANAALYRIVLTRMSSDPRTQTYVTKRRAEGRSNREIIRCLKRYVARETFKHLT

SEQ ID NO: 291392 - protein, 378 aa, unidentified
MRFYQGQHRFYCGVDLHARTMYLCILDQAGAIVLHQEVPAEPGAFLEAVAPFRDGLVVACECLFCWYWLADLCAGEKIAFVLGHALYMKAIHGGKSADDRIDSQKIAQLVRGGNLPIAYVYPKGLRETRDLLRRRMYLVHKRAEVVAHVVNTNSQYNLPPFGKKLIYARNRQALKIAERFADASVRMSIELNLRLLDTLDDLIGDVELYLVRTVKVDDADTFYRLRSIPGVGKILALVLLYEIHDIHRFASEGMFLSYARLIRPLKTSAGKVKGGGGAKIGNAHLKWAFSEAACLLARESDQAKRFLARQQKKHGKPKALGILAARLGRAVYQMLRQKKAFDPKRFWSGEPGVSGAQLKKAAVKRPRRAKGSRCVLEA

SEQ ID NO: 291393 - protein, 343 aa, unidentified
MDHFAGLDVSVKETSVCIVDDTGRIAREVKVASEPDSLLQVLTNPAYHFKRIGLEAGRLSQWLFSTLAEAGLPVICVETRHMRAALKAQVNKTDRNDARGIAQMMRAGLYRPVHVKTLRSQKLRMLLTHRKLLQSKAIAIENDLRATLRNFGLKVGMVGTVKFETRIKELVDNLPELAVLVEPLLIVRRVLREQIGILHRRLLAVVRDDDVCRRLMTVPGVGPVVALTYRATVDVPARFRNSKAVGAVFGLTPSRYQSGESDRTGGISRCGDEMMRAMLYEAAQILLVRSAKWSWLKAWAMKIARHRGLKKAIVALARRLAVIMHRIWVDDTEFRWTREVAAT

SEQ ID NO: 291394 - protein, 347 aa, unidentified
MYPFYLGIDLHLKRTYLVLMNAEGEVIDKRRLKNTEMATYISKNIPRETYAVMEATRNWPFFYDLLEKHVDRVELAHAKGVRMIAAAAVKTDQIDASVLAHLARLNFLPIAYAAPKEIRDLRQHLRYREWLIDERRRAKNRVHAVLAGYNLFSPVTDLFGRAGRDWLQETVEKELRPTSRRVVLETLIMIDQLNAQIKELAKDIPLPEELKPKAEILMSMPGIGKLLAAVILAEVGDISRFNSPKALCNWAGLTPRVHKSDTVVRHGRISKQGSRYLRTAMVCAAMTACRISPRWYGVYEHLARKIGRRAAKVAVGRRLLTVVYYMLKRNQPYDEEYEQRRIVEQGA

SEQ ID NO: 291395 - protein, 463 aa, unidentified
MRKNEKKTAAIRFDSGLQQLRRDAAGMDIGAREIWVDVGVENDSEPVRRFETFTADLNRMAEWLIGCRVKTVVMESTGVYWIPACQILEDRGIEVLLVNARYAKNVSGRKTDALDCQWLRTLHCYGLLPASFRPAHEIVTLRSYLRHRQMLIQYAAAHIQHIQKAMTQMNLQLHHVISDITGRTGMKIIRAIVAGERDRQKLAAMRDARTHASQATIEKALEGDYRTEHLFALKQSLDAFDHYQKQIAECDRQIEQHIRSLETKAEPGSNLKPARSAKTRQRKRNLMEFNAREEAFRISGVDLTQINGINETAALSLISEIGINMNPWPTEKHFASWLSLCPNNKISGGRVLNRRTRKSANRARDTLCLCAQSLLASRSALGAFCRRICSRLGKPKGLIATAHKLALLIYRMLKYGRHYADIGQEQYEKQFKERALRSLTRKAKELGFQLVSNSDLASENGVP

SEQ ID NO: 291396 - protein, 319 aa, unidentified
MSAQTVIGIDVSRDWLDGFCLPEKQRFRFQNSPDGHARLLETLQSMPDGLKIGFEATGGQEWALWRLLISMGLNAVHLPPAQIKAFALFMGKRAKTDQIDAELIARFMAFRPEAGRTLPDVKLQFLRALTVRRAQMVEARKRLSAQISARRKQGVSAELEDMDSSLKAFLESQISELEQRIESVIAEAEELSAKAELLRSIPGIGPVSVSMLLAEMPELGRMTATEAAAMAGLAPMAHDSGAMRGKRVISGGRRSLRHVLFQAGLAVACHNPVLKAVAKRMKQRGKPHKLVIVAIARRLITIANAVLKTGLPWRISSAA

SEQ ID NO: 291397 - protein, 481 aa, unidentified
MKPRQAEKDKEVIADSSCGHWNQMNRQQRRHMMRKMQSDDLSLEVVHPDAAGVDIGNESHYVAVPPTRDSQPVRRFGCTTAELKAMADWLKQCGIQTVAMQSTGVYWIAVYDILEAAGLDVYLVNARDTKNLPGRKSDVQESQWLMKHTYGLLRNSFRPSQEIRTMRTYWRQRNDLVQSASRHIHRIQKALTQMNLQLANVLSDVSGLTGQAIINAILAGERNPYKLAAFRDPRVQASEEQIARSLEGNWQEDLLFVLKQEQDGYEFCQKQMAECDRQLEQYFQRREDRSQGASLPEEKRKTRLKKKNGNKPQFGLRADLFRMTGTDLTQIDSIDVVTASTIVSEVGWDMSKWETEDHFVSWLRLCPDNRISGNKIIGKGRLPTNNRVSIALRMAASTLRVSNTYLGAQFRRFRAKLDARVAVKAMAAKLARLVYRMMRYGMKYVDQGAKFYETQHRNLQLKHLKWRAAKLGYQLVQAPST

SEQ ID NO: 291398 - protein, 402 aa, unidentified
MIFINCLGIDISKSESVVAHYKDEVLVKEMVIQNNQNGYRYLKNYIKHLDSLFILFESTGIYSRGMKRFCEIHKIDYLEMNPLEAKFKTSSLRSWKTDKSDAHKLALLAFRMKDSKVQRQSEEIYFELRERARFHLEMEINQNRLKVELVETLHQTFPGLEKLFTNRYSKIALSIAKAFPHPDFVSTLTHDELVEKVLHSTDKGISVNKAHKYVQKLIEIQINSFPNVDKSSFLLQKVQYLCDKLLIGIEEMKEFDQEMIDLAKNTTEFENIISIPGIGELTAALLIGELGNIREFKTNKQLNAFVGIDIKRYQSGTSKSRDTINKRGNKKARRLLYLIIMNIIRGRNHYQSHIVDYYYKLREQPHGKTHKTAVIASINRLLKTIHYLIVNNKLYDYQKAPH

SEQ ID NO: 291399 - protein, 387 aa, unidentified
MIYVGIDIAKLNHFASAISSDGEILIQPFKFTNDYDGFHLLVSKLNSLEQDSLIIGLESTAHYGNNLVEFLVLHNYKVCVLNPIQTSTMRKNNIRKTKTDKVDTFIIARTLMMNPHRLFTTYDLDLLHLKNFGRFRQKLIKQRTRTKIQLTSYVDQSFPELQYFFKSGLLINTCYCLLKEAPTPNAIASMHLTHLTHLLEKASHGHFGKDAANSLRILAQKSVGSNDSSISMQITQSIEQIELLNSQVNRIESEMKTIMLFLDSVIMTIPGIGYINGGMILGEIGDITRFSTPKKLLAFSGLDPAVYQSGNFNASHTKMSKRGSGPLRYALVNAAHNTVKNNQTFHLYYDKKMSEGRSHYNALGHCAGKLVRIIHKMLTDNVPFNLE

SEQ ID NO: 291400 - protein, 330 aa, unidentified
MHVAGIDVGSKELVVSIRKQGRMGKARTFENTPVGQRDILKALTRAGVERVCLEATGTYHLDLAVHVAPQLPLMVVNPRAAKRHAEALMCRTKTDPVDASVLSDYAERMPFVPWQPPAAEVITIRACSRRLAALTHQRTQAKNQLHAWAATTTTPAFIIKDVQLTIRQLDQQIEQLKEKTLEIIVEDDFLSSVLKLFVTVKGIAETSAIQLMGELLVLDPSMTHRQWVAMAGLDPRHYQSGTSVNKRARISKAGNRYLRMALYMPALSAARHDPYVRGFYQHLVEDNGLKKIQAVCAVMRKLLHALHGMLKNMTAFDNTRFYRLPVTSSE

SEQ ID NO: 291401 - protein, 347 aa, unidentified
MLIIGCDFHPGFQQVAIFDNRTGEIEEKRLQHRAEAEQFYRGLAGQEVLVGMEACGHYPWFEGLLQELGMGLWFGDAAKVRASVVRKQKTDRRDAEHLLDLLRQDRFPRIWVPSLEVRDVRQLLVHRHKQVQARTRTKNQLQAMALSHGVQKKRKLWTKAGRAELEQLPLLAYAAQRRKKLLEALDELDVEISELDRRVAEEARERPEAVRLMTHPGVGSVTALAMVLTLGPAERFGSGKQVGSYFGLIPSEESSGGKQRLGKISKQGSSFLRFLLVEAGQTAARYDPQLKRFYRRLAVRKNRSVAKVAVARKLATRLYLMLREQWTYAQLSQAVMQVSPSHSVAGE

SEQ ID NO: 291402 - protein, 329 aa, unidentified
MTTNPPQIVFNHIVAFEVSKEKLVVHTLPDDEQWTIDNKPQAVRRLIKAEIKRNRKKQLGQMLVICEATGGYERHVLDGALEMGLSVHRAHGTRVRHFGHYRGLLAKTDPIDAHLIAQYGLKTENIRLYSPPPPDTAALRALHARRTEIQQMLIAETSRLDHAQHKSVLKSLKAHIASLKAALAAIEADIAQLVEGSEMLRKKVALMQTVIGIGPISAMVVLAYLPDIGQLTKGQAARLAGLAPINNDSGKKRGARHVEAGRTAIRRALYMAASVAMRANPILKAFSDRLRSKGYPFKYVVTAVMRKLIVILNAVLRDGQSWKGAQMAA

SEQ ID NO: 291403 - protein, 394 aa, unidentified
MVHSERVVIGMDPHKRSVTIEVMADDEAVLGGGRFATDPDGFTALRDYVRAWPDRVWAIEGCSGIGRHVALRLLADGQDVVDVPPKMSARARVFATGQGRKTDATDAHSIALVGTRMAGLRPVVNDEQLAVLRTLVDRRRSLGEEHTRMVAQLHHLLLELVPGGAKKSLSAAQAKAILAGIRPRDAAGKVRRRVAAELVSDLERTYKRKKTADKELTDLVRATGTSLLDLTGIGPSGAARLLVEVGDITRFPDRAHFASWNGTAPIDASSGDHARHRLSRAGNRQINRVLHIMATVELRNPGVGRDYFDRKKAAGKTSMEAMRCLKRRLSDVVYRAMLEDAIAHTTDSRTGPGGHRGTSLTSSAAGSHPRTGTSDQSLPGPATHDPRTTLPAAS

SEQ ID NO: 291404 - protein, 383 aa, unidentified
MKAHGKCSGRLLTPTASMCQSEIFADPLTGKEPQMQRTTIGLDIAKRVFQAHAVDAASGEVTRTKLQRAEVLQHFAQLQRSLIVMEACGSAQHWAREFAKLGHEVKLIAPQFVRPFVKTNKNDAADAQAIWTAAQQPEMRAVAVKTEEQQAVLGLHAIRERLKKARTAAVNQLHGLMGEFGIELLRGWRKMLPQAAAVLEPTNSAVPALLQPQLRRQLEEVRRLTEQMAEVERQIASWKRRQDECERIAAIPGVGLLTATAAVATMGEARTFRSGRQFAAYLGLVPRQSGTGGRVQLLGISKRGDKYLRMLLIHGARSVLKSSQAAKDPTTWLGRLMQRRPRNVAAVALANKMARQVWAILAHGRTYEPNYGLPQQVAAATPA

SEQ ID NO: 291405 - protein, 431 aa, unidentified
MKDSQNKKLMAIDTGTLVVGIDIAKSVQWARFVDYRGMELSKALRFNNTIDGFKRIVEKCTSLKKSYNFKKIIVGMEPTGNYWKPLANFLIANNVEVVTVGTFQTKMAKSLDDNSPTKSDAKDALTIARLVKDGRYSEVYMPDDIYAELRILGSLRAQINDKLYAVKNRIHNVIVEYFPEFTSVFKNPFKGKASMQILKNCPFPAHIVELGIDGVLAEIKKSVKKTVGKQKAEQIVKAARSSVGVSYGMSAAQMKLSMHIAELELLQEQLLEIEKAMDVALIQTGFSETLLGIKGIGIVSAANILGEVGDFKRFENERQIHRLAGYNLTENSSGNNKSGTRISKRGRKRLRSVLFQSAMVMVTKNDEMKSLYQHLKGRKNNPLKSKQALVVIAKKIITIIYKLVTKEIKYEAKLVFNNFRTKQIEETLKAA

SEQ ID NO: 291406 - protein, 391 aa, unidentified
MYFDSNTQPASDARVQVGIDAAVVAHHHVCVRSVDADGHVNVSRFHVPPTLTGLAALTKRLAPYPGVLAVAEPTSMTWLGLAVALQDAGSDLALVGSRHAARRRGAISGKNKSDVIDPDVLARAGDVFELHPLVLPSPPQLALRRACTRRGAAVIDGNRYLRRLISLARWAFPDLWSAFSGSLPTAVAVLDRWPHLDSLAAARRSSLTGVVAEHTRGVSDVPARVEEIRSTAAAWAHFWAGRLDLDALAWDVNEHLADMAVANARIERATAATQRYWEQLYGDDPLLSSVPGVGPVIAPTIRGFLIDGTGFVNAKQACSYVGMTPSNWSSGNTLDHSGRAITKEGPTVLRLAFYQAANVARTLDPQLAEFYYRLMVAHRHCHTHSVAATSA

SEQ ID NO: 291407 - protein, 354 aa, unidentified
MKRTTKYVAFDVHQATTVASVRDDSGRVLARSVLETHGPSIVEFLRGMRGALHVAFEVGTQSQWLHDLVAPLADRVVVCDGRRVARQGNKGDQVDADRLSELLRLGGLRPVYHGSTHRADLKELTRTYRNLVEDSTRVMLRIKALFRARAIPTPGTAVYQAKARAQWLERLTERGVRFRAEVLYAELDVLRALRPKAKGAMIAEGKRDSAWPVLRAIPFYGPVRVAVLLATMGTPWRFRTKRNLWAYAGLAVVTRSSADHTFVAGQPVRRRRAPLTRGLNRNHNRVLKDVFKGAATAAASRPGPLQDFYNELVARGLREEMARLTLARKIAALTLRLWKTGECYDATQLTRQSS

SEQ ID NO: 291408 - protein, 436 aa, unidentified
MRGCRCSMIMGFTKPIEHFNLQRKKVITMNTLYVGIDVSSKSNVVYLMLPNGDKYSNFSVANSHEGSTQLVKRILSALTSHSLDTVLIGLEATSVYGDNLVYFLREDATLAPFNRKIHVLNPKQVKKFHDAYNDLPKNDYVDSFVIADCLRFARINKEVYMGDYRYKALQNLTRARFFAVQNLVKEKQRFMNVLFKKYSTMTQEKVFSDTFSTTALAVYDEFESAEALANMDLHELTDFIIEKGKNRFPDPDAVAKVIQKAARNSYRLPKTVNDSVNQVLSISITSMKALESQIKEFDKAIKAQMELLPNVLISIPGIGPVYSAGIMAEIGDINRFNSQAALAKYAGLAWKQHQSGGFESEVTRLIPSGNRFLKYYLCEAAFSLVRCDKEYSDFYHLKYKEVNRCQHKRALALTARKFVRLVFRLLKDNRLYCPAK

SEQ ID NO: 291409 - protein, 444 aa, unidentified
MAGKRQKRRLEVVHPDCAGIDVGGHEHWVAVDPGRCEVSVRCFSGFTDDLQALADWLESLGITQVAMEATGVYWIAPFEVLDARGFEVLLVNSRATRQVSGRKSDVLDCQWIWQLMSHGLLSGAFRPGDAVCTLRAFVRQRSRRIQAQSWCLNHMHKALAQMNVHLGHVVSDLKGKTAMRILRAIVAGERDPWQLATLRDRRLRADEATVARSLHGNWRVEHLFALEQALAHFDFLEQQIGACDRAILSALEALPVRACAPTELATPSRSAHRSAAEQRRLQQALVQAMGVDLSAIPSLGVDTVLVIAGEIGPDLSRFPSQAHFCSWLGLAPPTRISGGKALSGPGTKVNNIAAQALRQAASNARSSRSFIGAAHRARLTRMDTAKAIKATAHQLARLIYAMLTRGQPYVEKSIEAFETTRHDRQLRALQRKARKLGLDLVPAA

SEQ ID NO: 291410 - protein, 348 aa, unidentified
MTLVGCDLHSRKQQVAVLDTTTGEVLEQELVHEGDAVERFYCALRPPVTIGIETTGYTQWFHALMHRLGHTVLVGEAAKIRAMVVRKIKTDRRDARHLLELLKHDRFPTVWIPDPDTRDLRALVAHRVRLVRMRTAVKNGLQAIALSHRLALRSKLWTERGRAALKGLVLPRHTTRRRDDNLDLLMWLTARIDDLDAQIAAAAAADPRAALLLTHPGVGPLTALATVLVLGPIARFPDSKHVVSYIGLAPAINASADKQHLGKITKQGNALLRWVLAQAAPLAARADEELRRRYFAVLSRRGRPKAKVALARKLLVRLYVMLRDRIDYDEFCRRGQLRRTARVPVAAM

SEQ ID NO: 291411 - protein, 367 aa, unidentified
MKNITTYVGVDAHKKDLFLAMLVGDQTTPVTWQVANEPNAVRRLVRKLEREAPGPVQMCYEAGPGGYALQRRVTTPRVNCQVIAPALIPRKPGERIKTNRRDARKLAELLRAGLLTEVRPPTLEEEAVRDLCRARDDAREDLQRCRHRLGKLLLRRGLHYSGRNWTRAHRRWIDTLEWTKTERVVVDDYLMAIDHTEARLMELDARLIEIAQADPYREPVGWLRCFRGIDTLTAILILAELHDFRRFHSARALMAYLGLVPGEDSTGEKHRRGRITRTGNALVRRLLVETAWHYQHRPGVGVALSRRRKGQPGRVIAIADKAQQRLCRRFRRLAEQHKPAPKIAVAIARELAGFLWAALQPVPVPAK

SEQ ID NO: 291412 - protein, 393 aa, unidentified
MAVMIGVDPHKRSHTAVAIDHEDMQLDAIEVRASTRQVAELLAWAVGFEDRTWAVEGAGGVGSLLAQQLVAAGERVLDVPATLAARVRVLGSGRSNKNDPNDGYSIAVAALHAPRLAEVTRADHATVLRLLAKRNRELSSARTRTACRLHALLVELVPGGISKEITVKRAVQVLAGVTPSDPVEITRHELALEHLEDLRRVEEQIRASKRRLTSAVEASATTVTEVFGFGPVGTAIAIGHTRDIGRFPSRDHFAAYNGTGPIEMSSGGRVVHRLSRRGNRQLNHAIHIAAITQIRHRHSPGRGYYDRKLAEGKTTKEAIRALKRRISDALYMHLRADAAKAGPGGQAGTTQSSVTGIAPRGPALRNSHSRTRTNATTRRAHTPRPNKRTRTRS

SEQ ID NO: 291413 - protein, 317 aa, unidentified
MEQRQTSTKIAGIDVGKSKLDGAVHGLEDTTQVDNAPAGFSELIGWLKARAVGRVGLEATGGYERAVRQALEAAGFEVVVHQPIEVRRFAQMKRWRAKTDRLDAQLIAAATAQVDAVRAAQDPRLQALAERLTTYEQITDQAAQLKTFLEHVTLADLTQAVCVQIAAMTALKAKLAAEILKQIKAHDDLLARYRLLVSLPGFGPIVAATHVIRMPELGQMRRGQAASLIGVAPFARDSGQYKGQRFIGGGRSRPRRMLYIAALAAKRWDPALRAFAEQLLARGKPPKLVIVAVMRKLVEAANLVLSRGQPWLRQPPA

SEQ ID NO: 291414 - protein, 345 aa, unidentified
MELRTIGIDLGKTVFHLVGLNLRGEVVVRKKFSRTQLLRFTANVHVKLVGMEACGGAHFLGRALREQGHEVRLIPAQYVKPYVKTNKSDYIDAEAIAEAVARPTMRFVPIKTDDQLDLQSLHRVRERWVMRRTAVINQIRGLLLERGITLRKGRCHVGAALPGILEDADAKLSGALRMLLAQLKLELDHLDMRIDEADAVIKKTAQENEACQRLVAIPGIGPVTATALIAAIGNGGAFRKGREFAAWMGVVPREHSTGGKQKLLGISKRGNSYLRRLFVQGARAVLQQRTKQSSGLSRWLAQLTSRTHRNVAGVALANKLARMAWAVLAKNEPYRPPVLADVAAA

SEQ ID NO: 291415 - protein, 328 aa, unidentified
MCKAIFYVGVDVGQEELWAAIEKSKLCSFKHTVAGVKALWNWVRRSNSEGTLHFCMEATGVYSQSLAAILSTYTDTQVSIVNPAQIASFAKAQLRRSKTDRVDARVILAFAQSQHPRTWKPQPEALQQLHHLVVQADALKATKRQWSNRAHTQAYIHNLPKVVCKTSSALQKSIEKQLTHIEEAIQKLCQTDPSLKTQIQLLCTIPGVKERSASRLLAYGKTALNSYSARALVAHAGLAPSHKQSGTSLRAKSHLTKQGDKRLRHTLYMPALVGIIHNPILRKYYQRLLAKGKPKMLALVACMRKLLIIVRAILTQQIPFNPAIQSLT

SEQ ID NO: 291416 - protein, 457 aa, unidentified
MAKRRRKAMSRKFKITKLPAELQHINLNAAGIDVGSERHLVAVPEGRDVVSVRAFGTFTSDLEALATWLKKCGVTTVAMESTGVYWIPLFEVLERRGFEVKLVDARHVKNVSGRKSDVLDCQWIQQLHTYGLLAGAFRPPDEICVLRSYLRQKEMLTQASSMHIQHMQKALQQMNLLLHNVVSDITGATGMKIIKAILAGERDPQVLSRNRDERCKHSATTIAKSLVGNYREEHLFALRQAVDLYETYQTKIADWEQAIIKELEKQPNVSDDEPPPADKETQARDRIRAGVDVRDMLYQKSGVDLFAIPGLAADTLLILASEVGFDMRPWKTEKHFSSWLSLCPGTRRSGGKVLDSKTKRNPNRAAQAFRMAASSLSRSTTALGAFYRRIKMRTSGQQAVTATAHKIARIYYAMLTKGASYIELGQQAYEQRYKQRRLDQLKNQAKSLGYQLIPCAS

SEQ ID NO: 291417 - protein, 353 aa, unidentified
MQRPRQGQVIIGVDTHKEIHVAAAVDWQGTLVGEECFPTTRQGYRLLESWARSLGEVLRVGVECSGSYGSGLTRHLLKNGFAVLEVTFPDKTVRRKRGKDDFIDAEMAAEAAFTGARTVTPKSRDGMVEALRMLQKTRSTAVAARRVALQMIRADIISAPEELRDQLRGMTRMQLIRHLVATRPDSTDFRTPLGAAKIALKRLAKRYVDLDDEVSELDDMIDAILADAAPLLVQLKCVGAQSAAQLMVTVGDNPERLRSEASFAMLCGVAPVPVSSGMTYRHRLNRGGDRQANSAIHIIAIGRLRTDERTKEYVAKKMSEGHTKMEAIRCLKRYIAREVYYVMKRQSELVNCS

SEQ ID NO: 291418 - protein, 418 aa, unidentified
MEVIIDRGAALDLHNKTIRVCALLTEGRSVEQKLATFGTTQQGRVGLREWLEQNRVTHVTMEATGEFWKPVYAELEGGFVLTVTNPQHVKNVPGRKTDTSDVVWHAELHRYGLLRPSFVPPAPIRELRDLTRSRRKSIQAQSRVENRTRKILEGAGIKLGAVVSDLFGKTGRSILDQMAQGRTEPSKLVQLAKGTLKQKKPELSVALEGTFTEHHSLLLQDQLRVHDAYTKAIHELDQRIARQAEPWTDLIRRLDQIPGVNPTAAVEILAEVGTDMAAWKYSWRFAAWAGLCPGNHESAGKRRQVSVRKGNPFLRSILVQCATAAVRTKGTYYRAKFQRLCARRGYKRAIVAIAHAMLIAIYFMIRDGKDYVELGETFVLQRTRTRTTHRLVEQLSKLGYTVTLTENTPTEQPSASGT

SEQ ID NO: 291419 - protein, 337 aa, unidentified
MGQEKYIGMDVHQATVSAAVRNRNGNLLMECILETKADTLVEFVQGLHGTLSLAFEEGTLAAWLHDLLKPHVNRVVVCDSRKAALLRDGNKSDRIDARNLSELLRTNQLKPVYHGEHGLRTLKELGRSYLTVSKEMTRTMDRIKSLYRSWAIPCAGTMVYAPRHRRQWLAKISEPGARMRAEHLYEQLDHLQPIRMRARRELLQESNKHAAVKRLRQIPSIGQIRAALLVALLQTPHRFRSKRQIWAYSGFAIETHDSGEYRYVRGRLQRNRERITVRGLNRNKAVTDPRAAVAADVASLRAVPALPSAWLISGLIYDVATGLVEIVVPPAPIRADA

SEQ ID NO: 291420 - protein, 336 aa, unidentified
MSLYCGIDLHSNNHVLCVIDDKDRRLLETKLDNDVHQTIKALSPYQKQLKAVAIESTFNWYWLADGLMEAGFRVELVNTAKVIQYSGLKRTNDRYDAFHLAHLMRLDILPTGYIYPKAERGLRDLLRRRIQLVQDRTRHLLRFQSQVQMHTGESVAASRIKTQKYRLPVIGDANVQLALQSQLLLIRALSAQIKQLEQSILSQVEPVASFAWLKTVPGIGDILAEAILLETGDITRFKGPGNFASYCRCVDSRRESNGKKKGENNRKNGNRYLAWAFIEAANFAVRYSDKAKRFYLKKEKATNSIIARKALAHKLARGCYWVMRNQEAFNQDRVFH

SEQ ID NO: 291421 - protein, 357 aa, unidentified
MTGDKDIIVVADYHAENIAFRWFNKATGEERTGRYATTQAGILQQIDQTAKELEPGGRVVWIMESTTGWARVKDLIGSRARFVLANVLQMPLPPKARRRKTDKIDTGRIMREYLHGGLPRSFQPAVWWRRVRRLVDFRQDLVERQTAIKNWIGSLLHHETWQNRKNLWSDRGRCRLQAMRLPAEDRLLMDLKLAQLDHLFEQICQVEVQMRQIYDGWPEAQWVDEVRGIGMVTAVSLLAHIGPISRFPTAEDLISYAGLAPGMWQSDGTCHHGRIGGGGTDSHLRYLLIEATRWLCQIPRYRPTYERVVKKRGKKIARIVVARLLLRSLHKMLTARIRFNPAPRPTAKATATAGCSK

SEQ ID NO: 291422 - protein, 412 aa, unidentified
MEVIYAVCAGLDVHKDSVKACLRRSGSNRQRIGEVQSFGTTTRELLRMTEWLSTYGCTHVAMESTGVYWKPVYNLLEGSVEVILVNAAHIKQVPGRKTDVKDCEWIAQLLEHGLLRKSFIPPKPIRELRDLTRHRKTLIQERARIANRVQKILEDANVKLASVASDVLGVSGRAVLAALINGEGDSTVLAALTRGRLHATQDEIQEALSGRFTEHHSFLLQQLLAQVDFVAARITECDQRIEVLCRPFAQKIDRLKRLAGVGQRAAEQLVSELGVDMGQFPSHRHAASWTGICPGNHQSAGKRKSGKTRKGNRWLRCVLIECGWAASRSKQSYFGAQFRHLVRRRGAKKAAVAVGHSLLVAAYHILRDDVEYRDLGADHFDRLNHHRLTDYHVQRLEQLGYQVNLESQPVAA

SEQ ID NO: 291423 - protein, 373 aa, unidentified
MQTKLYVGLDLHSNNTYVGIIDSKERRVQKGKFPNQLELILAVLEPYKKRIVGVVVESTFNWYWLVDGLMDNGYKVHLAHPAAFQQYNGLKYTDDEHDSFFLAKMLQLGILPEGHIYPKEERQIRDLLRKRQKLVRQRSAHIVSFKSLVSRNLGISMPSSEIKKLEGDEMNNLFDNEHLALSAKVNIAAMNNLKWQIYEIQNTLLKAVKIKPQFEKLLTVPGIGNILAMMIALETGDINRFPAVGNFASYCRCVGSSRISNDKIKGSNNRKNGNKYLAHAFVEAAQKARRFCPPAQAFFMRKTIKTNKIVATKALAHKLARACYYIMRDKVDFDVTLIFGKSLKVDKGCASEPKRGLATKPICLIGTSGAADL

SEQ ID NO: 291424 - protein, 328 aa, unidentified
MKTYILRATQTVEPQKSNPHLPPPLLAGRVLFIGLDVHNDSIAVSLAPSDSTEVRRYGIIGGEHDDVLKLVKKLQAAHPGTVLKFCYEAGPRGFALCRCLRSHGLECILVCPSKVPRKPGERVKTDRRDADQLARLYRAGELTGLYVPEPVDEAMRDLIRARYQVGKAQHRARQQLKMYLLRHNIRYAGNSSWTPAHLRYLAQIKMPFAVQQIVFQEMLEVISEATGRLERYDQEIERALPGWRWEPVVRSLMSLRGLALLHAATLVAELGDFHRFEHPGQLMGYLGLVPSEHTTGAEFIFKPPCRAAPALARGRWPGRGPRISRARQ

SEQ ID NO: 291425 - protein, 319 aa, unidentified
MTPTKVYVGIDVAKSRLDVAVWPTGERRTLANDTTDIDKLTTSLQAQQPCLIVLEATGGYERAVLASLGTAGLPVAAVNPRQVRDFARAIGRLAKTDSLDAEVLARFAEAVRPLPRPLPDAQAELLRALVTRRRQVVEMLTAERQRLASAQPPVQGLIQAHIAGMEQELAHLEQELDRTLRQSPLWRARERLLRSVPGVGPTVAAVLLAEMPELGRLDRRQAAALVGVAPLNRDSGQYRGRRSVWGGRARVRATLYMAALVATRWNPVVKNCYQRLLASGKAKKVALVACMRKLLTILNAMLRDGTAWQQVPAAHAIPA

SEQ ID NO: 291426 - protein, 358 aa, unidentified
MATTSIPHPNAPQLTVGVDTHLDVHVAHAVDQLGRCMATVQVPTTPAGYQDLLAWARGLGEPVAWGVEGTGAYGAWLARFLAAGGQAVVEVNRPDRQARRRRGKSDPLDAEAAARAVQAGRAATTPKAGTGQVEMIRSLRVARASAIKARTQATNALHALLVTAPAELREQLRGLSAAKLVRAAAELEPGPVISPLAAAMLALGTLAHRHQALSAEITTLTTQLDRLTRAAAPTLVALFGIGQDSAGALLVAAGDNPDRLHSEAAFSMLCGSSPIEASSGKTTRHRLNRGGDRQANTALYRIVMVRLRWHQPTKDYMARRLKQGKSRKEIIRCLKRYLAREVFAALNPTSNDTLTPAT

SEQ ID NO: 291427 - protein, 309 aa, unidentified
MNVKTIGIDLAKNVFQIHGVDEHGKRLFNKQLRRAQMASFFANIPPGLIGMEACASAHFWANKLISMGHNVKLMAPQFVKPYVKTNKHDAADAEAICEAVTRPNMRFVPVKTAEQQAVLALHRSRQSFIKQRTAQANQIRGLLAEFGIVVPRGIQQLQRRLPELVEDADNPLPVLFRTQLSLLQHHMAYLFDVIATLDKQIEQCYRQNALCQRIGKIPGIGPVTASALIATIGKANNFENGRQLAAWLGLVPRQHSSGGKQVLLGISKRGDTYLRTLLIHGARAVLQSAKHKQDAVSSWANQLMAVSVK

SEQ ID NO: 291428 - protein, 388 aa, unidentified
MQVVADRAAAPTAIQTDLRAIFVSLELSRSTWLITSLSPGGGERMSKHSVQAGDIAGLLRRFAQLKGKARTRTGRDFPVITIQEAGLDGFWIHRVLQSEGIESHVVDPASIATSRRRRRAKTDKIDGETLVRALLAYKRGEPRVCAMVKVPTPEEEDSRRLCRERKVLTAERVLHVNRIKGLLFCQGVSGYEPLRRDRRERLEELHTGDGRPLPQHLKALVNREIDRLELLLKQIKVVEAERDALLVAAHTPAAVPASMLLNIRGIGPEFAAVLWSEGLFRHFDNRRQVAAYAGLAPTPWQSGAVDREQGVSKAGNPRLRTTLIQLAWLWLRNQPHSALTLWFHERVSRNGGRLRKTTIVALARKLLVALWKYVTAGVVIEGAAMTAA

SEQ ID NO: 291429 - protein, 343 aa, unidentified
MDRLYYIGLDVHKKTTAYCVKDARGEVIDQGTVASSRASLSEWAASLGQPWVGAMEATLFTGWIYDYLKPYALDLKVANPAMLKAISASKKKNDRADAEKIADLLRCDLLPECYMAPQEIRELRRVLRYRNLMVREAIKMKNKTAGLLMEVGVEYNKKRLHTKRYFSELLGNLEDVPVSVTNMLKLTRSNLEMFESIQKRLVKELRSHSHLKERVRRLMTIEGVGEVVALTWVLEVGDPFRFSSIRQAISYCGLCSAQHESGGKEKRGPISKQRNKHLQSILIEAAKLAPTWNPELAEVYARESARGNRNRATLAVARKLVGYLLAVDKRQTNFISKECQTAA

SEQ ID NO: 291430 - protein, 458 aa, unidentified
MAARNTKTKVKVKIKAGKNQPALTITHPNAAGIDIGSASHYVAVPPDRDDEPVREFACFTADLNALADWLVACRIDTVAMESTGVYWIPLFELLDARGFKVFLVNARHVRNVSGRKSDVLDCQWLQQLMTYGLLSGSFRPEDQICVLRSLWRQRDSLLKNQARSVQHMQKALTQMNIQLANVISDVAGETGQKILRAILAGERDGKVLAALKNGHIAASAEEIAKSLQGNWRAEHLFALKQAMAAFDFTGTQLVEVDQEIEAQLKRLEVHDGKPGKPKRRGRSRNAPKFNLHSLLFKICGVDLTLIDGVDVTTAMAVISETGTDMGRFPDAGHFASWMGLCPGTKITGGKVMSSKTKRCANRAAQALRMAAAALRTSQSALGAYFRRLCTRMDKPKAITAAAHKIARLIYAMLTKGEEYVDQGQEYYEKRYRDAMVRNLAQRAAKLGFTVVPAEQAAS

SEQ ID NO: 291431 - protein, 334 aa, unidentified
MKSEIIKQNVGVDVAKDDLKVALSHLTIDYRKVVRSTRTFPNTAKGFQQLQAWVSVKQNPSLAPHFTMEATGVYYEGLAYFLYEQGCSLHVVLPNHAKKYGQSLGIKSKTDKLDAKTLAQMGLERELRLWQPVSSSLLGLKQLTRERDALVRNRTTTANQLHAYRHQGKPNKDSIKRSVKLISFLDKQIKQIEKEVESFVNQDKELKAQMEYLLSIPGVGLLTAATIVAETNGFAAFESIKQLTSYAGLDIRIAESGKWKGKSKITKRGNSHIRKALFMPSLSKKTHDPTTKQFFERIKEKKGIGMIATVAVERKLLGLMFSLWKKQEMYRTAL

SEQ ID NO: 291432 - protein, 317 aa, unidentified
MSKSSTIAGGIDVAKTHLDIAIHGCKQSWQVANSVEGFGELVRLVRQHQVRLIGLEATGGYEHDVVEHLRAAGLTVIVLQPKQVRAYAEIKLRQAKTDRIDAALIAAFVSEHGIVRETPDPRLGALAEQLTYLEQIEEDMARIKTRLEHVRDAGLRGNWTNDLARLRQRRASLIAKLLTLLRNHHDLAIRLDLLLSIDGIGPRTAIALLIRMPELGRLSRGEAAALAGLAPFNNDSGKRSRSRTIAGGRTRLRTSIYAAALPAAFRWNAALVRLYNRLKAAGKPHKLALVACARKLLTFANTVLERGTPWVKVAAPV

SEQ ID NO: 291433 - protein, 341 aa, unidentified
MTHYAGLDVSFMETAICVVDKAGSVVWEGKVGTTIETIASAVTRHAPKLERAGMETGPIAVWLSHGLSDAGMPVDCIHARHAAAALKLQANKTDRNDARGLAQLVRSGWYEAVPMQSIATHRIRAIRVARDQLVRMCTALINKIRGLGKTFGVIIGAGKGASFDRAVRNALPHDPIVRDLLESLLETLTLLRERKRRFDRQLHRIARENATCRQLMGAPGGGPLTAVAFASAIEDPSRFRRASDVGASLGLTPTRYQSGEVNIGGRISKCGDRLTRRLLFEAATVILYRTGGALGLRTWAERLVARSGSWKARVALARKLATILFRMMRDGTAFENRPYPA

SEQ ID NO: 291434 - protein, 387 aa, unidentified
MTKLNHTDTPAAPEYATVYVAFELSKAKWHLGVILPGAQKLSRFPIDGGDLAALSAHLARWRAKAEATGKPVRIISCYEAGYDGHWLHRWLTNQGVINYEMDPASIQVDRRARRPKTDRLDLEQLMSTLLRYLRSEPRACSMVRVPSPEDEDRRRASRERDRLVKERTGHSNRITGLLHAQGIRDANPFARGFIVSLNTMRTGDGRELPPRLKEEIVREHQRLSLVQQQLKALEAKSRAELRAPVRGPVEARINDLVDLRGIGVVSGRKLMHEAFYRAFDNRRQVGSFFGLTNSAYDSGNSHRDQGISKAGSRRARSLAVELAWLWVQHQPESELSRWFHARVGQMKGRIRRIAIVALARKLMIALWRYVTTGVVPAGAVCRQSARI

SEQ ID NO: 291435 - protein, 366 aa, unidentified
MKKTSTVRVNKNTIFKGHKLTIGLDLGDRWSCYCVLDEAGEIILEQKVAMTPETMKQAFSKIPQGLIALETGTHSPWVSRLLTELGYKVIVAHAQKVQLISKSNRKNDRHDARTLARLARIDPELLGPVRHRSAQAQIHLTVIRARAELVHARTALVNAARGLVKSYGQRLPKCGTQQVSRELGAGLHAELREVLEPLLKEVESLNQRIQEYEVRMEKIAKESYPHVELLKQVKGVGTQIALTYVLTLDDPHRFPKSREVGCFLGLCPGRRDSGESQPQMNISKEGDRYLRTMLVQGAHYILGPFGEDSDLRRWGLKLAARGGKNAKKRAVVAVARKLAVLLHRLWVSGEVYEPLRNSQKAMRAAA

SEQ ID NO: 291436 - protein, 392 aa, unidentified
MSTDRLFADPTAIHADPASIFVSLELSRSSWLITSLSPGGGEKMSRHSVPGGDVEGLLARFAFLKDKALERRGQSYPVLVVQEAGLDGFWLHRVLEAEGIESHVVDAASIAMPRRRRRAKTDRIDGEILLRTLLAYKRGEPRVCSMVRAPTPEAEDRRRLCREYKTLVAERVRHVNRIKGLLFAQGVRGYQPLHRDRRQELAALRTGDGRALPKHLRAQINRELDRLELLLDQLKAVAAERQALLAAARDAAGLPAVPALLLGLRGIGPEFAASLWSEGLCRSFANRRQLAAYAGLAPTPWRSGSLVHEQGVSKAGNPRLRTTMIQLAWLWLRHQPQSSLTRWFHDRAKRAREGWRKTAIVALARKLLVALWKYVNAGVVIEGAVMKPVPAA

SEQ ID NO: 291437 - protein, 356 aa, unidentified
MSHKLSTGIAVIGIDIGKNSFHVVGQDQRGAIVVRQKWSRGQVETRLANLPPCLIGMEACVGAHHLSRKLQLLGHDARLMPAKYVRPYSKGQKNDFRDAEAIAEAVQRPTMKFVATKTAEQLDLQALHRVRERLVSQRTGIINQIRAFLLERGIAVRQGLRFLRAELPGVLATRTDTLSARMLRVIEDLAADWRQLDERIEGLSGEIEALARQDQACERLMSVPGIGPIISSAMVAAIGTGDAFAKGRDFGAWLGLVPKQISTGDRTILGSISKRGNRYLRVLFVQAAWVVLVKLGPKQWERYGLKSWIEAAKKRLHHNVLAIALANKLARIAWAVLYKERNFECVRRNAIASRSA

SEQ ID NO: 291438 - protein, 478 aa, unidentified
MSKKRLYQRQSVNEVDRDWLRDRAVGHGDAGTTVGLDVAKHEIVVCVRWADGWFERPWSVKNPTEIGLLIELLQQLKEICGSLTIGMESTGTYGDAVRLAMTAAFLEVHRVNGKSVSDYKEIFDGVPSQHDGKDAAMIAELTHFGKGTPWPYSPLSEADQKLRHQILRMDAFRLQATQWTNRLEGLMARHWPEVTRLLPLSSKTFLKALETYGSPAALAADPEAAQRMYCWSCSNLKPKKIDRVLETARTTHGLPVGAAERCWIQEIASEALSALKEMEACKKQLQEMASQHKEMKKYVKAVGPITLCVIWATVGDPRQYGSSGAFLKALGLNLKEISSGKRKGELGIAKRGPGLARKWLYLWSLRAVQRPELHDWYQAFQQEGKRSKGKSNSHRKMKGIIALMRKLCRSLWYTMRCDLEFDYEQVFPGKPLARQGVLPPARAVGSGAAAEPSLRLDKKDRPAPSPSIGPRQASVGPM

SEQ ID NO: 291439 - protein, 338 aa, unidentified
MEQITTIGLDLAKNVFQVHGVAAAGKVLVRKQLRRAEALRFFAALPPCLVGMEACGTAHHWARELTKLGHTVRLMPPAYVKPYVKRGKTDAADAAAIAEAVTRPTMRFVAVKTVDQQSVLMLHKVRELLVRQRTMLINALRGHLAEFGIVAARGPGGVTAVITALHEAQDGLPDLARQVLHGLIDQMRVVGAEITKAEKRIMAWHRASEASQRLATIPGIGPITASAIAAAVPDATLFRSGRQFAAWLGLTPRAHSSGGKQRLGGISKQGDGHIRRLLVIGATAVIRFARQDNASKTWAARLLERKPARLVSVALANKTARIAWAILARNQSYTAPAV

SEQ ID NO: 291440 - protein, 343 aa, unidentified
MGEVSTIGLDVAKSVFQVHGVDDTGAVVMRKRIGCAKVLEFFDGLSPCLVGLEACPSAHYWSRELRALGHMVKLMPPSYVKAYLKRGKNDANDAAAICEAVTRPSMRFVPIKTQEQQTGLMLHRTRQLLVRQRTMLSNAIRGHMAELGIISAKGRNGTAELLQIIGDVADDRIPPVARLCLDLLARQYLTLNAEVSSIDKRIHAWHRSCEESRRLEEIPGIGPIVATALVAEIGDWGAFRSGRSLAAWIGLVPQQHSTGGKERLGGITKQGNRYLRWLLVAGAMAVIRYARQHGTRRAWLTRIMGRRPAKVAAVALANKIARMAWAIMVRGERYTEPKLLLAA

SEQ ID NO: 291441 - protein, 313 aa, unidentified
MGKNIYEIVWGIDVSKGWLDVSINSTVFRVKQTRKDINGLIKQHHEKQSRPLVVLESTGGYERLAVECFAAAGFVVHVAHPNKVRAYAKARGYLAKTDKMDARVLEEYGHFIDPDTIHQLPSKLENKLKALSVHLAQLKESHHQECCRIGMVTEKEVRRSHKTLIALLEKQMEKIQSELLNLIRSETSLSEKYECLLTMKGVGPTLAMVLVAELPELGKLNKKQIAALLGVAPMTKESGMRRGKARTQAGRSAIRRVLYMAALSAARYNEKLKPFYLNLVAKGKPKKVALVAVMRKMIVILNAMVHSNTVFNV

SEQ ID NO: 291442 - protein, 410 aa, unidentified
MRIIALDVHRTFAQVAVLEDGKIRNAGRIDLEHSRLLQFAKTLKPDDEIIIEATGNTNVIVRLLSPFVGRVVIANPILVRAIAWAKVKTDKIDAAVLAKLHASGFLPEVWMPDEETETRRRVVAERAQLVSQITRLKNRIQSVLHANLIPPYKGILFSQRGRTWLTAQPLPEDQRRVILRHAGELDRLGAELAEVDKSLALRALEEPQVKRLMTITGVNATVAMSVLAAIGDIRRFSSQEKLVSYFGLNPRVRQSGDKPAYHGRITKQGRAHARSMLVEAAWVVSGAPGPLRAFFIRIRDKRGKHVAAVATARKLAVVVWHMLTKDEDFTWSRPALLQWKLRKLELKAGHPSRRGGHQKGSAAAYSNKSARDSEREATGNAEEEYRRFVANWKQQSPKGRSGATNEVRRS

SEQ ID NO: 291443 - protein, 328 aa, unidentified
MIIGIDVSKSKLDVCILIDGQNKKQFIIENTPKGYAEILKTIKLFSFTNEDCFFCLEHTGVYAMPICYWFEQNEMNYCLVPALEIKRSIGIKRGKSDKADALSIARFAYYKQGELVCFRLPEKDLQLLKVWIAQREKLVRAIKMFTQSNEMKEFLPKSITKQAIGMNDKTVKFLQKQQKEIERKISEVIENNPLFKNTVELAKSVPGVGDQTAITLMITTRCFTSITDWRKMACHAGIAPFEYTSGTSVHGKTKVNQMANKKLKTLLNFAALNAKKYDNELRLYYERKVSEGKNGMSVMNAIRCKVLSRIYATVKRGTPYVPIARYAA

SEQ ID NO: 291444 - protein, 394 aa, unidentified
MRFAGIDIAAETHVVALVDEHGALLVKPTPFAEDAAGYQTLRTLLGGSEDLLVAMEATGHYWQNLFAVLVAEGFAVALLNPMRTRRFAGEDLARAKTDAIDAVGIARFAAQKRPAVTRLPAAATQELRELVRLRDRLRQEFGDRVRQLHRLVDLGFPEFTRVIPDLKGRLATALLAAYPTARAFAGVSVVRLAALRYDRVHRVGADLARALLAAARESVGQHHGPAYQLQVRYLCEDLELLRRRIDALEEDVATTLQTHEVGMLLTTITGIGVQTAARLVGELGDPARFRSAAALAAYVGVVPGTRESGKRRLTHARLAPTGHARLRAALWMPTLVAVRTNPWLRAYYERLRARGKLPKVALIAALHKLLLAIYSVAKHRRPFVPHLTVQGVQA

SEQ ID NO: 291445 - protein, 353 aa, unidentified
MIIIGALPPGLSANCVCGYRHRGVPGTATATPRGSGKVLSRAREPGMQVRVGMEASGQARWFERLLSELHFELWIGDAAQVRTKRVRKQKTDRQDAQLILQLLLEDRFPKIWVPSWENRDLRQLLWHRHRMVQARTRIMNQLQAVALNEGLRCKKRLWREAGREQLESFALAPWASRRRRDLLELLDQLTPTIAELTQAIEQEVEKCPEARRLQTHPGVGALTALSFVLIIGRADRFQCGKQIASYLGLVPLEDSSGQRRRLGHITKQGNSLLRFLLVEAAQVTVRSDPEWRSQYFHLAMRRGRKIAKVAMARKLAVRMYWMWRKGWDYEQLKKFGSHAGQPGNRHGVKSITE

SEQ ID NO: 291446 - protein, 346 aa, unidentified
MPHVGIDAHKAQSQICVLFEDGQVLERRVLTRADRLRKVLQEHRGSPVLIEASTESHWVARCLEEDGHTVIVADPNFAPMYGMRQRRSKTDLRDAQALAEACRTGTYRRCHQASDESRAIRVELRVRAMLVRQRAAQISLVRALARGDGGRIPNATSRSFVSQVRRSGLSERLMVQLDPLLAMITALCDQIAELDVRLADRARDHATARLLCTAPAVGVITALAFVSALDDAGRFTDSEEVASFLGLVPREWSSAERHRFGHIHKAGPAQLRWLLVEAAWRILLLKDPASEPLRRWAQRIAVRRGRWIAIVALARRLGCVLYTMWRSGQPYSAARLTSRLAVGKVA

SEQ ID NO: 291447 - protein, 421 aa, unidentified
MQEQVSAFAAFVGIDWADRKHDVCLHVPGASAPEASVLEHRPLVIDAWARRLRERFGGRPIAVCVELAQGPIVSALLEHDFFVIFPVNPTMLAKYRSAFVPSGAKDDPTDAALALDLLRRHPEKLAPLKRESEDMRALRRLVQARRDLVEDRVRVTNRLTFTLKDYFPQIVEWFRDKETDVFAAFLERWPSLQAAQRARRETVVAFFHAHNVRRAIVIDKRMAWIESELPLTSDPAVIEPAMAVVATLLPQLRALSAGIARLDADIARRCEALPDFRLFAPLPGAGAVFASRLLAAFGENRERFADAGAVQKCVGIAPVTERSGNKHWVHWRWACPTFLRQTFVEWAASSISHSFWARAFYDSHRAKGSSHNATIRALAFKWIRILFRCWVDRTPYDESRYLSALQKRQSPLLKFAAAQPS

SEQ ID NO: 291448 - protein, 368 aa, unidentified
MSHDTTFVGLDVHKDSITAACIGGDADASLIDLGTLGTQQYAIDRLCKKLSGRGRLRFVYEAGPCGFWLQRYLAARGYACEVAAPSLIPKRPGERIKTDRRDARNLALALRAATLSCVHIPTPEQEQFRDVVRAWQQAKRDVTAARQRLKSFLLRHDIRYTGRANWSAAHRRWLSEMVLPSPAQQIVFQELVDSITERERRRDRLEHQLDALAPEWSGHPLAQALLAFRGIQKTVAYTVVAEAGDLSRFAHPKHFMAWLGLVPGEHSSGPTRRQGPITRCGNRWARTLLTEAAWSYRYSPKVSRIIETRAQDIDPAIRAIAWKAQIRLHHQYRKLTAKGKHKNVAVTAVARELAAFIWDAARQIEQSA

SEQ ID NO: 291449 - protein, 330 aa, unidentified
MEEHYIGVDLHKAFFQVCAVDSFGQRCWEDRFPTTPGGIAAFLGRTRAGVTVGVEASGPTWSFVDRLQGRLAQVVVVDAAKTRWKAGYAAKTDRLDARRLADALRRESVVSIYYPPPAIRDLRELCRYRRSLVRTQTGLKQRLQALLLRHGVVEPAGSTLWAGQGARWLTGLALPGRAGESLVGLRQVLAAVANQVMTVEREVVREAAGDPIVIALQTLPGVGPVLGLTLRAEIGEITRFPDPPHLASYAGVVPRISQSGLRRARAGAITKQGSPWLRWALIEAAIHGVNRADPVGRWARRLAVKKGALKTRVALARALCEDIFRVWPRT

SEQ ID NO: 291450 - protein, 365 aa, unidentified
MQKLNDLSRSLTALEPNGTLIAVIEMSLSSWRVAGIVPGVERQPLKKLAVDESALLKLLHRWREEAEKAGRRIERIAVAFEAGRDGFWLARWLKARGIEAYVIHASSVAVSREHRRAKTDRLDTELLKRSFLGWLRGERDHCKMVEIPTMQDEDAKRPNREHDSLIGERSRIVNRMKAALVRLGIRGFNPKLKRATTRLDGLHTPEGEPIPPNALAELRRDMERRRLVNNQIRQIEEERLERIEQAPCDMLVHEVLSRNMRDRRAVARYAGLTGSPDESGRKRREKGLARSGNARVRRGMIQLAWRFLLHQKNSALTKWFRSRTENARGTRKPMIVALARKLLIALWRLMREGIVPDGVVLRPAQ

SEQ ID NO: 291451 - protein, 353 aa, unidentified
MSNVAQKWYVGMDVSEKKIDFFFLPPDDEGEGIHKIMPNKPDTLCEFCDTLPDPDSVVIAMETGTHSPWMSEYFERRGIKCYVGNARKLAAVWSSVQKSDRKDAEMLARLARADLKLFCPIKHANREFRIDAVTLKMRHRLVLCRTTLTNCIRGNLRSFGIDTSGLTPENFSTEVAKLIPSEMFLAMEGVLVQIKMLTQQIKSYDRQINKLCKKYEQTKRLQQIPGVGPVIALAFVLTIIDPERFGSAGRVASYTGLVPKRDQSGDVDKQLGITKAGNKLLRQLLLQGANYIISRAPDCELRQFAERLAERGGKIARRKAKVALARKLCETMYSMWKNETDYNPFYKAAKKCV

SEQ ID NO: 291452 - protein, 377 aa, unidentified
MGKDTAFVGLDVHKETIAVAVAEDRRGGEVRYLGEIANTRETIRKLVAKLSKAHDALHFCYEAGPCGYGIHRQLTDMGHDCELVAPSMTPSRPGDRVKTDRRDAVLLARLHRAGELTRVWVPDEGHEAMRDLVRARTAAMENLRRARQQLSGFLLRHDRVFRAGCNWTKKHRVWLSGLRFQHPAHQIVLQEYIHAVDDAATRLARIEDQIRTLVPTWSLAPVVEAIQAMRGVSFISAVTVMAETGDLGRFDNPRQLMSWLGLVPSEYSSGPRTARGGITKAGSKDARRVLIEGAWTYRCHAAVGKEHMARLEGLPQEIRDIAWKAQIRLCARYRRLSARGKPATLVVTAIARELAAFIWAIARKVTPNTRPEPAAAC

SEQ ID NO: 291453 - protein, 380 aa, unidentified
MPDVSSTAPAQIRMWVAIDQHKLSLVAAMLPASGGQPEVVRVENTERAIRRFLQRLGGAEGLAVAYEAGPGGYELHRLLSSMGVACDVIAPSLIPVRAGDRVKTDRRDAKKLVRLLRAGELAFVQPPSPMQEGLRDLVRCRDDLRCARTAARHRVAKALMRHGHVYRQGKAWTLRHRAWVESQRLADPLAQAALEHMLTHLGGLDVQIAALDQQLEQIATREPWADPVAWLCSFRGVSTHTALGLLSEIGDFRRFAHPRELMSYLGLTPSEYSSGQQQHRGHITKTGNRHARRLLVEAAWHYRHRPRQSTRAARLQEHVPTEVTIRAWQAQIRLHHRHRVLAEHGKRSTVANVAVARELTGFIWAAMTKAPLREQEAAAA

SEQ ID NO: 291454 - protein, 414 aa, unidentified
MLKIVYRVCCGMDVHKSFVVACIASTNEQGVTTYKSKRFSTFTGDLRRCAAWLSENNCKDVCMESTGKYWIPIYNILERTCNIVLAHPKYVKAIRGKKTDKRDAKWIADIFKHNLVAGSFIPPADIRQLRDLFRYRWKLTNFATGEKNRAQNCLTVSNFKLDDVFSDVFGKAASAITARILKNPSEKITDVSGFRTKRMKATDEEILAAVDGEMCAEQAEKLRIIRSHMDSLELCKLNLESLILSTAEKYLPQLELVMTAPGIQSFAAIGIISEIGVDMSVFPTSKHLCSWAGLTPQNNESAGKKKTTRISRAGAYIKPLLVQCALCAVRAKQFPEVRNRYLALKKRRGHKKAIIAVARMLLTAIYNMLKKNEPYNSELYRKGDRPPAHREVSVEEAVFILQRQGYLVSAPPTP

SEQ ID NO: 291455 - protein, 407 aa, unidentified
MLFVGNDWAEAHHDIEIEDDQGRVLVRRRLPEGVEGLATLHALVGDRLAEDAEPEQVLVGIETDRGPWVQALIAAGYTVYPINPLQVARYRERHGVSGAKSDPGDAHVLAEIVRLDRAHHRPAAGDSVVAEQVRLAARAHQSMIWMRQRSANTLRSLLRECYPAALAAFADDLAGRDALAVLTAAPGPAEGRGLSVSRVAGLLRNAGRQRNLQKRAAEIVTALRSEQLPVRAELEGVNAATVSALVAVLTTMVAQTGVLEEQVRLGFGQHPDAKIYLSQPGLGTILGARVLAEMGDDPDRYTDARARKNYAGMAPITRASGTKRVVLARYARNRRLADALYQQALSALTASPGARAYYDRHRTRGATHHQALRALANRLVGVLHGCLRRQQPYNENTAWPSEHQLAA

SEQ ID NO: 291456 - protein, 458 aa, unidentified
MNQQTQDYRKMPIVHQQVAGVDIGSQFHVVAIGDDPKQHVQQFGVSTKELFRLAQWLTDNQVKHVAMEATGGYERPLVNVLQEADFEVLVTAGANTKNYRRFKSDTSDAIHIRTLHSLGLLPPIFLPDEFSTLIRPLVRLRRSLVEDAADYIRRIQKALRAGNVRLDAVLTDTNSVSGLRIIAAICQGQEDPLKLAELVDSHCKKKPAEIIELLGGNWNGAMRFEVRSNYRLYLNLQAEIAELDKELDQHFTDHTKGLKQPTAVTDPTVGRQKLRQSRNTPRLPIEQYAHKLLGVDLSNIPGFGRDALLTFIAEVGESISKFHSAKAFAKWLGFTPNNKASGGKVLSKKTLKNKSTLPNTFRMVANSLGNMKKPNPMTAFFQRIAYRAGRIKAITATARKLAVVVYKMLTTGEAYEPAKLVRDIAQVKQQQIRQIRKKLAKFEITGQDLGLFATLGAA

SEQ ID NO: 291457 - protein, 347 aa, unidentified
MSQYIGIDLHKAKSFVTRMDRRGRVLEQVNLPHATGALQRYLERIPRDTRIAVEATGNWMWLYELIEARHPDLVLAHPLKTKAIASARMKTDKIDATTLAHLLRADLVPAAYIPPRAVRDTREILRYRASLVRLRVQVKNKIAAVLSKTGITTPTKTAFGVKSRHVLATVPVRPCYRLALDGYLRQLERLTEEIRQVAQTIEAQAAADPDAQLLCTMPGIGPYAALLLLSEIGDVHRFPDSRHLCSYAGLVPSVHASGGKTRLGRLTKQGSRWLRWILVELSKHAIHGAPQFRQLYSRVAKKHGANTGRVAVARAMLKTIYAMLKHQETFRPMVTGSIGQRPRVMAG

SEQ ID NO: 291458 - protein, 412 aa, unidentified
MQVVHAQCCGLDVHKRGVVACMLLTQPDGTVERRTSTFGTMTADLLALHDWLGDHGVTHIALESTGVYWRPVYNLLEEAGRTILLVNPQHMRAVPGRKTDVKDAEWLADLLRHGLLTGSFIPPAPIRELRELTRYRKTLVQQRADEVNRVQKTLEGANVKLAAVATDVLGVSGRQMLAALLDGQDDPEALAELARGRLRAKLPELRRALDGRVQPHHRALLAHQLAHIDFLEATIADLQQEIAAALRPYDEAVELLQTIPGVGPVAAMAIVAEIGVDMGRFPSGRHLASWAGVCPGNKESGGKRLSGKTIQGNVWLRGMLGEVAWSIARSKGTYLHAQYHRIARRRGKHKAVVAVAHSVLVIIYHMLRDQRPYADLGPDYFDRLDAARLQRHHVRRLEQLGYTVTLQPQEAA

SEQ ID NO: 291459 - protein, 421 aa, unidentified
MRELRAKRARMVKEGTLIATVDIGITSNTGYCTTLDGRSTKSFRFGNTKEGFERFWYMTIASKNRFGCDEVLVGYESTGPYAEPLVHYLANQQVKIVQVNPMHTKKMKEVNDNSPLKTDDKDPRVIADIIRLGRALTIVVPEGDAASLRRLNNARERHVGEQTALLNQLQQLVFLIFPEFKTVLKNMKGKTAQYILKRYTLPERIGTLSKEALGEEMRKWSRGKFGIKAAESLIGLARETVGIKEGIAGIFMDIRHILTQLEAEGRFISEIEAEMRATLERIPYSGRLLSIKGLGIVSVAGLIGEVGDFSKFSTQSEIMKLAGLDLYEISSGKRKGQRKISKRGRSLLRKILFYAAIQMIRKNGIMSEYYARLIGRGMERMRALIAVSRKLLRIIHAIVRDNRDYVGQYQAPERRVIKMAA

SEQ ID NO: 291460 - protein, 415 aa, unidentified
MKPWKEITYYAGFDWAHDHHDVVIVDRRGEIVADFAIAHTAEGWLRWREQVTTLGAENLAVCVETSQGLVVEQLLESAVSLYPIAPVSSKAYRERKAPSGTKTDRLDAWSLADALRLDGHRWKALAKEDPLIAELRLLCRDEVLLIEERTALVNQLQSALQEYYPAALEAFEDWTLPAAWAFVDVFPTPRALAAAGQRKWEKFLHVHKLARPQTYAKRLEIFARGSELAAGEALTRSKSRLALTRIRMLRVIQTQIEAYRAEIEKLFAKHPDHHLFGSLPGAGPKIAPRLLGEIGSDRARFDDPSALQALAGTAPVSYQSGQIHKVYLRRHCNKSLRATIHLWANLSRRASPWAAVYYQALRARGKSHASALRCLGQRWLKILWKIWQTRRSYDPELHARNQLKHRSWILTLQSA

SEQ ID NO: 291461 - protein, 410 aa, unidentified
MKPLFVGIDVSSRNNVAYLMKPDGSEYSSFSVQNNLGGAKLLSEKIVSALRSMQLERVVIGLEATSIYGDSLVYALREDGSLGRFQRKIHVLNPKQVNKFKLSYNDLPKNDYVDSFVIADCLRFGRINKEVYLDDYRYAALKNLTRARFFAVQNLTREKQRFMNHLFKKYSTMAQEKVFSDTFSTTALAVYESFESAEALANMDLHQLTEFIIEKGKKRFPDPDSVAKAIQKAARSSYRLPKTVNDSVNQVLSISISSMRAMESQIKAFDKAIAEQMALIPNTLTSVKGIGPVYSAGIIAEIGDINRFPTQASLAKYAGLVWSQHQSGDFEAQNTRMIHSGNRYLKYYLCEAALSLVRCDAEYRSFYHRKYKEVNKYQHKRALALTARKLVRLVFRLLKDNCLYRAPESK

SEQ ID NO: 291462 - protein, 355 aa, unidentified
MKDTMIGVDLAKSVFQLHGASMAGHLKFRKKVTRVQFRDFMAKHEPAVVVMEACGSASYWAREMAKFGHEVRLIAPQYVRPFVKRQKNDAADAEAIVIAARQPEMRFVEPKTVEQQSRAAVFRSRERLVHQRTGDVNALRALLYEHGHVFPVGIRYLDRMTVLVEDKTSDLPALIREECQDLLAQISEKTVRIAKRTSKLKTLAAESDRARRLQTMPGVGPLTAIAVEAFGPDMAQFKTGRDFAAWLGLVPRQHSSGGKARLGRMTKAGQADIRRLLIIGAMSRVIGRGRHKIKAESWVGGILNRKPKMLVAIALANKMARQMWAMLTKNEDYRDPALAVRHDAYAEPLATVRGV

SEQ ID NO: 291463 - protein, 313 aa, unidentified
MELYIGIDVSKDKFDVASYPSSFESTFANDREGISSFVRSLRIAKPKLIVLEPTGPYHVALRNALHAAGLPVSVVNPRHTRCFIQSDGELAKTDRIDAAALALYAARMRPAVRELPDARQQQLQALMSRRRDLVGYMTMEKNRRECASPWILRKINKHIHQLQVELDAIEARMTTLLEADSQRWLQYQLLLTVPGVGKICGFTLLALLPELGRLNHKEIAALVGVAPFNFDSGRYAGKRQCWGGRSEVRRVLYMAAVSARKHNPVIKEFYERLTGRGKPPKLALVACMRKLLTILNAMLRDHTPWQAEPALAA

SEQ ID NO: 291464 - protein, 358 aa, unidentified
MSTYYIGADVHSNSTELAIEKRGEIVARYSVPTSIPAIINVLDSIQGKKYLAVEEGPMSGWLYRNLNSKLDQFISSDPRRNKLIASEGDKDDKIDSAKLASLLRGGFLREVYHSDDDGRAELKHWVSLYHDRVRDAVRSINKIRARCRMHGVKISRAALRDPASRIKWLLKTKHNPLANQLKMLWIGYDATVQQVKFAKRQLSTLSRKYNIIEQWSQLPGIGLIRATTIFAFLDTPWRFKQKNKLWKYCGVGLQRTTSGTDKKGRPKPARLQLPWAVNRTLKNAVLGAALSAINQKDNVFKDYYERMLKDGIITSNARHAVARKMLTVMWAMWKTNSRFDEKIVCNELNRPTVQVLSR

SEQ ID NO: 291465 - protein, 312 aa, unidentified
MKIICGVDVSKARLDASIEPGAIFESFDNDPAGIAELAAFCRQHQAELVAMEATGGYQRRAFLLLWEAGVPCAMTDPRSVRRYAKSMGILEKTDRIDASVIARFSHAKNLQPTPAPTPAQQRLKALVARLRQVTDDLTVQKQRRASLLDNAEMLASIGEIITLLKRQSRTLEGEIASMIDDDPLWAKLAEAWRSVKGIAGRTVARLMADVPEIGTYSNKAIAKLAGLAPLADDSGKRQGKRSIRGGRPSVRSILFLVAAIAAKYDKTLAAFRDRLLAAGKPKMVVRIALAHKLLVRLNAKARDARAQYANAT

SEQ ID NO: 291466 - protein, 411 aa, unidentified
MERFVERCAGLDVHKDSVAATVHVPGPEVSRLQETRTFATTTRGLLALADWLASYGVTLVGMESTGCYWKPVYYLLEERFECWLLNPRHLRNVPGRKTDVADSAWICRLLEHGLVRASFVPPRPIRELRDLTRYRKTQIEERSREVQRLDKVLQDAGIKLSSVASKTLGVSARRMLDALVAGTHDPELLAELARGRLRRKLPALKEALSGRFRSDHHGLLVAQILAHIDYLDETIATLSERIEQAIAPFSRERELLQTIPGVGRTGAEVLIAELGVDMSVFPTDAHLASWAGQCPGNHESAGKRRSGRPRHGSKWLQTTLTESAKAASRSKGTYLGAQYTRLRGRRGPRKATGALRHSILIAAYHILDQNTAYRELGADYFDRRSTDQRTKRLVRQLEKLGHTVTLEPLAA

SEQ ID NO: 291467 - protein, 379 aa, unidentified
MSQNTTAIMNQNITSVYAGLDIAKASLQLHLQNRSYDLSNTSAGHAQLIKRLAAIPGAHVICEATGGYERAVVAALQAANLPVSIINPARVRQFARASGELAKTDPIDASMLTAFGFAFAPDPTPPRTAAEIKMAALVTRRAQLLELRVAETQRADTCAEPSLSKLFRSWLPQIEKQITKVEALIEELLAEQTTLAHHVERLDEITGVGRITAVTVLANMPELGQLNRRQAAALAGLSPYNRDSGQWAGKRCITGGRNEVRRALYMAALSASRRNHHLKPFYDRLIAAGKPAKVALTAVMRKLIILMNHLLKNPSFSLREWEMLWHAAASTPQYSPHTDSKRASSTRERRRDPQRLRRENAPLPIQSCLSPSRGTRISS

SEQ ID NO: 291468 - protein, 348 aa, unidentified
MDHIGIDVHKRESQIYILAEGGEIIERRIRTEPERFAAVLGGRPRARMLIEASTDSEWVARCLEALGHEVIVADPNFAPMYATRTRKVKTDRRDARALAEACLLGAYRPAHRLSDPQRHVRGRLGVRDALVHTRTRYISVIRALLRQQGYRVPSGSAEGFIQRVRALPLPGRLLSVVAPLLAVMRHLNRQLAYSDATIEHLAVQDPRVPRLRSVPSVGPVTAAAFIAAIDDAQRFRHAHQLEAYLGLVPREYSSGETQRRGPITKAGHSRARWLLIQAAISILRRQPPEAEALRTWALRIAARRGKHVAVVALARRLAGILYALFRDGTVYAPRRPAAHPDPVAVLHA

SEQ ID NO: 291469 - protein, 386 aa, unidentified
MQPILECCCGVDVHKDMIEACIIKGLNNPELIRRQFSTFPNSLKEFVVWLFENDCYHIAMESTGVYWRPVYEAIEANSAYYENIIVANAHHMRNLPGRKTDVKDAEWIATLLQHGLLEPSFVPERLIRDLREFSRTYKNAVSDKTRYVNRLDTFLQTHGFKLSSVLSDINSVSGINILTLLAQKGRLSISEVSAALKGNHKNTADDIQKAICGILNDNECFLLHDFIDEIKHIQEHISKILEKMQELSEPYSEIIARLDSIPGIDITAALLILAEIGECPNKSFKTSKHLCSWAGLSPRNDESAGKIKSKKVMPGNPYVKSILCQVAWVAVKNRKTPLGNWFWSHQSKLGRKKAIIAVSRKILALAYTLISNNTFYDNNYLQTQLN

SEQ ID NO: 291470 - protein, 374 aa, unidentified
MEKDSRFVGLDVHAETIAVAVAEADGTVRSLGTIPNTPEAVRRLVTKLGPRKLLRVCYEAGPTGYVLYRQLTALDVPCAVVAPTLVPVKAGDRVKTDRRDAAKLARSHRSGDLTPVWVPDAAHEALRDLVRAREAAKQDQLRARHRLSKFLLRHGRRAPAGLKAWGAKHSAWLNTVRFDAPAQEATLVDYRHEVDHATERIARLERALTAVVAAAPAPLRAVIAALQALRGIAMLGAVTIVTEVGQFSRFAHAGELMGYSGAVPSEHSSGPKTRRGSITKTGNAHFRRILMEAAHAYRHRPAVGTTLRARQRGLGEEVKAIAWKAQHRLHGRYRHLSAKGKPIPKVITAVGRELVGFLWAIGVEVEREEARHAA

SEQ ID NO: 291471 - protein, 371 aa, unidentified
MADYSEVFVGIDTSKLRNAVAIAQAGRNSEVRYLGEIDNTEAATSKLVKKLAAQHRRLTFCYEAGPTGYGLYRLIKTLGHECVVVAPSLIPKKPGDRVKTNRRDALNLAKLLRAGELTAVWVPDARHEAMRDLVRAREAAVDDLKSKRQQVLSLLLRLGRHFTGKRTWTRAHMNWLASQKLAHREQRIAFEEMLLAVRQAGERVIRLERAIAAAVPDWSLAEVVPALMALRGLDLISATIFLAEIGDLSRFASPRQLMAYLGLVPGEASTGDRVWRGGITKAGNHRARRILVECSWSYRHPPRVGKKKLAKVEAAPPAVQEIAWKAQTRLTARYRALARRGKRPTLVVTAIARELSGFIWAVSRAVGAPAR

SEQ ID NO: 291472 - protein, 318 aa, unidentified
MTFKVVRFICGGMDVHKNLIVATIGTTDRQTLITEYIQQSFSTFYSDLIRLKEWFISHDCYDVCMESTGKYWIPIYNVLETELNICLTHPKYVKAIKGKKTDKRDSKWICDLYKCDLVKHSFIPKKEIREMREIARYRCKLVYMRSSERNRYQNCLTVSNISLASVVSDPFGKTATNIMKELMQSEVIEDDKILKLIHKNCKDKDKILDSLQGYRIESDQRFKMDTVMNHIEYLDKQIQACEAELIKRAYPLRDYFQHITHIKGISALSAILIVSEIGTDMNQFESDKQLVNWAGLSPANNESANKKNPFASLKLVNT

SEQ ID NO: 291473 - protein, 347 aa, unidentified
MMKILALDLSKFKSVGCVYEAESGEHRYRRVNTTPQALHDLLVDLEPDRVVIEVSSVSGWVSDLVRALGLELQVVNTNGEAWRWRNVKQKHDQGDALKLARLSAVNQLELVHVPAPAVRQWRAVIKYRQHLVGRRTDIKNHVRELLVREGVVLPRGRKCWSEAGCERLEKLACNWEEVGIAELWRGELESELQQLQVIQERIREVEAKLEVLAQADERVGRLQTIPGVGPRLAEAMVALIDDPHRFRRARDVGAYLGLVPRQYQSGELNRLCRITKRGSKLLRSLLVEVSWVSLRYNPWLRSLYERMNRGSKTRKKIAIVAVARHLAIYCWAMLRDGTAWRPPCTNQ

SEQ ID NO: 291474 - protein, 343 aa, unidentified
MLAITTVGLDIAKSVFQVHGIDARGSVVVRRQLKRRYVLAFFKKLAPCLIGIEACATSHHWSRELQALGHTVRLIPPAYVKPYVKRQKNDAADAEAICEAVQRPSMRFVPTKTPEQQSCLMLHRTRHLFIRHQTAIINTIRAHLAEFGIVAPVGRNGVEDLLYAVADQRDERIPEVARACLEALGALLSKLKAQILEFDRQINAWHLSNEMSRRLDELPGVGPALATALVASVADPKAFRSGRDFSAWIGLVPKQNSSGGREKLGSITKQGDRYLRSLFTAGALAVIRYAKIHGTKHRPWLARLLERRPTKVAAVALANKIARMAWAMMAKGERYREPIALAR

SEQ ID NO: 291475 - protein, 310 aa, unidentified
MTTYAGIDVSKGTLDLAVHEGAATSYPNTEAGIAQLRAALPRDALVVLEPTGRYHLSVTAALVAAGRAVAVVNPRQVRDFARSTGQLGKTDRLDAALLARFAAVVQPPVRALPDAATQELADTVARRRQLLEMRVAEQCRLEIRSTRIRKSIHRTLKLLDAELAALEDDLDDQIRQSPVWQATADLLRSVPGIGPHTARVLIAELPELGRCTRREIAQLVGVAPHPRDSGTYRGARHCWGGRAAVRSALYMAAVTAARCNPVSRPLYARLRAVGKPAKVALVAVMRQLLTILNAMLKTNQRWQPRLATTA

SEQ ID NO: 291476 - protein, 315 aa, unidentified
MADQTFVGIDVARDHLDVGLYPTGKPWRVPHTAPGIAALTAQLQALRPTRIVLEASGGWELPLLAALGSAELPVVAVNPRQVRDFAKARGTLAKTDRLDAQVLAHFAAAVQPALRPLPTAATQALAALVSRRRQLLDMLVAEQNRTSTAPPAIRTDIQTHIAWLRQRLTGLDQQLAATLRASPLWRSQEDLLRSVPGIGPVASVTLLAQLPELGTLDRKQIAALVGVAPLNRDSGTRRGQRSIWGGRASVRSALYMAALVGIRHNPVLRAFYARLLAAGKPKKVALTACMRKLLVICNALLKHGTRWVPPTPLSP

SEQ ID NO: 291477 - protein, 327 aa, unidentified
MVYLGIDVSKAKLDCALLAPATGKRKNKVVSNDKAGFKTLLAWLAKQDISVGEVHGVMEATGVYHEQAALWLTDAGMRVSVVNPTQVRDFARGLAVRTKTDGMDSVVLARYGTLIQPEAWEAPPLEIRELKALIARLEALETDARRELNRREKALVAKAPALVRESLDNHIASLSKEIARLQQAIDDHIDRHPRLKADRDRLLSIPAVGDKTANRMLTVLRSRKFTRAEQVAAFLGLVPVECRSGSSINKRPRLARNGDAKTRAVLYMAAIVATKYNPHVKALYARLCAKGKAKMAALGAAMRKLVHLCFGVIKHQTSYQPDWAGSR

SEQ ID NO: 291478 - protein, 358 aa, unidentified
MAVNEGTRRIVGGVDTHKDLHVAAVVDEQDRVIETRSFATTRQGYRQMLAWMRAFGDLQHIGVESTGSYGAGLLRFMQQAGIAVLEVTTPDKQDRRRRGKNDDLDAQNAAHAAFAGQRTVTPRSRDGMIESLRVLMACRKTAVSARRVALQMIHNTIVCAPDGLRDQLRSLTRMQLVRTLASWRPDLTAYRDLESAYRIGLKSLARRYLELHDEIADLDVMIAAIVDELAPNLVARNSIGHIGAAQLLLTAGDNPERLRSEASFASLCGVSPVPASSGKTVRHRLNRGGDRAANSALHIIAIGRLRTDQRTKDYVTRRIAEGHSKLDAIRALKRYLAREVFTLITQRRREINATRIAA

SEQ ID NO: 291479 - protein, 423 aa, unidentified
MDTLHERVAGLDVHKATIVACVRTLIGGQVKRECRSFETTTAGLLGLLAWLKECRCTDVAMEATGVYWKPVWNVLSDGGFELLVVNASHVKNVPGRKTDMNDAMWIADLVACGLLRASFVPDGSQQELRSLMRTRKQLSREQVRHEQRIEKTLEEANIKLGAVICEIMGVSGRRMIEAMIAGVRDPRKLAALADRRIKASPKELYDALHGRLTDHHRFLLELHIGQFDALNAAIERIDRQVSEALVRLDQEVADGQASFRTLISLLCTIPGVSTLSATTILSEIGTDTSRFPTSGHLVAWAGLCPGQNESAGKRKRSRLRKGDPWLKTVLVQCAWAAKRKKDSYYKAQFFRLSARRGPQKAICAVAASILTAIYHMLRNGTEHHDLGVGHFDRRPTEIKAKRLVAQLAKLGYHVELPPLNEAA

SEQ ID NO: 291480 - protein, 349 aa, unidentified
MNEVRIIGLDLAKNVFQVHGENEQGMRVLSRRLSRGQVSAFFAKLPACVVAMEACGSAHHWGRVIASFGHSVRLLPAREVKPFVRLPKTDASDAAAICEAARRPQLRTVAVKTVAAQAACTAHAVRDRLMRLRTAQINMLRGHLAEYGIVAATGREGAGRLKELVRQGLGGEEGHSETMPKLLTGALLALVETIDAIELSIESIEKDIRRAARADGRIRRLEEVDGIGRLSASALVAFAGDPARFKNARAFVAWLGLAPRVEASGGKMRIGTITKAGNEYVRRLLVHGARSLIHWSQQDKAGGRSAWIDALLARRPKAVVIVAVAAKLARIAWAMMTSGQSFRPRVQTA

SEQ ID NO: 291481 - protein, 352 aa, unidentified
MQHFIGCDVHTRNQFVAWIEEETGEIRKRRLEHGGEEVRKFYAQFPRGTVVGIEATFPAYWFERLLAELGHELWVGDAARIRASDVRYQKTNERDAEDILDLLRSGRFPRIWVPSLEERDLRQLLVHRMKQVRVRTQVKNQLHALAISQGVCRKGKLWSLKGRKELESLALLPWAARRRKELLEGLDRLDEQVRELDRAVEEAGRQRPEVALLRTHPGVGMVVGLAFVLTVGPIARFPNRRKLVSYLGLNPREDSTGDRQRLGSISKQGNTMMRWLLVEAAQTAARLDPQLRRTYQRLKNRRVSGVAKVAIARRLAVRLFWMLRTRHNYAQLVHMSGSPSSAVVSPRAGSMV

SEQ ID NO: 291482 - protein, 408 aa, unidentified
MEILYPRCGGLDVHKEQVTACRRVATDGKAKQDVRSFSTTTSGLLALAEWLGEVECTHVAMEATGVYWKPVWHILEGSFELVLANAQHVRNVPGRKSDVNDAMWLADLLAHGLIRGSFVPPTPVQEMRDLTRTRKQIVREIAQHTQRIQKTLEDANIKLGSFISNVVGVSGRAFLAALIAGETDPEKLADLADGRLKAGRKDLVEALRGRATEHHRFLLQLHLDQIDTLDKAVRALEERMGDALTPFREQVEHLKTIPGVSDTVAHVIASEIGLDMSRFPSAGHLISWAGLCPKMDESAGKRRSTRVRKGAPWLKTTLVTAAWAAARKKTGYLRTQFLRIKSRRGSKKAIMAVAASMLTAVYHMLRNNEPYRDLGTDHFDQRDKRQVANRLIKRLSTLGFTVELKAAA

SEQ ID NO: 291483 - protein, 338 aa, unidentified
MENFVGIDLHKYVSQLAVLRESKSPSQLRFANDVVTVERVLKKLPEGSKIAVEAMGSWWWLVELAQKSGHEVFLSHPKQTKAIASARLKSDKVDALMLAKLLKADLLPTVWIPPAAQRHIRELLSHRGRLVRQRTAVINELRAVYAKRNIDPEAKLQRARPIVSGAEDLSGYGPRIVEEDLKLLEFINRQIGGLDKELIKIALEDAQAKRLMTIEGVGPVSAVAISCWIGEIGRFSNAKKLASYFGLAPRVRQSGDTERHGHITKEGNRMVRMLLIQAALVHTRRGKGPSRKHYLGVVKRRGKQIARVAVANKLIGAIFHMMKEGMDYSDFIKRSGAQ

SEQ ID NO: 291484 - protein, 339 aa, unidentified
MRLYVGMDLHSSNCYTGIIDENSKKLLGRKITNDKRKIMSALSPYKEDITGIAVESTYNWYWLVDALMEEGYKLHLANPSAMKQYEGIKYLDDRHDAFWLANMLRLGILPEGYIYPRETRGIRDLLRQRSRFVVQKTSLKHTLQQIYCNNTGVILGNNTMYGLSEEEIRNALHDEYLSSNGVSILSTIRFIEGQIEAIEAQVLKKVKGEASYSLLQSVPGIGVVLGLTIMLESGQIDRFASAGNYASYCRCVPTAYWSNNKQKGGGNKKNGNKYLSWAFAEAANFAIRYCKEAKAFYQRKCAKTNQPSAYRAVANKLSKACYYIMKDQTPFDAQRLFQK

SEQ ID NO: 291485 - protein, 361 aa, unidentified
MTAAATAPTSETRTGPDVVIGVDTHKHTHMAVALSANGGWLGSLKLDAKRSGYQELIRWAAGFGSHPVFAVEGTGCYGAGLCRALQTAGLEVVEVNRPDRSTRRRLGKDDTIDAEAAARSFIAGQATVIPKAGDDLVEMIRMLKVAKDSATDNRTAALNQLHAIVVTAPAALRERLQRLKGKELVECCSGLRSGDISTPLAAAKMTLRTLARRIQQLDQELKDTVAQLDRLTMQHCPELRNTYGIGVDISATLVVAVGDNQERMKSEASFAALCGVNPLPASSGKVVRHRLNRSGNRQANCALHRIVICRLQRHQQTREYVERRTAEGRSMKEIIRCLKRFVAREVFGILRGGPAVRTAAA

SEQ ID NO: 291486 - protein, 369 aa, unidentified
MNTTTIEKQFGTFIGVDLGDTKHAVCVTDKDGKFLEEFTLVNSAKALEQLVERFPDAKIALEVGTHSPWISRFLKSKGVEVTVANARKLRAIYDNDRKCDKLDARMLAKLLRVDPELLHPINHTSEEAQLNLIPVKLRDTLVRQRVKAIASLRGVLKSLGVRLRSPSSAAFTKQARAQLAEQQELLTIIEPLLLAVDGLSAQIKHYDKVIAEAALAHTGCQRLQQITGVGPITALTFTLVVEETARFENPRDIGAWLGLVPRRDQSGSSDKQLPISKAGNRYLRNLLVQAAHYILGHFGPDCDLRRHGLKLAARGGKAAKKKAIIAVARKLAVLMLVLWQRELDYEPLKNAGKPAAEESGDETPMANAA

SEQ ID NO: 291487 - protein, 351 aa, unidentified
MSRKTEAGLACTIGIDTGKNTLHLVGLDAKGAVVLRDKLARGRIAARLANVPPCLIGIEAGMATHYVARELLVLGHDVRQVPPSYAKPFRQGHKNDFRDAHAIAEAVQHPSTRCVPVKTDAQLELQALHRVRSRLIGGRTAAINQIRSFLLERGITVRQGLRFLRQQLPQVLATRTDVLSPRTIRIIEDLSSDWRRLDERIEHVTEEIELLASDSEACRQLMTVPGIGPIIASAMVAAIGNGAAFAKGRDFAAWLGLVPKQMSTGDRTILGRITKRGNRYLRTLFMQGARVVLLRPTNWAKHSFGPWIAAAAKRLHHNVLATALANKLARIAWTVLAQGRSYERRAVPGIV

SEQ ID NO: 291488 - protein, 357 aa, unidentified
MKKIQHYIVKGKEVVIGLEDSKKTWRVCARCEDRIINQTAMPALYSNLRNYIRNNFPECTIKVAYEAGFRGFNLHDKLKEDGIECLVIPPHKIREEKCNKQKSDTTDAREISKNAEEKDCSRCYVPSKENREDRQLSRTLEHIGRDIIREKNCIRRMIEFHGLEEHFEDRAWTDKRYREFDIELKELSISESLKDSFLIIHTVLVKLMKLKELLKKKIEQLATKKNYERQVEILDSVPGVDVLTATRLLLEWVDVSRFDRAVMFACFLGLVPGQYSTGERERKGHITKQGNRWVRRWLIQISWVCIRKDPVMFETYTRIVSNTGSKKKAIVAIARKVAIRMRALLLKDETYELGIIE

SEQ ID NO: 291489 - protein, 324 aa, unidentified
MNVPKVKTGSYNRDCFVGIDVSKDKLDICIMPGGESWTQANGDFDELCDKLEVINPELIVLEPTGGCELGVLNALIRRGLRVSREHAYKIHHHGRASGQLAKSDKLDASVIAHYAEVYSRKIKPMTEPLEKQELLHQLSSRRKQLVVMRGAEKARLGQPGVFEGIRQSCERMIRSLSEEIEELERQIREAIGQDKEWRDNQEILESAKGIGEKTSSVLLANLPELGKINRKKIAALVGVAPFKNESGRFKGQQKVKGGRSEVRAALYMAALSAIRHDPRIRALYNRLLEKGKKKKVAITACMHKLLRMLNAMLSKRECYRPCVS

SEQ ID NO: 291490 - protein, 309 aa, unidentified
MKEELVYLGVDIAKSYLDAAIGNEKRRFANERTGHRELIKWIKQVEGSVQAICESSGGYERALIEALARAQVTVSLVQANRVRQFARAAGILAKTDRIDAKVLCIFGEVMQPGTISASQLEQQHLRELESQRRHLTHLLVMEQNRAARVSDACVRRLNRSLLNQIKKQIEQLDRLIKEHIEASPALLVKAQKLTAISGVGARTAALLLAQMPELGQLNRREVAALVGVAPFNRDSGKMRGKRAIYGGRRPVRHGLYMAALVAARHNPILRAFYLRLRAAGKPAKLALTATMRKLLIVLNSSLKPDPTYA

SEQ ID NO: 291491 - protein, 344 aa, unidentified
MNYYAGLDVSLRTVNICVINDQGELIAETKLDSEVTDIIAYLDELDLEVASVGLEAGTLCQYLTYGLQSAGFEVVCMEARQVKAALSAMRNKTDKNDARGIAQLLRTGWYSRVHIKSMESHRVRALLSSRKAVLSKCIDLENEIRGLFKVFGIKLPPKLGHGAFDAAVRDIITTDTTLSQSLLPLLDARLVLYHCFRELDNRTRNMAHADPVCQRLMSAPGVGFVTALTYKAGVDDPYRFKHSRTVAAHFGLTPRRFQSGEIDIDGHISRCGDRNVRCTLYTAANALMTRSSKWSSLKVWGMQLAKTRGHRRAVIAVARKLAVILHRMWLDDTQFQWGTEAARS

SEQ ID NO: 291492 - protein, 349 aa, unidentified
MHKYAIGVDVSMKDLHVCFMLLKEDFSSKIIGTRKFLNTNSGVKRFQKWINTKRKDQTLSLQIGMEATGVYHENLAYTLHESGYDVSVLVPGKVKFYFRSLGLISKNDQSDAKGLAQMMLDRKWPLWSPPTKQIRALRSLYRFRDSLQVQLTQVRNKLHAVSHSYSPNKYIVKELKKQIKSLSKQVDKVDIEIEKLLDQNTAFSKKANQIADSIKGLGLQTVGQIASELDGFNLIASQSQLTSFVGYDIIENQSGKHTGKTRISKCGNSHIRKALHFPAFNVVRYEVDVFEQLYTRVYERTKIKMKGYVAVQRKLLCIIYALWKNDTTFIENYQQESIEKTKPICEMAA

SEQ ID NO: 291493 - protein, 409 aa, unidentified
MLFVGDDWAEDHHDVEVQDESGHRLATARVPEGVAGISRLHELIGRFAGPDLSADQVQVGIEIDRGPWVGALVAAGYTVFGVNPMQVARYRERHSTSGAKSDAGDAHALADMVRTDSHQLRAVAGDSALVEGIKVTARAHQNLIWDRQRQLLRMRAALREYFPAALEAFDDLSGDDALELLSAAPDPDRAARLSRSRIAAALRRAHRHHVEARAEQIQAVLRGEQLTQPPELVAAYAATVAATAAVIGTFNTQIAALQEQVQAHFGRHPDVEIYRSQPGLGAILGARVLGEFGDDPGRYNGARARKNYAGSSPITRASGKKKTVTARWVRNTRLADPLHQQAFSALTCSPGARGYYDALRARGTSHHAAVRQLSNRLVGILHGCLRTRTLYDEHTAWGHHHAKPASKAA

SEQ ID NO: 291494 - protein, 359 aa, unidentified
MSPNRTRTVARVKCSHIARLGQFGAVSNDDESQENTQGANMSQIKETFVGIDVSKQSLDIALRGGQEESFSVKAETKELQKLTKKLKEAAPSLIVLEATGGLENELVCALALAQLPVVVVNPRQVRDFAKATGRLAKTDSIDAKVLAHFADAIRPEVRPLPDAQVTALEALVNRRRQLIEMRVAESNRLGSSSDKKVQSNIKAHIQWLENQLDHLDKDLSQTIKDSPVWREKDELLQSVPGIGPVASFTLLTSMPELGSVSNKKIAALAGLAPFNRDSGTLRGKRQIWGGRANVRTALYMPTLNATRHNPVIMAFYKRLRLAGKAAKVAITACMRKLLTILNSMFKNNSPWNENLASPS

SEQ ID NO: 291495 - protein, 341 aa, unidentified
MKNKSFIGIDISKNVIDVSIFCEGTPIKDFPHAVFNNSRKGFGEMCTWLKKNHVVLSNCLFGMEFTGSYSMELEKFLYARNYQFCMLSTHVVKHYPMGSKDKSDKIDSAKIADFLYRYNGTECVKPYKMPDKTMQRLKTLMNERKFLVEQRTCFMNRRQLCSTKEDAQLYDGYIRKLGHDIENIELEEQKLLATDDSLLTTYKNLLTIPGIGFVNAINAIVITRNFTAFETARQYASYVGVAPHSHTSGTSVRWRPRPSARCDGQAKADLSMAATVAVQYDAELQSFYNRKLGGKQDSDTKRKALNAVKFKLVLRMFAIGKQNRKWEPLDSKSSNEKLAIS

SEQ ID NO: 291496 - protein, 347 aa, unidentified
MVPDFEVKAGDRWFHQCVGIDIAKEKFDACLFMYDTGSDMGCCTQSVQFPNNKTGFNQLVKWSRKEALKDFPLTFLMEPTGVYYEPVAYHLHKVGMTVYVVLPNKARHFAEYLGIKTKTDEMDARCLALLGCANQRLQPWTPPIPIYRELRQLCRFAADMNKLRTMLNNHLEALQHSECPEPSVVKHYKSMIDVVDRKLEKNEATILSKVDSDKNLAEKVKRIATIKGVGIQTIVTVIAETNGFALIRNRKQLTSYAGLDVIASQSGDKDPKHKLSKKGNSRIRAALYMPAITAIRWNPQIHEAYGRIVDKNPGVKMIGVAAAMRRLLLLIYSLWNNNETYDPNRKQ

SEQ ID NO: 291497 - protein, 359 aa, unidentified
MDRIARIGVDLAKNVMQLHGVDAAERVVVRKAVSRDKFLEWFANRERCVIAMEACSSAHFWARRLREMGHDVRLIPPQFAAPYRKGGARVKNDALDAEAICEAASRPHMRYVSIKTAAQQGVLVLHRVRLGLVEERTALVNRLRGLLAEFDVFLPQGINRFRAGFVEAVEDGSNELPGLTRTALLRGWARFSEIEGEIKWYDAQIAQHAREDHNARRVVEMFGVGLLTASAATATVGDARQFRNGRQFAAWLGLVPKQNSSGGKDRLGRVTKQGNEYLRTLLFQCARVTVTAARRRKDKLSRWIAALSERVGHGKALVAVANKHARVLWAILAKGERFNPDYIDMRRAESDSLPRSVTH

SEQ ID NO: 291498 - protein, 348 aa, unidentified
MTLTIVETRAVTGGVDTHADVHVAAALDPVGGLLGVGEFPATPAGYARLLDWLGGFGTVCLVGIEGTGSYGAGLSRHVTGAGVRVVEVDRSDRQDRRRQGKSDPLDAVSAARAAQSGRARGAPKGRDGTVEAVRALMVAKRSARSERTQTINQARALVLTGPADLRTRFARHTVAALVAQTAALRPRPGDVVGYATRVALRELGRRAEFPGSQLCRLDELIVPLVAGHAPGLLALYGIGPDTAALLLIAAGDHPERLRSEAAWAHLCAAAPIPASSGKVTRHRLNPGGDREANHALWRIVITRMSSHPPTRAYVDRRSKEGLSKKEIIRCLKRYVAREVYPHLRPPAG

SEQ ID NO: 291499 - protein, 343 aa, unidentified
MLRTNVIGIDLAKNVLQVCHISRQGELLSNKAVSRQKLKELLAKSKPSLVALEGCASCHYWGRYAESFGHEVRIINPKKVKAYVDGHKTDANDALAIANAALQIGIKYSKPKSMEQQTLMSLEANRQFLSKTIVSLGLHIRGIINEYGIVKAKGTKGLAELVTSTLYESDVLPASLVTTLSMLWQQYLNLKDELSKLQKSMNSTTRQIEPCKRLRALEGVGETTASMLYATLGNGTQFTNGRQASAFVGLTPKQYSSGGKVTMLGIDKFGGVKDLRSMLYLGAMAYIYRLPESPKNQKQAWLIKLVDRVGFKRACIALANKTVRTAWAMLHYETAYQPKPLSI

SEQ ID NO: 291500 - protein, 424 aa, unidentified
MKEWKEITHYAGLDWASDHHDIAVVDQQGKIVLQQRFSQTAEGWKALAEQLKPFGTVAVAVETNHGIAVEQMLAQGLIVYPINPKSAERYRGRKSPSGVKNDQLDAWSLADALRLDGHGWKPLAKEDPFIAELRLLTRDEVALIEQRTGLINQLIAALRDYYPAALEAFDDWTLPGAWAFVERFPTPQALVKAGKRSWEKFLHAHKLYRPETAPMRLEIFARADQFTGAEGVTAARSLLASTLTVMLRTLNQQLALYRERIEALFAKHPDHDLFGSLPGVGPKLGPRLLAELGNDRDRFDSAQSLQCFAGTAPVTIQSGQIINRKMRRACHLGLRTAVHLWANTSRRTCPWAQAYYAAHREKGKSHACALRCLGQRWLKILWKMWQTRTQYDADLHARNQQKHGSWVLKLKPLQFEKGTGELNA

SEQ ID NO: 291501 - protein, 404 aa, unidentified
MKGPIVSIDVSKGKSDYQAFKDLNVKYTGSRSIKHNKEGFDEIVNLVRKMEKKLETEVCVVYEATGVYHRVLKKVLEDNNIKQFIINPLLSAKTRKNDSLRSPKTDKLDPKSIAKTYYSHSLHNSHKQETIYHELRELSRYYEDILVHIRKDKVAFRAQLDIVFPGYDTLYDDLYGPVALAIIEKYPHPEMLQKKKINTVSKVIQNKTCHRQAVSDTMADKAIEYSKTIYSGCDKDDIEVLILQRFIKKLNEDMAEAERTIGEMIKLAQELPDFNIIKSIPGIGDNLAARIIAELGDMTRFKKKNELVALAGLDPRISESGQNDGDHMHITKKGNKRLRCLLYLAVTCSIRLKRDDNSIKDFYIKKKQQSNPMCSKAAKTACASKLVRIIYSMCKTGELYQYNK

SEQ ID NO: 291502 - protein, 326 aa, unidentified
MEHELHYIGIDTAKEKLDVDVLRPDGRHRTKKFANTTKGHDELVSWLKGHKIDHAHICIEATGTYMEPVAECLYDAGYIVSVINPALGKAFAQSEGLRNKTDTVDARMLAEFCRQKRPAAWEAPHPLERALRALVVRHQALTDMHTQELNRTETAREVQRPSIDAHLLWLEAELKRLEKQIKDLTDDDPDMKHRRKLLESIPGIGEKTSAVLLAYIGLKDRFAHARQFAAFAGLTPRRYESGSSVRGASRMSKAGHVSLRRALYMPAMVATSKTEWGRAFRDRLAANGKKGKVILGAMMRKLARVAYGVLKSGVPFDASRHNPVAA

SEQ ID NO: 291503 - protein, 315 aa, unidentified
MSRMVVIAGIDVSKDKLDIHVLPSNQTFVVGRDPRGLASLARRLRKAGVEQVALEASGDYERIVIEALEADGFVVQLLNPARVRAFAEAIGMLAKTDPIDARLIALYCQHFPDTGLTRRPEQARKLGEFLNMRAMLLKLAGEIRNSLEHVREPGLKALADTLSADIAAKLKDVDDRIAKVIAGDDATMRKARIIRSFTGARPVLTSGLLARVPELGGVTRHAAARLCRAAPTDRQSGRTRHRSSIEGGRDQVRPVLHMAALAAIRSNPIIKAFAHRLSAAGKPKPLVIAACARKMVVILNAMLRDNTEWKYAKAA

SEQ ID NO: 291504 - protein, 486 aa, unidentified
MAKQKKSAFERLSSGAMNRRQRRDLARRLAGNDPGLTIVHSNAGGIDVGNESHFVAVPPDRDTNAVQEFGCWTADLKRMAEWLSACRIDTVAVQATGVYSIPLYDILTEYGIQVVLVNAQHTKNVPGRKSDVQECQWLMKLHTYGLLRDSFRLEERMESVRTVWRLRDRHVKDASRSVQHMQKALTKMNVQLANVLTDITGVSGQAIIAAILQGERDPWKLADLKHEMVKASREEIARSLEGNWRDDLLFELRQAVDGYHFAHQQMRECDRKLQSFLASLPARTLNRPVEPGGSPATTQKAKKARKPRKTRRNEPSVDLGPELKRICGVDLTSIDGIDLITAQTIISEIGTDMSGFKTENHFASWLGLTPGKDVSGGKIIGSGKRKVQNRVAMSLRMAATTLLNSKTYLGSRYRHLRQQLPSYAAAIKAMARYLAVLIYRLLTRGEAWVDRGAAKFEQRRTERELASLNSKARAKGFQLVPITQAI

SEQ ID NO: 291505 - protein, 388 aa, unidentified
MYHVGIDISKFKHNCFIATDAGVKVKEFVFDNNKLGFIELKDSLISLGNPQEIKIGFESTGHYGTNLKSYLSNLGYTYVELNAYLTHLFSKALTLRKTKTDKVDAKVISSMLGSVDYETLYTQFYHMNDLKELVRQRNIYLGNRSKELIKLTNLLDKAFPEFKPFFKNRLGSGALFILKRFKTKARIAKLSMSDFELVKSKTKGKMTYPKLNRLKQLAHDSIGVSSKVYDLLIQTSIEQFEHLTHILKTIDLEIIALFKQTDSKLLTIPGLGIITAATIYAEVGDFKNFSKPAKLIAFAGFDVRIIQSGTQEHYGKLVKHGSSLLRNAVWTYALPAVRFIPTFNDYYHKKKSQGKHHKVILSHICRKLIRMIYYIEYNNIPFDHNLSR

SEQ ID NO: 291506 - protein, 341 aa, unidentified
MEHYAGIDVSLECSSVCVVDANGKILREAKVTSEPEALIAWFRSSGFDLDRIGLEAGPLSQWLFAAMREAGLAVELLETRHVRDAFKAMPVKSDRNDARGIAQLMRLGWFRPVHCKSMNAQETRSLLTARKLVQSKLSDVENSLRGILRGFGLKVGKTTELKFAGRIEELVSGHPHLETIAKALLAVHEVLRKELATFEKQTRKLARSDARTRLLMSTPAVGPIVALTYASAIDDPGRFKSSKQVGAHFGLTPKRYQSGETDYTGRISKIGDGSVRTALYEAAHIMLTKPLKGCSALKSWAMRIAKRAGMNKAKVALARRLAVIMHRMLADGTAFNAAAAA

SEQ ID NO: 291507 - protein, 343 aa, unidentified
MDHFAGLDVSVKETSVCMVDDTGRLVREVKVASEPEALLAVLTNPACHFKRIGLEAGPLSQWLFSALAEAGLPVICVETRHMRAVLKAQINKTDRNDARGIAQMMRVGLYRPVHVKTLRSQKQRMLLTHRKLMQSKAIAIENDLRATLRNFGLKVGVVGTVKFEARIKELVENLPDLVVLVEPLLIVRRVLREQIGILHRRVLAIVRDDDVCRRLMTVPGVGPVVALTYRATVDVPSRFRNSKAVGAVFGLTPCKHQSGESNRTGGISRCGDEMMRMMLYEAAHIMLVRSAKWSWLKAWAMKIARHRGLKKAIVALARRLAVIMHRIWVDGTEFRWTREVAAA

SEQ ID NO: 291508 - protein, 414 aa, unidentified
MNAAGIDVSSRKSTIAVLRPFGEVVKVPFEVSHTAEGLASLARQLKAIDGETRVVMEHTGRYYESVANVLHESGLYVSAVNPLLIKEYGGNSLRKVKTDKADAMKIARYALDNWCDLRDYTPIDTVRYDLKNLNRQFQLASKQKTASSNNLIALLEQSFPGIRKCFEGPVRKDGTQKWVDFAHTFWHADCVRKLSLNAFAERYRKWCKRNRYQFSTEKTDEVYELAKSAVVLVSKTEVTKVLIKEAANQLTSISRSVETYRTEMNRLASQLPEYPVVMEMYGVGESFGPQLMAEIGDVRRFERKQSLVAFAGIDPMPNQSGEKNVRSNKSSKRGSPYLRKTLFNIMTVHLQRAPANEPVYQFLDTKRAGGKPYYVYMMAAANKFLRRYYAKVRDYLASLDSLPPVDMDSTGLNK

SEQ ID NO: 291509 - protein, 344 aa, unidentified
MEIRTVGIDLAKNVFQVHGMNERGKPLLRKQLKRDQMAVFFANLSPCLIGMEACSSAHYWARKLEALGHTVRLMAPQFVKPYVKSNKNDAADAEAICEAVTRPTMRFVPIKNVEQQSVLALHRARQGFVKARTAQANQIRGLLAEFGLIVPQGIAHITTKLPSVIEGATSELPVSFRQLIERLIEHFKALDKGVEELEAQIKVWHRANETSRQLESIPGIGPLTASALVASVGDAKNFENGRQLAAWLGLVPRQHSSGGRPTLLGMSKRGDAYLRTLMIHGSRSVIYRAGQKNDPESWLIKLIKRRNINVAAVALANKTARIVWALLAHKSEYQPDYQHSLRAA

SEQ ID NO: 291510 - protein, 391 aa, unidentified
MVCVGIDVAKDKHDCCILDSDGTIRADCITIPNNMDGFKQLLQTIRDCTKKSDKIKVGLEATGHYSYNILGFLLDNDLAVYVMNPLHTNLYRKSLSLRKTKTDRVDARTIATMLLSDVDLKSYTDTAYHNEELKSLTRYRFDKVRERAKLKQSVSRLVTILFPELEEIVPSLHIASVYALLSEYPGAKQISEIHLTKLTNLLATASKGRYGKDKAIQIRDAARTSIGSVMPAKFLELKHTIKLIRELTSEIDEIEVSIQKIMDELNPPILSIPGVGIQSAAMILAEIGDFSNFESPDKILAYAGCSPSTYQSGKLTNCYAHMEKRGSRYLRYALYNATKYVCHWNPVFAEYLAKKRAEGKHYNVALSHATKKLVRLIYALQKSGKAYLVAA

SEQ ID NO: 291511 - protein, 343 aa, unidentified
MLHVGMDMHKKFSVVTVVDDEGKEIVAGRRIDNDPAEVSQFMSSLDGEEARVVLEAGSNWQWMCDLLDEIGVDNRLCHPLKTKAIASARIKTDKLDSRILSHLDRMDFVPEAYKADMETRRLREMLRYRAGLVSERTSFKNRIHAILTKFNVSNPYTDLFGKAGTGLLRKLELPVAYRKSLDGYLRMVEALSIEVKKADREIEDTFKGSAEAQLLSTIPGVGKLLALTILAEIVDIERFSSAKQLASFAGLVPSTSQSGETTRHGHITRQGSKWLRWALVEASIHAVRKPGPLKKHFDRLRRKKGYKVAIVASARKLCTYIYHMLNEKKDYGAIVRYLGSDLG

SEQ ID NO: 291512 - protein, 338 aa, unidentified
MSKITTIGLDLAKNVFHVVGCDAHGKLVRRKQLRRGHMLRYFANLPPSLVGMESCASASYWARELQALGHAVKLIPPQYVKPYVRGNKNDYNDALAIAEAVVQPQMRFAAIKTVAQQDIQALHRLRERRIAERTALCNQVRGLLGEYGIVLPRGVASLRRRLPELLEDAGNGLSELFRRLLAQCDQQFGELDAHIDGYTRELKRQSRQSAVCQRLETIPGYGPIVASVFYSVVGDGSAYRRGRDVSAAVGLVPRQHSSGGKENLLGISKRGDRYLRSLLIHGARSVVRQAAGKDDRLSRWINRVKAARGYNKAVVALANKLARIGWAVLAHNTTYQAV

SEQ ID NO: 291513 - protein, 365 aa, unidentified
MTKSTWVGLDVHQDSITAAILRDDSNHPEVVRLSGDLMKVRRLFRRLSAHGPVRSCYEASGAGFVLHRVLSDDGFHCEVIAPSLIPKKPGDRRKTDRLDAVNLAQLYRGGHLTSVHVPSSEQVELRQLLRLRGRYQQQAKSTKVRITSVLRTHGHRFIATRSLWTKAHHAWLEAMRRSLTGPLQIVIASELEHLEYLEMQRTSFDAEIERVAQSPTYRPRVDALCCFRGIQTLTAMTILCEVGDIRRFDSPRRLAAYLGLVPSERSSGDIQRRGPITKAGNAHARRLLVEAAWNNRHRAKSTLVLTRRRQGQPSEIVAIALKAQHRLSKRFHHLLERKHVNVAVTAVAREMCGFIWAALRALPQA

SEQ ID NO: 291514 - protein, 366 aa, unidentified
MGWMAPLRHRRAKLVFSRITRNREPSMSEITTIGLDLAKHVFQAHGIDAEGTTVLRKRLRRGQVLAFFSRIPRCVVGLEACATAHYWARELGALGHEVRLMPAQYVKAYIKRNKHDAADAEAICEAVQRPTMRFVPVKTTEQQATALLHRGREQLVRQRTMLVNALRAHLAEFGMVAAQGLRNVGELIAIVRDDGDTRLPDVARQVLQVLAAQLEQIEAAIAALEKQLMAWHKTNAVSQRLASIPGIGPIIATAIATTVADPGVFRSGREFAAWLGLVPRQNSTGGKTRLGGITKRGNRYLRRLLINGASANLLRSKATKADPWVIGIRRRRPPLVVAVALANKTARIAWAVMLRQKEYQPRALAA

SEQ ID NO: 291515 - protein, 342 aa, unidentified
MMTAIGIDTHKDSLAACLVDELGTALDERTFANDPVGHRGLLDWLLTRAPEATVGIEGSASFGAAAARYLIAAGRSVREVPPQLSRRERIGTRRAGKSDPGDALAIARVTVREHDLPPVRLADRSQDIQLLVEAREDVVGDMTRVRNRLHADLRVLVPGYGASAANLTAVRHQRTIGRLLRGRSEVQAELARTRLADLRRLGLEERRLAGRLAELVVGHPLLGLPGAGVLVTAKLVGEIGDIGRFRSAAAFASLAGVAPIPASSGQTQRMRLNRGGNRQLNRALHTIALTQAWHHPPARTYIARKRAEGKTWREALRALKRQLVRTVFRLLQAGAGSVRLAA

SEQ ID NO: 291516 - protein, 386 aa, unidentified
MTQHSHIAASHQLDYERTLILAVEVSGRSWVVAAQVPGLRQKGVKQQLAPRADALMAAVEGYKRRAAAAGMAVERVIVAYESGGSGFWLARWLQQRGVEVYVMQPSSVPVDRRMRRAKSDRIDADMLLRTLLAWLRGEPRVCSMVPVPDEAVEDARRPIREREELIRARVALVNRIEAVLTVLGAGEYNPLRRDCRERLGQLRTALNQPLPPHARAQIERLLDRLDLIRQQVADLEAQRDRAVEGETVGQAERMIQHLARVRGIGVQTATVLVHEAFVRRFRNARALGSYAGLTGTPYSSGGTHREQGISKDGNRRLRATLVELAWMWLRYQPGGALSRWFHDRLGGSRGRLRKVMIVALARKLLIALWRYLQDGAVPQGMELKPA

SEQ ID NO: 291517 - protein, 464 aa, unidentified
MSKTLGVDVACRAAHQGSLAVDGRLIWTGRRFFTRPADLERLWADLDLADPAELTVVVEPTRNAWIVVAAWFRRRGAKVVMVPTTQSADLRAYYSKHAKNDRLDSALLARLPLLHPEGLREFTGDGPADPLRRLTKQRSSIVKRRTAVLQRLDALLELLGPAWYEVLGSNYGKAALMLLARYGDPHALIRLGQARLARFLARHSRGWWKDDHATRLIAAARESLELWGSGGIDFAELAADIAIEAEQAQMLTEQIEDLDERIANLYQDADPDGFVASAPGVGPVTSAIIAGRIGDPHRFKSLAAIRAYSGLVPKVSQSGVVETRGGITKAGDPLLREALFAAADAARKTDPQLAAKYARLMATDRHHESAICHIATTLLTRIAASWRAGEHYALRNTDGRIITPEQGRQIVRDNHKVDPKIRDTAAHRRMAQRQKNRTSREQKKSQSAPASRPVPTRIEPADVA

SEQ ID NO: 291518 - protein, 351 aa, unidentified
MDMIGLDLHKRESQLCIKSEDGRISERRIVTSRERFTAVLGSRPRARILLEATTESEWVARHLESLGHEVIVADPNYAPMYANRSRRTKTDKRDARTLLDALETGAYRPAHRLSDARRHVRAELAVREALVRTRTRYIAVAKTLVRRDGLRVAGSASETVAERIAALALSPTLASELTPLFAVLRPLNEQIAAADQRVSAVAKADPAMVLLATAPGIGAVTAAAFVATVDDVKRFRSAHEVEAYLGIVPGERSSGEKRRIGRLTKAGNSRVRWLLVEAGWRILRSKSPETAALRAWALRIAGRRGKRVAAVALARRLAGILYAMWRDGAEYDARKIRFPRPETQEVMARAG

SEQ ID NO: 291519 - protein, 370 aa, unidentified
MKKNSRRTSQSPQTARRTARKKSITIGMDLGDKTSRYCVLEEDQVVKESSVATTKKDLTRTFGVCPRCRIALEVGTHSPWVSRLLSRLGHEVIVANPRQLQLITQSSRKGDQVDAKTLARLARIDPELLRPIRHRGEKAQMDLMQIRVRAALVEARTALVNTLRGLAKSVGERVPKCDPDALDPGQLEGLPTQLKAVLQPLAEQIEALTQQIQECDRKLEQIARREYPETELLTQVHGVGTLIALTFVLTVEDQQRFAKSRDVGCYVGLRPKRSQSGNSDPQLRITKEGDGYLRKMLVQGAHRVLSARAPDTDLKRWGLKLGARGGRNARKRAVVAVARKLGILLHRLWATGEVYEPLRLSRAGAEPKAA

SEQ ID NO: 291520 - protein, 352 aa, unidentified
MKQITTVGVDLAKDLIVACAADAAGHAQFYKRFGFHSFATWAANLPPCTIAMEACSSAHHWARTLSALGHSVKLLAPDLVKPFRKSQAAKNDRNDAQAILITALQPDMRFVSVKSVEQQSILAVHRMREGWKSERTALINRVRGLLAEFGIWLGRSPQTLTRRLPQLMQEDQLPARVRALLAQAHGQLLQLEALMQQCELDIQAHARHSEAAQRLGAVNGIGPITASAIVATVGNAADFRNGRQLAAWNGLVPKQSSSGGKERLGKITKRGDTYLRGLLTQGARSTLNAALARPPDKRSQLEHWIVALRHRVGYHKSLVAIANKHARICWALLARGERYDPHAASRYPRAAA

SEQ ID NO: 291521 - protein, 471 aa, unidentified
MPRRKPASSPPDPATAAVLQTLTPHAAGIAIGATEFWVCVPPSAVASPAAPSAPTVLPPHVRRFGSFTTDLHAIAAWLRQCQVTTVAMAATGVDWIPLYDLLESAGFQGLLVDPRQVQRAPNRPTTDVHDCQWIQRLQSLGLLTAACRPEEPIRVWRSSPRHRASLIEDAGRHVQRSEKALEQMHVKRPEVGSAITGLTGMGILRAIVRGERDPQAFAKLRDHRWKESAATIARALQGTWQPEHLFAFQQSLALSDDSHEPLRDCDRVIEDHLTGMAFPEVLPLEPKRRVRRRKDNEVTCDARQRLHHVAGGDVTAIAGIEESTALVVLREIGTERSRWPSEKHVGSWVGRAPHPKKSGGKVKSSTTRPGVNRAAQALRLAAKHLQRSQSALGAFFRRIAARRGLAKAMTATAYTLARMVYALLKHGTAYVAQGLAAYETAYRERVVRQVKRKAAELGLVVMERDAVGQPS

SEQ ID NO: 291522 - protein, 354 aa, unidentified
MQIHTIGIDLGKTVFHLVGLNLRGEVVVRRKCSRTQLLQFTANTRADLIGMEACAGAHFLGRALREQGHEVRIIPAQYVKPYVKTNKSDFIDAEAIAEAVDRPTMRFVPIKTDDQLDMQSLHRVRERWVIRRTAVVNQIRGLLLERGITLRQGRRHLEAALPGILEDASARLSGALRMLISQLKHELEELAHFIGEADGIMERTSRENESCRRLLAVPGIGPVTATALIAAIGNGAAFRKGREFSAWVGMVPRESSTGGKQKLLGISKRGNPYLRKLFIQGARAVMLRGTKQSPGLRTWIENIAMRKHHNVAAVALANKMARIAWVVLARGEAYRPSLLTESEPNLHSLQRMPA

SEQ ID NO: 291523 - protein, 426 aa, unidentified
MNFTQNEKLNQVTTETLIVGVDIGSETHYARAFSWRGVELGKVFRFANNGEGFGQFYAWIESLAGKTTNSSIMVGAEPTGHYWFSLASYLKDHDIRLVLVNPYHVKQCKELDDNHPSKTDSKDPKTIAKLVIDGRYNIPYIPEGIYAELRIAMNCRERIVREQVVIQNRIERWLKIYFPEYHEVFKDFEGQSSLLILSSTPLPADVVNAGADGINQLWRKNKLRAVGMRRAQALYDAAKRSMGCTEGSNAARMEIRLLLEDYHSKKAQYDGVMAVVEELCMQIPAVQKLLAIKGIGILTVAGFFSEVGDLGRFQSPKQIQKLAGLAIRENSSGKHKGQSSISKRGRRRLRALLFRAILPLVATNREFAEIHSYYTNRKENPLKKKQSLIALCCKLIRVFFALATKGEDYDPVRLLGDIRHPVAAAA

SEQ ID NO: 291524 - protein, 308 aa, unidentified
MNEQVITFEQIVERGCGMDVHNETVVATVSGIGIKTETRTFSTYTNDLCNCRDWLKKLHVTHIAMESTGIYWKPVFNILEEYFKILLVNARHIKNVPGHKTDKKDSKWIAKLLLSGLLKASFVPPRDIRELRDLFRYRRKLTARDTAERNRFEKILQDANFKISTVISDIFGVSGTKLIDALLQDNYNFDELFELCHGRIKAKREQLKEALVGKLTPHHKFMLRAIRKSLHYNELLIADIDRQIDRQTKEYAIDLELLQTIPGVDKLTAVALLAEIGPDMDKFPTEQHLASWAGMCPGSNESAGKKKR

SEQ ID NO: 291525 - protein, 353 aa, unidentified
MEGYAERQFVGIDLHRRRSVIVRMTAAGERLETVRIDNDPVALALEIAKAGPDPEVVLEATYGWYWAADVLAAQGARVHLAHPLGVKGFTYRRVKNDVRDAADLADLLRMGRLPEAWIAPPAVRELRELVRHRAKLVALRTGLKAQVHAVLAKQGVAVRVSDLFGVAGRALLETVPLDPVYRGRVNSLLRLIDAYGFEIAAVSTRLTADLAREPGYQALLTLPGVGPVLAGVFFAEIGDVHRFPTAAHLVSWAGLTPRHRESDTTVHRGSITKQGSTLVRWAAVEAVQKTPADAGWLVARRHQLAARRGANIATVATARKLLTLVYYALRDGHVRALSPRPRPQPRPLAAASA

SEQ ID NO: 291526 - protein, 392 aa, unidentified
MPAALWGWLTNELLARRDLAVVWLERGTHKEHLQSGVPTAVFIDDRRITVTVMIGVDPHKATHTALVIDGREVELAKLKVRASKRQSLQLLAWAAEFEDRVWAIESAGGLGDLLAQQLVAAGETVWDVPATLAARVRVLGSGRSDKNDPNDARSVAVAALRAPSLTGVRPEDHVSVLRMLAKRNLDLARWRNKVCCRLHALVAELVPGGIATEVVVAQASQLLDGLRPDGASAAERHRMALELVEDLVHIDTQIRESRRHITTAVAASGTTLTDIFGVGPVIAAMLIGYTGDPCRFDSQHRYAAYNGTAPIEFSSAGRKTHRLSRRGNRTLNHAIHMAAVTQIRFAHSPGRGYYERKLAEGKTPKEALRALKRRISDAIYRQLITDAHRAGR

SEQ ID NO: 291527 - protein, 343 aa, unidentified
MQIVRIGLDLAKYVFEIHGVDAQGKTVVRRTLRRHAVSTFFANLPPCLVGMEASNGAHFWANALSDLGHDVRLISPQFVTPYVKSNKNDRNDAEAICEAVGRLSMRFVPVKSAEQLAVQAVHRIRSRLVADRVRLVNQIRGLLGEHGVVVAKDIGNLRRALARIVDDEDRVLNPLARALMAELREELAELDARIGGYDLKIRELYRNSEICQRLGKVEGIGPVTATALVAAVGDRSSFKNGRQFAAWLGLVPKQRSSGGRARLFGISKRGDRYLRTLLIHGARSALGRVRDKQDPRSLWLGRMRQRRHPNIVAVALANKNARIAWSLLTSDSVYDVRLSVRAS

SEQ ID NO: 291528 - protein, 343 aa, unidentified
MQTITTIGFDIAKSVFQVHGVDAAGQVVVRRQLKRRYVLAFFQKLPPCLVGIEACASSHHWSRELQALGHTVRLMPPAYVKPYVKRQKNDATDAEAICEAVTRANMRFVPTKTPEQQSGLVLHRTRHLFIRQQTAVINAIRAHLAEFGIVAPVGRHGVEELLNVVADPNDKRVPEIARACLSAFGAQLRRIKEQILEFDRLIRAWHRSNEMSMRLDEAPGVGPVLATALVATVADPKSFRSGRNFSAWIGIVPKQHSSGGKNRLGNISKQGDRYLRGLFVAGALAVIRYAKIHGTKHRPWLTALLARRPTKVAAIALANKIARMVWAMMARGERYKEPVALAR

SEQ ID NO: 291529 - protein, 338 aa, unidentified
MALYCGIDLHARSSYVAIVDEQRKRIFKRNLQNDRKLILSFLAPYKQELAGIVVESTFNWYWLVDALMDDGHTVHLANPCAIKQYAGLKYVDDKHDAFWLADLLSLGILKEGYIYPKEQRPVRDLLRKRGLLVRLRTSLLLSLQNTVVNTFGIKIPAHRIKGKEDYVTTYDFGNESLALMGQVSKTSIDTLSRQIEAIESHVYQHCKLTAAYNPLVSLPGVGKILGTTIVLETGAVGRFPAVGNYVSYCRKAETVWTSSDRVKGKGNRKNGNRYLSWAFSEAAEHARRFDTASRNFYNRKLHERNSPVAHNALANKLARAAYYIMRDQVPYEEKKLFG

SEQ ID NO: 291530 - protein, 346 aa, unidentified
MKITTIGMDLAKQVFQVHGVDAHGKVALKKQLRRSQVLTFFGNLGPCLIGMEACASSHYWARELEKLGHTVKLMAPQFVKPYVKTMKNDAADAGAICEAVARPSMRFVPPKTTEQQAILAVHRARQGFVKARTAQANQIRGLLSEFGIVIPQGISHIARRIPEILEDAENGLPDPMRSLLARLAGHLKGLDREADELEGQIQAWHRSNEASRKLEKIPGIGPITASALVASIGDAKNFDNGRQLAAFLELVPRQHSSGGKPTLLGISKRGDTYLRTLLIHGARSVVQVTERQPGTDTWLKRLLARRNKNIAAVALANKNARTAWALLTHPERCYETKFDARRFKAA

SEQ ID NO: 291531 - protein, 458 aa, unidentified
MYRELQPFREALSQELKASLFPAVAGVDANKLLETYLDRLTMFTGVDVADQTFTSLALDAGREILGSLEGCSNGPAGFERFMAWARDLRDRHGLRIIAIAGETTGIYYWALWDFLGEQSDVARVLYNPRTTEHMGEVLSKKVRNELVDALLLAEQLRLGSTPEVLLQDDADLLTARYYSRAARDLAQQINRKKNQLRALLRAYCWPVCQVFPGEQLHHPAVYALLQEYVFPTDFLHAGAETLTTLLTAHCRDIFGPIEVDQLLAASRQAIPRPIGQDAIRSLVHAHIQDIITFQERKALYLKAGYALIKGRQETKLLRTVKGAGLSNTLALVSEIGDIARFSSGEHLASFLGLTTSKHISGATLFQSKRITKQGSPNGRYAAVNVAQHLTRWVPRYHDMYQRIKTRKPPRKGHFIALVAIARDFVSNVLYDMWRHQRPFFVEVSDYRSYRQKHSRSND

SEQ ID NO: 291532 - protein, 434 aa, unidentified
MRLKDYGRKQKKRKEYIQQTGLLLVGVDVSKSKHDACIGTLDNVKSRIGFRNARDGFKRFEDAIRKNMFRHKCKRVLIAMEPSGLYWYSLFNRLKRCGYGVCLVDCKAVKNNRKTMLDGASKTDKKDAYSIFDLLQQGKFFLPVERDDELNSAYRLMRRHMGLKKRVGQIRNQLRGAIHLSFPELNDCINDITMPTALRFLQSNPTPESIMRNGRKRFLEKWRPRRRCGQWRPEKFKRIYELAKESIGIKNPFRTDEFEIKTLACDLADSVEKQQMWLDKAIDLLKDRTDFNLLIQMPRVGAPTAAAILTAIGNISEYTNGKQLVKLAGLDVRLYESGTTIFKKPRISRIGSAYLRHWVYFLAMRLVAHEPEFKEYFEKCKKKSPGKGQGTRALTAVSDKILRIIYRMLKDNESYIPGKDKTTAEYYTEQRKAA

SEQ ID NO: 291533 - protein, 343 aa, unidentified
MYYVGIDVSMTESALCILDGKGKIVRETKLPTDPEIIARFIAATGLAIERIGLESGCTAAWLFAGLQRHGWPVICIDARHAAAALQAGFRNKNDRNDARGIADLMRVNKYRPVWVKSPEAQRHGRLLTARATLQSQLVALENTIRGLLCQEGIGLTDRRTAFEAAVREAIDGDCLLQAALHPLLETRNAVLRHRAALDRQILRIVRADPVCRLLMTAPGVGALVSLAFKVAVDDPRRYSRSRDVGAHIGLTPREHSSGELSYQGRISKMGDREVRRLLYIAASRMLRRDAALWCPLKVWAVRLAQRIGIRKARVALARKLAVVLHAMWSDGQVFQWRRSEALA

SEQ ID NO: 291534 - protein, 325 aa, unidentified
MKPTKLNSKTTWIGIDVSKAEHEIHSYLPFAKLPSSIPNTLKEIKKFITKLKKIPHPHLVFEATGGYEKLLLKLLQEAGINASRVTPSLPRNFAKAQGLLAKTDKIDAQVLTDYGQTLTPPVTPKLDPIVEEVHALIKYRRHLGEELHRERQQLEHYPVKSIITIVKRRMKTIQNEMKTIDAQLIILKNKSKLLSEPCKLLTGTIGVGDRSALSLLAALPELGTLTRKEVSSLGGVAPINRDSGKMRGKRMIYGGRKDVRQAIYMASLVATRFNPILKEFYDRLVAKGKPKKVALTAVMRKLLIHLNALMKQYLAAQNPIQINPS

SEQ ID NO: 291535 - protein, 389 aa, unidentified
MYSYFVGIDIAKNTHWASCLSSDGEIISEPFSFSNDNSGFQKFISKLESLDKTKILIGLESTAHYGENIISYLFNLDYNIGLINPIQTANLRRSNIRKTKNDKVDTKIIIKALTLGNYSLITSRDINNLKLKGLCRSRRNLVTMRSKAKIQLVSYLDQIFPELAQFFKGNLHLNVSYQLLKEYSSPKQISSLHLTKLSNILHDNSHGRYNKQDAIRLRELAKNSVGIDNPSLSLQIKHAILQIELYNEQIAEVEALYKQILDEMNTPILSIPGMSYNQAAVIIGCIGDINRFEHSCQLLAYAGLDPSVIQSGNFQARSTRMSKRGSGMLRFSLVYSAHNVVKNNKTFRDYYELKRSQGKSHYCALGHVAHKLVRIIFKMLKDNVAFNLD

SEQ ID NO: 291536 - protein, 410 aa, unidentified
MTKIIVAQNAPVLVAIDIAKARHEVLIAIPDKKRRRRLTVLNELADFNRLIDTLRDYGCPVRVAFEATGNYHRALAYHLATAGFEVKLVSSVALARTREALNNSWDKNDPKDAQVILHMMEIGNEQFYHDPLVHGTNDIQELSKTHDIVSKSKTELWHRVLTHYLPLYFPEADRFHRSSRSDWFFAFLERYPSPHFITAMGKDAFTTDAWDVIGRKVAKERLLADIYETAKSSVGLPVAPDSDAISMFRLVLGEGRSLIAQRNQIEDRAVALLKDLPDYQLLTSIPGIGPINALTILAEAGDLRRFGHHRQFLKFCGMDLATIQSGTFRGQTKLSKYGNARLRRTLWMAGQVAILQRTNSFRDKFERYIAMDRQNTHLRRKAYSAIAAKMARTVHGIIKHGEPYRPFFEG

SEQ ID NO: 291537 - protein, 343 aa, unidentified
MQTVTTIGFDIAKSVFQVHGVDAVGQVVVRRQLKRRHVLAFFEKLPPCLVGIEACASSHHWSRELQALGHTVRLMPPAYVKPYVKRQKNDMADAEAICEAVTRANMRFVPTKTPEQQSCLMLHRTRHMFIRQQTAVINSIRAHLAEFGIVAPVGRKGVTELLQIVADPNDKRVPEVARACLAALGNQLLRIKEQILGFDRLIMAWHRSNQTSKRLHYIPGVGPMLATALVASVADPRTFRSGRNFSAWIGLVPKQHSSGGRERLGSISKQGDRYLRSLFVAGALAVIRYAKIHGTGHRPWLTALLGRRPTKVAAIALANKIARMAWAMMARGERYKQPAALAR

SEQ ID NO: 291538 - protein, 519 aa, unidentified
MNLIQEQGSVVGCSVAAFSFGAFWYSELPAGETGSVRRHAYYLVTPLVRCSRWGGLSFLMASGHPAADTFGPFLTIMKALPILDPKAAAIDVGSEKLYVSIAGDTPKVFGTFTGDLESLCAWLKLAEVHSVAMEATGVYWMYLYEVLEGAGLEVVVVNGRHVQNVPGRKTDMADCQWLATLHAHGLLRGGFVPTAEIRQLQDYQRLRGDHLIGAASQVQKMQQALERMNIKVHDVISDLVGVSGLKVVRAILRGERRPGELLGLCDVQIQKQKAAAVKESLRGCWKKAQLFTLQQALELWETYQQKIAACDREIEALLQQLAGPQTPGGGVGVGPIQLAPAKKPGKNAPVMERFQELLARVCGGRDATQIPGMSTYLVLQLISEVGTDMLRWPSEKHFVSWLGLAGGRKQSGKRKGSVKAHRNRAGRLICAAARALAQSVDKALGGFYRRLRGRIGGLAANVALARKLALLFYRLLRHGMEYVEKGLKNYEAKVLETETRLLRKLAKKQGFTLLPTAPN

SEQ ID NO: 291539 - protein, 282 aa, unidentified
MDAIYVGIDVSKDRLDVHVRPGGEAFAVERNGKGLEKLVDRLRGLSPSLVAVEATGGFETIVAAAVAGAGVPLAVVNPAQVRHFAQAIGKRAKTDPVDAGVIAHFAEAVKPEPRPMPEETAVLLAELVGRRRQIIEMLVAERQRERHASNIRVRKSLARHIAVLEKELPSIDQDIDGLVRGAPIWRAKEDLLVSVPGIKNTLARIFLAEAPELGSLDRRRIASLAGVAPYTRQSGRWHGKAMIGGGRTALRSALFIAALTASRHNPALKIFYQRLLATGKPK

SEQ ID NO: 291540 - protein, 447 aa, unidentified
MDTESATQYAAYIGIDWADKDHAYALRATEGKKVEQGKVEAKPEAIEEFVAQLRQRFGGKAIAVALEQSRGSLLFMLSKYDHLVLYPVHSSTLDSYRKACHPSGAKSDPDDAALILDLLQKHPEWLQPFAPDTVPTRTLQFLTEERRDAVNDKTRYLNQLTAALKTYFPQMLEWLDVDSKVMCEMLQRWPTLEQLQQQKPSVVEEFLREHRYPVVRVKPLQEAMEKAIPATTDQAVIEAKKFTVQRTIAQLEALRENIAELDRRIEQITRLHEDYRVFASLPCAGKVMVPRLIAAMGTQRDRFQTASELQCQTGIAPVKEASGQREWIHWRWACPKFLRQTFVEWAWLSTRKSQWAREFYDRQRAKDKSHHAAVRALAFKWQRIIFRCWKDRCPYDEARYLATREQRARTAKASTDGSPQLKSSQAGGVEIMWKNVSGFSRPDSISC

SEQ ID NO: 291541 - protein, 327 aa, unidentified
MARMQGKTTPDVSQLFAGIDVSKAHLDLQLSCERRSRRFTNDPAGCAAIDAYLRLRRPADTPCLVALEPTGRYHFLVWRALHEAGHGVAPINPLHVRRFAESDGELAKTDALDAAVLARMAAQRLPSAKPPPSEEQLRLKALTTSIADRTDRRATLKGQRAEARDPLVARFDEAEIAQLSDAIDALKAERARLIGQHPQRARVSEILCSIPGIGETSAHRIIADMPEIGTLNEKQAAALLGAAPRANQSGKRDKRRHIKGGRRRLRAALHMPAIVASNANPDLKAFKQRLKANGKNNAVILTAILRKLIILANALVAQNRMWTQKCP

SEQ ID NO: 291542 - protein, 355 aa, unidentified
MSESYAGRQYVGIDLHRRRTVVVRMAADGQRLGSMVRISSTPEALRAAMAAAGPAPRVVLEATYGWYWAVETLQRLGAEVHLAHPLGVKGFSYRRVKNDELDAADLADLLRMGRLPEAYIAPEPIRALRELVRYRAKLSGWRASVKSSVHAVLAKRGVLPSMSDLFGVAGTELLDALALEPAYGARVSSLRELLGMLDTEITGFDYVIAQMLAGHRGYHAIQQISGVGPVFAAVFVAEIGEVARFAGPEKLASWAGLTPRHRESDTKIRRGRITKQGSALVRWAAVEAVQRSNESKINQIRARISDRRGRPGHPGSGRNIAKVAAARTLLGLVYYGLRDGHIRAVDHNTHGRTAA

SEQ ID NO: 291543 - protein, 424 aa, unidentified
MKEAPQPPKEQPALFIGIDWADQKHDCYVIDRDGKAFHQEITHSPESIHAWVSEMLELAGGQPIAIMLEQSRGPLVYALMFRQNVLLYPVNPKQLVRYRESYPGGGKDDPTDARYLARMLRERISTLTAWQPDDENTRLLGHLSEQRRKIVDGQTKLRQQLVAHLKSYFPIVLELFGNESQLPLLLSVLGRWSDPRELRRADRRLIRRVLSEHSIRNDKQQDELIERIRSSQLLCDDEALITPSAMAVKLLVGQIQQVQKTIQQFDTKIAEVMKQHPDAHLFTGLRGAGKALAPRLLCAFGSQRDRWEDADSLASFSGIAPVTRKSGQQCQVQRRYACPKFLRQTFHEFADSARKFCPWSKARYRLLRDGGMKHHAALRKIARSWIRILFRVWQTRIPFDCERYIAQLQQRCPEITPYLEAQKK

SEQ ID NO: 291544 - protein, 433 aa, unidentified
MNDVEDEPLFAERVAGIDIAKAGIEVTIRVPSETRAGGRQQETRSFATTRRELMALADWLRVWGVTKAGMEATGDYWKPVYFVLESQGFDCELYHAAQVKALPGRPKTDRADSVWLARITERGSLPSSFVPPEPIRRLRTHTRYRRHLTQARTAEKQRVEKLLEDAHLKLSSVISDIHGVSGRAMLEAIIAGERNPRVLAQLARGTMRGKIARLEEALDCSFLTEEHAAVLRMMLSLIDSYTAQIEELTAKIEVLAAPWLHQIEQLDAVHGTGRISAQDVIAEIGTDMTVFPTASHLVSWARWCPQVAQSGGKRKGANASGRGNPYLSAALGEISISAARTQSFLGARYRRLVRRMPKKKALVATGSSVLTIFHALLSDPAATYHDLGADYYEQRMNARRQARTHVRGLERLGYHVTIQAINPDTGELLPATA

SEQ ID NO: 291545 - protein, 340 aa, unidentified
MTLIDAFKKQTKTDIQSVGLDVCKDSVRICFWNKTHTIDYEIGNNSQEIQKFCLECKEVKIKKKIPFIIESTWDYHLLLALELRKNWCNVKEINPIITKQYTRTSVRGTKTDKTDAVILWKIGSIEWEQLKSFDRTEENIELKKKIWLVANLEKQLQSIKATIKRYHESLKKLWMDKEHEKDLWHDEIKSVEKLIKKLQKEIENYTFEKDEDNEKVKYISSIVWVSDYMAKVFYIQFANKDFKSKDAMYAFVWCEPRLKQSWTKSIGTRMSKRWNGYVRKKLYQSAYCAKYHCEELGKLYDRMKEKWKHHYIALNVVMKKIVHIIRSLLKHKRYFDPALV

SEQ ID NO: 291546 - protein, 352 aa, unidentified
MSWNQLHSKPQQIAFVDTDTGELQERRLEQREEAEKFYRELAVQGIKVRVGMEASGQARWFERLLGELKFELWVGDATEIARKRERKQKTDRQDAQHILKLMLKDDFPQIWVPSWENRDLRQLLWHRHRMVQARTRIMNQLQAVALNEGVRCNKRLWREKGREQLESFRLAPWASRRRHDLLEWLDRLNPTIGALSQAIEQEVEKCPEAQRLRTHPGVGPLTALAFVLIIGKPDRFQCGKQIASYLGLVPLEDSSGNRRRLGHITKQGNSLLRFLLVEAAQVTVRSLPEWRRKYVHLTMRRGRKIAKVAMARKLAVRLYWMMRKQWDYEQLKKFGSHAGQPGNRDAVKQNIE

SEQ ID NO: 291547 - protein, 339 aa, unidentified
MESFVGVDLHKKVSQLAALREPKPASQLRFPNNTVTVEKVLKKLPQGSKIALEATGSWWWFVELAQKTGHEVVMSHPKQTKAIASARLKSDKVDALMLAKLLKADLLPTVWIPPATQRYVRELLTHRARLVRQRTAVINEIHALYAKRNIDPGMIFHRVRPPAFMAKELSGYGSRIVEEDAELLAFFNRQLRGLDNELQKIAEEDVESKRLMTIPGVGPLSAVAVNCWIGTIERFSKAKKLSSYFGLAPRVRQSGDRERHGHITKEGNRMVRSLLIQAALWHIRLGKGASRKHYLGVLKRRGKQIARVAAANKLLGIMFHMMKGRIDYQEFLRRGSSAQ

SEQ ID NO: 291548 - protein, 406 aa, unidentified
MITCGIDWAEGHHDVAVLDDAGRVLARRRIDTGITGFSELMSLLAEHAEDPVTVPVAIETDKNLIVVALQAAGLAVFAINPRAVARYRERHGQSGKKSDPGDAALLADVLRTDRHQHRTLPKISPAGLAMKALARQHQEAIWALHMTTSRLRSVLLEFYPQALKAFPNLKHKAALTVLASASTPELGNKMTRRRLVALLHRCGRRNDAALVEQIIADLTTPALRQPAPIETALGQAVVTLIGILTAMHTAVEQLETALETEFGQHQLAPILRSAPGLGPILAARVLAEVGDDANRFTTANGLRAFAGTAPVTRASGRSRRVFARRVRNKRLGDACHWWAFAMLTKSPGARAHYDRRRAAGDHHNAALRNLANKLIGRLWWCLQNEQHWDETAAWNDPATTPIPAAA

SEQ ID NO: 291549 - protein, 467 aa, unidentified
MKNNDYNLFVGIDVSKGKADAAVLAVPELRSVKPRFLRKKLSFKFIKADVAEFLNTVRKYSSDPHCLHTYFALEVTGIYSTNVYSFIKENCNSDEEIHQLNTDFVNKWRESHNISKSDPLDAQTISTIIGTDDDVRYVSDSVFENKNGYQDLKALVHRHYQIKKLYSQETNRLIALCDCYFPELQYVFEPKSAAFLAVLSQYPTSHDIINASKNEVFSLVYEASKHRCNMDKIDKLFNYAQDTLVPHVSDHIRCVISNTVESIVNIRTQLKLIEKDIRKLASTFNVYSLLMTITGCGPLTAAVIIAETGDIFRFKNADHYVSYSGSSPRNKRSGKSVEIMGKISKKGSKYLRHALYMIAEFARRHNPVLKHLFERVKNGNKKRHKLAVIAVANRIARYIYSIMKNESSFVIMHENIMRLPEETRNTFFNSISLDFPKNTRKQIYQYSDVNGEIHRFVYKNETTESIA

SEQ ID NO: 291550 - protein, 369 aa, unidentified
MSQSTMVVGCDVHKEKITAAILPSTAPRPTEVVTIENDPKAIARFVKRLAHRGDLTFVYEAGPCGYEVQRQITRMGYRTVVIAPALVPRRPGDRVKTNRRDAEKLARLYRAGELTEIRVPTREEEAARDLVRVREDALKDRMRARHRLSKFLLRQGRMHHETKPWGTAHRAWLRAQRFESSLLRATFDAYMRALEDAEARLESLDQQVLALADTAPYQVPVQYLRCLKGINTLGALTLWVETQDFRRFLEAPAYMKFTGLVCSEDSSGEDERRGPITKAGNAHLRRILVEAAWNYRRRNTTGPELAKRRRGCPPDVLRIARRAQERLHRKYWRLVSRNKLPQVAAVAVARELAGFVWAIAQHCPAQKSA

SEQ ID NO: 291551 - protein, 340 aa, unidentified
MTIIIGIDPHKATHTAVAIGSDESELATVTIRATRQQTDKLLSWAEPFEERTWAIESAGGLGYLLAQQLVGAGEQVLDVPATLASRVRVLGSGRSNKNDPNDARSVAIAALRSPGLRAVSIADHAEVLRLLAKRNGDIGDHRTQVVCRLHALIAALEAGGIAKELNASDANGLLGTFEPSSPAERTRHQLALELLADVRHLDGQLAESKQRIKVAVSASGTSLTEVFGIGPVIACSLIGYTGDVSRFASRDQFAAYNGTAPIEVSSGGRVAHRLSRRGNRNLNHAIHMVAICQIRHTHSEGRAYFDRKVAEGKTKREAIRSLKRQISNTVYRHLVLDAAK

SEQ ID NO: 291552 - protein, 458 aa, unidentified
MAHRKKKIAAQIVEDEEYQLRHERVAGIDIAKGSAVVCTRLPPARGSRRRRSRIEEVAATAAAIMALAAAWLADGVELVSMESTSDYWRIWYYTLEAAGLKVQLVNSSAARQLAGRPKTDKLDAQWIARLTEMGLLRPSFVPPAEIRALRDWTRTRLQLVRDRTAEWQRLEKLLEGALVKLSSVVSGLAGNMTARAIIEALIDGDRDPRALADLALSRLRGRRGDLEQALQGMAFGAHHAWLARLHLDRIDTLDRQVAAIEDEIEACLAAIPQAHGVTADGIPSPDPGPGAPVLPAAQRLAEIPGISLNLAIAIIAETGLDMSVFPTAGHLVSWAGLTPVARQSGPRQRKGKKGQGNSYLRRYCTQAASATAQTGTFLGERLRRLAKRKGGTRARCAVARSILVIIWHLLANPEARYTDLGPGWHASKTDTDRRTRSLISQLRALHPGATITISQPAA

SEQ ID NO: 291553 - protein, 424 aa, unidentified
MAYRIAGIDVHKRMLAVVVADVEVEGEYEFERQLFGATPQQLRSLAEWLLEREVEEAVMESTAQYWKPVWAALEQYWKPPCRKKDGAGPMSGALHLAQARSNRGRRGRKRDFPDAERLVKRLVAQELNLSFVPDAEQRLWRTVTRRKYQLTRNRARLQNQLESLLEEAHIKLSSLVSDLLGVSARRMLQALADGETDPATLAAMANKQLRATSEQLCDALGACTELNLVYRRLLKMALEELRFIEQHIGQLDQEMATLLCQHQDAVQRLAEVPGLGVGSAQQIIAEVGATAASFPSEKDLSSWVGACPGDEESAGVSQSHRSPKGNRQMRRILNQCANAAVKVKGSIFQILYRRLVPRLGHNQTIGAIAHRICRLIWIILHRGVGYVEHGPAVQESSKRARTSRMIRQLRNLGYRVELLAQNPA

SEQ ID NO: 291554 - protein, 423 aa, unidentified
MAYSIAGIDVHKKKLAVVVADIEVHDEYQFERRWFGSNPEQLQRLAEWLIEQWVEEVVMESTAQYWKPLRSALERYWKPSCQNREGAGKMSGTLHLAQALSNRGRRGRKKDFPDAERLVKRLVSQELTLSFVPDTEQRLWRTLTRTRYQRTRDKVRLQNQLEALLEEAHIKLSSLVSDLLGVSARRMLHALADGETDPAAVAALAHQRLRATSAELRDALGACTELNPVYRRLVRLALDDLPLIEQQIGQLDQEIASLLREHQDAVQRLAEVPGLGVDSAQQIIAEVGAKAATFASAKNLVSWVGACPGEEESAGVNRSKRSPKGNRQMRRILNQAANAAVKHKGSIFEIVYGRFVPRLGHNKTIGAIAHRLCHLIWIILHNGVRYEERGPSVCEKAKRVRTSRMIRTLRTLGYRVEPAVIPA

SEQ ID NO: 291555 - protein, 401 aa, unidentified
MKPEPPVSVMIRARLTAQSFFVVPQSAGHNNLYYRRLLMDKYIGFDIDDNKTVACVVQKGKKDRFTTIKTEIAQMKQFLCDQRKGGEKLHLTFEISGQAGYRYDQLGGCVEDITVSNPSKMTWIYRTAKKTDRVDARKQAVLLSIGEVPKVHIPSKEVRQWRVTIQHRRKIVNRITAVKNRIRAHLKGNGFSKAPHRGSWWKVVNRVWMRSLCEGVEVTSGDLWRMSLADMLEELYLLEGQRKRITKWLDGYLDKQAGGRLLMSIPGIGPRTAEAVLAYTDEVGRFGRSKQYCSYFGMTAKLDESGSVRRLGHISKQGPSVVRWLLVEASWRVIKKSAGLRGFYQRVMCGQKARKKIAIVAVARKLLSIMRAMQVTGELFNEELVCNECGVSRIGKVREPA

SEQ ID NO: 291556 - protein, 357 aa, unidentified
MRAIQILPVDAGPFTIGLDVGDRTSRFCVLNGTGQCICESSLSTTISGLRRAVENLPKTRIALEVGVHSPWMSRELAKSGFEVIVANPRRVQLIAASSRKDDRMDARTLARLARLDPNLLAPIRHRSSEAQAHLMNIRARAVLVESRTKLINAARGLVKSCGERLPAKDSGQVRPDLATHLSASSRNAILPLLTEIDNITKRISEYDRQLEEIARGRYPELARLKQVNGVGTLVALTFVLTLEDPNRFSSSRDVGCYLGLRPRRRDSGQSQPQLRISKEGDSYLRQLLVQSAHHILGPFGRDSDLRRWGMQFAEHGGKNAKRRATVAVARKLAVLLHHLWKSGAEYDPPWNDKLKAA

SEQ ID NO: 291557 - protein, 315 aa, unidentified
MNTHSASAGGVVYVGVDVCAEWLDIHGLKSKKITRLANAAAGHAKLIAQLPDVAHVVLEATGGYEHALWLALLRAGRIVSRVNPGRVRHFAKASMKLAKTDAIDAAVLSSFGEALKPKADTLPAQWEMELADLVSRREQLVSMRAQQKTQLHQITHEALITQARALIQTLGGQIKHLNGLIKGVMEHEAARSKAARLQQMDGIAQVVASTLMAELPELGSLDNARISSLAGLAPHPHDSGPMRGQRHIAGGRKKVRRVLYMAALRCVRVNTILKAFYQRMLSRGKPFKVAITAVMRKLLCVLNLLIANPNFQLAR

SEQ ID NO: 291558 - protein, 369 aa, unidentified
MIVNEVAKNVEKIISIDTAKNSFQVLVVNQKTGKKKNTKVQRSKFVEYILKQGPCLIFMESCSASQHWARLFESFGFTVKLIAAQHVKAFLRNRRVKNDERDAEAIYTCGIQTDTKFVRIKTVEEQTVALLHTLRKAAVSQRVELSNRIRGILAEFGIVVARGRGRGSFNSEIEALFNECEKIHDVNLRAAISSLFEDYHRLEQREKELSGKIESLNKDNELVKIALTCPGVGPLTASAIVAEVGDASQFRNGREMATWNGVVPSQHSTGGRSTLGGITKTGNRYLRALLAQCASAVIQNASRHLEQGKDTHLDRFALRLKLNGKPAKKIMIAVANKIIRILWAMLTQRKTFKNKADETSDISAELQLA

SEQ ID NO: 291559 - protein, 318 aa, unidentified
MRIKECDLQARQQTLAMLDTGTGEVVNRTLPHEGESVREFYSTLPGPVRVGIEATGSMKWFLQLMQELGIDCQVGHPATIRAAEPRRQKHDQRDAELLLKLLVENRFPSIWQPSQELLDLRGLLLHRHQWVRLRTRIQNALQAIALANGLRRGSSLWSESGQRAIASLPLATHTAQRRSELQAMYARFEAEIEQLKQQVLQQAGPRPTAGLLMTHPGVGPITARATDVFLGDPKRFSNGKALASYIGIIPREHSSGGRQRLGGLSKQGNPLLRLLWCEAAAHAVRRDPELRRFYRRKLVQKGLGKARVAAARKLGPGN

SEQ ID NO: 291560 - protein, 388 aa, unidentified
MRGSSTITLTAEPHGREEPAVSVVSMPRGEVKWVGLDVAKDAIAVGVLDGVSEATPRLEKIAHDEVSIRRLVSRLGGPGRLRACYEAGPTGYELHRLLGSMGVDCEVIAPSLVPVAPGDKVKTDRRDARRLVRLFRAGELVTVRVPTREEEGCRDLSRLRAAAMVDRRRARQRLGSFLLRRHLVYRDGRAWTVKHRRWLRSLAFDDTGTQVTFAHLLASVEERELRVDAIDTDLARFFEAGLFVNEVARLGAYRGIAPLSALGLACEVCDWRRFPAPGKFMGFVGLVPSEYSTGASTSRYGITKSGNAHVRRILVEAAWAYRYPARVSPELARRHEGVAPDVIARAWNAQVRLCGRFRRLAARKDRRTIVATAVARELAGFVWAEMTA

SEQ ID NO: 291561 - protein, 420 aa, unidentified
MRKQPEDKNPGEGRLEEAEHFLAPPPPSKGKIIGVDCHPDSFTAAVLEGQTPHEARQLCCRADMTLEELLEWAQRECSAQDLFLLEAGSNSFEVHGHLLALGRRAVVLESAHVGKHAKSYADNDKSAAARIARVYLAGNAPCVWVPDAETRQRRELLHAYGKAVEDCTAATNSLKSYLNQFTVRLGQRKCTVKKTQRWILAQREWSELQLRLLEDHFANCEFHAERRKELCRLISREVAKDRLMLGCMKLLGIGVINAFALVAIIGDVRRFEHAGKLVAYVGLNPGQRESGRGKRVKLGVGNRGRGDLRRYLIQGAQAVLRYGRGSKLSAWGWKLFARKGSRNVAVAAVARKLLVQVWYLLSGKAPEAVDSENQLRTKLGKLTVNLGKSLRREMELPATIAGCIQHFRDQLNPIQKTTTA

SEQ ID NO: 291562 - protein, 440 aa, unidentified
MRLRTRILEIVPFEELLSVHIRSDLMEMIKNKVCGADIHKKFLVATILSRDGTKTSERFGMMLDDILKFKEWVIANNCEQVAVESTGVYWVPIYTVLEDKIEVIVGNAYQIKHTPGRKTDLRDSEWIAELCLKGMIEPSRIFPKEDRELRTLTRARETLVNNRTQMKNRIHQALESSCIKISSVLSDIFGKSGRYILDGLLEGKTIDEILVGIKLKQIRKKDQELREAIKNSLDPAQILFIRNCLELMEEIQKRINNLDTEIMSRMERMKEDVEIAMSIPGIAFTSASSILAEIGNYRDFANGNKLAAWCGLVPTVSESAEKRILGSITKQGSKHVRRMLVQVAHAISRTRNSRLKSFFLRLKAKKGAKKAVIALARKVLCILHHLLVNRERYEEKGNLKPKTIKFDRTSSPIQITEQYMIDTLVKAGYIIKKNGILGGE

SEQ ID NO: 291563 - protein, 388 aa, unidentified
MYMIYIGIDISKYKHDCFICNDTGEVIVDNLSFENTKKGFQQFLDLLKPYDNDNVRIGLEATGHYGLNLKLFLEKNNYTFMEFNPLLVKEFKKSLSLRRTKTDKVDAIVICQKLMSVPYKPNSKLFYHKYSIKSLSRLRETLVKQRSKYMVQLTNVLDIVFPEFKPFFNNRFSSTSLYLLNKYGNAEKIANMRDFDTPNKLSKGSFTYAKFAKLKELAKNTVGESNVFFEIELQTLISLYNEIDSKINSIDKLISTIIKELNPPTLSIPGIGELTTAVIISEYGDFNRFSNADKLLSFAGLEPGIYQSGTIIANGKMVKRGSGYLRYSLMNIANVVIRYNPIFYDFYLKKRSEGKNHRVALSHVCKKLLRVIYKLETQNIQFDPSLLK

SEQ ID NO: 291564 - protein, 410 aa, unidentified
MERVIERCCGLDVHKKTVVACVRVPGRTSVREQHVRTFGTTTAELLALRDWLGGYGVTHVAMESTGVYWKPIFYVLEDAFTCVLANAAQIAQVPGRKTDVKDCAWIAQLLEHGLVRGSFVPPAPIRELRDLTRYRAALIGEHTRETNRLQKVLEDAGIKLASVASDVLGVSGRAMLDALTQGTHDPDVLADLARGALRRKLPALRQALTGRFRPHHAFLVSQVLAHLDYLDEVIEALSTHLDEVMAPFAEEVSRLDTIPGVNKRTAEVLIAEIGVDMGVFPTAGHLASWAGLCPGNNESAGKHRSGKIRKGNRWLRGALIQAALAGGTRATKGAFAARYRRVMRHRGHKKAVVAVAHAMLVAAYHLLARHTTYQEPGADYYERRHAERVRQRAVQLLERQGYRVTLEPAA

SEQ ID NO: 291565 - protein, 416 aa, unidentified
MFAVGVDVANGRSMVAVLDGMRNMVAKPFEVVHTAQGFAALVEKLRQLDGEVRIVMEHTGRYYESFAMTMHRAGFFVSAVNPLLIKNYQGSINVRKVKTDKADAQKIAQFALDKWTILPHYTPMDTIRYNLKTLHRQFQLASKTKTALSNNLIALLEQSYPGANRYFDSPVRTDGRQKWVDFVDTFWHVDCVAMSSEHAFVERYRKWCKRHGYVFSEQKAIQLHADARQKIPLVPKSDTCKLLVREAVSQLNAVSRTVETYRAEMDRLASQLPEYETVMGMTGVGKSMGPQLMAEIGDLRCFAHQKSLVGFAGTDPIKEESGDKVSQSAPSSKRGSPYLRKTLFVIMTILLQLQPQEDPVYQFLDKKRSEGKPYYVYMTAGGTKFLRVYYGKVRDCLKAKGLWEVPASASQEVNPG

SEQ ID NO: 291566 - protein, 370 aa, unidentified
MKANSIQDVGVDVAKSVFQIHAVDARGDVVMRRQLKRAQFLPFFAQLPPCRVGMEACGGAHHWARQLRQYGHAVCLMAPQFVKPFVKTNKNDRADAEAIVEAMSRPGMRFVAIKETWQQDMLIIHRVRERMVKARTALMNEIRGLLQEYGIVFQRGSHHLRAGLLQVLGSPEDRLSDSVQQLMQHLVEEWTDLDKRLEECTFTIGQSYRSHETCRKLGELPGIGPITATAMVATVGDARVFKNGRQLSAFFGLVPRHDGTGGKTRMKGLSKRGDRYVRKLLVHGARAVLQAAEKKPHLRNRWVLQLSQRRGFNKACCALANKNARRCWAVLVGREPREVMRATRYPPRATRASGPRFPGGSPSIALPLRG

SEQ ID NO: 291567 - protein, 342 aa, unidentified
MDYYAGIDVSLECSSVCVVDASGKIIREAKVASEPQALIDGFRALRFGLVRIGLEAGPLSQWLYAAMTQEGLAVELLETRHVRDAFKAMTVKSDRNDARNIAQLMRLGWFRPVHCKSLAAQEVRAMLTARKLVQSKLLDVENSLRGILRGFGLKVGKTTKTSFASRIEELVKAHPNLKTIAEALLRARAVLLAEFNDFEKRVRRLSALDAKARLLMSTPAVGPIVSLTFASAIDDPSRFTSSKKAGPLFGLTPKKYQSGETDYSGRISKTGDASVREALYEAAHIMLTKPIKGCSQLKSWAMRIARRAGPAKAKVALARKLAVIMLRMLMTNMPFNPAVRAA

SEQ ID NO: 291568 - protein, 317 aa, unidentified
MTPNADKIQFALGCDVSCRTVTIFDSRSHQTSTVENTPAALRKALEPYAGCRDVLAVCDASGGYEDMLLSVLAALAIPTHRADAAKVKAFIRSFGTRAKTDPIDARFLAHYALDRGTRLCRWQLPEKTQSMVKLLVARRADLVAMRVQETNRLAAPRNRPIATQIKSHVRDLDRRIVETERQIDLLIAKSPQMAQRRTILQSVPGIGPVVSAMLIATMPELGHIDRRKAAGLSGCAPHPRDSGAMQRHRVTSGGRRQIRPVLFTAALTAIRGTSPLADGYRRLVAAGKPKRLAINAIMRRIVVIANARLKEYETQLT

SEQ ID NO: 291569 - protein, 358 aa, unidentified
MKKIAYVGNDVHQDSITASVYVGDEREPSIERQMLNERKAVEKFYKRLSDEYEVRACYEASSNGYVFYRWLKELGILCEVIAPSLIPEKRGDRQKTDKRDARKLGRYYRSGDLTTIKVPSEKEEASRSLLRLREQMSREVRNAKQYLLKFLQLRGLTYKEGSNWTVKHRQYLKGLKFEERLEARVFDEYMLMLAYKEASLKKIDDEIYTLAYGEEYRERVKRLTMLRGVKETTAMGLITEVVDFKRFSRPREMMAYLGLIPGERSSGEEQRFTGITKAGNPRVRRLMVEAAWHYRHKPVIKKRKGSDLDESWEIAQRAQRRLHDKYWRLIQKGKCKTKAATAVARELTGFIWAIMRTV

SEQ ID NO: 291570 - protein, 380 aa, unidentified
MQPAQHANANATLTLSIELAGNSWKLAATDGLQPNPAVLATDVEDRWSRLQDVFGHIDALRKKWRLPAHARVAVIYEAGQDGFWIARALQARGVQVFVVDAASIPVPRHLRRRKTDRLDAIKLLEVLRAWLRGERSEVHMVRIPSEEAEAQRLLSRQRGLLQKEVLQHRDRMRKLLLLQGCAETVDRGFAERLMAGQVRRGDGRPLPQQLWDWLLLECERLELVERQLASVEKTLMHQLPQSVQQTITVLARLRGVGWVGATRLVLELFWRDFANRRQVGACVGLVPQPYDSGQSHSDQGISKQGNARLRALLIEIAWKWLQHQPDSALAKWFARRTAGEHKRGRRVAIVAVARRLAIELWRYLKNGVIPAGAQLKPAGC

SEQ ID NO: 291571 - protein, 416 aa, unidentified
MDIVFPCCAGLDVHKDTVVACVRRLRTGAKRKTESAVRTFGTMTEQILALADWLAEEGVTHVAMESTGVYWKPIWNLLESGPYEMLLVNAQHIKQVPGRKTDVKDCEWIAQLLQCGLLRGSFVPEPPQRDLRELTRQRRQLIQAKAAVANRIQKILEDANIKLGSVATDVLGKSGRAMLRAIIAGQDDPVVLAELALRKLRAKIPQLRAALRGGVTENHRFLLKLLLEEVTQMEAWIEQLSQRIVAVLPVPFAETVQRLATIPGIEERAAENILAEIGVNMEQFPSVGHLASWAGMCSGNRQSGGKRYSGRTTKGNLWLRATLVQVAWAASHTKGTYFAAHYRRLAGRRGKKRALVALGHTILTVIYYVLKRKTTYEELGADYLERHDKDRVLASLVRRLERMGHKVTLEPCEPAA

SEQ ID NO: 291572 - protein, 355 aa, unidentified
MNSTKYIGMDVHTATISVAVRDAAGKLIMESVLETKASTIVQFIHGLRGELYVTFEEGTWAAWLYDLLKPYVTNVVVCDSRRNALLQEGSKSDRIDGRKLSELLRANLLRPVYHGENGLRPLKELVRAYLTISKDLARVMNRVKAIYRGWGIPCAGQSVYHPRHRDEWLGKITQASVRRRAQLYYLQLDMLVLLRKQARQELLVEGKKHQAWKSLRSIPALGPIRAAVLMAIVQTPHRFRTKRPLWKYGGFGVVTHSSADHRYVEGQLQRSKKPVSVRGLDFSHNHHLKDLFKGAAIQASTREGPFREFYEALVAKGMRPEMARLTLARKIATIALTVWKNGVAFDAKYLKPQTA

SEQ ID NO: 291573 - protein, 409 aa, unidentified
MLKIVYPNCCGIDVHKTFVVAVIAITNNQGITEYHRKHFSTFTNGLTQLRDWLEYYSCFDVCMESTGKYWIPVFNILEEQTNVCLAHPKYVKAIRGKKPDKKDAQWIADLFKHDLVASSFIPPLKIRQLRDLFRYRMKLTQLQVGEKNRYQNCLTWSNLQIASVVSDVFGKSAQAIIKSILDNPQDKPNIEQLVHKRMKNKVQDLEIAMEGALTPEQAEKIRVIKAHYDALAICKEDLEQMIRELGQDYQHQVKLIQTVPGFKEDLSALRIISEIGCDMTVFDSAAKLCSWAGLVPANNESAGKKFSTRISKGGKYLKPFLVQVANAVVKSDKHPELRNKYLKLKKRRGHRKAISAICRRLLVSVYQVLRKQEDYNPVLQGLTEIRNPDKTMSVQDAVRFAQQHGFNVA

SEQ ID NO: 291574 - protein, 355 aa, unidentified
MTSVKYIGLDVHKESISICVRNSVGKVVMESVIETKASTILQFIDGLRGDLRVTFEEGTWAAWLYDLLKPRVSGVEVCNPRKNALLKDGSKSDRIDANKLSEQLYMNNIKSVYHGEHGLRTLKELARSYLTISKDLTRVMNRLKALYRSWAIPCAGKEVYAPRHRAEWLGKISEPGVRRRAEFYYQQLDAMGLLRQEVRLDLLREVKKHQAWKLLRQIPGIGPIRAAVLMAVMQTPHRFRTKRQLWNYSGLGLETHDSGEYRAVKGQLQRAKKQATVRGLNRDHNHDLKDIFKGAAMRTSTAAGPLHDFYENLLARGRKPTMARLTLARKIAAITLIVWKKEVRFDANYLKPQAA

SEQ ID NO: 291575 - protein, 356 aa, unidentified
MISSTKYIGMDVHTQSISSAVMNSVGKVVMESVIETKASTILQFIDGLRGDLRVTFEEGTWAAWLYDVLKPHVTEVVVCNPRKAALLKDGSKGDRIDARKLAELLYMNRIKSVYHGENGLRTLKELARSYLTITKDLTRVMNRLKALYRSWGIPCAGKDVYAPRHRAEWLSKISEAGVRRRAEHYYQQLDVLRLLRQEVRRDLLAEAKKHKPWKLLRQIPGIGPIRAALLVALMQTPHRFRTKRQLWKYSGLGLETHDSAQYHAVKGELQRSKRPATVRGLNKDHNHDLKDIFKGAAMQTSTAAGPLHDFYENLLAKGRKPTMARLTLARKIAAITLIVWKKEVRFDAKHLKQQAA

SEQ ID NO: 291576 - protein, 315 aa, unidentified
MTNLNKSKSVVNVGVDVGKFYLDVYIYEKGVYFQEENTEKGIKRILKRLSYYQIERIVMEATGRYDFMLAQAAHSKNLPVCIAKPSSIRNYAKAINLTAKTDKLDAELIAEYAAIVQPVITPEKSKNLIAIKDLIARRRQVMGMRTQELNRLKIMGKGFEVSCKRIIKYLDQEIDRLEKRLAKHVADQADWTEKKTILKSAPGVGDTLVYTLLADLPEIGSLSNKEISSLVGVAPMNRDSGKLRGKRRIKGGRYAVRTVLYMATLSATQCNPVIKGFYNQLLAQGKHKKVALTACMRKFIIMLNAMVRDRCEWAY

SEQ ID NO: 291577 - protein, 372 aa, unidentified
MGHHSEAFIGIDTSKLRNAVALAEGSRGGEVRYFGKFPATVAAMRKLVGKLAAKYRRLTFCYEAGPTGYGLYRLIKGLGHEVMVVAPSLIPKKAGDRVKTNRRDAVELAKLLRADQLTAVWVPDERHEAMRDLSRARQAAKRDLQGKRQQVSSLMLRIGRCYPGKTTWGPAHMNWLMSQKLDHREQRIALEELLEGVRQERERVERLEQAIREAVPEWSLAEVVRALQAMRGIDVIAAVTVLAEIGDLCRFQNPRELMGYLGLVPSESSTGDKVKRGGITKAGNGRARRILVEAAWAYRYPARVSREKQPSVAAVPRRVREIAWKAQTRLCGRFRALVRKGKLPTVAVTAIARELSAFVWAINREVTRTRQA

SEQ ID NO: 291578 - protein, 352 aa, unidentified
MEYYIGCDAHKKYSVFAGISEAGEIIPAQRVEHNRESYRSFLQSLPPACQIAVESVGNWYWMVDEMENAGHVPALAHPAKAKLMMGQLNKTDKLDARGLAVLARNGTLPAVWIPPGELRDQRELPRMRMALSQVRTKFKNRIHSAFAKYGITFDEVSDLFSGKGRKLLEKSLDELPPETRLSVQEQLWLLDQVEQSIKRAEKRIGQVIKRDDTMQLLQTLPGVGPILAIVIALEIGSIDRFATAEKLASYTGKVPRVNSSGGKTYYGKVRPDVNRYLKWAFTEAANAIVLHQNCWPDRHVVRLYQRVRKHKGHAKAVTAVGRHLAEATYWMLRNNEPYREPGKKWQVSSTQG

SEQ ID NO: 291579 - protein, 375 aa, unidentified
MYQYSKYVGLDVHKEKIMIAIAEAGRRPPLYYGEIANTEEAIARAIRKVIGQGDVAFCYEAGPCGYGLYRQITNMGYQCDVVAPSLIPKKSGNRIKTNRRDSLSLAGLYRAGELTSVWVPDKEQEAMRDLTRAREDMKAMERHSRQRLGGFLLRHGKVYSGRSKWTQAHFRWLEGVRCETATQQIVLQEYIDMVKHAQGRVEAMEGEMRKALDDWKLKAVVEGLMALRGIDLIAAMTIVAELGDISRFESPRQLMAHLGLVPSEHSSGEKRKQGGITRTGNGHVRRVLVEGSWSYRLPARKTAHLQRKAEKTTEAVQGIAWKAQKRLCKRFWYLIHKGKLPVESCTAVARELVGFIWAIACEVMGKGTLSAAVKG

SEQ ID NO: 291580 - protein, 298 aa, unidentified
MLDTTTFVGLDVHARSIKAVSLDVMTGEVRAATFGYDAGAVAEWVRSVDPGARCVYESGVTGFDLQKRLSGLGVDCVVGAVSKMIKPSADRRRKNDRNDAEFLARMLSVGNVVEVWVPDDECEAARDLTRALEDARDDLSRSKQRLSKFLLRHGLVFDERTPTGRRKGNWTRAHWSWIESIRFAEGADEEVLAYYVDAVRRAAEEKARLEGLVEGEARKPRWRRRVDSLRCLKGVDTASAADLVFEAGEFSRFRNARSFAAWVGLTPSEHSSGESDRRGAITKAGNKHLRKTLVLALL

SEQ ID NO: 291581 - protein, 446 aa, unidentified
MNYYLGGDVSKGYCDFIILDKSKKVIEQGFQLDDTKESHTILYNILASLLKKESSSVIYAAIESTGSYENNWVKSIQKFQLTLNIHIARLNPYGVSHSSKANMERIITDQISARTVAEYLINYQPKIRFIEEDNFSTLRRQWKYISLLKKQKVQFYGQLESLVYNSFPEILTFCKNGFPNWVLELLLNYPTAERVSRARVKTLSKMPYITNEKAEILISKAQRSVASENNSTIEGIIKSIIEQIIGLDKTIASQKKMMTNSVSKENLPEVQLLTSFKGIGDYSAIGLIIEIGSVDRFATSKQLASYFGLHPVFKKSGDGTYAMRMSKKGRTSPREILFNVAFTAIRDNELIKEIYARHLKKGMSKMAAIGAIMHKILRIVYGMLKNNESYNPEKDRNDTKVVHELGQKKTDNTRRHQDYDIYAPISSRQSGKRTMIKKELELNVPK

SEQ ID NO: 291582 - protein, 346 aa, unidentified
MDSIDFIGFDIHKKTISFCAKAQDGRILDEGTIPARRTDLSAWAKRRSRPWWGAMEATLFTGWVYDHLRPLAQELKVAHPAMLKAIAASKKKNDKVDARKIADLLRCDLLPECYMAPSAVRELRRVLRYRNLVVRQATRMKNRIAGLLMETGTVYSKERLHGKAYFSELLESLREIPGSVIELLKLSRAQLEFFATIQQRLVKGLRADAGLRERVERLQSIRSVGEILALTWALEIGEVKRFPSISDAVSYCGLTSAQRNSAGNEHRGPISKQRNKHLQTILIEAAKLAPRYNPQLAVVHERELKRGDCNRATLAVARKLVAYLMAVDKSGKPFQVRASAGEGEQT

SEQ ID NO: 291583 - protein, 343 aa, unidentified
MPIVGGLDIHRKQLTFDYLDTATGEVKRGQIAPADRAHLRSWLVRFAGRDDVAFALEGCTGWRYVAEELAGAGVAAHVAEPADTAFARGRKRHAKTDKTDSRHLRELLAEGRLPECWIPPSYVLECRALLETYHDLRAEHTAWVQRIHAVFFHQGAPALGALRTEQDIEAVQAAAACHLSPAGQLQVDTALGMLAFLEGRLEVLRHRLLAAARSLTGARVLAARLYGVGPVTALALTCWLGGAGRFSSSRKAVRFAGLDITVYSSDRKGPPGRLSRQGPAVLRWAVFEAGKTHARASAPDHAYYAAVKDRKDGKRAALSEARKILRQACHILAELGDDALTAA

SEQ ID NO: 291584 - protein, 405 aa, unidentified
MEVLHERCAGLDVHRDTVVACAITPEAREVRTFGAVTGGLLELADWLAGLGVTHVAMESTGVYWKPVYNLLEGGGLELLVVNARHMRAVPGRKTDVRDAEWIADLLRHGLLRGSFIPDRPQRELRELVRYRRTLIEERGREAQRLHKVLEGANIKLGAVASDLMGVSGRAMLDAIVAGQDDPELLASLARGRLREKHDRLVAALRGLLGPHQRRLLAAQLRHIDFLDAEIATLSAEVAERMRPFGVAVALVDTVPGIALRTAEAILAEIGTDMGRFPSSAHLASWARVCPGTDESAGKRRNGATGAGNHWLRSALVEAAHAAARTKGTYLAAQYRRIAARRGSRRAAVAVAHSILVIIYHLLRDGVVYEDLGATWFDQRDRSGTVRRTVKRLEALGYRVTLEAAA

SEQ ID NO: 291585 - protein, 349 aa, unidentified
MNKFSKAKSDGNVCTDMFVGMDLHKNYLQVAVLDGKGKVLKNSRIDNDLSKVGRFFDRIGGSGNSSDVKVVMESSCVWYNIYEYLSEERQLDVSLSNPFKTRAIASAKIKTDTLDAVKLADLLRGGYIAKCYVPDRKIMDLRQLVRHRIVLVRMRTKLKNKIHGITLMQGVRITDTSAFSNNYVQKLKQLNDYRIDAYLRLIDSLDSEIKKVSKEIQSRAEKEDMTKLLVTIPGIGYYSALLILSEIGDINRFPDSYHLCSYAGLVPTTHSSGGITYHGAITKTGSKHLRWIMIECVYTHMRISKNSNITRFYTRLANRKGNSKAVVAAASKLLKVVYWVMKEKREYHV

SEQ ID NO: 291586 - protein, 347 aa, unidentified
MTLYIGVDFHPHQQTVSYCNNEEGEVHQTSLVHNVEQVRRFYGQFPKAVVGIEASCTAAWFEQLLSELGHELKVGNPSAIRARARSRHKSDKRDADLILDLLLKDEFPELWRRPLPSQSVLEQLRFRHHLVKHRTQICNRLQALAHAAGLPKKGIQTKRARVALMAANFTETQSFERDQMFELLDDLTQRIQQVEKWLEEKAAGDEKVKLLLTHKGVGLLSALAVAHTLGDINRFPSSKEAVAYTGLDPLEQSSAGKVRFGSISKAGSSVLRHLLGQAMHVASRYDGELKAFYKRLANRRSKSIAKVAATRKLLIRLFIMLRDGIDYSEFKRRGSAVGMPVQSHGLQ

SEQ ID NO: 291587 - protein, 345 aa, unidentified
MQIKSIGIDLGKTTFHLIALGSRSQVVIRKKFSRSQLLVYTANLPASLIGMEAGVGSHFLGRALREQGHEVRLIPAQFVRPFVKSNKNDYRDAEAIAEAVERENMRFVPIKTEDQLDLQALHRVRDRLVARRTSVINQIRAFLLERGISFRKGPASLRRQMPEILENGDEKLSPGMRRLLDFLWQEWKGLQLQIESLNADLEQIASSDPSCVRLQQIPGVGPLVSTAVVSAMGNGAAFKKGREFAAWLGLVPRQWSTGGKAKLLGISKRGNPYLRKMFIHGARAAVLRLKREGSSLGTWMSGLETRAARNVVIVATANKLARISWAVLASGNDYHPRHKALAFPN

SEQ ID NO: 291588 - protein, 319 aa, unidentified
MTQISTTAGIDTSKAKLDVAVYGRSERWQVDNTASGWRRLVGELRKAGITRVGIEASGGYERGVVAALRDKGLTVLVLQPIQVRAYARVHLRRAKNDALDAVLIAACAATIEPPAIAPDDRLARLADHLTYVEQVEEDIAQLKGRLEHVDDPRLRRMVLADIARLRARRSAELLRIVTQLRHQADLARRLDLVLSVPGIGERTALALIIRMPELGRVSREQAAALAGLAPYDDDSGTHKGQRRIAGGRQRLRRSLFAAALPAAFRWNRALVEIYGRLTARGKVHNLALVACARKLLIYANTVVARGTPWVQQPPAPATR

SEQ ID NO: 291589 - protein, 366 aa, unidentified
MKKVSTITAAATKNFSNDRLTVGLDLGDRNSWYCVLDEAGQVRLEQRVRTTAKALREVFGASARSRIALEIGTHSPWISRLLKELGHEVIVANARKVRLIGESRKKDDRLDAQTLARLARLDPKLLYPVKHRSAEAQAHLMAIRARAGLVRARTSLVNTARGLTKSYGQPLRSCNVRNMNPEKAEQLSPELQRALEPLLSAIEELSERIAEYNQQVENLARTGYPQVELLKQVKGVGTLIALTFLLTLEDPHRFRRSRDVGGYLGLQPGRRKSGQSEPQMHISKEGDPYLRTLLVQGAQHILGPFGIDCDLRRWGLKLAERGGRNGKKRAIVATARKLAVLLHHLWLSGEVYEPLHNHNLTVAAAA

SEQ ID NO: 291590 - protein, 359 aa, unidentified
MLVERTCVGLDVHARSVVAAAIDGVTGELSQARLTPSHDHIRSWIEQFDGPVAVVYEAGPTGFGLYRALNPVGVRCVVAAPSKLQRPPGDRVKTDAKDAVHLARLLRLGEITAVTVPTVDQEAARDLVRARDDCRGDLMRARHRLSKLLLRHGFVYSGGQAWTGVHDQWLRRQRFDHRATTMAFESGYEAVTAITARRGRLDKAIAELAAASEFTPIVHRLGCLRGIATLTAFALAVEIGDWNRFTGNSIASFVGLVPSEHSSGASRVQGSITKTGNTHVRRLLVEAAWQHRPAYRPGKVMRDRWDLADPAARARGDAGNRRLHQRWVQFNLRRKRPVIANIAIARELAGWCWSLAVMG

SEQ ID NO: 291591 - protein, 338 aa, unidentified
MNRKFYVGIDVSKKTIDVAFIAQSGEQKTEPRWKVFDNTDPGLHQMKTWLNKESVTLDANTIFVIENTGLYHRRLVSFCNKHQIQLCIENGAQVKWSLGIARGKSDKVDSRRLATYALRFADRLKPAAALHEGIQAVKDLITLRNRHITQLSALRSNLKELKLTTDPAAVKELEKIHKPLITATKNTILKIEAALLKKIKSNKLTSRQYELLLSIPCIGPVTAAYLIACTNAFTLCETGKQLACYCGVVPFEYQSGISIKGKHRVHKMANKNLKALLHLCAVSSLRYVKELRAYYDRKVEEGKHKMSVINAIRNKLVLRAFAVVKNGKPFVNNCISAA

SEQ ID NO: 291592 - protein, 319 aa, unidentified
MEQNNYEVYIGIDVSKAKLDIKYDDSDSLLTIDNKPGDFKQLNRCFPKDKKSVLVILEATGGYETKVVKWLLSRNIPVVVANAKRVRDYAKATGQFAKNDKLDAGIIREFGMKVGHKLYLQQKKNRVEEQIDDLTHRRKQMISVRNKEKQHLAMIQNIEGQRSIKRAIKFYNSEIDNIEKKLAATLKQDKQLQAKAELLQTIKGVGDVTTYTMIGELPELGHVSNKQISALAGVAPFCRDSGTMKGKRTIWGGRAQVRTALYMAALSASKYNPAIKVFYDRLIAKGKCKKLALVACMRKLVIVMNTMVKNNEPWHAEML

SEQ ID NO: 291593 - protein, 325 aa, unidentified
MQGKDRSEQETKAKSTVGIDVCKLWLDIHILPSEESFRVPNTKAGSKEISRRLQHYDVQLIAIEATGKWHRDLHRNLVGHGYAVRVVNPLRARLFAEAMGLLAKTDRLDARMLAIFAASLTEARPPAPEIIETLKELVQARSSAVEEQTSLTNQFKSATTAFLRRQLKLRLTQIAKHIKALETESLKRINADPGLARRYDILISIPGFGDVVAMTLLAWLSELGSCNDKQIATLCGLAPWPDESSDRVGARHIRGGRQLIRNILYLASITAKSFNPSMKAFFTRLTANGKAKKLALVAVARKLIILANTLVRADRLWQTEAPKCA

SEQ ID NO: 291594 - protein, 393 aa, unidentified
MRRVIGMDIHRTFAEVVVWEDGRLRHHGRVDMTRSGLEGFGRSLRRTDEVVVEATGNAMAVVRVLSPYVGRVIVANPMQVKAIAHARIKTDRIDAGVLAQLHASGFLPEVWVPDERTERLRRLVARRNQVVRHRTRVKNEVHGILQAHLVPKCPHADLFNRRGRAWLEQQVLPDDERAAIARHIREIDRLAEDLADLDRDIAREAVDDVQVRRLQTITGVNAIVASGIIAAVGDIRRFREPQRLVSYFGLNPRVRQSGLGLAQYGRISKHGRSHARAFFLRIRNKRGHQVAAVAVARKLAVLIWHLLTKEQDYFWARPALVAAKQRQLALKAGAPGERGVGRRGSAYAYNVKELRNSEKAAAENAERAYELIVRHWRPRGPKRRTDATKEERL

SEQ ID NO: 291595 - protein, 342 aa, unidentified
MKFYCGIDLSARDCHVCVIDEQLKVVVQQKLRNELPRICRLLEPYKANLKIVVESTFNWYWLIDGLQAEGFEVVLAHTLGLYLITGAKVKTDRRDAYALAKLLLVGAVPAAYIYPVETRPVRDLLRRRAHLVQVRAGEYGSLRRLLLRQGILSSKQQEIKTATEAELEQWFAHPLVRLHASQELQRIELYSQQIAELEKTILLLAKTERSYELLLKLPGVGQTIALTILYEVGELTRFANVKVFSSYCRVVPGIAQSGNVTRRGRASKQGNHYLKAAFSQAAVHAVRCYPKVRRYYERQLKRHQGRGRQMICYNIIAHKLAQAAFHVLKEQTEYREELLFGR

SEQ ID NO: 291596 - protein, 308 aa, unidentified
MQTYIGVDISKNDFLACFNELDKPIKFANNNLGLAKFFNHLKTSGYQKDNTTIGVESTGAYSLPLAIVGTRKKYRVKIINPIVTKAYLGSSIRKVKTDKADAKVIRNCLINGAGAEFRDTAEETVFKNLIRQRYFLVKLKTEFTLKQQDITLKEECLKLPISSINTELKEIIEKKIIFLEQQTLLRSIPEVGKITAITFATEIGNINKFSSAKKLVGFVGIDSKIRQSGTSLNIKGHISKRGNRIIRKTLYVAALTAIQRPSLFMDFYQKKISEGKAKNVCIVAVMRKMIHVIYAVLKRQSPFISKEA

SEQ ID NO: 291597 - protein, 317 aa, unidentified
MDTVYWIGVDVAKDSVEVHVSPSGETFRCATDTTGMRELVRRLKPLAPRIVAMEATGGHERVVAAVCDEAGLPIAIVNPRQVRKFAEAIGRLAKTDKIDAAVIAHFAEVIGLTPRPVPGPDQVEPRALLARRQQLVEMKVAERQREARADSKLLRRSHTAMLRQLTAEIERIEKAIDRIIDGSPLFRGKEDLLRGIPGIGSIVARTMIAELPELGTVNRHEIAALAGLAPYSRDSGKFRGKRWIRAGRPRVRALLYVAAMAAIRGDGPLAVFYRRLVAAGKLKSVALIATMRRMLVIANAMLRTGQPWKEAAAASRV

SEQ ID NO: 291598 - protein, 441 aa, unidentified
MENKISFEQIHANAGGIDVGSEKIFVSVDGVTVKNFGTCSSDYHDCISYLQEHAIERVAMEATGVYWLSLYGMLESAGIKVSLVNPKQTKQQRGKKTDVQDCRWIQKLFAAGLLQESFVPEGKMLEIRYLVRERLDIIEMGSSYVNKMQRCLELMNIKLTEVISQIHGASGIRMIEAIIDGQRDPQVLLQLCDKKIIAKKAEQVLKALEGNYNETWLFMLSQNLNLWRQHQLQIANIDGRIESLLTELTAGKQIDSSQLGKVKPIRHHKPHIKDLHEIMVKLFGANLSSIAGINNYSLLRLIGETGTDMSRFPTIKHFVSWCGLSPGRNQSGKKSKWIKQAPCNKAGQIFLEAAQSLGQSKYTAIGCFIRKLKSRRGAGVAYKAGGRKIAEAYYNALTKGTAYVEQGAKQYELQIKQRELATLKKLAKKHNLQVIEKQKAA

SEQ ID NO: 291599 - protein, 371 aa, unidentified
MKYEIKILKYAVGIDISKADFKACFVSIDNNQHIKIIASRSFSNSNAGFKKLDQWINQKRKDNAIGLVLVLEATGVYYENLAFFLQDKQYALSVVLPNKAKKYLEYLGLKSKTDKIDAQGLAQMAAQQQLRLWQPATKFWYELRALTRHYQNLQEQKTAVGNQLEAATHSANSSNFVLKSLKLQIKRLNLEVKKAAIAIKAQVQKDEKVYAKILGICKLKGLAILSVTTVLAETFGFELFENYKQLISYAGYDVVENQSGKRSGKTKISKKGNSRIRRILYMPAFVAVKHQQTVFCNLYNRIYEKSGIKMKGYVAVQKKLLVTIFAMWKNNTAYDNDYHKINIRRNGSVGVSLSGTSSSEAAIITNEPMIV

SEQ ID NO: 291600 - protein, 350 aa, unidentified
MIIIGCDYHPSFQQIAFVDTETGEFQEQRLTHHEEAEKFYRDLAARGEKLRVGMEASGHARWFERLLAELNFELWMGDAAKIRAKRVRKKKTDREDARHILKLMLKDDFPKIWVPSWDNRDVRQLLWHRHRMVQMRTRIMNQLQAVALNEGLRCKKRLWREKGRKQLESIRLAPWATRRRRDLLELLDRLNPTITELTQLIEQEVEKYPAAQRLMTHPGVGALTALAFVLIIGEAERFECGKQIAAYLGLVPEEDSSGESRRLGHISKQGSGLMRFFLVEAAQVTVRSDPEWRNKFFHLAMRRGRKIAKVAMARRLAVHLYWMWRKQWDYEQLKKFGPHAGKPGTGVGVQ

SEQ ID NO: 291601 - protein, 434 aa, unidentified
MSPDSTTLYVVLDIGKNVHWLGAYAGFDLHPVIAPLEVRSDRTGFERVTALLDSLLACGAYSRVVLGHEPTGVYHEAWARALMERYAAHLQGSATPPLDYRFLNPLLTKRKREELARGRKRKTDAKDLRAIAYCLRDDLGQPAFLASDQELRLQLWGNAYRQNHRERRRLTVFILSQLDRLWPGMVVNVQRFRQMHPKLEVPVPLVLSKPLERERVRAILTHCPNPHDFLTLGEAGIQTFYRTHVGRCGPAIARQAYRLVSNALLPPPDVATLLAGQLQADFARYLALEQDFLALVQQAESLVPDSSAAVLTAMPGVSCELAARYLAHVGHPQRFTCAAEVWSLAGFDIVSEESGDFRRIGHISRKGHPGLRDTLYLIGLHAARHVPAIGQAKQRALARGMSDVGATLHAAHKANRICHHLLYHQVAFDPDRVR

SEQ ID NO: 291602 - protein, 419 aa, unidentified
MKQIQTKKLKVVNEKTLIATVDVSKDKHTGYCRCSNGAETKPFDFSNNIHGFNEFWECITRMKEAHNMEEIVIGFESTGSYAEPLIHYLRKRPVKLVQVNPMHTKRLKELNGNSPSKTDYKDPKVIADIVELGHALTVIIPEGAAACLRRLIHARERAIQRRTALFNQLQDMVFLIFPEFLQVMKDIKGKTAKYLLRHYPTPESIVGCGLLGLTDTLRRVSRGKLGKDRAEELFKAAKTSIGIKEGQSSILLEIKEMLTIIETTDHFIAKLEAEISYHLKEIPYSRYILSIKGVGEITAAGIIGEVGDFGSFDTIPEIEKLAGLDLYEISSGRHRGRRRISKRGRPLMRKLLFFAAINVVRKGGILHEWYQESLKRGMQKIKALVAVSRKLLRIIFALVRNHSEYVTGYLKPKELKMAA

SEQ ID NO: 291603 - protein, 346 aa, unidentified
MSHYVGLDVSVKSVSICVVDGAGSVLARGDTTSDPDEIASFIAQHAPDLERVVHESGILAIWLTRELEKRGLPIICIDARLAHKALSGRINKSDPGDAEGLAHLARTGWFTPVHIRSEASERVRVLIGTRERLIRMRKDLEAHVRGVLKVFGICMGVVGQADMRQRFRDQLAEAGESDLAISVMADLFIPIHKALCAATQAMDAELKAIARESDLVRRLMTVPGVGPVVALSFAATLDDAGRFRRAKDVGAFLGLTPRRHQSGDVDWSGRISKCGDRDLRRLLYSAATTLITQVRKSSRLRNWALHLQDRKGFKKAAVAAARKLAVVMMCIWRDGTVFEPAQEAIA

SEQ ID NO: 291604 - protein, 353 aa, unidentified
MKKYIGCDAHTRYSIFVSLREDGGCDPAVRIEHNELEMERYLKQLPAGTPVALESSGNWYWLVRAMEEAGLDPRLAHALEAKKRMPGRNKTDHLDAKGLALMLRNGSLPEVWIPPANLLDLRDLMRTRLATRQQGSELKCRILAALRRYGVRREEEGADLFAESRRPKLAIAIARLPQECRIATTEEWVLLRELEQHLEAMEQRIRQRIASLGWVRLLKTLPGVGTILGSTIYLEIGEVSRFPSPEHLASYAGLVPTVHASGGKMWQGPTPRSANHFLKWAFIEAANVIVAHQKGWADKHVVRLYQRLKANKCHGKATTAVARHLAESSCWILTKKQGYREPALATMSSSKNG

SEQ ID NO: 291605 - protein, 319 aa, unidentified
MSDAAAVVVGIDVSKAYLDVAAVGAQPACDRYANDEEGHTALIEALKSLAPGLVILEPSGGYEAELVCALQAAGFAVVLINPKQARDFARALGERAKTDKIDARMLAEFGAVLARRPELDKLLKPKIPAEQQDLAALVNRRRQLVLMLSAERTRLAMARATVRPSIEAMITAIQKQLDHVDTEMAANLTEHFAAQSKLLQSAAGIGPVACAWLIADLPELGRLNRREIASLVGVAPFPRESGSMRGRRTISAGRFDLRRVLYMATLSATRFNPIIRAFYKRLIGAGKLHKVAMIAAMRKLLTILNAMVRSNRPFQQPVA

SEQ ID NO: 291606 - protein, 296 aa, unidentified
MNIVFLGIDLAKNVFQLCGLNQAGKPVYTKRTGRKELLQTLANIPACLIGIEASTGAFYWQREFEKLGHKVKVISPQYVKPFVRGQKNDGNDAQAIAVALMQPTMQFVPPKSPEQQDIQALHRARRRIVNHRTATVCQIRGLLLDRGSPIGSAVSRARRAIPLILEDAENGLSSRMRRTIAELYDLFNDLGRRIHFFDKEIETVFRQSEACQHIAKVKGIGPETATAVAAAIGKGTEFKNGRHFAAWLGLVPRQHSSGDRQVLMNMTKKATSICGHFLFMVPALSSGLPRITMMVI

SEQ ID NO: 291607 - protein, 437 aa, unidentified
MDEVRDEPLYRDRVCGIDIGKASMAATIRVPSDADPARRMSETRTFGTTKKEVLALADWCRCWQVPAVVMEATGDYWKGPFYRLEAEGFECVLADPKQVKNLPGRPKRDPSDSRWLAACFERGAVTACFVATEEFRLIRLHTRYRRDLTEERTRDKQRAEKLLESAAIKLSSVLSDLHGVTGRDIMDHLIAGERNPRVLAGLARTAARRKIGQLEEALEGTEFLTSRHAALLKTMLARIDRAGADIEQISAVIEDLLAPYEEQVRQATSMPGWARRSAQDALAETGVDMTRFPTGAHLASWGSRAPLDHQSGTRTGRSRSKKGNRYLAGTLGQTAVAAGRTQTREGARYRRLARRRGKAKAQVAVGNTQLKVLHKLLSSPGMRYHDLGPDYYERRADTRRQIAHHVGKLGALGFEVTLARIPDPEPEPDGTGQPQAA

SEQ ID NO: 291608 - protein, 407 aa, unidentified
MVYVGIDWGSDQHQIAVVDEHGEELKNFAIPHQAEGIETLLNLALELAPDKSGICFAIETSQHVLVDVLLEAGYPVYPINPKQSERARENYSVAGAKSDKSDALVLARFLKNDHGCLRPFKPSSEPARELRLLTRDRQTLVAFRTQLVNQLISCLKAYYPRALELFSQPDSNIFLAFLREFPTPEDAQKVTVVRFTTFLKRNSYPGMAKAGMIHEKLHRPQLPVEPFVIKAKSKLMASLVVQLSSLNDQLKQYDQSIAELFEQHPDSNIFRSLPGSGGSTIPRLLAEMGDCRENFPDATALQCQAGTAPVTKASGHSHYVQFRYACNKHLRDAVHNLSFASLKQCLWAREYYKRKMRQGKRHAAALRMLGNIWLKIIHSMWCNHTLYDEKLFLASRAKHSLLTHSLT

SEQ ID NO: 291609 - protein, 343 aa, unidentified
MSAEYDGTQIVGIDLHRRRSVIVRMDQDGQRLDTVRIDNDPMAFAAEIAKAGEHPQVVLEATYGWYWAADVLADAGAQVHLAHPLGVKGFAYRRVKNDVRDAADLADLLRMGRLPEAWIAAPAVRELRELVRHRAKLVAWRSGLKASVHAVLAKQGLHPRATDLFGVAGRAWLHAAPLDAAYRLRVNALLRLIDAVDFEITAVAGPLRAALADHTGFQAVQKVPGVGPVLAAIFVAEIGDVTRFASPARLSSWAGLTPKHRESDTVVHRGPITKQGSTLVRWAAVEAAQGARNAGWLDQTRTRIAERRGRNIATVAVARKLLTLVYYGLRDGYIRALQTAKVA

SEQ ID NO: 291610 - protein, 429 aa, unidentified
MNYNTQNAKIASITEKTLIVGIDVGSETHYARAFDWRNYEYSKKPFAFNNDEAGFASFKAWMEDIAEKHGKEVVIPGMEPTGHYWLNLGAYLQEQGMKPVHVNPHHVKKSKELDDNNPNKNDRKDPKTIAGLVNEGRFSYPYIPTGIYAEIRNLSNLRIQTQEELTRIKNRIARWFSIYFPEIKDVYKNPNAVSGMMVIKKVPLPCDIKELGVDGVNQVWRDAKLKGAGIKRARTLVSAAEHSIGNTEAPESARIEIRNLLNDYEVYKNRMDALLKEIEAKLSEIPYIDKLMEIKGIGLKTVSCFIAEVGDIRRFDNPKQLQKLAGYAIVADSSGKHNGESRISHRGRKRLRYALYEAAISVIGKNKEFREIHDYYRTRKQNPLKKMQSVIAIACKLIRIFYTILTKGIDYDGQKMLSDIVRPEAIMAA

SEQ ID NO: 291611 - protein, 355 aa, unidentified
MNAIKYIGMDVHLATISIAVLDAAGKLIMEVTIATQASTLLDFIGGVSGTLQVAFEEGTSAHWLYTLLEPHVAKVVVCDPRQNPRRLGEKKSDRLDARKLAELLRLGSLKPVYHGNALGPALKELARSYRTLVSDTARVMNRLKALYRARGIRCAGARVYSPCFRDQWLEQLREPGVRGRAERLYKQLDLLLPLRQEARAALLAESRKHPAQKILCSIPALGPVRVALLLALLQTPYRFRGKRQLWTYAGLALVTRTSADYQMVDGQVTRSRKPALVLGLNANHNHTLKGIFKDAAASALVHPGPFKDFYTVRTEAGMKPELARLTLARKIAAIVLTLWKKGEGFNAEHLKAQAA

SEQ ID NO: 291612 - protein, 355 aa, unidentified
MEIKTLTVDLGKNFQHVCAFDSAEKLLFKKVCKPKSFHDLLSKTNQCTVVMEACGGAHHWARTAKNYGHHAKLIAPKFVKRFVDEGKKNDFEDALAIFEASSRPRARFVAVKSQLQQEIAFLHRSRSRLIEDRTQLVNQIHSYVCELGYKAPKARMALRKYVYELCDLSNSDLSCIIKTELQLMLEELSQKDARVKDLDKTLLQIASSNPIAVKLMKVPGIGPITASALLCEVGDFNIFDSGREFAAWLGLVPRQNSTGGKTKLGSITKTGNRYLRRLLIHGARSLYALTKTKEDVQSKSLQWMKSLCGRAHTNIAVVAMANKLARIVWAIIVHDREYDPSFISNPPVYSSKRMH

SEQ ID NO: 291613 - protein, 334 aa, unidentified
MENIALIGIDLGKNSFHIHCQDRRGKAVYRKKFTRSKLIEFLATCPATTIAMEACGGSHFMARKLEELGHFPKLISPQFVRPFVKSNKNDFVDAEAICEAASRPSMRFVQPRTESQQAMRALHRVRESLLQDKVKTTNQMHAFLLEFGISVPRGSAVISRLSTILEDNNLPLYLSQLLLKLQQHYHYLVEQIKELESQLKRKLDEDEVGQRLLSIPCVGTLTASTISTEIGDGKQYASSRDFAAATGLVPRQYSTGGRTTLLGISKRGNKKIRTLLVQCARVFIQKLEHQSGRLADWVRELLCRKSNFVVTCALANKLARIAWALTTRQQTYEA

SEQ ID NO: 291614 - protein, 320 aa, unidentified
MSSPSKPTRCIGCDVGKASVVAFDSRDGRSKTIANEPGALTGFAAELDDACLVVCEATGGHEANLLAALVAAGRAAHRADARKVKAFIRSFGILGKTDAIDARALARYGQERHATLPRWQPRDAARDRLQTLVLTRSDLVTQRVACANRLAAPGAGPVRRPLEAVLCCLDAQIAAIATDTEALLRASLPLASAARTLRGIAGIGPITAIALIALMPELGRLTRRQAAALAGLAPHPNQSGASDAYRRTRGGRPEVKRALFMAAMAAARHNPTLRTFYERLLAAGKKPLVALTAVMRKIVVISNAMLRQTTAQPDIGDPII

SEQ ID NO: 291615 - protein, 342 aa, unidentified
MLIIGCDYHPGMQQIAWFDEESGEYGEQRLEHSGGEAERFYRELKRRGVRVRVGIEASGHTRWFERLLAELEMELWIGNPAKIAAQRVRKQKTDREDARLLLQLLREDRFPKLWVPSAENRDLRQLLLHRHRLVQMRTRVKNQLHAIALNEGVQRKSRLWSKTGRAQLESFALAPWTARRRHDLLELLDQLTPQIAELSQAVEQEAERRPEVQRLMTHPGVGPITALAFVLILGTPERFRCGKQVGSYLGLIPCEDSSAGKQRLGHLSKQGNTLLRYLLVEAAQSAVRCDPEWRRRFVHLAMRRQRNIAIAAMARKLAVSLYWLWRQAPDPPAAPQSGSHVG

SEQ ID NO: 291616 - protein, 418 aa, unidentified
MNTLASFEFTAYIGIDWSDTKHDICIQPAGGSEREFDRIAHRPKDIEQWAYAMHQRFGGPIAVVLELSKGPLVSALQCYDFFVLFPINPSMLAKYREAFKPSRAKDDPTDAELAVDLVLRHPERFRPLQPQSSEMRTLAHLVEKRRRLVEDRRRFANRLISALKAYFPQAVEWFSHKETFVFCAFVTRWPTLKQVKRARRSTLERFFREHNVRRPLIVEARIQAIKAATPLTHDPAVIEPYSLEALALAEQLRTVLEVIKRFDQAIAALAPLLPDHELFSSLPGAGPVFTPRLVAAFGEDRQRFQSAAEVQRYAGIAPVTERSGNASWVHWRWACPNFVRQTFVEWAEKTVYRSFWAGLYYRQQRSKGASHHTAVRALAFKWIRILYRCWQSRSPYNESRYLKALQRRGSSLLPQESA

SEQ ID NO: 291617 - protein, 356 aa, unidentified
MIKVKTNFADQTIYVGLDVHKRSWNAALFLNDQYLRNIHQPASPQALYTFLQTNYPGADYVCAYEGGKFGYWIQRQLSVKGVQCIVVNPADIPATHKDEVNKTDRRDARTIAMALQCGQLRGIYIPPVGQESDRGLVRHRKKIWRDLVRCKNRIKGFLDYTGVALPEKFNNSNWSRNFLEWLKALSFQYASNRVTLNYMIKETELLRKELLAISNDIRKLMRSKEYKKLYYLLRTITGIGPLTAALLITEIGDMKRFANFYQLNSFIGLLPMEHSSGEREVKGRLTIRRHRQLRSDLMECAWTAKRTDPALSLFYHEQLKKGKDPNLIIVKIARKLLSRIRFVWLSEKPYEKSVIK

SEQ ID NO: 291618 - protein, 487 aa, unidentified
MPQLNKNATIKWPTESKGVRRSKSRRVSKSRRSSADPTEGLAVGNPNAAAIDIGCSEHWVAVPAGRTERPTQRFGCCTAELNRLADWLKECGVDTVVMEATGNYWVVLYDILEERKLNPVVVNPRYAKNMSGKKGDICDCEWMQKLHTYGLFSNSFRPTQEIRVLRAYLRQRETLVGAAAQEIQHMQKALTEMNLQLANVISDISGETGLRIIDAVLGGERAAGVLAKLKGPRIMASLVTLERSLEGHWKEEELFRLEQARLSYAHFQEQLQQCQQRIEQQMQTIQGRVPLEGQGRAATDKGAEPLPGQGDGRKSKSFDLGVELKRVLGVDLTQIDGVGPVAAQVILSEVGTDMSRWRTEKHFASWLGLCPDHRISGGKILGRATRPVVSRARNALRLCAYTLTHSKSWLGAKYRRLKHKLGAPKAIVAMAHHLARLIYRMIKNGQDYVDKGMEVYEAKYRENRIKWLKKQAKELNLQLHEMQALAS

SEQ ID NO: 291619 - protein, 328 aa, unidentified
MSDQYIGIDLHKAFFQACALASDGTRLWEGRFPRSEDGLAALTARCTAKTAMAVEASTPTWHFADAMAPRVGDLRVVDPFRTKLKAGYAAKTDRLDARRLADALRRESVVGIYYPPLAIRELRELCRERHALIHTRTRLVNRIRAVLLRQGIADARRLAKYADDRWLTTLALPPRAAASVAAMRHVLAVVREEIAHADAEVAQLSATDPIAHGLQTVRGIGPVLALTIRAEVGDMRRFPSGAELASYAGLVPRVDSSAGRTRYGRITRRGSPWLRWALIEAAMHSPRRSDRVGRWGRALAVRKGMLKARVALARVLCTELHQRWLALE

SEQ ID NO: 291620 - protein, 391 aa, unidentified
MSKTSRVVIGMDPHKRSAAIEAMAADEQVLGGGRFGTDPAGFEAMLAQAGQWPARVQAAGGCEGIGKHLVLRLPGAGETVIDVPAKLSARMRVYATGQGRKTDDTDAHSIALVGVRMTGLRPVDGDESLEVLRLLAGRRRRIGEDHTRMVCQLHVLLLELLPGGAKKDLSAAQARTLLAGVRPKDVAGKTRKRVALELVVDLERVYARKKAANKELAALIKQAGTGLSGLHGIGPSGAARLLAGVGDITRFPTKGHFASWTGTAPIDASSGDNVRHRLSRGGNRQINMALHMMAVVQLRNATQGRAYYDRKVAAGKTPNEAMRCLKRRLSDIVYRTMLDDLVASAGTGPGGHRGNDSDSSAAGSHPHTSSSDKSLPGPATAKPRTSRRKAA

SEQ ID NO: 291621 - protein, 434 aa, unidentified
MSDSEVQGTRVVVGIDTHADTHHVAVVTEYGKPLGDREFPTTSAGYREVLGFVTGFGEVLQVGMEGTGTYGAALTKVLQGEEILVIEVNRPDRQQRRLKGKTDPLDAYRAAQSVIAGRSTAIPKAKDGPVECLRVLRALRVSAMKSRSAAINQIKGLLISAPEVLRCKYQGMTTATMIGVMARSRPTGHLADPSYVTARVLKALAVRYQHLSTEIDDATAQLKDILESYAPMLQELTGVGTDVASQLLVTLGDNQDRVRNEAQFAALAGVAPVPASSGKTSRHRLSRGGDRQANCALHHIVLVRMNIDPRTKNYVTKRTEEGKSKREIIRCLKRYVAREVYRQITNPVPAPAIGDLRPLRHELGITLQEAAGSLGEWPSTLSRLERGRTRNDQLLLRYRAWLREKDTNAVALTHYANPADWCGPGAADHSRGQF

SEQ ID NO: 291622 - protein, 339 aa, unidentified
MKKSDRPTYLGIDVSKGSLDCCLYNGKEHKTHSFNSNKLSTVQKIITHFKISPDSCRVVLEATGVYHSAAFVGFVSQGFDVTVENPLKIHSFATMKNLLRTKTDPVDARTIAEYGFTNEPVSAKLKEAYQCEVMAKLKLIGFFKKLITQNRNYLEALNNNSFECNAPSLIKLVKNEINHLNVTIKEINRDIEKILTKHCSKLYKQYKSIPGIGPAVAGAIICFYGDFSGFSDSKKAAAFAGICPKVCKSGSSVDKRGGISKKGNSMLRTLFYMAALSAARCNDACQKAYLRLRQAGKPAKVALIAVANKLLRQAMALARKGESFTENYKEINLCKAKTT

SEQ ID NO: 291623 - protein, 433 aa, unidentified
MKVKYEDRLKQKVIAITTDTLVVGVDIAKNYQWARFVDFRGIEHDRALKFKNSKGGFETILARIREICKKENFAKAVVGMEPTGHYWKAFANWLEKQEGITVVLVNPYATKQAKELDDNSQTKSDKKDALTIAKLVKDGRYFELYLPHDVYAQLRGLSTTRTGLNKRKNAIKNTITAVMDEYFPEYEEVFKCPLSGKASRHILKTCPFPKLILGLGEDGVTDEIKRAVKKTVGRKKAVQLVEAAKDSIGVDYGEEAARLKLRLMLEELELLEKQTEELERQMEDTLRQTDYADFLLSIKGIGIVTLATCLGELGDPTRFDDPRQMSRMAGYNLVEDSSGKNKSGTKISKRGRKNLRGVLYQMALTMVATNDEMKQLYHYLKTREKAPLRKMQALIVVSKKILTLIHTLAKKKESYDPEKVFGHVRREQLKAAA

SEQ ID NO: 291624 - protein, 411 aa, unidentified
MEVVYERCAGLDIGKDEVVACIRVPDGARGRRQELRTFKTFSSGLEALADWLTEEGVTQVVMEATGQYWKPCWYVLEERGFALLLVNARHVKILPGRKTDIGDAAWLAELLEHGLLRGSFVPPPAIRELRDLTRYRKRLIQAHTAECQRIHKTLEDASIRLGSVAADVLGVSGRAMLRALLAGERDPQVLAEMARGRLRNKLPELRQALHGRFSAHHGLLLRLALEHVEQLERSIAELDTAVDRVIAPFAQARDRLDTITGVGKRAAETIVAEIGTDMSVFPTAGHLASWAGRCPGNNVTGGRRRSGRTRQGNVWLGEVLVECAWAAARSRDSYLSAQFWRLARRIGKKKAALAVGHSILVIAWQLLANDCDYADLGGDYFVRRDADRTRQRAVAQLQALGYQVTLEPLAA

SEQ ID NO: 291625 - protein, 337 aa, unidentified
MNNIEGCGVEVSARELVVARKGKAGVQLTRFANTAAGHRQLLRALTRGGQRVRVVLEATGLYALDLALLLSAQEQVQLMVANPRAVRHFAQAMMQRSKNDQLDAVVLLEFAERMPFTPWVRPAENTLALWAIARRLQALTKLCTAEKNRAHAMGLSEAIPAMVRRDIARSLQFHQRAMKKLRQQALQCIAADAQLQQRYQLLRSVPGLGEISAVQTLAELLLLPADRDVRQWVAYAGLDPREYSSGTSLRKYTRISKVGNAHLRRALYMPALVASRVEPHLRGFYEHLLARGKSKRQALVAVARKLLHAIYGMFRSQRPYDGTRVYLAAAAQAEKFS

SEQ ID NO: 291626 - protein, 416 aa, unidentified
MRTLKLTLKGFKMYYVGIDVAKEKHYVCILDDAGEIAVKPFWIYTNIIGLREFIKRLGDLSLDNDDFIIGLESTGAYSENLYEYITDSDYKAVLLNAYQTAKYRDFSTLKKIKNDAIDAYIIAELLSTNRYKESHISNDAYHSLKVLGRARKSFSDKIKTIKREISTVMATVNPEITKVFPNIFSKTALEIIKVYPTATDVAKATPKKLTRLFRHIKGNNFSEDKAKYLIDLAQTSVYAGRACKARASMITSYIRVLELYCQEKKQIEAQIKQLIEEEIDTVHNTVSNLQSIPGVSDKTISAILGECGDLKRFDSAKAFIGYLGLYPTQYQSGNSLSVGRLAKRGIPIAKHALYMAAVGSVLHNTQLNKLFRDKVSSGKSKKEALIIISKKIATIMYSIVKYNKPYEPHRVFIPNR

SEQ ID NO: 291627 - protein, 408 aa, unidentified
MQRYYLGVDWADKTHQLYVADESARKIKELQVQQTPEEMAELGRWLDESQSNGIELWAAIEKPHGRIVDFLLDHAVVVYPINPKALDRARDRFRMSQSKSDGFDAYVLAEFLRTDHAHLRALEPNTAEAQELKMLTRDHQRLGRQKTRLLNQIGITLKEYYPRPLEVFEDLETKIALDFLKAYPTPQALSKLTRRGWNRFAKRDHHFSEARSNELWENLDKPQLAVPQHVVRAKAKLLLALVMQLEASLKAVNSYNEEVESFFAAMPAAEIAKTLPGAKSGITIATIWAELGDAQKRWNSFRHLQAEAGAVPVTKSSSKSRVVQFRYACNKHLRHALYWFSFNSLKRSEWAKKYYRDQRTKGHSKHQALRALGAKWLKIIFVMWRDHKPYDENYHLANIARQKMRQAA

SEQ ID NO: 291628 - protein, 384 aa, unidentified
MSRAARRGPGASHVLITPDHAGNVVGIDPHKRTLTATVVDPRGGILGSEHFRVSGDGHRALEVWARQYGQIARWGVENASGWGRHTAVFLTGRGHDVRDVCANRTPRHDRARQRGKSDTLDSERIAREMLAHFMLPRAFKRAGADSGPDEQHQLLALWHNRRLSILTSRQHLVNEAEHLLCELPLELREQLPDTKAVRPRLRALSSRNRRRRYDPPTRLRLQLLDEYRMQIAALDREEKQVVAQLAALVKASGSTLGELCGLNTRSAAELLVEVGDPRRFTEGGFGRFNGTAPLPASTGEGPGEPVRHRYNPGGNRRINAILHRIAVTQLRCEPRAQRIYANAHADGHTKKEARRILKRHLSDVVYRRMIRDLAAHSAQPLLAA

SEQ ID NO: 291629 - protein, 323 aa, unidentified
MFFEGEEIHNSTYPSDVRHLKKLLERYEKFTVHAVYEAGPFGYTLHDWLKKQGVKVIVTPPSKMPVAVGDFVKTDKRDARHLAHLLSSGLLKSVPVPDKRKREDRDLLRTRDQLVNQRKRIFLQIQSKLRFHGIPIRNRLLISRKNRKMILEYPDMGLSLREAFRLMLDSYDYYTENLKRVRKAVLELSEDKAYRDGVAILKGIPGVGLLTALSFLLELPDMRFFDSNEKVGSFLGLTCSEYSSGEKQHQGRITRCGNARVRGLLVQCSWKTIAGDEAMKRFYERLKRRRGGKRAIVAVARKLSGRMRTVLMKNEPYQVGLVQ

SEQ ID NO: 291630 - protein, 330 aa, unidentified
MKKPAFTIGTDVSKSTLDVYCTEVNKHIKVSNDSIGFKAFLKFCKEQKINLNDALIVLEYTGGYEYRWIQFCASKNIPYVRIPGLAIKRSLGISRGKNDRVDATRIANYGDEKFKQLEPEKPINTSILKLKELLGFRKRLVRESAGYKASIKERNHMYEVPKSDIINKMLQKKLDANDALLLQIEEAINDLILTDQALLTNYKLLTSIKGIGNVNAWMTIAYTENFTSFTSARSYAVYVGVIPFDHTSGTSIKGKRRVSKLANKELKQELSQAAKSAIIWNEEMKEYATRKLTNKPYGIVVNNVKFKLILRMFTVVKKGENYVDILKKAA

SEQ ID NO: 291631 - protein, 328 aa, unidentified
MIMLGIDVSKTKIDCCIFPQGLTGKRKNKIFTNTESGFGSLLKWLITLKIEPDQVTAIMEATSVYHENLGYYLYDAGVKVCVANPSRVRAFAKAMSMLNKTDKADSEALSRYGYTAKLIIWQPEPENVRLLKALLGRRDVYLGSLLQEKNRLEKAQSTHTSVVVIKLLEENIEYLNQQLENIDKLINNHIDQDPTLKQDLKLLQTIPSIGERSGLLLLGLFHSHKFEKASRAAAYVGLVPVHQLSGSSVNKQSHLSKAGDSKIRSVLYMSALTAIKYNPHIEALYQRLLSQGKNKMCALGAAMRKLIHLCYGVLKHQTAYQRDYLVVE

SEQ ID NO: 291632 - protein, 349 aa, unidentified
MLHVGLDLSRRRLDYCLLDGDDEERVERGAVAPDADALAGLVRLIELRHGPRPVRAAIESMNGARFVHDVLERCGWEVRIADAQRVRGLAPLACKTDRIDAWVLAELSRRDLVPAIWLPSFAQRQERERARFRLHLVKHRSSLKQRVHSSLMAFGHPCPVTDLFGAQGHALLERLQFPEPWRTDVLAAVALIDDLERQIDQIERELRALGADHPYVPLLVTVPGISWVLAYTIASEIGDIGRFASPTKLVGYTGLCPRVYQSGDSDRRGPLAKHGPRYLRWALMVAATNAAKHRLYRDRYRATKARVGRQRGAKVAQIQLARTLAEAIWHMLTRNQSFAPAGAPLPLAA

SEQ ID NO: 291633 - protein, 404 aa, unidentified
MYNAVGIDISKNKSTIAILQPGGTIIRKPFNVSHTSQNLIELADYLGSLEGSTKIVMECTVRCHEPMLKALYEARLFVSVMNPHLSKNFGNNSLQKVKSDPADASKIARYTLDNWAELRQYSGMDNTRTQLKTLNSQFSFFMKQKVAAKANLIALLDNTYPGVNKLFDSPPREDGSEKWVDYAYSFWHVDCVRRIGLKTFTERYRAFCRKHHYIFQPDKPEKLFHASKELVAVFPKEKTYKLLIQQSIQQLNLASGHVERLRQEMNALASTLPEYSTVMGIYGVGKTYGPQLIAEIGDVSRFTHREALTAFAGVDPGVDESGQHKSKSNRASKVGSARLRKTLFQIMTTLLQNAPEDDPVYRFLDKKRAQGKPYYVYMTAGANKFLRIYYGKVKECLRNLEQAE

SEQ ID NO: 291634 - protein, 350 aa, unidentified
MIVIGADVHKRTHTFVAVDAVGKQLGSTVVPATTAGHRTAMQWAHARFGTEVLWAIEDCRNMSARLERDLLGADQKVVRVAPHLMAEHRRTGRERGKSDPIDALAVARAAAREPDLPVASHDAVSYEMKALVDYRDCLVRERTSKINRVLWRVHQLDPEYHIKKGGLTAKKHQKALQTWLEPQSSVDARLAGKEVAAIYDLTVEINEVEKEITKKVSDAVPTLLAMPGCGALSAAKLLGESADITRFPGEAQFARHAGIAPVPVWSANPGRHRLTRSGNRQINAAIHRIALTQARMPDTLGHAYYEKKKAENKTPREAMRCLKRRLARVVYNHLTTDHQARVATGLAAAA

SEQ ID NO: 291635 - protein, 323 aa, unidentified
MNTPTLGLDMAKLTFVAALWFGPKHSIRSSFENTRSGYRKLSRWLKTHCVGPGLRVGVESTSTYADGVVEWLYNEGHEVYLLNAERTAFYARSLGQRNKTDPADADMIAAFVATHEGTRWQPLSPEQKHLRSLTRTRHQLTGVATELSNQLRTASEPGRAALQAVLRKVREQIAALVRQIKEHLRQAPILARHVGHLITIKGIALITAATIVAELPPITPDTDPRTICGWAGLTPRRFQSGQSEWRSRLSRKGNQYLRDALYMPALVAKRHNPLLKAFAQRLAAAGKSHPAILGAISHKMLRIAVGLLRSDADFDPDWSFQRT

SEQ ID NO: 291636 - protein, 357 aa, unidentified
MEVYVGMDVSLKQTSICVVDGGGEMVSEGTVISEPAAIAAFIEAKAVDAKRIGLETGPTSTWLWHELRALGLPVICIDARHAKAALSLQINKSDRNDAVGLARIMQCGWYKEVQVKSLLCHEIRALLNSWAQLVKAKRDIDNQIRGLLKNVGLVIGAGKGNVFRRRVEALAGEQGLLWQAVRPLLEVREILRREIAGLYRQLMHLARNDADTRRSMTVPGIGPINALAFCAAIDDPARFRRSRSVGAYLGLTPRRYASGEIDWTGRISKCGDAMVRTYLFEAAGVLLTRVPHWCALKAWGLRLAKRSGLKKAKVAVARKLALRAAYAAPQGPRSTLSLHRMWRDGTDFIWSTKEAAA

SEQ ID NO: 291637 - protein, 355 aa, unidentified
MSEKFNSEIAVIGIDIGKNSFHIVGQDRRGSIVLRQKWSRGQVEARLANLPPCLIGMEACTGAHHLSRKLQALGHDARLMPAKYVRPYSKGEKNDYRDAEAIAEAAQRPTMKFVATKSADQLDLQALHRVRERLVGQRTGIINQIRAFLLERSIAVRQGLHFLRAELPGILAKRTDVLSPRMLRVIEDLARDWRRLDERIDALSDEIMMLARQDKGCERLMTVPGIGPIISSAMVAAIGSGDTFSKGRDFGAWLGLVPKQMSTGDRTILGSISRRGNRYLRTLFVQAAWVVLVKIKPEGWERYGLKSWIETAKQRLHRNVLAIALANKLARIAWAVLHKGRAFECVTNATASRPA

SEQ ID NO: 291638 - protein, 351 aa, unidentified
MTPSKRSIIGGVDTHTATHHAAVIDLNGRLIADAEFPATPAGYAAMLTWMRNQGKLSRVGVEGTGAYGAGVARHMHEQGVEVLEVPRPDRRIRRQRGKSDPIDAEAAARTVLAGTASSAPKLADGPIEAIRMLRVARNGAVKARTAALNTLRSMVITAPEPLRTQLRPLSSAQLVAACARLRPDLANLAEPVHAAKLALRSIALRVQHFDIETRSLRKQLDELTQAAAPTTSAVFGLGPDTVSALLITIGDNPDRLRSEAAFAHLCGVAPIPASSGKTNRHRLHRGGDRAGNSALHIAAVVRLRYDPRSRAYANRRTTEGLSMPEIIRCQKRYLAREIFHALRADYAKLST

SEQ ID NO: 291639 - protein, 354 aa, unidentified
MSLAPSIKGETTMEHYAGIDVSLECSSVCVVDAKGKILREARVASEPEALIVWFRSCGFELERIGLEAGPLSQWLFAAMRQAGLAVELLETRHVRKAFEAMPVKSDRNDARGIAQLMRLGWFRPVHCKSMSAQETRTLLTARKLVQSKLRDVENSLRGILRGFGLKVGKTTERGFAGRIEELVVGHPHLQVIAKTLLAVRSVLRREFAAFEKQVRQMARSDKRARLLMSMPAVGPIVSLTYASAIDDPGRFKSSKQAGAHFGLTPKKHQSGETDYTGRISKIGDSSVRTALYEATHIMLTKPLKGCSELKSWAMRIARRAGMSKAKVALARRLAVIMHRMLADGTTFNAAAAAA

SEQ ID NO: 291640 - protein, 344 aa, unidentified
MSEIKRIGIDPSKAVFTLHAIDPADRPVLRVNLRRAQILPFFKKRPRTQIAMEACGSAHHWARKLTALGHDVRLIPPQYIKPYVKRGKNDRNDAEAICEAAGRPGMRFVLAKSEEQQADGLVLKVRETLLGQRTRLINTLRGHAAEFGVIAAKGTSQVAPLLAAIEAEQSIPASAKAMLALLGEEIAHLDGRLKELETKLLAMHRANAISRLLATIPGIGPIIALTLAVEIDPKVFQSGRHLAAWLGLTPREHSTGGKQRLGGISRAGNERLRALLVTGATAVIRHASRADSKLATAWLRQLLSRKPRKLAAVALANKMARIVWAVMTRGDAYRHPVAATPVAA

SEQ ID NO: 291641 - protein, 330 aa, unidentified
MHYVGVDLHKRFLVVRAEDEHGIRKGSGRFDSQDRSGILKFFEKLKPFRCVIEASCSYRWFHELVSPVGDVVLAHPLRVRAIVAGRAKTDKLDAALLARLLRARLISEAYIPPRAYQELRDLARARARLSQQATSAACELHALLTRRNLRLPFANVFSKAAQRWVTGLELPAVDRLVRDELTARIRHYRDEREKLDVLLKEMSVRFPEHEALMMLHGVGLYSALLIIAELGEPERFGNARQVGAYAGLTARVSQSGQRSRHGHITHQGSPWLRWILVEAAMKLVRRDRKLGNFYQRIRKRSGAKIARVAAARKLAGICWVRLMTWRRRAA

SEQ ID NO: 291642 - protein, 343 aa, unidentified
MTEISILSIDLAKHNFQVCATTSEGEMIYNRKYTRVRLVKLLAAQEPCIVAMEACGTSNYWGRLAVSHGHDVKIISPIYVKPFVRRGSKNDANDALAIATAVRQPGMRFVPVKTAQKQSYAMLFRTHQTLMRQRAQLICSLRGHLSEYGVIVARGNSALFAFEDQIDERLAELPPAVLDATRIFYHHFDQLNQSLKDLEKQMAAATNADQDTRRLRTMPGIGPINAAAFLAFAPPMESFKRGRDFSAWLGLVPKQMSSGGKTKLGRVSKMGQADLRRLLVTGATVCIRWAKWKGIRPESWLGRLLARMPGKKAAIALANKMARILWAMVTRKEDYRGGLVEYV

SEQ ID NO: 291643 - protein, 408 aa, unidentified
MLFVGDDWAEDHHDVEIVDDTGRRLATRRLAEGLAGLTGLHALIAEHLPDPGPDAEAAQVKVGIETDRGPWVAALVAAGYEVFAINPMQVARYRQRHSTSGAKSDAADAHLLAEIVRLDREHHRPIAGDTPLAEAVKLMARAHQTMIWDRSRAVLRLRAALRDFFPAALEVFDDLDAPEALELLSRAPDPDRAARLSKAKITAAFTRARRKDVEARALHTQQIFRAPQLRQPPAVQTAYAVIIANTVRLIDEFNRQITELGEVVSEHFGRHRDAELYLSQPGLGSILAARVLAEFGDDPQRFTDAKARKNYAGTSPITRASGTRRIVLARYARNRRLGDAVHQWAFCAMRGSPGAKAYYKTMRGRGIGHQAALRQLSNRLVGILHGCLKTGTLYDENTAWAHHISAAA

SEQ ID NO: 291644 - protein, 427 aa, unidentified
MSYRIAGIDVHKRMLHVVVSDVQVDGEYDFTRRIFGSLPEALRSLAAWLLEQQVQEVVMESTAQYWKPVWGTLERYWKQICQTREGALATSGTLHLAQAQSNRGRRGRKKDFRDAERLVKRLVAHELVLSFVPDVEQRLWRTVVRTKYQLTRNRVQLQNRLEALLEEAHIKLSSLVSDLLGASARRMLHAIADGETNRETLAALADRGLRATQEQLQDALGVCQELNPVYRRLIRMVLDEVASIDKRIEQLNQEMANLLRPHEDQVKRLAEVPGLGVDSAQQVIAEVGATAATFPSEKHLSSWVGACPGDEESAEVNYSRRSPQGNRHMRRILNQAANAAVKHKGSIFEILYRRYVPRLGHNQTIGIIAHKLCRLVWKILHRGIRYEERGPEVSKASKQKRTRKMIQALRRLGYRIEPSPSQSAITA

SEQ ID NO: 291645 - protein, 361 aa, unidentified
MRIIGCDLHARQQTLAMLETITGETVNLILMHEGNNVREFYSQLPHPVLVGIEATGSMHWFLNLMAELGIECRVGHPAQIRAAEPRKQKHDRRDADLILKLLTEDRFPAIWLPSQELLDLRALLLHRHQWVRLRTRVQNALQAIALANGLRRGPSLWSYDGQAKIALLPLLSHTAYRRSALQAMYQTMEAEIEKLTQQVAEQAENRSRARLLMTHPGVGPVPALATEVFLGDPLRFADGKALASYVGIIPREYSSGEHQRLGGVTKQGSPLLRFLWGEAGAHAVRRDPELKRFYRHKLFQKGLGKARVAVARKLGIRLWIMLRDEIDYYEFCRRGQMNQAVRPVVGMPETGNGAKNHRPVA

SEQ ID NO: 291646 - protein, 420 aa, unidentified
MSVQETAVSLLPRVLCYVGIDWAAETHAVCVLDGSGRIKTQFTIGHTAAGFADLLRRLVRLTGDPADVAVGIERPDGRLVDALLEAGHPVVPVSPNAIKTWREGEVLSGAKSDAGDAAVIAEYLRLRAHRLQPATPYTAETKALRTVVRTREDIVDMRVAAANQLSALLDAHWPGAKAIFADVESAIALAFLTRYPTYPSAQHLGEKRLRAFCVKHGYSGRRTAAELLSRLRSAPAGSTEEALTDAVRDAVLAQVAVLTALTAAEKNLGRSVVAHLGEHPDAAIFTSLPRSGQINAAQVLAEWGDSRAAYDHPDAIAALAGVSPVTKASGKYRAVHFRWACNKRLRKAVTCFADNSRHASPWAAKVYADAIARGHDHPHAVRVLARAWIRVIYRCWNDGVPYDPNKHGNASKLREIAAAA

SEQ ID NO: 291647 - protein, 328 aa, unidentified
MSVFTGIDVSKDKVDVGWLRDAATGKKKTKVIRNTAKGHQQVVDWLLKNTKEPAEEIVVALEPTGVYHEALMYFLHDCGFKVLLVNPGKAKKYAESVNMIHKTDKLDAIMLAYYAHDQHNKLMFWQPEALEVRELKVMIRRLDALEKDLQREQNRQEATLVSLSSDRVVQSLKGMIETLEAEIKRLQKDIDNHIDGFPELKRNRKLLESIKGIGPVMSRELVYLFAAKQFKNAKQAAAYLGLIPKLRESGKLKGRTTLSKVGSARIRAKLYMAAVCASTYNVDIKAQKQRLLKAGKVKMQALGAAMRKLIQICFGVIKHQCEYQPQLV

SEQ ID NO: 291648 - protein, 365 aa, unidentified
MNAIHYIGLDVHKKTISFCEKTADGQIVEEGKLQAERTVLRRWAAGRKQAWHGAMEATIFSAWIYDTLKPYAQQLSMGHPAKMKAITAGKNKSDQIDARTIADLLRCNLLPVCYVLSPQLRDLRRLLRYRNLVVQQSVRMQNKMAGLLMESGTPFNKQKLHQKRYFADLMKSLEEVPESVKDLLRMSRGSMEMFQSTQKQLVKRLLSEPALEQRVERLMGIRAVGPITALTWALEIADPHRFASIADAVSYCGLSAAFRSSAGKQQRGPISKQRNAWLQPVLIEAAKLAPLWNPQLAAVHAHALERGHANRATLQVTRKLVAYLLAVDKSGQPFQVHTPPPPASTQARKKLPRRSKRAAALAPAA

SEQ ID NO: 291649 - protein, 412 aa, unidentified
MEVLHACCCGLDVHKESVTACVLWAEGKGKKRKAKRQFGTMTRDLLELADWLQSCGVTHVAMESTGVYWKPVWNILEGHFEVLLVNAQPIKAVPGRKTDQNDAEWIADLLQHGLVRGSFVPPTPIRELRDLTRYRVSLVHECNRIVNRIQKVLEDGNIKLASVATDALGASGRAMLKAMIEGEEDSGKLAEMSCGLLRRKIPELQQALEGRLRSHHRFLLRELMEHLEFVESKIARLEQEIGEHLRPFEEEVERLCTIPGVDWVTASGLIAEIGVQMEQFGDAEHLSSWAGLCPGSHESAGKRKSGRTRKGSAWLRRCLCQAAWAVSTQRGNYLSALFRRLAARRGKKRAIIAVAHTLLRIAFYILRDRKCYQELGANYFDQLHPNRVKRYLVKRLERLGFQVRLVPAAQPA

SEQ ID NO: 291650 - protein, 335 aa, unidentified
MKITTVGIDLAKNVFQVHAVDERGRAVLRKQLRRDQMTAFFANMPPCLIGMEACGGAHDWGRKLQELGHDVRLMPPSYVKPYVKRGKTDAADAAAICEAVTRPSMRFVAVKSEACSSVLVVHRTRDLLVRQRTQICNAIRAHMTEFGVIAAKGAQNVDRLRTQLHQLPEAARLPVSLLFEQLVDTDTRIERLTREIEAAHAQSETSQRLVTIPGVGKLSATIIAATTPDVGNFDCARDYAAWLGLTPKPHSTGGQQRIGRISKMGNRYIRRLLYLGAMAQIMVRRRCGPRQDWLSDMLARKKTKVAAIALAHRMARTIFAVLRDGSRYQPLATAA

SEQ ID NO: 291651 - protein, 354 aa, unidentified
MEALKYVGMDVHTETIVSAVLNARGKLVMESVIETKAQAVRDFVQGVRGMVHVTFEEGTHAAWLYDVLHPVVAKVVVCDPRKNTLLLAGNKGDRIDAHKLAQLLRADLLTPVYHGIHGTRALKELACSYTALMADCTRVMNRLKALYRARAIPCTREGVYQKEERERWLRKLTEAGVRHRAEWLYQELDPLVELRDTAREAMVSESRKHPAHRLLQSIAGLGPVRVAQLIAAIDSPHRFRTKRQLWAYSGLAVTTKSSADYRVVKGELRRAARTRATRGLNANYNRTLKHVFKDAALLASARGAFKPYYDHLVEQGMRPALARLTVARKIAAITLAVWKKGESFDPELIRPQAA

SEQ ID NO: 291652 - protein, 353 aa, unidentified
MKGELQKRRILGRGKGVFIGVDVHKESWHVTARLEEEEVFHGGIPSQYHAFERILDRFPGCTVKVAYEAGPCGFWLYDKLTEDGIEAIVVPPSLIPIESGNKVKTDKRDSRKLAKLLEGNMLKRVYVLKEEDRVDRELLRTRRQIVEHRNDVARQIKSKLLFYGIRSPFAPRYGWGRNYLQWLKGLDLPREGLRACFESLIELYEYLSDQLMKMNQRIKELSQSLKYRQRLKLLCSVPGIGTLIGMEILVELQEVERFKRAEELASYIGLTPSEFSTGQYVRQGRITRCGNKRVRTCLVESSWILITKDPLMRLKYNRLKSMKGAKRAIIARKLIIRIRRILLNNEPYVVGGC

SEQ ID NO: 291653 - protein, 338 aa, unidentified
MKVYCGIDLHSTNNYLAVLDDDRQPVLSRRLPNRLDTILDCLQPYRENLAGIAVESTFNWYWLVDGLMEHGYRVQLVNTSAVRQYEGLKYRDDRHDARWLAHLLQLGVLPCGYIYPKEERPLRDLLRRRSFLVRQRTADLLSLKNLFSRQTGQQVSSHELKRLTAEDIEQRFADPYLALSFTSTLKVISDLNVQITTIEKAVLKEARLRPDFKRLLEIPGIGQILALTIMYETGSMARFPDVGHFCSYCRCVPSKHLSNGKVKGSGNVKNGNPYLSWAFTEAAHFLIRFEPRAKRYYERKSAKTNPILALRAVANKTARAVFYVLHDQTPFRVERAFG

SEQ ID NO: 291654 - protein, 342 aa, unidentified
MQIAVLGIDLGKNSCSVVGLDTTGRVVLKRRLHRDGVLKLAASIPSCVMALEACCGAHHLGRILRDHGHEVRLMSPEYVRPYVKAQKNDDRDAEAIAEAATRPTMRFVTLKSETQLDMQSLHRARDRLVGERTALINQLRAILLERGIILPQGRRKLELHLTPLLAGDPMAISPRTRLLVNDLHLEWTELDRRIEAFDAEFAAQARTDETARLLTTIPGIGPLNATALAASIGNAQTFQRGRDLAAWLGLVPKQMTTGGKPKLLGISKRGNRYLRKMLIHGARAALPSLSKGETPMGGWLRDLLARAHVNTVVVALAAKLARIICAVLRTGRKFELTSAAVS

SEQ ID NO: 291655 - protein, 412 aa, unidentified
MDATYYVAGIDVHKTMLAVVVANVSERELRFECRRFGTTVSELQNLSAWLRAHTVQEVVMESTAQYWKPVWLALEGQFQLWLAQARSNRGPRGRKTDFRDAKRCVSRLLSDDLRLSYVPDAEQRCWRTLTRTKYQLRRDRVRLQSQLESLLEECQIKLSSVVSDLLGASGQRILRAIAAGETDPAQLGALGDKRLHATDAQLKDALSGQPQPAHRALLTLYLQRLDVIEAQMAELERMIADALKAHEAAIVRLSELPGLGVDSAQQIIAEIGPRAEAYPSAGQLASWVGVCPGREESNGESNSNRSAKGNRTMRRLLNQLAHAAVRKRDCYLQIVFKRLSVRLGYAKAVWAVAHRLCGLIWKVLHEGVRYVERGPAVSALTLRRRKQRLVAQLKKLGYSVQLTPITASETTL

SEQ ID NO: 291656 - protein, 426 aa, unidentified
MVQTDSAAEPQFAAFVAIDWADQKHAWSLQAAGSEQRESDEMKHTPEAVEAWVSMLSARFAGKTIAVALEQKHGALVFMLGKYANLHLYPIHPRAAAQFRASLYPSGAKDDPMDADLLLDMLVLHRKHIRPLRPDTEQTRLVQHQVEARRRLVNEKTRQIQRLIARLKLYFPQVLDWFDKVESPLVGALLHRWPTLPDLQKARPETIRTFCRRHNCRDAGRIEERVEKIHQAVPAITDPAVVQPAVTMTRNLMELIATLQAGIAELDQQIAQATAGHPDFGVFDSFPGAGPALAPRLLAAFGSCRQRYTAAAEMQKLSGIAPIVRRSGKSESVHFRRACPKFLRQTFHEWAGHSIAFCDWARVFYQQKRHEGLDHHAAVRALAFKWIRIVYRCWQDGVPYDNTRYVESLRRHGSPIAAALDAASRK

SEQ ID NO: 291657 - protein, 383 aa, unidentified
MSFKILKFNCCGLDVHKTWIYACIGITDSNNRTEYKQARFSSFTKGLNELCDWLAKYNCKDVCMESTGKYWIPVFNILEQHELWVTLSHPKYTKPMKGNKTDRKDAKWICDLYMCGMVKPSFIPPADIRELRDLVRYRFKLTCMITGEKNRAQNCLTVSNLKLDDVFSDVFGKSSRSITEQILQHPGEKFDVSPFVDGRCKTPIEEIQAAVDGAISKEQAVKLRQCLDHIDELQKHISEVEQETLRLSDKYEAALNLIRTVPGFDKNPMTAIQVLSEIGGDMSVFPTAKHLVSWAGCCPRNDKSDRKIKSTRISCAGSYFKPVLVQVANALIKSKKHPEFTTRYKRIKARRGHKKAIIAICRMILTAIWHILSDLKPYCKDRL

SEQ ID NO: 291658 - protein, 342 aa, unidentified
MKITTIGIDLAKNVFQIHGVDAHSKTVIRKQLKRDQVAPFFANLPTCLIGMEACGSAHHWARKLQAMGHTVRLMAPQYVKPYVKTNKNDVADAEAICEAVTRPTMRFVAIKTIDQQAVLALHRARQAFVQARTAQANQIRGMLAEYGLALPLGIHHIPQRVPELIEDGSIELPGQFRLLIQRLVEHFKELNRQVLELEAQIKAWHRANPASCKLEKIPGIGPITASALVASIGDARHFANGRQVAAWLGLVPRQNSTGGKAMLLGISKRGDTYLRTLLIHGARSVLAHAWRRADQCSWLHRLVQRRNANVAAVALANKNARVIWALLAHDREFRADYVSVAP

SEQ ID NO: 291659 - protein, 418 aa, unidentified
MNKHNNSGKKSEPTSKQAKPRGPIRRDTKDVLAELVGKLKEKLDPKKLAATSAGEKHKRGELRPNLDRLTVGVDLGDQWSNYCILDLEGETLAEGQLRTTQEDLAEFFQALNAARVVFEVGTHSPWVQEVIGGCGHEVLVANPRMMDGSKRRKRKNDRIDANKLARLGRVDPQSLHPIRHRSREVRQDLVVLRARDALVAARTELINATRGLVKSMGTRLPKCSSPSFAEKVEGTIPAELRDALLPLVRMATALSDCIQEYDEKIEKLGREKYGHTALLRQVKGVGPITSLAYVLTLENPDRFVKSRDVGPYLGLVPKQEDSGEIQPQLGISKTGDTMVRKLLVGSAHYILGPFGPDTDLRRYGLRLCERGGKNAKKRAAVAVARKLAVLLHCLWGSGEVYEPLRQGTSATIAPAVAA

SEQ ID NO: 291660 - protein, 396 aa, unidentified
MSPLSDQPFTAYVGIDWADLKHDICLQAAGGTRREFDCIAHQVAHIDEWASGLYRRFGGPIAVALELASGPIVAALQKYDFFVLFPINPLTLARYREAFQPSGAKDDPTDAELALDLLLHHPERFSRLRPQSAGMRSLMSLVVQRRQLVGDKTRFTNRLCDTLKQYYPQALEWFEDRDTVLFCDFLTRWPTLAAVRRARTTTLEAFFHAHNCRCARLIGARLASIRAASPLTEDPGIVVPCRLHVLALVAQLRTVLTAIDWFDRETAAVAGTLPDYALFQDLPGAGRQLAPRLLVAFGEQRDRFHGADELQKYSGIAPVTERSGKKSWVHWRWQCPKFLRQTFVEWAGQTINKSFWAGAYYRQQRARGSSHPAAVRALAFKWIRILYRCWQTRTPC

SEQ ID NO: 291661 - protein, 486 aa, unidentified
MRTCPYPLSAAPSAKSHYGRGGDETQPQARMSAKDRPSASLLERIQPDAAGIDCGQNSHFVAVPPDRDPQPVREFRTFTAELERLAVWLAQCRIKTVAMESTGVFWIPLYEILEQRGFEVLLVNARDVHNVRGRKSDVMDCEWLRELHSVGLLRTSFRPAAAIVPLRSFMRQRATLVEEASTRIHRMQKALTQMNVMLHVVVTDITGQTGLRIVRSILAGERDPARLAAHRDPRCHASHAEIVAALTGNYRAEHLFALRQNFAAYEFLLRQIAECDGEIEVLLTALAAQQPPPSAPLPAPRKRDSKHQPQFDIRSPLHRLTGGADLSQIDSIGPHAALQLIAEIGTDMRRWPTEKHFASWLTLAPNNKISGGRLLSSRTPPSANRAAAIFRRCAMSLTRTSTALGAFYRRLAARAGKAKAITATARKLALLVYRVMSGQLVYTDPGVTAYQQLHRTRELKSLRRRARQFGFQLVDQTTGEILNAVS

SEQ ID NO: 291662 - protein, 425 aa, unidentified
MKKIDYLSTLFVGIDIGSRTNVISAIDFNQAFFIRMKPVPNSQSGAEELESMIVKVLEKNHQFKMVIIGLESTGFYGVHIANYLSASDHLAPFSVNVYCLNPKEVSNYKKSFNALDKEDGIDSFVIADFARVGRIKIKPWRGSQYLALQRLTRHRMHITECIAREKTYMLNNIFLKFSEYALVDKAEHPFSNKYSATAEAILTEYTTNEDLVNTPVEELVKFISAKSRGRIADPLETAELLQAAARNSYRLDKVLYEPLTISIASSFNCIKSFEKELKAIDDAILKTVQGLNPSEYTVLNSIPGIGKVFSAGILAEIGTIKVFKNDDALAKYCGIMWKRNQSGEFDAEDRKMLKAGNRYLRYYIIEATASVIRHCPEFKSFYDRKYAETRTHQHKRALALTSRKFLRLLFSLLDKEQLYSSEKSR

SEQ ID NO: 291663 - protein, 448 aa, unidentified
MAKVKSKLEITNPNAAGIDVGLAVHYVCVTEGSDEQRIQKFSCFTEDLYNIAKWLKKCKVNTVAMESTGVYWIPLFQVLESHGFEVKLVNAKHVKNVPGRKSDVQDCQWIQQLHSYGLLQGSFRPDDQMCVLRSYVRQRKNLIENASTHTLRMQKALTQMNIQLHKVISDTTGVTGMQIIKAIIDSESNPEKLAELRDGRIKSDKSVIAKALAGNYRKEHLFTLKQEFELYNIYQEKVAECDRSIEEYYKTFETKSDESKKLGEEKNKHRKSKPNFALHEELYRVTGIDFTKIPGLDILTVQTIISEVGINYNKWRSEKHFTSWLGLSPSNKITGEKVFNARTRKVNNRAANAFRMAACSVGKSKSAFGAYYRRLKKHLGAPKAITATARKLACTFYQMLKYGQEYVERGMDYYETRYKEKVVKNLIKRAQEFGYVLVQQERLIEEVS

SEQ ID NO: 291664 - protein, 344 aa, unidentified
MEPMYYIGLDVPKRKISYCVKDSSGKVCAEGSLPATRLDLDHWMKTLPQPWSAAMEATMFTGWIYDHLQPHAAALKVAHPLMLRAIAAAKKKNDRIDASKICDCLRCDFLPECYMASTAIRERRRTLRYRHLLVRQMVQMKIKTSSLLMEAGVSYNKQRLHKAGYFRELLASNPDIDEGLGSLLRLCRETVVRLGKTESALVRSLERDPLLVERVERLMTIPAVGPITALTGALEVGDVQRFSSIKKAISYCGLCGAEKSSGNTVQRTPLSKQRNKHLQTTLIEAAKMAPRYSPELAMLYDKEKQKGNANRATLAVARKLVAYLMAVDRGQRNFQVVETNCIAA

SEQ ID NO: 291665 - protein, 372 aa, unidentified
MDVFIGIDVAKEVHWACAMDRNARVLFSQAVGNDPAAIVSLIGEIEALEAENTRTAIDMLGGAASLLCAMFAEAGLPLVHTPGLAVNRARQGIRGGERKSDPKDAVVIAELARTRPDLRAVEPPDPLDAEIRLLVSRRRELVTEQTRRAARLRDLLSGLFPALERRIDPTTRTGLVFLSHYAAPEDIRAAGAKRITRRLTKAATGLRGLEALAEDAVQAAQAQTVTIPGAQLRAEIIADIAREALAARDRLKATDHAIRERLANHPDTALILSMPGMGATLTAEFIALVGRIDRFDSADALAAAAGLAPVLRQSGKTSFLRAQPVATRPSSASSIRQPSPLSDDPTAAPSTTASVPRANATTRPSSPSQEDA

SEQ ID NO: 291666 - protein, 348 aa, unidentified
MAKQVPLRQCLGIDVSKNHLQVNLCNLEADQRLRVIASTKFDNTAKGLEKLNSWIGKHRVSNLDLKVVMEATGVYHESAAYFLHEKGFAVSVVLPNKSKAYAKSLNAKSKTDSIDAKILAQMGLERQLEIWQPASHNMRRIKRLCRERVALQEQKTITLNQNHARSCEHKPERNSQKRGDQLVKFIEKQITQVEQDIQSSIASDEILKEKIDRICTVKGLGWITVVTIIAETDGFALFKNKGQLVSFAGYDVVQNESGTSVKGTTRISKKGNRHIRRALHFPALMAVRHEPQFKNLFERTFEKSFIKMKAYVAVQRKLLVLIYTLFKNNTPYDPNYVNTQNRQELCPA

SEQ ID NO: 291667 - protein, 355 aa, unidentified
MTQDTQRKSVLASRQAVSIGIDVHKRSWSVTAVSEGAVVSKASIPTRYDALLDFFKQFEGRKIAVAYEAGPCGFSLSDHLVKDGIPCIAVPPSLIPVEIGNKVKTDKRDSLKLALLLEKDLLKKIFVLSREQRMDRDLLRTRKQLVKHRGDVMRQIKSKLLFHSIEIEGEGHTVWSKRYLRNILGHDFPGELLKASFDALLKTFDDLSATIRTLDKKIQELSKRKEYKEEVALLMTVPGIGRLTAMEILTELGDVSRFRNNEQLTSFLGLTPSEFSSGEHTRRGRITRCGNKRVRTCLIESSWTLISRDPVMRDKYDQLKRRRGAKRAIVAIARSLAGRIRGLLLRREEYVLGVG

SEQ ID NO: 291668 - protein, 341 aa, unidentified
MEHCGIDLHLKSSEVCVLDETGSVSERSRIPTSEASFRRWFGGRERMRICIEASGLSPWVARILTALGHEVIVANAQRVRLIAESTLKNDRVDAETLARLVRMDPALLCPIRHRSEETQRLRGMLRVRRTLVNSRTACLNTARGLLRSFGYRVPGQRPERLARALTTGKVPEELCGLVAPLVATALELDEKVRALDDEVIEVGRAFPEVERFQHVPGIGPLVALSYVLCIEDPSRFRGSRDIPSFLGLRPRMRESAERSHFGPITRHGDAEMRRLLVQAAHGCLRSRQDTELKRWAEQLAGRIGKKKAVVALARKLAVLLHRLWVTGEDYEALRHQVAAAA

SEQ ID NO: 291669 - protein, 435 aa, unidentified
MSFTSPASIDPVWAAFAAIDWASQKHSWSLLPAEGGSIESGQLDNTPEAVELWAAELRRRFPQAPIAVALEQKRGSVVYMLSKYQHLVLYPVPPSMSAAYRRAFCPSGAKTDPGDANLLLDLLVHHRQQLSPIATDTAETRLLRFLVEQRRQLVQQKVGLIQQLTDSLQQYFPQIRTWFGSLDTVLVTALLHRWPTLSDLQHAHPGTLRRFFVDHACRNDDLIQQRIQAIYAALSATTDPVVIGAGTRKTAAIGSLLAAAREQIHALDKRIAAVVADHSDAELFASFPGAGAATVPRLIAAFGTDRNAWTSAAALQCFSGIAPVHKSSGNSTVVVMRHACPKFLRQTFHEFAGQSIRFSEWAKAYYRHQREDQKASHHTAVRSLAFRWIRILYRCWKDRQLYDERLFLEAQGRRNTPRTGWNTAAGFHKPATPNS

SEQ ID NO: 291670 - protein, 451 aa, unidentified
MEILYSNCAGLDVHKKTVKACLLTQMSHGQPHKEFRTYFTTTEELLKLSDWLKEQGCTHVAFEATGVYWKPVFNLLEGSFELLVVNAHHIKAVPGRKTDTKDAEWIADLLQHGLLKASFIPSAPQRELRDLTRYRVRLTEEKAREVNRVQKTLEDTNLKLGDVVSDIMGKAARMILHALADGETDPARLAALAVGRVHASQEQLEAALTGHVTDHHRFLLQEHLTQIHHLEQAIDRVTAEITRRFTPPSPPEATTVSQKEDETTKERASDPGSQPEANVQSQATLSWAQAVVLLCSIPGISERTAIGILAEIGTHMQQFPTAAHLASWAGICPGNHESAGKRLSGKTRTGNPWLRCLLVQAAHAASHQKHCYLAEQYRRIAKRRGAKRAAVAVAHSILVIIYHLLSNQTTSQEKGETFFEERDREGREKRLVRQLSSLGYHVELQPIALAG

SEQ ID NO: 291671 - protein, 463 aa, unidentified
MKNKSKEKGTNFVSTCTVYEVRGMPVINTHAAGIDVGSRSHFAAVGQELSDVREFGVYDQDLRHDITTVAMESTGSYWQNLYDVLIESGFEVFLVAGRQTKNTCAAPSASMEGKTDVKDSRWIQFLHSVGLLTSSFLPDLETEELRTLFRHRDFLLKQAAKYICKMQKCLRLMNFRLDVVLNDVTGKSGQAIIKAIIAGERDPQKLASLADWRVKKSKEEIAKALSYNGRTDYMYELSDSFDIYQSYIKKMEECDKKMEELMRAQIVKLKKPQTSPPPLEKAKKNGKNAPKIPTHELSWQWNEEVDLLSIGGVGHSTVMAINSEVGQSIDKFPTAKAFVSWLRLSPDNRISGGKVQSSHVRKGSNRVASALRHAAESIGKQKDAPLYPFFQRIMYRKGRCAAIIATARKLAVIIWTMLTKKVKFIPYDTTKIENQIREKQVKKINKLLKVFEVKEHEINFAFA

SEQ ID NO: 291672 - protein, 417 aa, unidentified
MVNDVQWFVGIDWATQSHCVYLLDAEGRDVGEREFAHGGAGLTELRDWLLEKTKAAPGQIAVAIEMPHGPVVEMLLEHRFVVFAINPKQLDRFRDRFTVAGAKDDRRDARVLGSSLRTDRAAFRQLAADDPVMIELREWSRMADELKQERTRLANRLRQQLWRYYPQAARLTDDVADDWFLALWQQVPTPDRAAKVTEKTIARLLGEHRIRRLDAATVLKTLREPPLFVAPGTTEAACAHIRSLAARLHLVNQQIKEAQQNLDRLCAELEAGDSPSGQSCGQCDVTILRSWPGIGRTNLATLLAEATEPLRRRDYHALRALAGVAPVTRQSGKQRFVVRRLACNRRLQSAVHHWSRVAIQHDAAARRRYEALRRRGHGHARALRSVGDRLLFALCTALKRQTPYDADYNSSNRGPKG

SEQ ID NO: 291673 - protein, 355 aa, unidentified
MNQEKYIGMDVHDATISAAVKNAEGKLLMECVLETKAATVLDFIQGLRGTLALTFEEGILAAWLHDLLKPHVSRLVVCDPRKNALMRDGNQNDRVDARNLAELLRTNQVKAVYHGKHGTRALKELGRSYLTLTKDSTRVMNRIKSVYRSWAIPCAGTSVYSRRHRAEWLAQLVEPGVRIRAEHLYQQLDSLEPVRQAARRELLRESGKHAAVKLLRQIPAIGPIRSALLVALLQTPHRFRTKRQLWAYSGLAVQTYDSGEFRFVRGKLHRNRERITVRGLNRNHNHDVKNLLKGAAISAIGHPGPLQDFYAALVEKGMRPSMARLTLARKIAAITLIMWKKGVSFDPKQLQPQAA

SEQ ID NO: 291674 - protein, 345 aa, unidentified
MPIVGGLDIHRKQLTFDYLDTETGEAGRGQVSPADRAHLRAWLARFAGRDDVAFALEGCTGWRYVAGELAAAGIAAHVAEPADTAFARGRKRHAKTDKTDSRHLRVLLEQGRLPECWIPPEQVLECRALLETYHDLRREHTAWVQRIHAVFFHQGAPALGEGALRTEAALAALRQAAAVHLSPAGQLQVATALDMLAATEARMDVVRLQLLHAARRLPAAAVLADRLYGVGPVCALALACWLGGAGRFSSSRKAVRFAGLDVTVYSSDGKRSPGHLSRQGPEILRWVLYEAGKTHARASAPGHAYYAAVKDRTGGKLAALSQARKIVRQACHILDELGDGALTAS

SEQ ID NO: 291675 - protein, 356 aa, unidentified
MARISRLEPTRVTVGVDTHRDVHVAVALDQLGRRLGQIELATTRAGYERLLAWAESLGAVEAFGVEGTGCYGAALARHLRAREMLVVEVMRPSRQTRRRRGKSDPTDAEAAARAVLSAEAAGSPKAGDDLVEMIRVLRVARGTAIKARTQAINALRSLLVTAPPELRDQLRALSTTRLVRKAAQLRPGTLASPLAVSKLALRHLARRCQTLEAEIGSLDGQLARLTATASPQLIGAFGVGADTAGALLVAAGDNPDRLRSEAAFSMLCGSSPIKASSGKTNRHRLNRGGNRQANAALHRIVLVRLRYHQATKDYVDRRTSEGKSKREIIRCLKRYVAREIYAALTQTGHQKLAQAA

SEQ ID NO: 291676 - protein, 354 aa, unidentified
MTRYIGLDAHAASCTLAVVGPSGKHIGCHVLETRANVLVDLIKTIPRPRHLCFEEGTHSGWLYEILSPHLDETVVTGLMERRGRNGVKDDERDAFVLAEKLRTNSIETRVFKDVGRYGKLREISHAYGMLVRDSVRVQNRVRSLYRSRGIETPGDGIYDAERRAEWIAKLPPKSQPVAQLMVQQYDAVEKLRADGEKQMRTEARQHPVTRRLETIPGIGPIRAAQLVPIIVSPHRLRTKRQLWKYAGLAIVTRSTSDWVKGKDGSWSRQRMEQTRGLNRNHNATLKSIFKGAATTVIGRADAGCPIYQHYRSMIDNKTKPNLAKLTIARQIAAIALAVWKKEEVYAPAKVKKSS

SEQ ID NO: 291677 - protein, 394 aa, unidentified
MRFIGIDVAADEHVVASVDAAGGVQLKPTAFAEDADGYAALFTRLGPPADTLVAMEATGHYWKNLFAALVARGFAVAVLNPLRTHRFAGEDLQRTKTDAIDAVGLARFAAQKRPAATRLPDPALEALRELVRFRDRLVQDFGDRVRQLHRLVDLGFPEFPHHVRDLGSELATTILHAYPTAAAFRGVPPRRVAGLRYDGRHRVGDALATQLRDAAARSVGQHHAEVYRVEVRYTCEDLDVLRRRLRTLERDIERLLEAHEVGRLLTTIAGIGPQTSARLVATFGDFSSFPSGAAVAAYVGAIPGLSQSGQRRSMRAGLTAIGAADLRAKLWMPVLVAVRRNPWLRAYYHRLLARGKLPKVALIAAMRKLLHALYSVATHRRPFVPQLPAPGTRP

SEQ ID NO: 291678 - protein, 351 aa, unidentified
MSHKTAVTVAHTIGIDPGKNTLHLIGLDDKGAIVLREKIARGRIAARLANVPRCLIGIEAGMATHYVARELSALGHDVKQVPPAYAKPFRQGHKNDFRDAYAVAEAVLRPSTRCVPVKTDNQLDLQALHRVRSRLISDRTAVINQIRSFLLERGIPVRQGLRFLRHQLPDILATRTDVLSPRMVRIVEDLVGDWSHLDERIENVTDEIEALAHGDASCRQLMTVPGIGPIIASAMVAAIGNGIAFARGRDFAAWLGLVPKQMSTGDRTILGRITKRGNRYLRTLFMQGARVILLKPVNWAKHSFGLWLTAAARRLHHNVLATALANKLARIAWTVLAQGRSYEARVEPKVA

SEQ ID NO: 291679 - protein, 334 aa, unidentified
MKKRYFMGIDVAKATFDFCLLSSTEGWLWRGQFSNDAHGIARFLAQLPAPSRKPAQIHFALEATGVYGKALVAALHQAGLAVSVLNPAQVKYFAFSVLRRTKNDTVDAAIIARFCRERKPLATRPLRPIEEQLKVLVHERESRVGEQTRERNRAKKDPFQIALPTLISRQRRQRLQQLDKEIAQLDAAIDSLIASDESLSNQSQLLCSIPGIAAVTAAKLLSELAGKEFQSARQLAAYAGLTPAEFRSGYFLYGKTHLSKIGNAFLRKALYLPAAVARRWCKPLKPWIAILESRKLHHLAIRGAIMRKLLHIAFGVLKHQKPFNPLLVFIPKTL

SEQ ID NO: 291680 - protein, 466 aa, unidentified
MKHNHRKASGKRRVSSTVLERINPDVAGIDCGSAEHFVAVPPDRDPMPVQCFKTFTSDLLRLADWLTACRVTSVAMEATGVYWIPIYEILEARGFAVLLVNARHVKNVPGRKSDVSDCEWIRELHSVGLLRGSFRPTDAIVALRAYLRHRQTLIESAGTYVQRMQKALVQMNLQLPLVVSDITGLTGLRILRDIIAGHRDPHQLAEHRDPHCRASKAEIVAALTGNYRPEHLFVLQQNLELFETCQVQLAACDRAIDAHIHTLTASVAKPTTPLPAPRVTRKPHDNEPRFEIRTPLHHLTGGVDLTQIDGIKPYTALKLVSEIGTDMSRWATEKHFTSWLTLAPNNKISGGRLLSSRTQPSANRAAAILRLTAMSVGRTQTALGAFYRRLAARIGKPQAITATARKLAILVYQALKGELRYYDPGAAAYDAQQGTRVLRRLRQRAAILGFELVNRQTGEVLAAGPA

SEQ ID NO: 291681 - protein, 421 aa, unidentified
MNQLSGEPYTAYIGIDWANSKHDICLQLAGSEERVFERIKHTPEAIEEWAQALYQRLGGPIAVALELSEGPIVSALQKYDFLVLFPIDPKRLAKYREAFVPSGAKDDPTDAEFAMDYLMRHPEKLKVLKPESAAMRKLRYLVEARDRIRGDQSRCVNRLIQALKQYYPQAVDWFNDHNTLVFCDFLKQWPTLATVQRARKARLERFFKEHNVRFARLIEERIQAIKAATPLTHDEAVIDAHRLQVEILVEQLRLTIMAMKCFDKEIAAIAAQFPDYERLFTALPGAGKVIAPRLLVAFGEDRDRYNCAAQLQKRSGIAPITKRSGNSTWVHWRFQCPKFLRQTFIDFAAQTINKSAWAGAYYRQQRDKGASHHMAVRALAYKWIRVLYRCWQERTPYDESKYLETLRRRGSPLLKQLAEAA

SEQ ID NO: 291682 - protein, 341 aa, unidentified
MNITTIGIDLAKTVFSIHGTNPYGKVVVRKRLNRPKLLAFFAQLPPCLIGMEACSGAHYWARELTRLGHDARIIAPRFVAPYRKSSKNDDNDAEAICEAVGRPNMRFVPIKTEDQQAVLCLHRIRRGLIKERTAQINQIRGLLAEFGLIIPQGRYHARHRIPEILEDAENGLPMLARRLLNNINQRILQLDEDILAYDREIEAMARRDEQAKRLMAIPGIGPQTATAILASAPDPRQFKSGRHFAAWLGLVPRQYSTGGKPRLGRITKRGDKYLRTLLIHGTRAVIAKLADKNDRLSGWARNLVERRGYKRAAVALAAKNARIIWALLMNQTEFKTQPVEG

SEQ ID NO: 291683 - protein, 327 aa, unidentified
MIYLGIDISKAKLDCTLLDPVTDKRKTKAVSNDTKGLEALSAWLDKQGVAPIDVHGVMEATGVYYEQAALWLADAGMRVSVVNPAQVRDFARGLAMRTKTDGTDSVALARYGALIRPEPWEAPPPEVRELKALIARLEALETDARRELNRREKALVAQAPALVRESLDNHLAALKQEIARLQQAIDDHINRHPGLKADRERLLSIPAVGDKTANRMLAVLHSRKFRSADQVAAFLGLVPVEHQSGSSIQKRPRLAKNGDARTRGVLYMAAIVAAQYNPHVKALYTRLCAKGKTKMAALGAAMRKLVHLCFGVVKHQTVYQPDWQPGG

SEQ ID NO: 291684 - protein, 336 aa, unidentified
MFQLGIDVSKKTLDLCLLREGVKGRVKTRKLQNDINAVSAVIAWLSKQHCKPEDVHIIMEATGVYHESLAYGLHKAGGRISLANPHRAREFARGMGMLTKNDRVDAYMLACYGALKAPEPWLPPPEEVRHLSALLRRRDALVADSTREKNRLEKYLATDTPSVIAESVEAMIGQLNAEIKRLDRLIRSHLNQHPELKKDFDLLTSIKSVGYQLGLNMLVILRSHDFATAEQAAAFLGVVPVEKYSGTSVRGCPKLSKIGPPEIRAKLYLASLCGLRFNPLMKAMYERLCLRGKGKMCAIGALMRKLVHWCYGVLKTQKPFDVGYLSSYARSACKAA

SEQ ID NO: 291685 - protein, 320 aa, unidentified
MSSENFIGIDVSKSFLDVTVLPDGQTEQFANNEAGIAQLLKVVKATDPKLIVFESSGGLEFLAVSILSAQQYPVVVVNARQVRDFAKATGKLAKTDKIDAAVIAEFARALRPEVRPLKDEHTQLLTALNARRKQIVDMLVAEKNRLHRAPLPSRKNIQAHIRWLEKNLTDINKDIRKTIRKTPVWREKDDILQSFKGIGPATSASLLSDLPELGDIESKKIAALVGVAPFNCDSGLYRGRRRVWGGRSQVRRILYMATLSAVRTNPVINSFYNRLRQAGKSHKVAMTACMRKILVILNAMLKNQTFWQPTYQMLDSEHSC

SEQ ID NO: 291686 - protein, 355 aa, unidentified
MNDAKYIGLDVHQATISGAVRDSDGKLVLEAILETKAETILQFMQGLHGSLHVTFEEGTSAAWLYSLLKPHVTRVLVCDSRKNALLKVGNKSDRTDARKLSELLRSNLLRPVFHDDTGLRTLRELARSYLTLTKDVTRVMRRLKAIYRSWAIPCGGQQVYSPRHRAEWLGKITEASVRRRAELYYQQLDALRFLHQQAKRELLAEGRKHKAMKLLRQIPSIGPIRSVLLVALLQTPHRFRTKRQLWSYSGLALETRNSGEYRIEGGQLKRSKKVFAIRGLNKNHNHDLKNIFKGAAIRAAAVEGPFQKFYDALVAKGMKPTMARLTLARKIAAITLIVWKKGASFDAEHLKQQAA

SEQ ID NO: 291687 - protein, 332 aa, unidentified
MSMVVGVDTHKQTHSAALLNELGVVQSGLEVAASARGYRQLLSWARSRSTERVWVVEGTGSYGAGLASYLSEQDEVVYEGDHPKRSWRGPAGKSDQLDAIWVAKEALSRKRPSLPRARGERELQTARNGAVEAEKQGLNQLYALVVSAPEPLRQRLGKLGAPALVKACLRLRPHGDQETALTAVTLRSVARRVSALAAEAAAYECQIAKLVSTLAPQLLALKGVGPLSAAQFLISWSHPGRLRDHNAFAKLAGVAPLPASSGRVERHRLNRLGDRQLNRALHLVAITRSRCDPQTQAYIARRTSEGKSAREIRRCLKRYLARRIFKLLENLT

SEQ ID NO: 291688 - protein, 324 aa, unidentified
MNLMPLGIDIAKQKFNVCLRFAHDKLKHKVFTNNQAGFTQLHRWLQQHAGARVHACLEATGAYGEALAFYLHEQGHLVSIVNPAAVKAFAASCLSRTKTDRVDAELIARFCLAQQPPAWEPARPEVRELQALVRRLASLIEMRVAEENRLAAGPTVPEVHRSLEESLAHLQAQIKRTEKLIRTHLDQHTGLRQQRDLLTSIPGIAATTAALLLAELPHLKQYRSARQVAAVAGLVPRERQSGSSVKGRVRLSKIGNARLRKALYFPAITALRCSPFMQQWAQGLRERGKSKLSVVGAVMRKLLHLAYGVLKTNQPFDPEWAIKV

SEQ ID NO: 291689 - protein, 361 aa, unidentified
MKKHTQDLIAEVPRGCSQVGITIGIDLGDVWSHYCTLNEDGEVVDRGRFRTNPSSVDKWFTDLPRVRIAMEAGTHSIWISEQLQELGHEVIVANVRELRAIWHSDRKSDQVDAEKLARFARLDPKILRPIAHRTVAQQEALTLIRARNLIVRLRTAAVNAVRGLAKPCGYRLPASSTLCFAKRCMAVLPPGLVQALGPVLEQIADMTLKIKAYDRAIKKLTETEYPETMALTKVYGVGQLTALTYVLTLGSKERFQRSRDVGCYLGLRPRRSQSGERDPQLGITKAGNVYLRSLLVECANHVLGRHGKDSSLRDWGLHLASRGGKQSRNRAIVAVARKLAVLLHRIWVTQEPYVPFYAAAA

SEQ ID NO: 291690 - protein, 358 aa, unidentified
MFSERTSVGLDVHARSVVAHGMDQVSGEVFTARLVPDSSSVLEWLGQLPGPVATIYEAGPTGFGLARSLRAAGTRCEVVAPSKLQRPAGNRIKTDARDAEHLCRLLRLDDFTAVAVPAEGSEAARDLVRAREACRSDLTRSRQRVSKLLLRHGIVWSGGKAWTNPHLAWLVRHQLPGPAQWALDEGVDQVLVTLARRKRLDAHIAQLAADSVWTPIVRRLGCLRGVSTLTGFALAVEIDDWTRFNGHTIGAYLGLVPCEHSSGQSRALGSITKTGNRHVRRLLVEAAWHHKPAYKAGTTIRARWDLAPAAARLRGDAGNRRLHHRWAQFEKRKKNNNVAVVAIAREMAGWCWSLAMTE

SEQ ID NO: 291691 - protein, 369 aa, unidentified
MKQLITYIGLDVHKETIAVAIAEAGKRSEVREYGKIANTPAAVKALVAKLARNGHELRFCYEAGPCGYGIQRQLTGSQHDCIVVAPSLIPRRPGERIKTDRRDAINLAKLHRAGELTPVWVPDAAHEAIRDLVRARLAAVRTLRQGRQQLSGFLLRHGHHYNRPAWTLMHRRWLAGLRFEHAAHHIVLEDCIAAIEAATARRDRLEAHIAAALPDWSLAMVVRALQALRGMALVAAATLVAELGDITRFANPRQLMAYLGLVPSEHSSGGTRRQGGITKAGNGAARRMLIEAAWSYRFPARISREQLLRQEGQAKPIRDTAWKAQERLCRRYRKLARAGKPPTVVVAAIARELAGFVWAIARQARPTGA

SEQ ID NO: 291692 - protein, 346 aa, unidentified
MLHAGLDLSRRRLDVCLLRDGGELVAETAVPPDADGLRGLVRRVSRYREPVRAVIESMNGARFVHDTLEEHGWEVLVADAQKVKGLAPLACKTDKIDARVLAVLSERDLVPAIWLPDPSIRRERELARFRLHLVRHRTTLKNRIHGTLITFGHPCPVSDLFGLAGRDLLDRLEIPDPWRANVDVALELIDDLELQIARLTVELKRQGADHRYIPLLVTAPGFGWINAFTVASEIGDIERFASPAKLCGYTGLCPRVIQSGSTDRRGPISKHGPRYLRCGLFEAAMNACKHPLYAERYQRTKRRLGRQRGPKVAQIELSRKLTEAIWHMLTRNQPFAPAGAVGRLAA

SEQ ID NO: 291693 - protein, 315 aa, unidentified
MATSSETYVGIDVSKDRMDVAVLGEGQVWQVKNNQEGIAELVQQMQTLCPELIVVEATGGYQRAVVEALFVAGLVVAVVNHARVRQFARACGLLAKTDKLDAFVLAEFGQRVQPRRYEGKSEAEKQLSALLVRRRQLEEMLKAEQNRLRTISPNLKSSVEKIIACLKEEKKLLDEQIQLFMKEREDWQQQSEILSSAPGVGMVTTATLLAELPELGKMDRKKIAALVGVAPMNYDSGRKRGYRKTKGGRSDVRSVLYMSMLVATRYNPVIQAQYQQLLKRDKLKKVALTACMRKFLTILNAMMRDRQPFRCAAAM

SEQ ID NO: 291694 - protein, 316 aa, unidentified
MLAPNPVAGVDVGKSFLDLDFDPAAKALRVRNDAPGIAALIEAMRRRGASRVALEAIGPYAWPLTAALVANGFEVGLADPRQVRAFRTAEGRIAKTDRLDAGLIARFARTMPERLRPAPEPQALALKALSTRRRQLTELVAMEKTRLAQAFDAGIAASHRAVIATLEAACAEVERRLEAAIAADPALARKREILTSIPGIGGRIAGVVIADMPELGSLDRKAAASLAGMAPHPDQSGTLPGRHAISGGRPCLRTAFYMAGMVAARCDPRLKAAYRAMRDAGKPPKVAIVATGRRLVTIANALVRENKTFDQSRFVS

SEQ ID NO: 291695 - protein, 333 aa, unidentified
MRSKRLLCGIDISKAKLDVFYNDKEGKTHSLKVANTLTGHSELIKKLGRNRTYIMENTGKYGWPICIKLKKAKADVRVENPLVIKRFIQMNMERHKNDNIDAKWIYFYGLEREARAWQMPSKEQFYCSQIIKAIDLYTRKLGMLSNHLSTYEQQPFLYKEIMKGMESIKENITNEIQKLDEQLDSILDKWQGKMKKNLNTIPSLGKRVISYLITYTDGFSRISNYRQLIALTGLTPREHTSGTSVSGKRSICKMGHFDLRKTLFMCSLSAIRHNKPCKEKYERLKVAGKPSKVALIAVCNTLLRQAFAIATKGVPFQQDHVSVRPSLKAGKAI

SEQ ID NO: 291696 - protein, 367 aa, unidentified
MEVPTMAKIRSWAGLDVHAAKVVAVCVDAQSGEMITRKLPGQTAKVVEFVAGLPGPVRVAYEAGPTGFTLARALREVGVGCVIAAPGKIERPAQDRIKTDRRDAERLVRLLMVDGLHPVRVPDPAEEALRDLVRAREDLRGDLMRARHRLSKLLLRHDVSFDGPGGNWTDTHRAWLAKVRLGDVAAQVTLADYVGAIEALLVRRDALERSIGELVPASPWAQTVARLRCLRGIDTLSAVGLCAEIGDFARFERPGQLMNFLGVVPSENTTGQKRRQGAITKSGSRHARRLLVEAAWHYRKAPRSSQVLARRQAGQPEHVLQISWKAQQRLHRTWNRLDRDRGKRRTIVAVAVARELAGFCWAIANVD

SEQ ID NO: 291697 - protein, 320 aa, unidentified
MMAQNELVVVGIDVAKHKVDVCIRSPLLRQTFENTAQGQRKLVAWLRKHRVNKAVMEASGGYERGWVRLLRQAGIEVRIVDPRRVRSFALSAGRLAKNDAIDAEMIAWFAETFSEAPCQVYDAAHEELLALAKARISLVDLKARLESQSEHAAPSLVQAARRRLLKNLVGEIAKIEAAIAARIKATPHLAERAEIIESIPGFAETTSANLVAGMPELGQVSNEVAAALIGLAPYDDDSGKRRGERHIKGGRRWVRNAIYMPCVGAATLNNPVLKVYYQRLIAKGKEPKVALVACMRKLIIILNTMIARRQKWDSSRYALG

SEQ ID NO: 291698 - protein, 355 aa, unidentified
MNAIKYIGMDVHVATISIAVLDANGKLIMEVTIATQAGALLDFIRGLSGTLNVSFEEGTSAHWLYTLLEPQVAKVVVCDPRQNPRRLGEKKSDRLDARKLAEWLRLGTLKPVYHGNSLGPALKELARSYRTLVSDTARVMNRLKALYRARGIGCAGTRVYSPRFRDQWLEQLREPGARGRAERLYRQLDLLLPLRQEARAAMVAESRKHPAHKILCSIPALGPVRVALLLALLQTPYRFRGKRQLWTYAGLALVTRTSADYQMVDGQVTRARKPALVLGLNANHNHTLKGLFKDAAASTLAHPGPFKDFYTTRVAQGMKPELARLTLARKIAAIVLTLWKKGECFNVEHVKAQAA

SEQ ID NO: 291699 - protein, 400 aa, unidentified
MLPGGFRAFEIRVNEMVIPTLRGHTFAGCFISEAIITSAVALVGIDPGKQSFHLHGKDGSGRKIFRTKATRQQMMRLLGILPACTVVMEACAGAHFMARQLTALGHQVKLISPQFVRPFVKGNKNDFIDAEAICEAASRPSMRFVSPKTEARQTLSVLHRMRDSLVRDRTKTANQAHGFLLEFGISLPKGLSLVRRLPSTLDEHELPPRLVVLLTRLHQHSRCLDGQIKAPDKEMTTQLEEDDLGSRLLTIPCVGPITASLLSAEMGDGKQYGGSRDFAASVGLVPRQHSTGGRANLLGISKRGRQVSAAAFSAVRPGLPAAPGASAGCLGPLGPLATAATPCEHGGARPGQQVLPSRLGVRRQPLGIRSRASRLRRLTRPFSCTTEHPSRFCDAEQPMT

SEQ ID NO: 291700 - protein, 416 aa, unidentified
MQKPHDNSKASPAAFMQDNTLIAVIELGLSNWLVAGLIPGVSREPLKKLEPNPEDLLKLLHGWRDEAIKAGRPITRIAVAYETGRDSFWLARWLRERGIDAHVIHATSVAVSREHRRAKTDRLDTAMLKRGFLGWLRGERGHCTVAIVPTMEEEDAKRPHREREGLVHEQTRVVNRMKSALIQFGVRNFNPKLRKASVKLETVRTPEGKSLPPNTIAALRRDMERLRIIKEQIKAIEQARLQQFAQKPEALANRMIYLLVRIYGLGLETADLLVHELLSRTLRDRKAVARYAGLTGSPDESGSKRREKGLSRSGNARVRKIMIQLAWRMVKFQPDSALVQWFKQRTENAKRSRKPMIVALARKLIIALWRYANDGVIPARLQAAFSGVIGNRKEEEISGFGTSARIATKRPKNDPR

SEQ ID NO: 291701 - protein, 458 aa, unidentified
MRKKSRQMKRTEEARPFAGLSKVNRNAAGVDIGATEIVACVSGGDEVQLVKAFGNYTVDLQSIAKWFQEHKIKTVAMESTGVYWIPLFEELERQGFECLLISSRSLRKVAGQKTDVEDAQWIQTLHSYGLLKGSFRPQGDLVGLRTLLRHRAQLVEHRAPHIQHMQKALLQMNIQLSQAVTDVMGMTGQKIIRAIVAGLRDSDGLASLRDPGCKHSEEEIAKALTGTWREEHLFVLKQSLELYDFYTEKIEACDEEVNRQYGMTRPDWVRAELPAVPEKKRHTHSKNAPKDARKIREHLYRINGVDLSLVDGMGVSLAQTVTMEVGSNVGEKFPTEKHFCSWLGLAPKHDVSGGKVLNNKTLKTKNRAGQAFRMAAQSVKKADCPFGVMYRRLRSRLGPAQATVATAHAIARVVYKMLKYKVEYDPLSVNEYQAKYEEQQVKYMKKRAAKFGYQLVPA

SEQ ID NO: 291702 - protein, 375 aa, unidentified
MKEKLRFLGLDVHAETIAVAIAEPDGEVRSLGTIPNRLESIRKLIKKLGPTEKLRACYEAGPTGYVVYWQLAELGVKCDVVAPTLVPVKAGDRVKTDRRDAEKLARSHRSGDLTAVWVPDEGSEALRDLVRTREAAKQDQLRARHRLSKFLLRSGQRPPTGIRPWTRPYLIWVAQLRFTQMAQEATRLDYLHEVEHMRERVERLERAITEAVKLASPALQQVINDLQALRGIADISAVTIAAELGQVSRFDGARQLMGYCGAVPSEDSSGKRTRRGSITKTGNAHLRRIVVEAAWSYHRPPCIWYGLRKRQESISEEVKEIAWKAQHRLHKRYMRLAAAGKDKRKITTAVARELLGFIWAIGIRAETTLSQRIAA

SEQ ID NO: 291703 - protein, 335 aa, unidentified
MDNYDHYVAIDWAQSNMAIARMTREAEKISVIDVPSDIKEFQLYLERLRGKKILTFEETTTSQWLYTELKSYVDEVVVCDPYRNRLLSEGPKTDKIDAEKLVQLLRANLLKPVFHSGDEFIYLRKLVSGYEDIVQFGVRFKNQRSSLFRANGLDKKEKDLKEPSEQFVLEGIDQGIEAYEKQKSRYEREFNRIVSKNSIVRNLTSLPGIGKIGAVKVAAIVVDPKRFKDRGQFLSYCGLICLEKISGGKSYGQRKPRYQGMLKGVFKTAALGAIQGEGKNNSMRQFYDYLMREKNYAEHNARHAVARRIAVLTLGVLKSGKKYHPRGRLQCNKTL

SEQ ID NO: 291704 - protein, 347 aa, unidentified
MEYVGIDVHKKDSQICLLTEAGEVIERRICTEPERFAAVLGGRPRARILVEASTESEWVARCLEALGHEVVVADPNFAPMYATRTRKVKTDRRDARALQEACLLGAYRPAHRLSDAQRHVRGRLAVRDALVRTRTGYIALARALLRQHGWRVPSGSAETFSQRVMALSLPGRLLSEVAPVLAAMRTLNQQLAYSDRVIETITRPDPRVQRLRTVPGVGPVTAAAFVATIDDAQRFHRAHEVEAYLGLVPRELSSGESQRRGRITNAGNTRMRWLLVQAAVSILRLRDPRTAALRRWATGVAARRGKKIAVVALARRLAGLLSAMLRDGTTYTPRGVPRHAAEVAAPV

SEQ ID NO: 291705 - protein, 411 aa, unidentified
MRLFVGDDWAEDHHDIEVMDQAGKVLAKRRLPEGVAGMTQLHELTGRFLPGDAADAEVVIGIETDRGPWVAALVAAGYVVYPVNPLQASRYRERHGVSGAKSDQGDSHMLADMVRTDSHQLRPAAGDSPEAGAIKVVARTHKTLIWERTRAVQRLRHQLREYFPAALEAFADLDAPDALELLARAPDPGRAAKLTRAQVAAALKRARRRNIKDKTDAILAALRGGHLGQPAALTAAYAATARSLIAVITTLDEQVKILEEQVRDHFGRHPDAEIYQSQPGLAAILGARVLGEFGDDPHRYADGKARKNYGGTSPITRASGKKKAVTARWIHNDRLLDALMSWAFASLNASPGARAFYDELRARGLEHNDALRRLANRLVGILHGCLKTRTLYDETIAWGHRENLPQSSVAA

SEQ ID NO: 291706 - protein, 377 aa, unidentified
MSKTKRKSYAEQAAEKGTLSKYYVGLDVAQKKTQVCILDENGKIVREKYVNSRPKALEEVIRHYCASNVEQIGIESGNYSGWLYQELKKAGFPIVCLDALQIHRFLSVRRNKTDVNDARGIAELVRRGMDWVNAVHVKSAICYEIRGLLTIRNRMVKQRTDNILMLRGILKAYGGIIEGGSDNIDTFRQKVIDVAVDIHVRDQIDLRPRIRPVLEMIAKLDSSAQKIEEELKVMAEASPVCQKFMTVPGVGPIIALSFYTAIEDPTRFRRSSDVAAYFGLTPRIYQSGETETSGQISKMGNQMTRSHLVLAANVILSSSREWSSLKVWGNKLVKRVGYNKAKVAVARKLAMILFAMWRDDKQWYYNQDALQQARAAA

SEQ ID NO: 291707 - protein, 431 aa, unidentified
MKYKLKQKQNQRITQITDSTLVVGADIAKKIHVARAVDFRGIELGKDCTFRNDASGLTKLAAWMKELKQAHAKTEIVFGIEPTGHYWFPLAAYLKEQGIKIVVVNPHHVNKSKELEDNSQTKSDYKDAKVIADLIRNGKYSEPNLPTKEYADLRILMNLREKMSVSLTQVKGRIVNWFDRFFPEYTSVFKVWEGKASLMTLREFPLPAEIRAKGARVVLEHWKTDVKRGVGIKRAEKLVAAASTSIGLTEGVEAARIELAVLLQQYDLFSEQLETTIAKVLEILESIPGTAQMLSVPGVGVVTVAGFLAEVGDIHNYDHGQQIIRLAGLNLKENSSGKRKGRTGISKRGRSRLRALLFRAVMPMVAKNPAFKALHQYYTTRSQNPLKKKQSIIALCGKLIRILFTLGTQQKEYDANDVIGPVRKAQMQMVA

SEQ ID NO: 291708 - protein, 408 aa, unidentified
MNTLYVGIDVSSKSNVVYLMLPNGDKHSNFSVANSHEGSTLLVKKIYSALTSHSLDTVLIGLEATSVYGDNLVYFLREDATLAPFNRKIHVLNPKQVKKFHDTYNDLPKNDYVDSFVIADCLRFGRINKEVYMGDYRYKALQNLTRARFFAVQNLVKEKQRFMNVLFKKYSTMTQEKVFSDAFSTTALAVYDEFESAEALANMDLHELTDFIIEKGKNRFPDPDAVAKAIQKAARSSYRLPKTVNDSVNQVLSISITSMKALESQIKEFDKAIKALMELLPNVLISIPGIGPVYSAGIMAEIGDINRFDNQASLAKYAGLAWKQHQSGGFEAEVTRLIPSGNRFLKYYLCEAAFSLVRCDKKYSDFYHLKYKEVNRCQHKRALALTARKFVRLVFRLLKDNRLYCPAK

SEQ ID NO: 291709 - protein, 468 aa, unidentified
MKLKPNQKRSQNQSAHKAAKKLNNFEQINLNAAGVDIGSGEHWVSVPPDRDPQSVRRFTCFTPDLQALADWLQQCGVETVAMESTGVYWIPLFQILETRGFEVKLVNAHYVKTVPGRKSDVLDCQWLQQLHTYGLLSGSFRPSDQVCVLRSYIRQRDNLIRSSCVHVQRMQKALTEMNLQLHKVISDITGVTGLAILRAIVAGERNPLALAELKHGRIRRSKTEIAAALTGDYRGEHVFVLQQELSLWEFYQAQIAACDRQIEQCLSEFADKVDLGQSPLAKPKRCQRNSGNAPDFDLRTHLYRISGVDFTRIDGLGVLTVQTILSEVGLDHKRFPTVKHFTSWLGLCPGSRITGGKVKSSQTRHVVNRAANAFRMGAQCLRNSPTALGAFYRRLRSRLGAPKAITATAHKLARLFYRLWTTGGEYTDPGANYYEQQYQQRMFKNLSKKAQALGFSLVPQPSIAEDVS

SEQ ID NO: 291710 - protein, 429 aa, unidentified
MQNESAPGARGPVFCGVDTHADSHWLCVLDWRGRKVLSRQFPADAAGYEALAGAIAAAGEPACVAMEGTSSYGAGLTRHLASLGMPVREALSPTRTQRRRPGQGKCDEADAERAARAAISGSRLGTPKSQDGWVDGVRCMLAARSGAVKARTSAINTARSLLTTAPEGLRSRFRGMAGPRLMEELPSVRAEGALGAALGALADLWAAARDAALDMELAIEASLEENCPALLAMYGCGPVSAAKLAVAAGDNPGRLRSEASFAAICGACPIPASSGKTVRHRLNRGGDRQANSALHEIARQRVMRDPETAEYAERARGRGKSDREVMRCLKRYVAREAYRALMRPHEIRRPEDASDLVAARRAAKVSQVRAASILGTSEKYISMLERGQRELKPIRRAYEAWVEAGLPLDWDRQAFEAERKMDSKKHLAK

SEQ ID NO: 291711 - protein, 311 aa, unidentified
MYYIGIDVSKKDLSVFNGKDLNFINKEGLKSFKKYLKKKYNLSKIAIIFEATGIYSLYLKEFCAENSIKVYIVNPKQSHNFTRALGIRPKNDKIDARTLYKFHKLIETKDIKVAKIDQQTKILSSYLVSYEFALKQRISLSNHLESLRDKGLIVLMKKDLKRAKKLEDKIFNDILEYVSKNQNLKEDYQRLLTISGVGDKTAIALLTLFKTYQGTNRAQITALAGLDPVKRESGTSVKYKVKISKNGKGIYRKIFYLPTVCATVHNQKIRVFYQRLLAHHKTKKLAIIASMRKMLLIAHAMYRDKTEYVAA

SEQ ID NO: 291712 - protein, 411 aa, unidentified
METIFERVGALDVHKAQVTGCVRIPDACGRREAHLAEFPTTVQGLLALADWLKAFAVTNVAMEATGVYWQPVWHILEDDFELMLVNARHVKQVPGRKTDVSDAQWLCQLMEAGLLRSSFVPPKPQRRLRALTRYRKTQIAERQREANRLHKALEDTGIKLDCVATDILGKSGRAMLDALVKGTTDPAVLAELAKGKLRKKIPVLTEALEGRFDAHHALIVSAILAHLDFLDEQIGRLSEAIEDQLGPTGLAGVALASTITGVAARTGEVMVAEIGTDMSVFPSAGHLASWAGRCPGNDQSAGKRRSGRTRKGSKWLGIALEEAALAAIRSKDSYLAAQYRRLKPRLGHGRALGAVKHSMLIAYWHMFTTGETYRDLGGDYFQRRNPQRATNRLVTQLEALGHHVSLEPTAA

SEQ ID NO: 291713 - protein, 311 aa, unidentified
MTLPQDIIGVDIAKDWIDVFHLSTSKHERIATTEQALARFSKGVAGALVVLEASGGYERPLIEALAKAHTEYARVNPRQAREFARATGRLAKTDRVDAEVLARMGRALELKPTPPEDPDLARLSDLVARRGVLVGQIRAEKNRAGTTRDRWIAKEIALMIKVLDAHLAAVETQIATLVESRDALAATQARLSSVPGIGPAISAVLIARLPELGHLDPRRIASLAGLAPHATDSGLTRGKRRIWGGRADARRALYVAAFIASRYDPAMKAFRARLQAAGKPLKLVLTACARKLLTILNAMLRTGTDYRKMSP

SEQ ID NO: 291714 - protein, 364 aa, unidentified
MYDSTRTVTVGLDVHARSIRLAAVRADELLEERTLPYDEEAVERVLRRWPAVRCCYEAGPTGFGLYRHLVERGIDCQVVAPGLVPQRPGDRVKTDSRDARKLARLLAGELLTPIHVPSRELEAARDLVRAREDGRLDRMRDRHRLSKFCLRHGRRLPTSSWTVMRRKWLSEQRFEFAAEQITFDSYVHAVDLVDRRIEQLERAIRETSEREPWCALVARLRCLRGVDTLTALGLVAEIGDFNRFKNAEELMGFVGLVPSEHSSGETRRQGSITKVGNSHARRLLVESAWHARRRPKVGYELARRQRGRDAVVVERAWRCQQRLYQRWQRMAGRGKPQQKIVVACARELAGFVWAIATEQPLRNS

SEQ ID NO: 291715 - protein, 422 aa, unidentified
MIKTPMKMTTATDAQAPYAAFLALDWADQRHAFCLCPAGSDQVESGTVKHEPQELHRWLEELGRRFGNQPIAVAVELTRGPLVWALFEHRFLTIYPVTPILTAKLRQGFFPAGAKSDPADSRLLLSILQLHRAELRALRLDDQQTRLLGQLTVDRRHVVEQRTAVVEQLTAALKEYYPLALEVAGKLTTSAAARFLQKWPTLEQLQSAKPQVLRNFYYGQNCRADVEGRLQQIKEARPLTNDAAVIEAGRRKVQCLAQWLLVLNEHITDYEERIEQLYRAHPDRALVSELPGAGAALAPRLLAAFGLDRARFQAASNLAAYSGIGPVLRSSGKIKLCLKRMAFPPFLHQTFFEFAGKSVAFSQWAAKYYAIRKAQGREHNAIIRSLAFKWIRILWRCWQDNQPYNEAQYLAVLKAKGSPYAT

SEQ ID NO: 291716 - protein, 403 aa, unidentified
MNNVAGIDVSKGKSMVSVLRPFGEVVAKPFSVGHTGSELKELADYLKSLDGETRVVMEHTGRYYEPVARFLHEEGVFVSAVNPKLIKDYGNNTLRKVKTDKADARKIARYGLDNWAELRQHTPMDTIRMQLKTLNRQQSLYTKTKTMMKNNLIALLDQTYPGVNALFDSPVREDGSQKWVDFATTFWHVDCVRNMSLTAFAERYRKWCKRHGYNFSQSKAVEVHAGAQDLIAMLPRDALTKTMVRQAIDALNAISASMERLKAEMQALAAQLPEYPVVMTMHGVGDSLGPQLMAELGDVARFTHRNAITAFAGVDPGADQSGTHEAKSTRVSKSGAPELRRALFLVMDCLLKTQPQDDPVYRFMDKKRAEGKPYLVYMTAGANKFLRIYYGRVKEYLASLEEN

SEQ ID NO: 291717 - protein, 414 aa, unidentified
MDLVHERAAGLDISKSDAKVAIRVPGKRAGTFPAPVVTTWGSTTNQILALRDMLVAAKVTTVVMEATSDYWKPFYYLFEDVLPVMLVNAKAARNIPGRKTDVSDAAWLAQLGAHGLLRPCFVPPPPIRILRDLTRARTVATQDRTREIQRLEKFLESTGIKLSDYVSDLMGVSSRAMLTALVAGERDPQVLANLAKGTMRRRIPELVEALTGRFEEHHAFICHMHLERIDSITGWVEQLTTRIDEAMEPFRAAREFLTTIPGVSILVADVIVAETGADMSTFETPGRLASWAGLSPGSNESAGRVKSSKTRPGDPYLKGALGIAALTIARHPNNTYLGARYKRLIVRRGKKKALVAIEHSILTAVWHMLADGECYQDPGSDFFTKKDPTRTRNNAVRRLRELGYDVTLNTREAA

SEQ ID NO: 291718 - protein, 344 aa, unidentified
MFYVGLDLSRKRLDWQALERDGDRAGIGAVPPDRDGLARLVARLGDEPVLAVIESMSGARFVHDQLELRGWDVRIADAVKARGIAPLACKTDKIDCWVLAELARRDLVPEIWLPDPAVRAERERARFRLHLVKHRSSLKNRVHSILFQHGIPNGHRDLFGAGGRRLLDRLALPEPWASTLAASLALIDTLDQQIDGCERELRRLGADHPYIPLLTTLPGVAWILGYTIASEIGDINRFPSPRKLVGYTGLCPRVEQSGERDRRGPLRKNGPNYLRWALIEAAHTAGRDRRYRPIVERMRARHGRKRGSKIAAIEIARRQTEAIWHMLTENRPFAPAGAPTPLAA

SEQ ID NO: 291719 - protein, 309 aa, unidentified
MEHFIGIDVAKDRLDLHTRPGGEVFAVARDSNGLAMLVERLQRLAPALVALEATGGYETVVASALGAAQLPLAVVNPRQIRDFARATGKLAKTDRIDAAAIAHFAEAVRPPARPLADAEARALGELVARRRQVIEMIIAERHRRRMASQRRVIRAIERHLALLQAELSELEGDIDDAIRKSPAWQADADLLASVPGVGKVTLRTLIAELPELGHLNRRKIAALVGVAPINRDSGTLRGRRTIAGGRPAVRTALYMAALVASRANPVIAAYYAKLRAAGKTGKQALVACMRRLVVILNAILRDRKPWQPA

SEQ ID NO: 291720 - protein, 345 aa, unidentified
MEQITRIGMDTSKHIFQLHGVTAAEEPALRKKLRRKEMVTFFEKLAPTVIAIEACGASHHWARLLQSFGHSVKLIAPQLVKPYVKRGKNDAADAEALCEATSRPTMRFVPVKTAEQQAALMLVGVRDRLIRNRTQLANAIRGYAAEFGLTAAKGKAHLDPLLDRIHADESMPALARELFAAQAKEYAQLQSQIDEVDARLMSWHRADECSQRLAKIPGVGPIGAVLLKMKTPEAELFRSGRQFAAWIGLTPKDHSTAGKVRLGVITRAGDEGLRSVLVVGATAVIRHVRRGGRASPWLTELLKRKSPKLAAVALANKMARIAWKLMVTGENYAAKSLPAALAGAA

SEQ ID NO: 291721 - protein, 427 aa, unidentified
MLNAQVEKLSLVRGNVIIVGVDVAKKKNVARFFDTDGFELCKYFKFRNDRAGILSFISKCLNIKEQQGAERIVIGMEPSGHYWEPLAYFLKEYPIVQVLVNPYHVKQSKEMDDNSPDKNDIKDARLIAKLVKDGSFFKTYLPEGVYRDLRNLTSEREQQCAKLNSAKNRLVALLDRYFPEYVKVFKNLLGKTSVFILKIYTFPEDIEKLTEEELTGVIKAASNKRLGSKKAKELKKAAESSVGLTEGLDSARYRIKSCLEEIEFHLKQLEATEQKMSALLSQTGYKLNLLSIPGVGIVTAARFLGEVGDLSRFEHPSQVIKLAGFNLRGSTSGEKQNSKTVITKRGRSRLRCLLYQAALIAAAKNPQLRALYYYFKTRPKNPLKPNQALIAVANKLVRIMFALIKKNEFYNPALVLGEMRESQLKVA

SEQ ID NO: 291722 - protein, 412 aa, unidentified
MVQSGGNRPMRKNINRSNGKKPETAKKNTKSRVKPKQKLEVRSLLHKLEAAKKKPKRKAAEKNVEYYIGIDLGDKRSYYCILDKHANIAAEGNLATTVQELELYFKAIPRSRIALEVGTHSPWISPLLEKLGHVVYVANPRKIGGGKKSRRRKNDKLDAESLARHVKLDPRMLYPIQHRGEKARRALVLLRTRHALVCARTKLICTVRGMVKSDGKRLPKCSTKAFHNMERDYVPEALRDALEPLFQQIGLLTEQIKKYDKEVTHMGGESYPETELLRQVNGVGELVSLAFVLTVDNPKRFAKSRDVGAYMGLIPRQYDSGDSRPQMRITKTGDRMMRQLLTQSAQHILGPFGKDSDLRRHGLKIAARGGKNAKKRATVAVARKLAVLLHSLWVTGEVYEPLRNSEPEEKAA

SEQ ID NO: 291723 - protein, 470 aa, unidentified
MATTTFKFSDYPKNIKFYCGLDVHKRQLEVALYARDDTGKEFLKSELFKPDQHGLESAWKFVKSFRPVKFTMEATNVYHHVVATLLENKKKEADWHYECLIVPPADAAGIPGRPKNDRVDARKLAMYTAAGVLNGGKPIIVPLEDMRALFRAAFRMECDMTALKNRIKKSMDRGGLRPEKFNLNTQWSREFLFALTAHEGTVGEFYASCMNNKSSQPGITKSLVRNRSKFEPYFDVELSPGMKALIRQDIVELDLKTARKTVIAIEIDAIIMTRPGLKQLVESVASIPGFTPYAATWFIVEVGPIHAYRNVRHFVSYCGCCPHELQSAGHIFSSHVTRRSNKYVRTLLFNAAKVVCIALKAESGLKAYARRMMEKKAIIHPKLAWVTVAQKLARIAYGIIKSGKPFDTGLACNTKSRSSSDGSGFSVADRKMLRKARNALDRVSKEGKLHLMSRRAKFFSDALDEALRKK

SEQ ID NO: 291724 - protein, 354 aa, unidentified
MNDIKYIGIDVHQATSVFVIIDPKGKLLGEAVLETKPATIIDFLKGQRGTLWVTFEEGTYANWLYDVIEPHVARLIVCDPRKNKLDGNKSDKIDARRLAELLRVNALKAVYHGKDSTRTLKELARSYVSLQQDSTRVMNRVKAMFRSRGISCRGTSVYQPENRKEWIEKLADRGPRRRAERLLKQLELLQELNLEAQGDLVRESRKHKSYKVLKGIPGLGPIRVALILALVVTPHRFQNKRQFWTYTGFSVVRRGSAEYEIDQGAVKRTKKKPLPRGLNRNYNRVLKNVFKGAALTAAYRGPFKETFDQRVADGTAPNIALLTLARKIAAITLALWKKGESFDIERHRLSEQTI

SEQ ID NO: 291725 - protein, 392 aa, unidentified
MSLDHLFEEPTAIRTNLGAIFVSLELSRSTWLITSLSPGGGEKMSKHGVSAGNVAALLMRLSELKQKAFARTGKSFHVIAIQEAGLDGFWIHRVLQSEGVESHVVDPASIATSRRRRRAKTDKIDGEALVRALLAYKRGEPRVCAMVRTPTPEDEDRRRLCRERKTLTNERVQHVNRIKGLLFCQGISGYEPLRRNRRQRLDELKTGDARPLPPHLKAQIARELDRLELLEQIKAVETERDALISASKPDGMNADAMRSPPAILINLNGIGPEFAAVLWSEGFYRSFANRRQVAAYAGLAPTPWQSGSISREQGVSKASNPRLRTTMLQLAWLWLRHQPQSALALWFHERVMRNGGRLRKTTIVALARKLLVALWKYVTAGVVIDGAVVRAA

SEQ ID NO: 291726 - protein, 400 aa, unidentified
MRAVFGIDVSKASSEVAILVNSEKVHGYSMPNDAIGFSRLLKDLNTVSNPEIIFEATGVYSRRLQAFLEENGYAYTRLNPLEAKKQLDSLRVRKTDKIDAEKLAESQFILNRKPTYGQEEVYQNLRDLSRFYQNLTEDMVRTKNRLHKTLQVTFPELEQLLAAPTGEQYWNLVSSFPSKDFVLELSHSELTEAIRQSTSKRISEKRVTLLSDKLTELAKQSYCAVKKTSPMIEEVKYYAQELLRLTKRRQVILDEMVNLAQPLPEYNILLSIPGIAETTATSIIGELGDIRRFHSANQINAFIGIDLRHYESGNFLAQEHITKRGNPYARKILFKCIHNIAAASHTNPCHIADFYEKRKRQSQTTSTKPHTIAAVHRLIRTMYYLITHNKLYDYTATQSH

SEQ ID NO: 291727 - protein, 348 aa, unidentified
MSEAYDGQQVVGMDLHRRRSVLVRMTADGRKLETTRITNSPAELRKVIARAGRRPRVALEATYGWYWAADTLAAAGARVHLAHPLGVRGFAYRRVKNDEKDAADLADLLRMGRLPEAWIAPGEIRELRELTRYRIKLVRLRTSCKDQVHAVLAKLGVPVTCSDIFGVWGNTWLDGLELPQPYAGKVASLRTLATELTAEITVLEAAIADLLAHHDGYHAIQALPGIGPVLAAVLVAEIGDITRFGHPGRLCSWAGLTPRHRESDVKVRRGHITKQGSPLVRWALMEAIQHVPAGHPLRARKDDILARRGAEAKNIAKVAAARQLLTWVFYAMRDGQVRALAAGSPKAA

SEQ ID NO: 291728 - protein, 338 aa, unidentified
MHVTTLGIDLAKQVFQLHGVDARGHAVLSRRVKRSQLVAAVASLPPCVIGMEACASAHHWGRAFEQLGHTVKLMSPQYVKPYVKTNKNDCRDAEAICEAVSRPTMRFVAIKTVDQADLQAVHRSRTLLIKTRTAVINQIRGLLAEYGLVIAQSPEKVRPALVRFLDDAESGLTAFARETFSELYEQLVELEQRITKVNQRLDRLFNTHPVCRKLAAVPGIGPLTATALLAAISRPHVFQNGRHLAAWLGLVPRQFSSGGHARLGGLSKRGNRYVRTLLIHGARAVVQRAAHKTDARARWMWALKCRKGTNVAAVALANKNARVIWALLAHDEVYRQSV

SEQ ID NO: 291729 - protein, 453 aa, unidentified
MPKPSLSMPQNLTRMNPGAAAIDIGSTMHMAAVNPDYAEMPIRSFGTFTHDLHDLAAWFRSCGVTSVAMESTGVYWIPAYEILEQHGFEVILVNAHYAKNVPGRKTDVSDAAWLRQLHSYGLLRGSFRPNAQVATLSAYLRQRERLVEYAAAHIQHMQKALMEMNLQLHHVVSDITGVTGMKIIRAIVSGERDPDVLASLRDVRCHSSVETIRASLIGNDRDEHVFALSQSLELYDFYQAKMLECDRKLEASIASMTVDPEAPLPPLPKVRTKTKQMNAPSFDVRAALYGLTRTDLTQIHGLGSSLALKLIGECGTDLRAWPSAKHFTSWLCLAPGNKISGGKVLSSRTRRSSSRAAALLRLAATTIGRSDTALGAFYRRLAGRIGKQKAVTATARKIAVLFYNALRFGMVYRDPGAAAYDERHRGRVIANLQRRARSMGYELAPITAGDCVS

SEQ ID NO: 291730 - protein, 458 aa, unidentified
MNRNKSKAKIDHTMPMVHPNAAAIDIGATMHMAAVRADRTPEPVRSFGTFTTDLHRLVDWFKECGVETVVMESTSVYWIPIFELLDARGFTVFLVNARDAKHVPGRKTDVSDAQWLQRLHSFGLLRASFRPKGQIAELRAYVRQRERLLEYAASHIQHMQKALTEMNLQLHHVVADITGATGLRIIRAILAGERDPKVLTRLRDYRCHSSAETIEKALTGSYRAEHLFALEQALALYNVYHEKASACDTRIEAVLKELSIDRGRRSDSLPSSGRPRSDQANALAFDVRAALFALLGKDITQIDGLGPYLSLKLIAECGDDLSAWPSAKHFTSWLGLAPSNKISGGKILSSRTRRCGSRASALLRLAAVTIGRTDTALGAFYRRLSARIGKAKAVTATARKIAVLFYNAVRHGMEYVDPGASYYETRYRTRVVNNLHRRAKAFGFVLQPMEPAPGVVVS

SEQ ID NO: 291731 - protein, 466 aa, unidentified
MTAGNKLWRNRKERKEWARRLRSEDPGLEVVHPHAAGIDVGNSAHYAAVRPDRDPEPVRRFECFTADLYCLAEWLQSCGVKTVALQSTGVYWIPLYEILEDRGFEVYLVNARHTKNLPGRKSDVQESQWLLKLHTYGLLNNSFQPPAEIRVLRTYWRQRAEHVSGAATCIQRMQKALTQMNLQLANVISDLSGLTGQAIVRAIIAGERNPQKLAELSHPRIEASREEIAKSLEGNWRPELVFVLQQEVEMYDTYQRRIAECDQQLQKHLASFGDTVLPQSPEAEPRERKAKPTKNAPRFDLGSELKRITGVDLTRIDGIDVMVAQTLLSEVGMDMSRWNTEAHFSSWLGLCPDNRISGDKLLGKGTRRVVNRAATALRLAARNLIRSRSYLGAQYRRLRTKLGAPKAITAMAHRLARLVYRMLKYGQQYIDKGTEYYENRYRQQQIRSLQKKAAKLGLQITVAVQS

SEQ ID NO: 291732 - protein, 368 aa, unidentified
MKDVTTYVGIDAHKKDLFIAMLVGTQATPLTWTVANEPNAIRRLVRKLEREAPGPVRSCYEAGPCGYALQRRMTTTRVVCQVIAPALIPRKPGERIKTNPRDARKLAELLRAGLLTEVQPPTPEEEAVRDLCRARDDAREDLQRSHHRLGKLLLRRGLHYSGRNWTRAHRQWIDSLEWAHAAERVVVDDYLLAIDHLEARLIELDARLTAIAATEPYREPVAWLRCFRGIDTLTAILILAELHDFRRFQSPRALMAYVGLVPGEDSSGEKHRRGRITRTGNALVRRLLVETAWHYQHRPSVGVALTRRRKGQPTRVIAIADKAQQRLCRRFRRLAEHHKPAPKIAVAIARELAGFLWAVLQPASGSAS

SEQ ID NO: 291733 - protein, 415 aa, unidentified
MSLKIVYKICCGIDVHKTFVVACIASTNDIGVTSYESHRFSTYTSGLKTLLQWLLNRNCKDVCMESTGKYWIPVYNILENDCSIVLAHPKYVKAIRGKKTDKKDAKWIADLFKHDLVAGSFMPPADIRQLRDLMRYRFKLTCFQSSEKNRLQNCLTVSNIQLGNVVSDTFGKSAQAILDKLLENPADTSFDLEPLVYKSLKKKLPELRDAIDGYITPEQAGKLKVIKSHYENLESRKAELEELILALAAPYQQELAILQTAPGIRSDFTAIGIISEIGTNMEAFPSAKHLCSWAGLTPTNNESAGKKKSVRVSKAGCYIKPLLVQCANAVVTSKKHPEIRNRYLRLKKRRGHKKAIIAIARMLLTALYHMLKNGENYNAELYRKSYLPPVDREITVEQAIIIARNQGYKIKSATA

SEQ ID NO: 291734 - protein, 360 aa, unidentified
MSNLTTTTSPIVVGGVDTHKELHVVAVVDAHDRVIGTESFSTTRAGYRALVRWMRTYGDIARVGVECTGSYGAGLMRHLDTAGIDVLEVTAGDKVDRRKRGKDDTIDAEQAAHAAYARVRTVTPRAHDGMVESLRALKIARSSAISARRVALQLIHATIISAPEELRDQLRNMTRMQLIRTLASWRPDLSGYRDPVTATKISLRSLARRYLELHDEIADLQVPMHALVDELAPDLLARVGIGYESAAQLLITAGDNPERLASEASFAMLCGAAPLPASSGMTTRHRLNRGGDRAANSALHMIVISRWRIDPTTQAYVARKKTEQHSNPEILRCLKRYIAREVYYLLRNQQRAIHQIAPAA

SEQ ID NO: 291735 - protein, 368 aa, unidentified
MVKIARIGIDTSKGSFQLHGVDAEEQVVLRKTLRRKQFLEYLAKQEVGEIGLEACGASHHWARALRQHGHRVVLVPPQYVKGYVARGKNDKNDAEAICEAMSRRRVRERLVPVKTLEQSAGQMMMKVRSSLIERRTQLTNSIRGHAAEFGLVAAKGMDKIGPLLERIAVDESLPARAREMFAMLAEDYAELAARIVRIDKRLLAFQRDNEVARRLMEVPTIGPIGACLWVTKVVDPHAFRSGRSCAAWLGLTPKDRSTAGKQRLGGITRAGDESLRATLVLGATAYLRHVRSGRIAATPWLAGMLARKPPKLVAVALANKTARIAWKLMISGERYDPAHQPTREGLDASQYGGLRAEPLAAAAGEAAA

SEQ ID NO: 291736 - protein, 390 aa, unidentified
MTKRKTETVNDLSRCLNPLDMDATLIAVIEMSQSSWLVAGIVPGVERQPLKKLAIDERALLKLLGRWRAEAEKKGHRIARIAVAFEAGHDGFWLARWLTTQGVEAHVIHASSVAVTREHRRAKTDRLDTGLLKRAFLGWLRGERGHCKMVAVPTLAEEDAKRPSRERETLVGEASRIITRIKAAFVRLGIRSFNPKLRTADASLEILRTPEGEAIPPNTLAALKRDLERHRIVKQQIRQIEQTRLEHLDKASAEGPHAMVLLLARVVGIGVETADMLVQEVLSRNMRDRRAVARYAGLTGSPDESGAKRREKGLARSGNARVRRGMIQLAWRFLMFQKDSALAEWYRQRTANAPSARKTLVVALARKLLIALWRFARDGVVPEGVRLRPA

SEQ ID NO: 291737 - protein, 423 aa, unidentified
MMRLIYPICCGLDVHKNVIVATIVTTNSSGISEYNQRSFSTINSDIQKFHSWLIENNCKHVCMESTGKYWIPIFNYLEYDIDICLTHPKYVKAIKGKKTDKKDSKWIADLYKFDLVRCSFIPPKDFRQLRELARYRFKLVCMKSSEKNRIQNCMTVSNIGIASILSDPFGKTATEIMTYLLSNTSETIDDKAVRRLIKKKANAKSDEIIEAIKGYNIETDQAKKFELARAHLDYLDDMITQTEVELYVRIKPYYEYVTLIATLPGITELSATIILAEISVNMDIFDDAKHLCSWCGLSPANNESAGKKKSVRIAKAGAYLKPMMVQCALAAIKSKKQPYFAVKYVRIKKRRGHKKAIIAIARMMMVCIFHMVSEKQPFNPTDYEELMDPHYSQPKVTLNETNVFAYLESQGYDTSLLVKCSDN

SEQ ID NO: 291738 - protein, 343 aa, unidentified
MEYYAGMDVSLKESSVCVVDATGKLVREVKVSSEPESLVGYFDQLDFPVERIGLEAGPLSQWLHAALFAAGHEVVLLETRHVKAALSAMTVKTDRKDARGIAQLLRMGWYRPVHAKSSPAQDTRALLVGRKLLQSKLLDVELSIRGILRGYGLKVGEVSRGRFEARIRELIAGHAILSMVIDAMLTARAALWSEFTKLHREMLRIARADRVCQRLMSAPGVGALVALTYRSAVDDPARFEKSSTVGAYFGLTPKKYQSGETDRDGGVSKVGDAMVRTALFESAHIMLTRATRFSSLKRWALDVARRRGMKRAKVALARKLGVVLHRMWMDATDFRWSANPMAA

SEQ ID NO: 291739 - protein, 313 aa, unidentified
MTALVAAGVDVGRDYFDVAFAPEGRAFRAPNTSGGVETILARLRRAGARKVVLESIGSFGARLVRALAEAGFEVGVVDPRRIKALRLAEGRRAKTDRLDAALIARFALVMQDAARPVPSAQTFQIRSLSARRRQLVELAAMEKTRLKQALDPQIADSCRAMIAVLSQERSRIEAQLEAMLDEDPANHRRGELLKTIPGVGPAVSTTLLTDLPELGRLDRRALASLAGLAPHPNDSGTRSGHAHIQGGRPCVRTALYMAALAAARSDKGFKSEYQAMRKAGKPAKVALIAIARKIVVAANGMLKADRPWRTNQP

SEQ ID NO: 291740 - protein, 328 aa, unidentified
MTMNPALSAFNHVVAFEVAKDSLVVHVLPADKQSVAANKPKAIRKVLLAERQRNAEDGLGAMLVVCEATGGYERHVLAICVELGIAVHKAHGSRVRYFARYLGLLAKTDPIDARVLALYGLKTADLRLYVPPAPEVLALRDLRTRRDQLQQMLFAENSRLEHARHSSVSRSLKAHIASLRKALAALEAEIAACLKASETLSRKACLMKTLKGVGPATVTAILAYMPEIGAFTKAGAACMAGLAPINDESGKLNGPRHIEAGRAAVRKALYMAALVASQHNPVMRLFADKLKRNGKPAKVVITAVMRKLIVTLNAIVRSEKPWSHAKAA

SEQ ID NO: 291741 - protein, 475 aa, unidentified
MKKTQQRKQARAVRGQSINRKQRRELARKIHADDVTLEVVHTAAAGIDIGNEFHYVAVSPKRDSEPVRRFGCTTAELKAMAAWLKECGIETVAMQSTGVYWIPVYDILEEAGFEVYLVNARDTKNLPGKKTDVQESQWLMKLHTYGLLRNSFRPTSEIRMMRNYWRQRNDLVRSAGRHIQRIQKVLTQMNVQLANVISDVSGLTGQAIIKAILAGERDPWQLAAYRDPRVKSSEEEIAQSLEGNWQEDLLFVLKQEQDGYEFCQKQMAECDVRLEEYLKGREDRSGGASLPEEKRKERRRKKRGNAPRFDLREALFRMSGTDLTQIDGIDTITAITILSEAGYDMSKWATEHHFVSWLRLCPDNRISGDKVIGKGRLPTNNRLTVAFRMAANSLRKSNTYLGAQFRRLRSRLGAPIAIKAMAAKLARLVYRMLRFGMEFVDKGAEIYETQHRQRQIHSLNRKAAQMGFRLVEVAA

SEQ ID NO: 291742 - protein, 428 aa, unidentified
MNTTTTTTADLTPAPAPLPAPAAWIGLDWGHHEHAFALQTATGATEEGTLTQSAETLHAWLQALAQRFGGRPVAVGLETSRGAVVAALLQYPWITIYPINPVTSARYRKTFTPSGASDDLPDARVLLELVRDHTAKLRPLEPEDSQTVKLAGLVEARRDLVDRRTQVLNQITSLLRGYYPQALELVGDLDTALAVDFLRRWPDLLTLKAVKPGVLKRFYYTHHLRRPELLEQRLALVRQAVVLTPDDARVSVAVLQLRCLLDQLRALRQHVAIFDQEIKTVFAAHPEAALFRDLPGAGPALAPRLCVAFGTIRTLYPDPASFQKHAGVAPVREKSGRSCWTHWRWQAPVFLRQSLVEWAGLTVVYSAWAKVYYQRMKAKGKGHHVILRSLAFKWIRVLWKCWQTRTPYDEAVYLRQLARRKSPNAVAA

SEQ ID NO: 291743 - protein, 345 aa, unidentified
MEIRTIGIDLGKTVFHFVAVNARGQVVVRKKGSRTQLLRFTANLRQCLIGMEACGGSHFLGRALREQGHDVRLMPAQYVKPYVKTNKNDYIDAEACSEAVTRPTMRFVPIKTDDQLDLQSLHRVRERWVVRRTAVINQIRGMLLERGITIRKGRHYIEESLPGILEDADNKLSGALRVLLTQLRMEMQYLHGQIEETDKLIARICGELEQCRRLVAIPGIGPITATATVAAIGNGAAFKKGRGFSAWLGVVPGEHSTGGKQKLTGTSRRGNKYLRKLFVQGAHTVLLQKTKQSSGLSTWLVNLTSRKRPQVATVALANKMARMAWAVLYKGEAYRPPTAAQVKAA

SEQ ID NO: 291744 - protein, 342 aa, unidentified
MTHYAGIDVSLEQASVCVVDANGKIVAEGKVASEPAALLAWFRSLGVELARIGLEAGPLSQWLYAGMTAGGLAVELLETRHVHAAFKTMPVKSDRNDARGIAQLMRLGWFRPVHCKSLAAQETRALLTARKLVQSKLHDVEMSVRGILRGFGLKVGKTTACGFAGRVRELVAGHPTLEVVAAALLAVRATMMRELSGLEKRVRTIARSDARARLLMSTPGVGAIVALTYVAAVDDPTRFKSSKGVGAHFGLTPRKYQSGETDITGGISKIGDASVRAALYEAAHVILTRPIKGCTSLKSWAMRLARRAGMKSAKVALARKLAVILHRMWVDGTTFNAAAAAA

SEQ ID NO: 291745 - protein, 365 aa, unidentified
MHKLNSAATLIQRTTTEAPRDHMYYIGLDVHKRTISYCVKDAAGQVHQEGKIGSTRCELDAWIKTVPQPRMIAMEATIFTGWIYDHLLQHAEKIKVAHPLMLRAIAAAKKKNDKIDAAKIADCLRCDFLPECHMASTAIRDRRRTLRYRSLLVRQMVQMKNRVSGLLLETGVSYNKSRLHKVGYFADLMSTNEEVNESIRPLLKISREHIVRAQRLDYALVSSLERDPLLAERLARLRTVPGVGPITALTWALEIGDFMRFRSIKKAISYCGLCGDERSSADKVMRMPLSKQRNKHIQHVLIEAAKLAPRECHELAMVRERELEKGNPNRATLAVARKMVSYMLAVERRKQDFVPAENFTCTTAA

SEQ ID NO: 291746 - protein, 348 aa, unidentified
MDWTVAIGVDTHKAGHVAVALDRLGHELGACEVEATQAGSEGLLCWARSLGACVFAIEGAASYGAGLARFLSGQAVPVFECERPSRRDRRHGKNDTLDALLAARRLVAGEGLSRLRGGGVRELLRILLIERRSADHARTVCLNQLHALIVTAPPPLRSRLTGRKRAGLVAAAARLRDRASDDVEQRAVIDVLRRLGARAQTLGRELADVERGIEQLVRTVAPGLLAECGVGPICAAQLIVSSGEPNRMHSEAAFAALAGTSPVEASSGPTTRHRLNRGGDRQLNCALHRIALTRTRFHAETATYYESLLARGKSKREALRCVKRVLARHFYRQLRSLPSLAFAERAST

SEQ ID NO: 291747 - protein, 479 aa, unidentified
MTPSKDAFPEPCPPVPTVPEPLVLRPSSSLPLYNPHAAGIDIGEAEHGVAVPPDRSPEPVRRFGTFTADLDVLADWLLDCGVTTVAMESTGVYWIPLFELLEARGVQVFLIDPRQAKRAPGRPKTDRLDCQWLQRLHAYGLLAAAFRPADQVCVLRSYLRHRQMLLTYGAHHIQHMHKALQQMNLKLSQVVSDLTGVTGMAILRAIIAGERDPLTLAQLRNPHCQHSEDEIAKALQGTWRAEHLFALQQAVELYHFYHQQLTVCDQQLQAHLGTCADKSDGQPLPPKPRRHKKANEPRFDARTPLYRLAGVDLTTIEGIEERTALVILSEIGTDMSRWPSVKHFCSWLGLSPQHKISGGKVLSRHVRPGAHRVAVAMRLAARTVQQARTALGAFYRRMRSRLGAPKAITATAHKLARLVYSLLKHGSAYVKQGLEAYESQYRERTVKAVARQAKALGYTLVELAVPATPGNDAVAPATP

SEQ ID NO: 291748 - protein, 347 aa, unidentified
MYPFYLGIDLHLKRTYLVLMNTEGEVIDKRRLKNTEMETYISGNVPKETYAVMEATRNWPFFYDLLNKHVDRVELAHAKGVRMIAQAAVKTDQIDASVLAHLARLNFLPIAYAAPKEIRDLRQHLRYREWLIDERRRAKNRIHAVLAGYNLTSPVTDLFGRAGREWLGEMAEKELRPTSRRVVLETLTMIDQLDDQIKELAKDILLPEDLKPKAELLMSMPGIGRLISAVILAEIGDINRFKSPKALCNWAGLTPRVHKSDEVVRHGRISKQGSRYLRTAMVSAAMTASRISPRWYRVYEHLSRRIGRRGARVAVGRRLLTVVYYMLKRDQPYDEDYEQRRLVEQGA

SEQ ID NO: 291749 - protein, 338 aa, unidentified
MPTDQTGQTYALFVGVDIAAQTAMVATQRPGAKASRSFTIEQTPEGYTSLLRQLQATGFVPGQVLVVMEATGSYWMSLATRLVHEGFAVSVINPAQAHHFAKALLKRAKTDAIDAQTLAQLAMILQPEPWTPPPQIYYALQQRLAQRDDLLNLRQQVRNQLHALVQHPEVIAEVRARMESLLATFESQLTEVESEITAALSQDSAWAAAATRLQSIKGVGWVTAAWTLVTTLNLTSCDTVDALTAYAGLAPMPRQSGSSVWHRPSIGHTGNGRLRTAFYMATLSAAQHNPVIKAFYTRLREVGKPEKVARCAAARKLLHIAWAVVKKDQPFDPNYALG

SEQ ID NO: 291750 - protein, 341 aa, unidentified
MKENTTKFYVGIDVSKPFFDASIMQVQNHQKGALVTAQFANTKEGLNAFKKWSKAAGVKSLNQLFIVIENTGVYHRPIWQFCSEQNIALHIGNAAHIKWSLGITRGKNDKIDSMRLCNYAFKNADELQATSVLNPVFIKLKDLMTARTKLLSQYTSTKSYLKELSPSNDKATQVIMEQAHKAALEGLKKSIGKIEEEIEKIIVADEKIKQNYDLIKSIPGIGHLTAVYIICCTNNFAGKISGKQLASYAGVVPFEHSSGISVKGKNRVHKMANKDLKKLLHLCALSAIKYDTEMKAYYDRKKAEGKNGMLVLNAIRNKLILRVAAVVNNQTPFVSNYKHAC

SEQ ID NO: 291751 - protein, 409 aa, unidentified
MTNTLFVGIDVSKKSNVIRFTDSEGKTLTLFKSPNNQDGANTILEKLKDTLLHTDFSSVIIGMESTSIYADHLAVFLRNDAFLKKWGVKVHILNAKQVNKFKESYPELPKNDNIDTLVIADYLRFGRIAKEVNLDEKYIALRNLTRARFQAAQNLSREKTRFLDTLFYKFSALDSSKVFSDTFGATSIAVISEFFSVDEINDMPLEELADFIAQKGKNKFTDPEQIATALKAAARSSYRLSKTVNDSVNQLLAVRMIGIKSIQQQLKDLDKAIESYMQLFPDILTSIPGIGPVYSAGILAEIADIHRFKNHPALAKYAGITWTRYQSGDFEAANTKLILSGNKYLKYYFLEAANKVRMHDAEFKRYYLTKFKEVPKHQHKRALALTARKLVRLVYSLLYTNRLYIPPTK

SEQ ID NO: 291752 - protein, 316 aa, unidentified
MGKMMIGADVAKKWIDIAIAGDSRVKRIANSERAIEAWLMQIGVGSIGLVAFEPTGGYERPLRRCLRRAKVAFKQVHPNEVVAYRRRRGIKAKTDRIDARLLADFAAEELARRDLESVPEADEILRELASRRRQLQALLHAETCRCDVADSAIVRKSLRAVIAALERSLAAVDKAIAERIASSAHAETSRRLRTFCGVGPAIAETLIADLPELGHLSGKKIAALCGLAPHTRDSGKQHGHASTGHGRPGVRKVLFNGARCAIQHNPIMKAFYLHLVDDNHRLGKVALTAVMRKMLVTLNAMIRDGSDWKHAARPAA

SEQ ID NO: 291753 - protein, 345 aa, unidentified
MKILAMDLGKFKSVGCVYDAESHEHRFCRAATTPAALHDLLTRIEPDRLVIEVGAPAGWVHDLAAAMGLEVQVANPSHEGWRWRNVKRKTDRLDALKLARLSAMDQLPLVHMPAPAVRQMRALLQYRSQVLARRTRIKNTIRSLVHREGRSMPPGAKGWTEGSLAVLSSWACPLEQAGAEELWRGMLQEELAALSSAESHLGRIEAKLDALASGDERVERLRSIPCVGPRTAELLVAVIDEPHRFSTGKQVGSYAGLTPRQYQSGQMDRSGHISKQGHRQLRRMLVEVSWLALRYNEPLRRVYERICGGRRSRRKVAIVAVARKLLIWAWALLRDGSRWRARPAA

SEQ ID NO: 291754 - protein, 422 aa, unidentified
MVLKGVPMALKIVYKICCGIDVHKTFVVACIASTNDKGVTSYESHRFSTYTSGLKTLLQWLLDRNCKDVCMESTGKYWIPVYNILEKDCSIVLAHPKYVKAIRGKKTDKKDAKWIADLFKHDLVAGSFMPPADIRQLRDLMRYRFKLTCFKSSEKNRLQNCLTVSNIQLGNVVSDTFGKSAQAILDKILENPADTSFDLEPLVFKSLKKKLPELRDAIDGYITPEQAGKLKVIKTHYEDLESRKAELEKLILALAAPYQQELAILQTAPGISSDFTAIGIISEIGTNMEAFPSAKHLCSWAGLTPTNNESAGKKKSVRVSKAGCYIKPLLVQCANAVVKSNKHPEIRNRYLRLKKRRGHKKAIIAIARMLLTALYHMLKNGENYNAELYRKSDLPPVDREITVEQALMIARNQGYKIKSATA

SEQ ID NO: 291755 - protein, 348 aa, unidentified
MNLKRIGLDTSKAVFTVHGVDHDEKAVLRRNMRRAEMEAFFAKLPPTHVALEACGGSHHWGRRLAAMGHTVQLIPPQYVKPFVRRGKNDRNDAEAISEAAARPDMPSVPVKSAEQQAEAIVLSARELLVRQRTQLVNAVRGHAAEFGIVAAKTIGKLPGLLEAVAAAETVPATAKQMLAFLGAQVAQLDSQIAELERRMKQQHKANPVSQLLAEVPGIGPVSALSLALTIDPGRFTSGRHFAAWLGLVPKEHSTGGRQRLGGISRAGNERLRQLLVVGAMAVIRYAKPGSKTASAWLLALLERKPRKVAAVALANKMARIVWAMMATGEAYRGSRKVAAPAAGAAAAA

SEQ ID NO: 291756 - protein, 347 aa, unidentified
MRILAIDLAKRTSVACLYNTKTAEAAYRSLPTGPQAFHDLLAEIEPARLVIEIGPASGWIRDLCEAMAIRLQAAETHGPAWSWRRVKRKSDRADALKLAQLSAMGQITEVHVPVKHVRQWRMLIGYRRTLVKRRTALKNRIRAILETEAMDLPSGAAGFTGERLEQLREWAKPMEEAGADELWRGILHEELTQFEHVRERIRSVEARLDALGRAEQRVQQLQSIPGVGARLSEAVVAVLDEPHRFRRARQVAGYVGLTPRQFQSGSMDRKGRITGAGHRTLRALLVEAAWIALRYNPAARAVYEQVRRGSPARKKVAIVAVARRLLCWCWAMLRDGTPWRPPVTTSG

SEQ ID NO: 291757 - protein, 347 aa, unidentified
MKFYITQHPYYCGIDLHARSLYVCILDAAGDTILHREIKALPEPLLDILAPYIGNVVVGVECMHCWYWVSDLCAEHGIDFILGHALYMKAIHGGKAKNDRIDSYKIAHLIRGGNFPQAYVYPPEMRSARDLLRRRTRIVRHGADLKAHVKNTTSQYNLPPNNLNLRYPNAREAMRDRFDDQFVQRNVDLDLNIIAFYNQELSSIECFIEKHAKHHNGNDYHILTSFPGIGRILALTILYEVGHIERFNTVQDFASYSRLIKCKAESAGKSYGTQGNKIGNAHLKWAFGEIAVLYLRGNDKAKSYLLKLQKRMSKAKALSALAHKIGRCVYYMLKNQKVFNEERFLTC

SEQ ID NO: 291758 - protein, 354 aa, unidentified
MKNVKYIGLDVHLSTISAAVLDEQGKLVMESVLATHSAAILDFIHGLRGILQVTFEEGTQSAWLYDLLVRQVQQVVVCNPRKNALLKAGNKSDAVDARKLAELLRAGLLSPVYHGETSTVTVKHLGRSYESLTQDSTRVMSRVKALYRGQAIPSAGQRPYGARREEWLGKLGGAGVQSRARRLYQQLDVLHALRREARQELIGECRKHAAVRLLRSIPFLGPIRAGLLIGRVQTPHRFRTKRQFWAYCGLALETRSSADYRFVNGQLERTRKPVWIRGLNLNHNHDLKNLFKSAATTASARPGPFGTFYQGLLAKGMAPAMARLTLARKMAAITLSVWKKGERFDAQKLKSPQA

SEQ ID NO: 291759 - protein, 337 aa, unidentified
MLDANGKLVMESILETHASTLRDFLAGIRGQLNLTFEEGVAAEWLYGVLQSDVDKIVVCDPRKNALLKAGNKNDRIDARKLAELLRGGQLRQVYHGNRGVRTLKELAHNYLVLTRDVTRVLNRIKAVYRSMAIRCPGQRVYHPRYRQQWLEQLAEPGLRRRAERLYQQLDLLQPLRQQARRELLAESRKHAARQLLEQIPSIGPVRAALLIAILQTPHRFRTKRLLWAYSGLGLEIRTSSDHDFKNGQLQRRRPKQISVRGLNRNHNPELKNLFKSTALSASLRPGAWQECYQRMLAKGIKPAMAQLTLARKIAAVVLTLWKKGENFDPDKLTMQAA

SEQ ID NO: 291760 - protein, 441 aa, unidentified
MSELSRTTPAEPEWVAFAAIDWANRKHFWRLLPAGSQRYEKGELDNTPEAIEVWAANLQRRFGGRPIAVCLEQSRGPLVYTLTKYPHLVLFPVHPTTAARYRQTFSPSGAKSDPHDAASLLDLLVRHRESLRPLQPDTEETRLLHFLVEERRQLVDEKTRHSNRLTAALKLYFPQILDWFDDLNSSLVADLLQRWPTLEELQHAHRGTLRKFFHAHNCRSEERIQERIEGIYQATPATKDASVVEAAVMSTRAAMALMATLRSHIAVFERRIAELVAAHPDRRVFASLPGAGEVLVPRLIVAFGTHRDRYQSAYEMQCYSGIAPVTEASGNSEWVHFRYACPKFLRQTFHEFAAISMRYSTWPKAYYDHMRNDQNAAHHVAVRSLAFKWIRIMYRCWKDGKPYDEEAYMETLRRRGSPLVGALALATSAEWKTIAGFQKLS

SEQ ID NO: 291761 - protein, 280 aa, unidentified
MEQLLKAKKISNNKDDIEKFLSEIPIDDKFEAVLEAGRNWGPMFDTLEEFDSIEKVFLANPYKTRAIADARIKTDVIDSKVLADLLRANLIPSLWIPPKDIREIKNIARFRIYLVRLKVKLKNRIHNIIDRTHLEKPQISDLFGRYGRNWLENVEMPEKERGLLNYHLELYDYVVEKIKEIERWLENLMEDDEDIKLLRSIPLIGKVFAIIIKLEIGDINRFSCPEKLHSYSGIVPTTYQSGKRVYHGRLIKQSNKYLKWAFIEGSVSAIKNSVYFKKTL

SEQ ID NO: 291762 - protein, 346 aa, unidentified
MEHYVGLDVSLKLTAICIVDRTGKIEREGVVASDPETIAAFIKSHAPHVTRVGLEAGATSTWLWTELNKLGLPVICIDARHAKAALKLQINKSDRNDAVGIARIMQCGWYKEVRVKDLDSHAIKALLVSRALLVKIKRDIENQVRGLLKNLGLVIGQAKMNVFAVRAAELAGARPELAGAVEPLLKAREAVGRQIADLDRKVMRLARNVAQVRQFMTAPGIGPITALCFLATIDDPTRFRRSRSVGAYVGLTTRRYASGETDWTGRISKCGDKMLRTYLYEAANVLLTRVAKWSALKAWGIRLAKRSGLRKAKVAVARKLAVILHRMWIEGSEFKWSSKEAAHQPA

SEQ ID NO: 291763 - protein, 449 aa, unidentified
MSKVSPPINGLPVIHERAAGIDIGSRFHVVAVPSTLSDEPVQTFQGFTADIQRMADWLKTIGVETVVMESTGVYWVPVFEVLESAGIDVIVANARETRSVPGRKSDINDAQWLQRLHACGLLRASFRPGRDIAALRAYLRHRERLLDYAAAHIQHMQKALTFMNLQLHHVVQDITGATGMKIIRAIVTGERNPQVLAEFRDVRCKSSIEIIHRALVGNYQPEHVFALTQSLDLYDFYQARVDECDIQIEQALAVLKANKPEPEQPMPKARHRTKQPNAVNFDVRAALYQLIGVDLTQIHGIGPFLALRLIAECGTDLSKWRTAKQFTSWLTLSPGCKISGGKVLSAHTRKSNNRLTAHLRLAAVTVGRTNTALGAFYRRLAARIGKAKAVTATARKIAILFYNAMCFGMHYSDPGADQYEQKYRERVIKQLHRRAAEFGFTLQETQCVS

SEQ ID NO: 291764 - protein, 399 aa, unidentified
MEKLFDIHIGVDVGKFSHHITALGKGAEILVDRPVENKQEALESVLSEIKEYSQRCLLVVDQPGNLASLVFAVADTLDIDYGFITPRSMKKSTELLGLYTRTDRVEAGAIATISQRIPELVCTKKQRESLMAELFVLLNLDRSLTVDITRATNRLHDLLFSVHPPLEATLSKAGLTSKVSLLLLGKYGGPQRLKRSGKRRVTTWIRGQKGCRDHAQELIEACFSALEEQSVTLGEAEVVETIISAGATHLMQMVTQRKLIEKRRDEILSHFPEDAILQTMSGLGAITSATVLTEIGSISEYGSAAELACYAGFAPTVKRSGKTVFSSSKPRGGNRRLKRILYLSAERSIHVCEESAVYYAKKRSEGRCHKAAVMALARRRIDVMYAMLRDMTPYKKENG

SEQ ID NO: 291765 - protein, 431 aa, unidentified
MGLIVPTAMDSEREDQPMPYDWFVGIDWGSQRHQVCVLDCDRRRVGERSIDHDGASLAQLAAWLWTVSAGQPQRVAVAIEVPRGALVEGLLDRGFHVYAINPKQLDRFRDRHSVAGAKDDRRDAFVLADSVRTDQPSFRRLQLHDPQLLRLRELSRAEEALLEDFRRSANRLQDQLHRFYPQMLQLCSSADESWLWDLIDLAPTPAHAALLSEEQVQRVLKAHRIRRVTAQEVLACLQTPALPVAPGAAEAAQAHCGFLLPCLRVLAEQLQACSQQVSALLRTLAETPGEGEGPSDVAIVLSLPGVGRKITAWLFAEAAQPLTERDYQVLRTHGGVAPVTKQSGKRRVVVMRRSCNPRLRHALYHMARVAMQRDAHFSRVYEALRAKGQRHGQALRNIGDRLLRILMAMLRDRTLYDSSRRYSGQIVLMEG

SEQ ID NO: 291766 - protein, 390 aa, unidentified
MYIVGIDIGKRNHEASIMNAAGKQYGKPIRFANSHSGFNKLMDWVKNISGADDVVFGMEATGHYWLALYTHLCHEGYAVHVINAVQSDALRGMYIRQAKNDSRDSFIIAEVIRFGRFCETAVSAPELHALRELCRHRFWIVDSVSDLKRKVIALLDQVFPEYENLFTNTFGKTSLQLLSEYTTPEELLAVDTDKLAETIYTASRGHHGIEKAQEIQNTARNSFGILLASDSIALLIRQYIEQIRFVEKQVDRIDTEIARLLSAFDNQLTTITGIGPTLAATILSEIGDIRKFASPGKLAAFAGIDPTMKQSGNFVGSHVHMSKRGSPYLRRAIWLAATIAAFKDPSISVYYQRKRSEGKSHLTALGHVSRKMVNIIFAVLRDNTPYSPAI

SEQ ID NO: 291767 - protein, 412 aa, unidentified
MEVIVERAAALDVHKAQVTACVRVPGKGGARVQEVVQFQTTVRGLLTLRDWLAAHRVRQVAMEATGVYWKPVWAVLEDDFELLLVNARHVKQVPGRKTDVSDAAWLCQLAEAGLLRASFVPPKPIRQLRQLTRYRKAQVKERQREAQRLHKALEDTGIKLDCVATDILGVSGRAMLDALVRGTTDPEVLADLARGKLRKKIAALEEALEGRFEPLHALLVGSILAHLDFLDEQIARLSEAIEEQLRPFKPAVELLRSLDGIETRTAENILAEIGLDMSVFPSAAHLASWAGQCPGNDQSAGKRRSGRSRKGSKWLNDALKDAAMAAIRTNDSYLQAQYQRLRPRIGHGRALGAVKHSIICTCWHMLQTGELYRDLGGDYFRRRDPERQTRRLVAQLERLGHKVTLETLPEAA

SEQ ID NO: 291768 - protein, 438 aa, unidentified
MLPTLNVHAGGIDAGSTHFFVATPDGKVTSFESCTPDLYRLRDHLLVAGVTTVAMEATGVYWLALFAVLEAAKIEVCLVNGAHVKNLPGRKSDVQDCQWLQELHAHGLLRKSFVPAEQIRALRSYSRLRDDHIRTSAMFVQLMQKALDLLNVKLHTVISQINGVSGLAVVRAILQGERDPAKLTDLCDVRILKKKRARVERSLHGLWQEEHLFALKQALAGWEFCEAQVKECDAAITGQLAVLTRDLQLPEVKGPRPKSGRHHVLGVPQLHEQLLALSGGQDAAALPGFTDTSWLKLLSEVGTDLARWPNEKAFCSWLGLSPGKDQSGKKNRRARHRPKTTAGQIFRLAAQSVGRSSYLALGGFYRRLKARTNAAVATVATARKLAVLYYDAMRNGLAYVERGLEAYEKADRERQQRRLEKRAAEMGFALTPIHAQTI

SEQ ID NO: 291769 - protein, 430 aa, unidentified
MKSNTQNAKIEAITVKTLVLGIDVGSETHYARAFDYRGIEYSKKPFKFSNTEAGFVTFKEWILDLKEKHEKDKVVPGMEPTGHYWFNLGKFLQDNEMKPVLVNPHHVKKSKELDDNNPTKNDRKNPKVIAGLVREGRYMIPYLPDGVYADLRTASNIRFQLQAELTRIQNRISRWFNIYFPEYKTVYGKPDAKSGMLILKQAPLPEDILTLGIDGVNQIWRDAKMRAVGKARAKTLIEAAEHSVGSKEGAVFARMEIRMLLEDYESRNIRLQEVMTLIEELVNQIPMAEKLLGIKGVGIKTVPGFLAEVGDISRFNNPKELQKLAGLALVENSSGKHKGKTTISRRGRKRLRYLLFEVAMSLVAKNPEFRELHNYYTTRKLNPLKKMQSLMAVAAKLIRVFYAILTKGVDYDPKKMVGDIKRPAVYLPAA

SEQ ID NO: 291770 - protein, 404 aa, unidentified
MVKYHIGIDVSKRKHKACIHNLAQDSYSGIFSIEVNHQGFEKLINTLEKLSTNKEDFLIGIEATGSYGDTLSYYLLSRSYKVVEINPYRANQFRKAQGKKAKTDSIDARSLAAQLALGNHKVLAIPDPVLDNLKELTRFRADMVKDRSALVNQLHETLSKIFPEFATVFSQLDSPSSIALLIAYPGPGYISRAGEAKITQILFKVSRGMMGKAIAESLIAASQTSIGVLQRQPALTTKVSILGERITSLTAAIKRVEKEVADLFHKLPYKPEDFPVGDISSLATLISEIEDINRFHTLKQFLSHYGWCPQSYQTGSYNREHPRMSHAGNSYVRRVIWMLSIVAIRNVPRYRDYFQRRVNEGKAKMHVIVAVARKLLSVLYAILKKGIPYDPDWEVNRHFAMARP

SEQ ID NO: 291771 - protein, 353 aa, unidentified
MKTYYVGMDVHRATIVIAVLNGAGKVVMESVIETGAERVRAFLKQLRGKVYVTFEEGTQANWLHDVVRPLVTEVVVCEPRHNKLLQSGNKNDRVDARKLAELLRNRALKVVYHGDNGVRTLKELVRTYDCLVSDTTRVMNRLKAIFRGRAIACAGHEIYRQDRRQQWLAKLSEPGAKQRAGFLYEQLAALKPLRHKAKLAMVKEVRRQPAYPWLMSVPQLGAVSVAQLIAVVGTPHRFRSKHQFWTYVGLAVVTSSSADHEIVAGMLRRSRKPLATRGLNRNHNHVLKRVFKNAATSACYSGPFKAGYDARVQRGMAPSLARLTIARQLAATTLAIWKRGEKFEPERKKEQTA

SEQ ID NO: 291772 - protein, 345 aa, unidentified
MYYAGIDYHKRYSVVSIQDQSGVVMREMTVQHNSMQGFQRVFSGVPGDIAVVYECGLNWSWLYEVLEKITAVKQIVLANAYRVRLIAETQIKTDKLDARKLAMLLRLGAIPSCHIPSREIRMRKDVLRQRAYWVRRRTGLRNRVHRIIERQHDLTMPQVSDLFGKKGKEALRKAVLPEPDAMLLTQNLDVLDQLDTVIKADEQLIQSESKPDKTVDILSSMPGFGLIISSIVATETDNVDRFLRCERYTAYAGLAPTTYSSGGKTYNGRMMQGCNKWLKWAFIEAAWVAVGCSAYFGGLYRQHRSRGKKASIAITIVARRMCRIAYQLLKEQRCYEERTLSPVAL

SEQ ID NO: 291773 - protein, 381 aa, unidentified
MKQDNKAKQNKGNEVSVEAPQDTCDLGRRRWKVQRVGLTVGLDVGDKMSHYCALNEEAEVVERGKLKTTPAALHPWLEALPAGTRVVLETGTHSSWISRLIEQAGQDALVAQPRKIPQIYRSKRKNDRRDAEKLARTGRLDPNSMGPIGHRSVEQQADLAVIQARDALVQVRTQLINTVRGLVKGTGERLMGCSSRSFARQVEEQIPQRLRGALLPLVSQITSLSEQIERYDAEVEKLAQKKYPETELLRQVSGVGPVTSLAFVLTVGDRWRFRHSRDVGPFLGLVPEQDESGESSPQLGISKAGNTYLRRLLVGSANYILGPFGPDCELRRWGKKLSERGDKNARKRAKVAVARRLAVLLHKLWVSGEVYEPLPEKRAAA

SEQ ID NO: 291774 - protein, 430 aa, unidentified
MSYRIAGIDVHKKMLAVVVSDVEVEGEYKFERRMFGSNPEQLRSLATWLLEQEVEEVVMESTAQYWKPVWEALERHWKPLRQKQEGASRRSGTLHLAQAQSNRGRRGRKRDFPDAERLVKRLVARELILSFVPDPEQRLWRTVTRRKYQLTRDRVRLQNQLESLLEEIHIKLSCLVSDLLGVSAQRMLKALADGETNPAALAALADRKLRATSEQLCDALGACTDLKPVYRRLLKMVLEQLQFLDQQIGQLDQEMAMLLNQHQDAVTRLAEVPGLGVDSAQQIIAEVGPTAETFPSAKCLSSWVGACPGDDESAGVNYSHRSPKGNRHMRRVLNQTANAAARTKGSIFEIVYRRCVTRLGHNQAIGAIAHRQCRLIWLILHQGVRYEERGPAVTKQSKQRRTARMIRQLRTLGYRIALPNPQHSSPARVQ

SEQ ID NO: 291775 - protein, 346 aa, unidentified
MENDTLVAVDIAKEVFEVAVSDRPGRVALRKRLLRDRFAAFFAQRPQATVVMEACGTAHYWGRRIEELGHVVVLLPPQYVRPYVVRNKTDRTDVDALLEAFRNEQIRPVPIKTVTQQVIATLHRLRSGWLADRVRSINTLRGLLRELGFFIPEGRQHVLPEAWEIIQDHRRGLPDAIKPSVTALCEEIASLSTRIEEVEAQLEALARQIPILARLRSVPGIGLLSATALYAFIGDPSRFPSGRHMASFVGLTPREYSSGLRRRLGRISKRGDAYLRLLLIHGARSILYHAKRMKHRDRLGAWAVRLERKVGHNKAAAALANKLARITWAVWKNDRNFEPVFEPQAT

SEQ ID NO: 291776 - protein, 465 aa, unidentified
MLFLTVLRTQQRTGGGNGARAVARLIGNAGIRHIRQPLQPVFGLDIHDLHALGTAGGLGRQQRRMHQQSAGLVGQQRQLPVLRQRQDLHQRELVAVGAGELAAVRGGGVGTQRNPGHPAILEGEQQAAAVIAGQAQKDHILSRVHAQEASAKVLFDFLSKNFPDGEYHAVYESGFSGFSTYYQLKEYGIHCVVVHAADVPSTQYEQVMKTDKIDAGKLARALRKGDIKPIYIRERENLDDRAVVRLRKTIQKQLSGYKTRVKHLLHTNGVKLPARFDKPGTHWSRAFMNWLKDEVVLLSSTRLSLDLLINQVESIRKNLLEATRVMRILAATDKYKANYELLLSIPGIGFNVAMCLLTEIYDFKRFGNENCFAHYLGLVPTCHDTGDKHSTGGKTFRGNKLLGPMIIEACWVAIHKDYGLSQAYCSYKQKMKPQLAIVKVARKMSNIIFSVIKNGKKYEPYKWEE

SEQ ID NO: 291777 - protein, 411 aa, unidentified
MELLYDRVAGLDVHRDSVAACVRLPGPRGGAVTEKERFKTTTAGLGRMAGWLAERQVALVAMEATGVYWKGVYYALERDFAVWLCNAHHVKNVPGRKTDMSDAEWLADVAAHGMVRPSFVPPPPIRELRELTRYRKTQIDARAAEIQRLEKVLQDAGIKLTSVASKVLTQSGRAMVEALIAGERDPARLAALAKGKLRPKIAELTEALAGHFGSHHAVAARRILDHLDFLEVSITSLTEQIDARTRPYAAVSELLLPVPGLDRLTIDVVIAETGADMGRFPSPAQLASWAGLCPGNHESAGKRRRVGTPPGNQWLRRALVEAARAAARTKGTYFAAQYRQIARRRGPNKAAVAVAHSLLDLIWHLLSTGECFQDLGDDFFDRRRDPERETRRLVHQLEQLGYSVTLATAAS

SEQ ID NO: 291778 - protein, 451 aa, unidentified
MEKKNVKMDVINPNCAGIDIGSRSHFVAIGQELSDVREFGVYADDLVSICHWLDEYSITSVAMESTGSYWQNLYVELIRHGFDVVLANGKFTKNIKGKKTDVKDARWIQKLHSIGLLTGSFLPDEQTEKLRTYCRQRENWITLGAEATHKMQKYLKLLNFRLDVVVRDVTGLTGLTIIKDICEGNLDPESLAKHRHYNCRKTEEEIAKALKGNNREDFLFGLKQEYESYNFYQKKITECEKMINQFLKQQINTDPTKKKLKAPDKKHKRVNKNAIKGIDLNQASYQYFGGVDLMSIEGVSHSTILSIISEVGPDGFKEFATAKQFTSWLRLAPNNKISGGKLLSSKTPKGSNRLKIALRNSANAIGNLKDTHLSNFFKRVCYKKGRTVAVSATARKLAVIIWNMVVKQIPYKPPIEYLFLDEKRRLGLVTRIRKQIDKFALTNADLGFTTN

SEQ ID NO: 291779 - protein, 372 aa, unidentified
MATVRFIGLDVHAATIAVAVAERHGEVRALGVIPHTPDAVRRLVRQLGPPATLRCCYEAGPTGYGLYWHLIALGAHCDVVAPTLVPVKAGDRVKTDRRDAEKLARCYRAGDLTPVWVPDAAHEALRDLVRAREAAKKDHLRARHRLGKFLLRQGRQRPATLKQPWTAGHLAWIRGLHFEHPAQQTVLVEYLHEVEHVAARLERLERAILDAIAQVPAEMAALIQALQALRGVATVTAVTIVAEIGDLTRFPNPRQLMAYGGLVPSERTSGPHRRQGGITKTGNAHLRRVIGEAAWAYRYRPAVRAPLRARHAGLNPAILAIAWKAQHRLHHRYRQMTARGKPHNQVITAIGRELLGFVWAIAYQVALQRAAA

SEQ ID NO: 291780 - protein, 349 aa, unidentified
MTMLAEVVDVVIGVDTHKHTHTAAVIDATTGAVLDERTVNTDPDGYAELVAMADRHSGLRAWSIEGTGGYGAGLTRHLNRGDELVIELDRPNRPARRNGAKSDPLDAVRAGREALARRHLAHPRTGGERAALSVLLAARRSAVDASTVAQRQLHALVVAAPEALRDRFRGQSTPNMITTATRLRRNSSWDLETTTYASVLRDLGRRIKTMQAEAATHERSIQGIVRSWRPDLLDQTGVGPIVAAVVLCAWSHAGRCRHEAAFANLAGVAPIPASSGQTTRHRLNRCGDRQLNRAIHTIALTRLRYDPATRTYAERRRAEGKTDREIKRCLKRYIARQLYRQLENPPTPT

SEQ ID NO: 291781 - protein, 334 aa, unidentified
METLYFLGIDISKKKFDAALTIDGKHFHEAQIENTSAAIQLFFRNLKKQLSSLNGLIVCLEHTGIYSMPLLDFLVKNKIKVSVEPALQIKQSQGMTRGKNDKVDAKRIAIYASKNRESLRFWQPQRDCIQRLKALLALRERLVKTKVQLEVPINESAEFVASSILKEVLTHCRGTLRALQSDIQRTEKEIEAIVWGDEHLSQQCKLATSVPGVGKITALNIIISTHEFSRIQDAKKFACYAGIAPFEHSSGSSLRGKTRVSKMANMTLKKLLHLAAMSAIQCSDELKIFYKRKVDAGKNKMSVINAVRNKLISRVFACIKNKRMYQKVYQHVLV

SEQ ID NO: 291782 - protein, 348 aa, unidentified
MAHFVGLDVSVKETSVCVVDAAGTVILEQKVLTEPADIIALLTSLDVSFCRIGIEAGPLSQWLVNVLTAADLPVICVETRHMKALLTAQQINKTDRNDARGIAQMMRVGLFKPVHVKTLVAQKQRMLLTSRKLLQRKLLDLECELRGTLRNFGLKVGVVSGFRYEARVRELVAGFPGLAAIAEPLLSVRRVMRQQFAVLHKMLLDVVRGDPVCRRLMTAPGVGAVVALTYRATVDQPQRFVHSRAVGAHVGLTPKRYQSGETDYDGGVSKCGDALLRTMLYEAAHSLLIHSRKWSWLKAWGVRVAQRRGMRRAIVAVARRLAVVLHRMWVDGSEFRWSKDSTAVPAIA

SEQ ID NO: 291783 - protein, 391 aa, unidentified
MICVGIDVAKDKHDCFILSSEGEILADVFTIPNNSVGFDTLLQTIRSCTSPQEKIKVGLEATGHYSYNILGFLLDNGLTTYVLNPLHTNLYRKSLSLRKTKTDRIDARTIATMILSRVDLKSYTDLSYHNEELKSLTRYRFTKVNERAKLKQSVSRLVTILFPELEKLVPSLHMASVYALLSEFPGAHQIANSHLTRLKTVLSNASHGRYGKEKAIEIREAARNSIGSRRRAASMELQHTLLLLATMDVVIEEIEVQIQEILEEIQSPMTTIPGIGFRMGAMILAEVGDFSQFSSPDKILAYAGLSPSTYQSGQLTNAHSRMEKRGSKYLRYALFNATKLVCQHNPIFTDYLSKKIAEGKHYYVAISHAAKKLVRLIYAMELSGESYRKVA

SEQ ID NO: 291784 - protein, 281 aa, unidentified
MQVTTIGLDLAKNVFQIHGITEADEVAFNRPLRRAQLLPFFSKIEPCLIGMEACSSAHHWARELTKFGHEVRLIPPIYVKPYVKRGKSDAIDAEAICEAVTRPTMRFVAIKTVEQQSSLSVHRARSLLVRQRTQLINGLRGMVAEFGVYIARGLARIIGFAEDILAGEVLDLPDIANEVIHNMCEHLMALHARVRWYEDRLKQVAKEDVRVRLLRTIPGVGAVTASAIIASIGDGHQFSNGREFAAWLGLTPANKSSGVKRSSGASQRWVINTYDPCWSLA

SEQ ID NO: 291785 - protein, 392 aa, unidentified
MYIIGIDIGKNHHEASIVSPKGRQIGHSLRFATTHKGADSLISFIFKNIGDSPCVFGMEATGHYWYPIYSFLKFKGYTIYVSNPIQSDSLRKMYIRQTKNDSIDSFLIAEVIRFGQFEATSMADETILAMRQLCRYRDSVVSSRTEIKLRISTIMEQIFPEYEKQFSSLWLGTSMGILEKYLTPENIQNAPIDELFEIIKDKSHNKLTIKKSVSIKDAAADTFGIKIAQDAFAFQLKQLIDRLNFLNEQLEALDHEILSYYEKFDCYLHTIPGIGMIAAATILAEIGDIHRFKNSSALVTFAGIDPTVRQSGEFNSIHNHMSKRGSPYLRHAIFLAATTCSFHNSPLNAYYKKKREQGKHHLTATGAVARKLTTVIYAVLRDGKPYEPKSFC

SEQ ID NO: 291786 - protein, 316 aa, unidentified
MKTEVFVGIDVSKQHLDVAVRPQGRHFIIPNDDRGIKQLLKRLTALKPQLIVLEASGGYELLATAALAEAQLPVALVNPLAVRQFAGATGKLAKTDKIDAQVLAHFAEAVRPEPRPLPDQEQQLLKAALQRRVQMVKMIGQEKNRLEKTFIPGLRQDIQAHLAWLQQRLAQLDRDLNDQIRRSPLWRDRDRLLQTIPGIGPAVSRAVLAQLPEAGRLPGKKAAALVGVAPYNRDSGRFRGKRMIRGGRSYLRRMLYMAAVVAARWNPVIRNFYQRLLAAGKPKKLALTACMRKLVLILNAMLKNNQPWNQFITQVP

SEQ ID NO: 291787 - protein, 373 aa, unidentified
MNTIYIGVDFHARQQTICYLKTETGELVTCELKHQDKVAVRAFYAQFPLPVIVGLEASGYSPWFERLLEELRCEVWVGHATEIRRRARWRQKNDRRDAELILDLMLHDEFPRLHRPSVQSREVLRMLRYRQKLIKIRTMSKNSLQALALQSGVARGSRLFTREGKQELAAALMSPVMQWQREHWLQLLQPLDQQLLETMVWCKAASKDDVEITRLRTHPGIGLLTSLCLVHTLQPVSRFRNTRKVAAYAGFDPIERSSAERKCFLGISKAGSRLLRYLLVEATQTAVRKDEDLKRFYLRLAARRGRPKAKVAAARKLLIRAYIMLRDEIDYAEFRRRAVAARLARRSHRPNMPEVLIGQPASTERQEPLLTEK

SEQ ID NO: 291788 - protein, 392 aa, unidentified
MIFIGIDIASKKHDCCAINAHGMVLAPIFTFENNAEGFGDLLANIKSCERDVSKVRVGVEATGHYGSNLISFLLSKGFDIVVFNPLQVDMYRRAGSLRKTKTDKADAKFIAQMLLSSNAENSSYTPNQPDIADLKALNRHRSRLKGIRARLRTSVSRLVTVLFPELCEVVWSIHSTSSYVLLLEHPTAAAITDCHLTKLSNLLVASSRGKYGKEKALEIKNLAAKSIGKNSRVIGFELQQTIRLINNIADELDVLDGEIKALMLKINSPITTIPGISYNLGSIILSEIGCIENFSSPSKLLAYAGLEPSTYQSGNYSATKTSMVKRGSPYLRWAILQAARHVSRFDPTFGTYAEKKRLEGKHHFVVLNHVGRKLIRVIFHILKHNQVFEAAA

SEQ ID NO: 291789 - protein, 395 aa, unidentified
MIAVGIDVGKSAHEACFLDPSGHEVAKPLRFLNTAAGVGQLQERLQSLAEPATIALEASGHYWLGIQRRLATVGYAVQVINPLQTDAFRTTGIRRTKTDRRDAFILADLLRIGRTRPNYVPDDTILQLRELTRFRWGLADQIGDAKRRLLTVLDRVFPEFAAQFSDPFGASARELLDRAAGAADFAALDLAEVTALLEQASRHRFGAAKAQTLHQCAQDSLGLAALGASSQVEVRSLLAQLALLEQQVAEVDQAVAELMATIPQHLTSIPGVGPVLAATILAELGDVSRFPSVPALVAYAGLDPSVFASGQFQGRRQHLSKRGSPYLRRALYLAAHSAHPRNPDWHAYLERKRKQGMSYRAALIAVARKLLICVYTLLRENRPFEVREVTHEPSA

SEQ ID NO: 291790 - protein, 353 aa, unidentified
MKTYYVGMDVHRASIMIVVLNGAGKVVMQSVIETGAERVRGYLKQLRGKVYVTFEEGTQANWLHEVVRPLVTEVVVCDPRHNKLMQSGNKSDRVDAQKLAELLRLGSLKAVYHGDNGMRALKELVRSYDCLVSDTTRVMNRLKAIYRGRAIGCGGHDIYRQDRREQWLEKLTERGAKQRASFLYQQLGALKPLRHEAKRMMVKEARRQPAYPWLMSVPQFGSVSVAQLLAIVGTPHRFRSKRQFWTYVGLAVVTRSTADHEVVNGVLRRSQRPVSTRGLNRNHNHLLKRVFKNAAQGACHSGPFKAAYELRVTQGMVPSLARLTVARQLAATTLAVWKRGEQFNPERMKQQTA

SEQ ID NO: 291791 - protein, 346 aa, unidentified
MEHYVGLDVSLKLTAICIVDRTGKIQREGVVPSDPEAIAAFIESHAPHVTRIGLETGATSTWLWTELNRLGLPVICIDARHAKAALKMQINKSDRNDAVGIARIMQCGWYKEVRVKALDSHAVKALLVSRALLVKIKRDLENQIRGLLKNLGLVIGPAKMNVFALRAAELTADRPELAAAVTPLLNARVGIAQQIADLDRKVMKLARNNAQVQQFMTAPGIGPVTALCFLATIDDPRRFRRSRSVGAYVGLTTRRFASGEIDWTGRISKCGDKMLRSYLYEAANVLLTRVAKWSALKAWGIRLATRSGLRKAKVAVARKLAVILHRMWIDGTEFKWSSKETAKQPA

SEQ ID NO: 291792 - protein, 370 aa, unidentified
MNEDSVVYVGVDAAKAKHAVAIAESGRGGEVRYVGEIETTPAAVERFVRKLARKYPRLHFCYEAGPTGYELHRQLVALGHACEVVAPSLIPKRPGEHVKTNRRDATSLARLLRAGELKGIWVPDAVHEAVRDLVRAREAAGEDLRKKRQQLQSFLLRHGRTFTGRKAWSPAHSRWLAAQRFEHPAQQIVFQDQVDVIADASKRLERLDAQLAELVPTWSMAPVVAAYQALRGVSFVVAVTFVSEVGDVRRFDNPRQLMAFLGLVPSERSTGESVRRGGLTLAGNRRARRVLVEGAWSYRHPARVTETILVRLEGLPKEVREIAWKAQTRLCARYRRMMAAGKKAPIVIAAIAREMAAFLWAIGRQVEPVR

SEQ ID NO: 291793 - protein, 346 aa, unidentified
MKKIFIGIDFSKEKFDATVIKAVGVEECAERKHEVFDNKVSGFRRLLRWVKSVADEQDTSLWLFCGENTGGYSKALCNHLYGSGYDMWLENALSIKRSSALQRSKSDKADSGIIAEYAMRNYDQMRLYRPLGKNLERLREVFLYRHNLVKLKASMTTRKGEKKLTQEKSDISRFMAQSSKHLITEFNKKIKECDMRIEKIIHEDEELLRNFEIISSIPGVGTQNAVCLMVYTDNFNRFDYNSRKIACYYGVAPFGRQSGTSVNTPPHVSPFANKLIKTLLSQAALASIRFCPHLAMYYHRLIESGKKSPVALNNLKNKMLHIITAMVRKGEKYDPEHDYYAAIKAA

SEQ ID NO: 291794 - protein, 356 aa, unidentified
MEQLTTVGLDLAKDVIAACVLDVHGAVIERRVLRRGAFERWAEQLPASNVAMEACGSAHYWGRWFAARGHTAQLIAAEFVVPFRKGGKNDTADAEAVAIAARQPTMRFVPSKTVDQQAILAWHSVREGWKEERTALLNRVRGLLAEFGIVIGRSSERLLTALPALTEDSRLPDAMRALLLEAREQFAALHARLARCDAQIAAHARNSPAAQRASELLGVGPVTASALAATVPDARVFKSGRQFGAWLGLTPRQHSSGGRTRLGRISLRGNVYLRTLLIQGARSTLQAAINAEPSRANRLQRWIIALYGRKGYYKTLIAIANKHARILWAMLAKDERYDAAAWQRHPMHQPPLAGND

SEQ ID NO: 291795 - protein, 417 aa, unidentified
MRFYTQAHRFYAGVDLHARTLAVCILDQAGAVVFQGNLAADPRAFLQAVAPFRAGLAVACECMFAWYWLADLCAAEGIPFVLGHALYMKAIHGGKSKNDQLDAHKIAILFRGGMIPQAYVYPKGMRETRDLLRRRMFLVHKRAEAVTHIQITNSQYNLPVFGKKLVYAGNRTELAVAERFTDPSVRKSIEVDLALIDHLDASIGELELYLTRTAKVDDVHTYERLKTIPGVGPILALVLLYEIHDMRRFDAVGQFLSYARLVRPEHASAGKKVGFGNKKIGNAHLRWAFAEAVCLFLRQNEPAKKWQAKKAKKHGKGKTLAILAAKLGRAVYHMLRKEQPFDAARFWGTPPAASAAATASRTGEPASWGREPEAPGSRPQTPTLLPSLCSVPREEAHAHRPGRRSPTPNGGASGRAR

SEQ ID NO: 291796 - protein, 336 aa, unidentified
MNKIKMVVGIDVSMEDFHACINVRSDDGSVKIKGTRTFQNTSVGFKELIQWVLGRKKDDCTLSFVMEATGVYYEDLADFLYSSKEQVSVVLANKIKNYAKSINVKTKTDKVDSKIIADFGMERKLDTWKPMSPVYKESRDFCRELLSIKKEMTRAKNQKHAMIKSHGKSEIILNFKNDQITFYENSIKNIIKELRRIVEMDPQLKEKLNKVQTIPGIGFETAVILASETNGFELFKSIRQLVSYAGLDIEFKESGKFKGKTRITKRGNSCIRQALFMPALAATNHNESIKALYERVCERNPNIKKKGVIAGMRKLLIFAYVIWKKDEEYDKSHVWC

SEQ ID NO: 291797 - protein, 423 aa, unidentified
MIFGKDNITITFGFRSHGEVDSDRHSGRVRLLPPTLEATMQTVADRPEAATAIRTDLGAIFVSLELSRSTWLITSLSPDGGEKMSKHVVRGGEVAGLLERFAQLREKTRARTGKVFPFVVIQEAGLDGFWIDRALQNEGIESHVVDPASIATSRRRRRAKTDRIDGEALVRALLAYKRGEPRVCAMVKAPTPEEEDRRRLCRERKVLIAERVRHVNRVKGLLFSQGISGYEPLRRDRRERLVTLQTGDGRLLPDHLKAQVRRELDRLELLLEQIKAVEADRDVLLAAQQAPAAMLLDIKGIGPEFAAILWSEGLFRHFDNRRQVASYAGLAPTPWQSGSVDREQGVSKAGNPRLRTTLIQLAWLWLRHQPQSALALWFEERGRRNGGRLKKTTIVALARKLLVALWKYVTAGVVIEGAVMKVA

SEQ ID NO: 291798 - protein, 349 aa, unidentified
MRIIIGCDFHPGYQQIALMDMETKELVEKTLSHENLEEVRAFYAALLRPVLVGVETSGQSQWFEGLLTELGHELWIGDAKKIRKAADRKQKTDRRDALLLLQMLVEGRFPRIWVPTASERDVRQLLLHRSKLVRMRTQVKNQLQALALNQGVRRKWKLWSEAGRKQLQASAMLPWAARRREELLVLLEQLHASIEELDRAVAQEAHTRPAARRLMTHPGVGPVTALAFVLTLGPPSRFARGKQVASYFGLIPSEASSGGRQRLGHISKQGNSFMRWLLVEAAQSAVRHEPNLRRAYLRLAHRKCRALAKVAIARKLAVRLYWMLRGERDYAQLIQGSCAGAPGSSCGRG

SEQ ID NO: 291799 - protein, 338 aa, unidentified
MHHTVIGMDIAKQVFQLHRVDPQSQKAERIKLKRSEVLPYFVQHPPALVAMEGCGGAHYWARELRKLGHTVRLLPAQAVRPFVLRNKTDAADARAIWVAAQQPDIKAVAVKTEHQQSVLALHRVRSQLMKVRIMHTNAVRGLLMEFGQTLPEGYGALQKTLPVCLASLDGQLPEMLLQTLREQWARVQGLDREIAVIELRLKQALSESAACKAIAEIPGIGLLSATAAVAIMGDPGSFRSGREFAAWLGLVPRQTGTGGRIRQLGISKRGDSYLRTLLIHGARAVVARRQQLPWISGLLARRPYGVVVAAVANKLARILWSVLATGRRYETAALSAVG

SEQ ID NO: 291800 - protein, 410 aa, unidentified
MEVHFSNCAGLDVHKDTVVACSRRVIDGKIVREVRTFKTTTSDLLKLSEWLAGLGCTHIVMEATGVYWKPVWNILSDGDFELMLANAAHVKNVPGRKTDVNDATWLADLLAHGLIRGSFVPDTQTQEQRGLLRTRKQLTRERTSHVQRLQKTLEEANIKLDSVISDIIGTSGRAMIEALIAGETNPARLAQLAGTRIKASPATLSEALRGRVTKHHRFLLRLHLEQIDTLERAIAEIDKEVEANLDPFRPLIPVLTSIPGIGELAARVLLAEIGTDMSRFPTAGHLISWAGLCPKNDESAGKRRSTRMRKGAPWLKTTLIQCAWAATRKKGSYLQAQFHRLRARRGAKKAVGAVAASILTAAYHMIANGTFYQDLGADHFERRSKTTQIKRLVAKLQSLGYEVEIKPLAA

SEQ ID NO: 291801 - protein, 317 aa, unidentified
MNYVGIDISKEKFDVAISENESYKHYVFTNDTIGFKQLIKLLNKSKHWCIMEASGPYYQKLAMFLHANEIELSVVNPLVIRRFCQMRLMKAKTDKKDAIMIAEYGKTEQPKAWIADQAHHLELKQMQAFLDQLDKSRTNYIRQLEAFSQSPNMHKAVKKGLSKMIKTVETQIQEIEDKMEEIIRQYHNEMFEHIKSIPGVGKKTSLLLVVISAGFTKFENAKQLCSYVGLSPRIFESGSSVKGKVKICKMGMSKVRAKLYVCSWSAIKYNKACKDLYTRIVEKGKPKQVALIAVANKLLKQAFVLATRKEFYREISF

SEQ ID NO: 291802 - protein, 340 aa, unidentified
MVYGAIDLHSRFRQIRIVTADGAVVRERRVVTSRSPLRNAFAAVGAVRIRVEASTESEWVAQVLEAAGYEVIVADPNSASMDGTRHRRIKTDTRDVAALSDACRLGVFRRAHRVAAAQRTLRQELAVRRQLVRRRTGLIAHLRARLRQDGFRLGSGSRTTVHERVARLERPASLRGSLTPLLETLAALTPIIATTTRRLTTTANADPVAVRLHTVPGVGPLVALTDRATVDVVTRFPSAGHVSSALGLVPREDSSGERRQRGHITKVGPSEARTMLIQAAWTCWRSRTARTTPLRQWADRLAARRGARIAVVALARRLSRILYAVWRDDTVFRVTPARAA

SEQ ID NO: 291803 - protein, 473 aa, unidentified
MARAARRQGGSQLRKGHSKGARSAQLEQLNLNAAGIDVGADAHWVAVPPDRDERPVPCFGAFLADLYALAAWLRQGPIETVVLESTGVYWIALFEVLAERGFDVKLVDPHTVRQVPGCKTDVKDGQWLQELHTSGLLRGALRPEDEVCGWRSSLRQRRMLVAMASRAVQHRQKALEQMHLKLTEVVSDSTGKMGMTILRTILAGARAPQWLATSRDKRCKHEQGTIAKALTGHWRAEHLLALQQVVDQYDFLAQQLQACDGHIAGCLQACVPDVETDAPPSPPARTWRASRSNPLRRDVQASLEAMTGVDLPPIDGIDSLTALKVISEIGLDMTRWPTSKHCAAWLGLCPGNKLSGGKRYRMRSKPSANRAATALRLAAQGVANSHSALGAYYRRMRARLGAPKAMTATAHKLARLVYSMLRYGTAYVDAGQQAYEQKYRDRVLTNLQRKARVLGYQLVHVADPGSAQAAATL

SEQ ID NO: 291804 - protein, 355 aa, unidentified
MNVKKYIGMDVHKETISIAMMTGDGKLVMESIIETKASTILQFVQGLQGDLHVTFEEGTWAAWLYDLMKPHVRELLVCDPRKNALLKDGNKSDKIDARKLADLLRGGYLRSVYHGENGLRTLKELARSYLTISQDLTRVMNRVKALYRSWGIACGGQQVYAPRHRAEWLNKIEEAGVRRRAEFFYQQLDAVRGLRQAVRRDLVAESRQHGATKLLRQIPYVGPIRSALLVALIQTPHRFRTKRQLWTYSGLAIDTRDSAQYRYVAGQLQRSKKPQQLRGLNENHNHDMKAIFKSAAAMASRREGPFQDFYQGLLVKGMKPAMARLTLARKIAAITLILWKKGAHFDAEQLKPQAA

SEQ ID NO: 291805 - protein, 456 aa, unidentified
MSRKRRSSRKTGTPVLHSLNPNAAGVDIGATEIYIAVPADRDPQPIRHFSTFTEDLHAAADWLKSCNIETVAMESTGVYWIPFFQILEARGFQVFLVNAHHVKNVPGRKSDVSDCQWLQYLHSVGLLRGSFRPEQEVCTVRSILRHRDGLVQMASSHVQHLQKALDQMNLQLHHVISDITGMTGLAIIEAILAGERNPQLLAKLRDRRIKANEQTIAKSLIGDYRREHLFTLSQSLAAYRHYQELIGACDKEIEQYLETFESKANPPEDPKWKSQDGQKTRGGRPAFDLQSHLYRIFGVDLTEIPGVHTLTTQTLLGEIGPDLSRFANAAAFTSWLGLCPDNRISGGKILSVKTRKVKNRAATALRMAAQSLYRSQSYLGHYFRRMRAKLGAPKLITATAHKLARVIYHMLTTRQPYDETICGQNELQNRQRLEARLRKQARDLGLEIVAARTGAV

SEQ ID NO: 291806 - protein, 422 aa, unidentified
MKSIENTIPLQSETVRFVALDIHKHYSMIGAVNRDSQVLLDPRRVEHSHLENWLRKHLKPTDRVVIEATTNAWHIYDLIDPLVAEVVVANPMKVKQIAYARIKTDKLDVLILARLLAANLIPAVWVPPMHVRELRSLVSQRRRLTQMHTQVINRMHSISHRHHLGHPKGKRFLPKDCAWQQSECLSTMEKLQLELDMATRLHLKTQIDRLTQEMATLSTDEPWEADALYLMQIPGFGVITTMTVLAAIGDISRFSHPKKLTSYAGLAPGMHQSGVKFRGKGITKEGRKELRWAMVEVAWRCLKGNAYWKERFETFKKRMHPNQAITAVARHLLVIVWHVLSKQEPYRQITEERIAYKFLTWSWQLNDQQRDGLSRSQFVRYNLMRLDIGHDLERIALNHKYPRKIAPVSEVLALKPELRPPA

SEQ ID NO: 291807 - protein, 342 aa, unidentified
MTAIGVDTHKATLAACAIDELGRVVGEATFGNDPAGHLSFIAWARSIEPEATIGIGGSSSFGAPLARAAQSAGHCVREVPPHLSRFERRRTRRPGKSDPGDALAIARVTARETNLPPIRLPDRTNEIRLLLEAREDLIGETTRARNRLHAHLRVLLPGYGGKVANLVAARHRTMVRRLLRGNATVQGELARSLLDRLLRLERECDVLTRRIEALVDGHPLLALPGAGPITVARLVAEAGDMRRFRTPDAFAALAGVAPIPASSGQIQRMRLNRGGNRQLNRAMHVIAVTQSRFHPPAKAYITRRIETDGKTRREAIRALKRQLVRPVFRLLVEGSEVRLDAA

SEQ ID NO: 291808 - protein, 521 aa, unidentified
MPRLRSAPPAKAKKGFVLQKPNGLLTPRVQAVGPEHFGILAIDCAKARSRYFLADFYGRVLLEPTTLPHQRGDLQAAVDRVRQAMRQHHLADLVVAIERTGEYHRPVQLAFRQAGFETRLVHPFTSKHYRQPADPGNKTDDTDLAAICRATTHGFGLLEPTWPDDYLTIQLLRRHRRDLVDKNAMLQCQIREVLHAAMPGYAECFCHLWDDSPAPLVFARHTTSAQAVRQQGVAGLEQIARQEGLRCRAETFHKILAWATQAPPDAGHSADRRRVLVSLDDDRLAKTQQILELERDLAHRVVHTPYLLLLAIPGINIVSVADLAGELGPLSLYLNANAITGRAGLVPTRYQSDQVDCANGPLRRRGNRRLRAVLMQTADNLVQCNHYFRARAGQWSRAGKDPRWVRVKVAKIFSRLAFAVVAGRQLFPHPCCQPRHYIVGKLLQFHSAHHTDLVAMRRDLEAAAEQLPAQQRRAEAEPLQRQLDALARRRGPQPLAELIPLVLARLAGRVVQSQPHESAGP

SEQ ID NO: 291809 - protein, 351 aa, unidentified
MMIIGVDYHPSFQTIAFFMEETGECGEQELKHSDGQAEKFYRDLKQRGICVRVGMEATGYSRWFERLLAELGFEVWMGDPAEIKAKRIKKQKTDRKDAQLLLRLMLENNFPQIWVPGPENRDLRQLLWHRHRLVQMRTRIMNQLQALAMNEGYRWKKKLFSEQGRAQLEKLTLAPWASRRRQELLELLDRMNPTIEELTAAVEREARKRPEAMRLMTHPGVGPLTALAYVLIIGTPTRFQRGKQIGTYVGMIPCEASSARKQRLGHISKQGNSLLRFLLVEAAQAAARIHPDWRRRYIHLAMRRHKSIAKVAMGRKLGVRLYWMWRNGCEYSPSLEFGSYAGQLGTGDGVK

SEQ ID NO: 291810 - protein, 337 aa, unidentified
MEYFAGLDVSMEETHICILDREGGLIREGKASSTPKMIAAFLADGPICAKVVFETGRMAPMLFHGLTGLGVPVVCIESRQAYQALKSLAGHKTDRNDARGLAHLARTGFYKPTHVKSLSAHAIRSLIAARKKLVGQRVTIDNQIRGLVVVFGVRLPRALSPAFKDAALKVSDGVPGLHAALRGLFAAREAILTAVAAIDSDIKAMTRKSKICTRLMTVPGVGPITALAFAAAIDDPTRFKRSRDVGPYLGLVPKRHQSGEMDYIGSISKRGDVRVRTLLYVAANVMLTRYAAPLKLKSWAPAIGQRSTMRKARVALARRLAIILHAMMRDQTDFQAG

SEQ ID NO: 291811 - protein, 408 aa, unidentified
MNPLYVGIDVSSKSNVVYFMLPDGSKHSNFSVANSHTGSSQLVKRILSAMTSCSLDTVLIGLEATSVYGDNLVYFLREDAALARFNSKIHVLNLKQVSKFKEAYNDLPKNDLIDSFVIADCLRFGRINKEVYIGDYRYKALQNLTRARYFAVSNLIKEKQRFMNILFKKYSTMTQEKVFSDTFSTTALAVYDEFESAEALADMDLHELTAFIMEKGKNRFPNPNAVAKAIQKAARSSYRLPKTVNDSVNQVLSISITSIKALEAQIKEFDKAIATQMELLPNVLISIPGIGPVFSAGIMAEIGDINRFHNQAQLAKYAGLAWKQHQSGDFEAQTTRLINSGNRFLKYYLCEAAFSLVRCDKEYSDFYHLKYKEVNRYQHKRALALTARKFVQLVFVLLKDNRLYRPAK

SEQ ID NO: 291812 - protein, 336 aa, unidentified
MTIIRIGLDTSKHVFQIHGVDENEQAVLRRQIRRSEVAKFFAKLPPTRIGIEACGASHHWARALRALRHEVVLLPPQYIKPYVKRGKNDKIDAEAICEAMSRPTMRFVPVKTTEQQAGLTMLGVRDLLIKQRTMLINAIRGHAAEFGVTVAKGPKQVAELSRRLASDDGVPALAREMVGVLARQLDGLDIKLTAVEKRLIAWHQQDQTSQCLATIPGVGPISGVSFALKVPDPRAFRSARHFASWIGITPREDSTAGRHKLGRISRAGDEDLRRLLVIGATAVMRAAKPGRSSPWLLALLARKSKKLAAVALANKMARIVWAMMVSGETYRQPAQA

SEQ ID NO: 291813 - protein, 345 aa, unidentified
MKHYCALDVSVKETAVCIVDETGKICRETKVATHPEDLISVIKDSKWQIERIGLEAGPLSQWLYEGLAKAGLPVICIETRHAKAFLKAQPNKTDRNDARGMAQMMRVNLYRPVHVKTLTSQKHRALLTARKLLQEKAIAIANDIRGLLRNFGLKVGLVGKIKFEERINELVEDRPDLHDIMQPLLAARKLLRAEFTKLHKKVLDLVREDEVCRRLTTIPGVGPVVALTYTATIDIPGRFAHSKAVGSVLGLTPKLNESGESKRVGRVSCCGDAMMRSLLYEAAQVLLVNVKKWSWLKAWAMNIARRRGRQKAVVALARRLAVIMHRMWSDGTEFCWTRESLPVAA

SEQ ID NO: 291814 - protein, 344 aa, unidentified
MRYYAALDVGLRTMALCIVDEAGEIRLERSLPSEVDDIVHCLRGFDGEIACVGLEAGSLTQWLTYGLRAAGFRAVVLEARQVQAALAAMRNKTDRNDARGIAQLLRTGWYRPVHVKSIESHYARTLLAARKALLRKCIDLENEVRGLLKVFGIKLRPGLRHGAFDKAIRGPIEANGGLRHALVPLLDVRLELYKAFLEMDRRVKALAHSDQICRLFMTAPGVGYIAALTFKSAVDDPGRFKRSRTVAAHFGLTPRRYQSGERDNPGRISKAGDSEVRAALYAAANIIMTRSSKSSTLKAWGNRLARSKGRKRALVAVARKLAVILHTMWIDGTVFSLKAQEAAA

SEQ ID NO: 291815 - protein, 371 aa, unidentified
MNITAIIAVASALVYCVDLAKNKFQMHSFGAHGARLKQRTLTRSSLAKFFANPNTPRGLVVMEACASAHYWSRWLMQRGYQTKLVPAQFVAKHRIGNKTDGNDADAIYATHTDARVRAVPVKSIEQQDQCSWHRLRDRLVAERLRCTNQARGLLAERGCVAAKGQKGFDELMAGIHEREDAEVTRPLLQMLELIGARIEQIDQQLKCIQDELTEQLHQSPVAQNLDSMLGVGVIIATAVVAETGGNVQRYADSRQFAASMGITPKEDSSGEKRHLGAITKRGNAYLRTLLVQGAQSVVTACQRRDDALCLMARRLLAQGKRRKVVVVAVANRMARIMYAIIKHGERYRPEGKWAAKAANDSTVSIQTAAAA

SEQ ID NO: 291816 - protein, 340 aa, unidentified
METKFRHFAGIDVSKHKLDVCLIVNSQRTQMHYGCFEQSLSGYKAMKKWFAELTGKAVDSLLALVENTGLYDDALLVWLWDNKIAVCLENATNIKRSVRDNRTKNDKLDSRNIAVYLLQHFHELSLWQKPRDVIGQLKLLLTQRSNLVDGLKRLKALHKEWKQYQWSGVHKLGSYEAGIKGLKADIDAIEKDMWELIKSDTALLTMFTLIVSIPAVGKITAMHFICYTNEFKTVKSGKQLSAYCGVVPFEKSSGKSVKWKPKLPHQANKVLKTLLHLCATTAIKMKGSFAAYYRRKIEEGKHSLIAINGIRNKLALTIAAVIRTGEPYNENYSYQHFEKP

SEQ ID NO: 291817 - protein, 352 aa, unidentified
MLIIGCDFHPGFQQVAIFDNQTGEYQEKRLSHRAEAEQFYRSLAGQTVRVGMEACGHYPWFERLLAECGHELWLGDAAKIRATVVRKQKTDRRDAEQLQVLLREGRFPRIWVPTLEERDARQLLVHRHKQVQARTRTKNQLHALALSQGVQRKRKLWTEAGRAELEKLELLRYAAIRRQGLLETLDRLETEIAALNRQVEAEVQQRPAALRLMTHPGVGPVTALAMVLTLGPAERFESGRKVGSYFGLIPSEHSSGGRQQLGHISKQGSSFLRFLLVEAGQTAARKDAELGRFYRRLAGRKHRALAKVAVARKLATRLYLMLRENWNYAQLCRAVVQASPSHSVGGRQKPNA

SEQ ID NO: 291818 - protein, 377 aa, unidentified
MNNDNRFVGLDVHAETIAVAVAEADGEARSLGVIPNRSEAVRRLVKKLGPAESLQVCYEAGPCGYVLYWQLSELGVHCDVVAPTLVPVKSGDRIKTDRRDALKLARSYRSGDLTPVWVPDAEHEALRDLVRAREAAKKDQLRARHRLQKLLLRRGLRPPEGIKPWTVRYLTWVKTLQLEPAALAATLLDYIAEVDHAHERIERLERAIDQAIEAAPEAIRAVIEGLQSLRGVARISAATIVAELGQLSRFGRAKQLMGYAGVVSSEHSSGERIRRGAITKTGNAHLRRILVEAAWAYRHRPYLGGELRRRQKNASEKVKEISWKAQYRLHSRYARLMGRGKSKQLAMTAVARELSGFVWAVGVEVERQLASRPVRAA

SEQ ID NO: 291819 - protein, 426 aa, unidentified
MTNSLFIGIDVSLQSNQICVLNFDQHKFFNLKFSNTPDGCEEAINKIKNIYDKFYFDKIVIVCETTGMYSFHLACYFSSHEYLNNFNAEVYQINAHDFAKYKDSFSDVEKTDPSDAYILADFARVGRTKSLHPFRGSQYIALQRLTRQRYHISKNLVKEKLYVMNNIYLSFSGLIIADKKSKPFSNMFGATSCAIFDNFDSPDQIAETPVDTLLDLISKVGKNRTKNPNEKIDLLNKAIRSSYRLEQTAYNGINIAIASSLSTIRFLENELKQVDKAILETVNGLNSNAYNSLLSIRGIGKVYAAGILAEIGNIDYFKHNSNLAKYAGLYWNRTQSGKFEKEDRKFSRHANKYLRYYLIEATASCVRMNFPFIKNFYDSKYKEVTKHQHKRALVLSARKLVRLIFGLLRKNQYYSPIDSNTQSLIN

SEQ ID NO: 291820 - protein, 351 aa, unidentified
MPRASTVHAVIAIGIDLGKNTLHMIGLDSSGAIVLREKVSRGRIASRLANLPPCLIGIEAGMATHYVARELTALGHDVKQVPATYAKPFRQGHKNDFRDAHAVAEAVQRPTTRFVPAKTDEQLDLQALHRVRSRLVSERTAVINQIRGFLLERGVIVRQGLRFLRQLLPDILAKRADVLSPRMVRIVTELAGDWRRLDERIETVTDEIEALAKSDDSCRRVMTVPGIGPIISSAMVAAIGNGVAFARGRDFSAWLGLVPKQMSTGDRTILGRISERGNGYLRMLFMQAARVILLRPANWPKHGFGAWLARAAQRLHPNVLAAALANKLARIAWTVLAQERGYESRVKKAAA

SEQ ID NO: 291821 - protein, 416 aa, unidentified
MDTMYERCCGLDIHKKTIEACFRSGKKKTHMSFGTTSAELRKLTMWLVENDCQSVAMESTGSYWKPIFNILELSGTDMKIIVVNARHMKNVPGRKTDVNDAEWIAELLQYGLLRPSFIPDREQRELRELSRYRKSLVGERAREINRLQKMLEGGNIKLTSVVSEVTGYSSRRLLDRLLRNDEPMTEDVISGLVHTSLAGKSKELETALDGLLSELQKELLIKVLDHIDDMSKRIADLDDFCRKQMKKYEDALDKLDEIPGIARRTAETILIETGLDMSRFPTAKHFARWAGLAPGNNESAGKRSSGRTTKGNPTLKSTLIQSAKVAARKKNSFFKARYQKIAAKRGANRASVAVAHSMLIAIYHILKSGERFKDLGEDYYNQSNREKKKNYYLKKLTKLGVNLKEATLSISIQTAT

SEQ ID NO: 291822 - protein, 424 aa, unidentified
MGRVIIGTDPHKASATIEVIDEDGVCLATGRFGSDTGGYRALLGYVRGQWRHRTWAVEGANGVGRPLAARLLADGERVLDVPAKLAARVRVFDTGQGRKTDATDAHAIALVALRTRGLRELSVDAELVALRLLADRRDELSRLRAQTVNRLHRLLVELVPGGAPRHLSALQAETLLASVRPRDLAGRTRREIAAELIGELAAVDRKLAELKRRLSAAVLARGSTLMDLFGVGPAGAARLLVDVGDVARFPSRAHFASWNGTAPLDASSGAQVRHRLSRAGNRRINHVLHIAAVCQLRHDTPGRAYYRRKLAEGKTTLEALRCLRRRLSDVVYRQLVADTADTAGPADTADPADDPQAGPGGHCGATLQSSAADLTPHVGSSDQPHPGPAPANLPPATARSEPRGLDSRPQRRRARGVNVEHPTG

SEQ ID NO: 291823 - protein, 362 aa, unidentified
MIESTTVMVGLDVHARSIRLAAVRADELLEERTLPFDEEHLERLLRRWPGVRCCYEAGPTGFGLYRHLVERGIDCAVVAPGLVPRRPGDRVKTDPRDARKLARLLAGGLLEPIYVPSPELEAARDLVRAREDARLDRMRDRQRLSKFCLRHGRLLPTTAWTVTRRIWLGQQRFEHAARQLTFDTYLHAVDLVDARIEALEQAIRETAEQGPWRQQVARLRCLRGVDTHTALALVVEIGDFGRFRSAEEFMAFVGLVPSERSSGEQRRQGSITKVGNAHVRRLLVESAWHARQRPKVGYELARRQRGQDAAVVERAWRCQQRLHQRWQRMAARGKLHQKTVVACARELAGFVWAIATDQPLRS

SEQ ID NO: 291824 - protein, 283 aa, unidentified
MKLHVLGIDLGKTVFHLVGLDSTGKVVIRKKCSRRQLLAFTANLQVELIGMESCSGSHFLGRALREQGHEVRLMPAQYVKPYVQTNKSDFLDAEAIAEAVQRPRMRFVPIKTEEQLDLQALHRVRERWVMRRTAVVNQIRSLLLERGLTLPKGRSHVDALLPRILEDAELRLSGCFRVLLAQLKMELEQSTARIEQMDRVIHKTARENEDCQRLTEIPGVGPVTATALVAAVGNASTFGKGRNLAAWMGIVPGEYSTGGKQKLLGISKRGNKYLRTLFVQGAV

SEQ ID NO: 291825 - protein, 345 aa, unidentified
MATYYIGMDVHCNNTELAIENRGKIVRRYSVPTTIPAISEVLDSFSGKKYLATEEGPMAGWLYRNLCDKVDTMVVSDPRRNKLIACDGDSDDKIDSAKLAALLRGQYLRAVHHSCDVDRWRLKRWVGLYHDRVKDATRNINKIRAYAGMHGIRLRGVALRNLQEREKWLASLKDRNLAELLKVLYIGYDATAVQARKAKGELVRRVKRYPIVNWWQELTGIGIIRAATIFAYLDTPWRFKSKNKLWKYCGLGLVRDSSGKDKYGRSKPGKLKLAWHSNKRLKCAVMGAAISAIHGKNNVFKDYYEKMIQDGLPRGNARHAVARRLLTVMWGMWKSSRRFDESLFC

SEQ ID NO: 291826 - protein, 311 aa, unidentified
MTILTSQTVVGIDIAKAEIVVYRADLETIEAVKNDRAALKRWLKTLPAQSAIAVEATNIYHLETVDLAHAMGHQVYVVDAYRVSHYRRGVGQRAKNDPCDARVLARYLTNEQSKLRLWNPPPKAYTVLKSLLHRRATLIQNHTGLMLSWADEPLLKKERTAQQKAFERSDKVIQKLLRKVSKEAGIEDNIDRCKAIEGVGELTATGLATTYMRGDFANSDAFIAFLGMDLTVDDSGKKNGPRFLSKKGDPEIRRLAYNAAMAACRSTKWKPFYESYLARGFSKTQALVALARKLCRVAFTLMKNQGEYRSV

SEQ ID NO: 291827 - protein, 399 aa, unidentified
MAKLWAGIDAGKAHHHCVVIDVDGNRLLSQKIPNDEPALLELITAVLKLGDGDEVIWATDLNHGGPALLIAILVAHGQNILYIPGRIVHHASKLYRGEGKTDAKDAAVIADQARMRRDLQPLRAGDEISTGLRILTARRADKSADRVRAINRLQAQLLEYFPALERAFDYSRSKAALLLLTKHRTPDGIRRAGQARIHAWLKKQGARSSAAVATSAVEAAKSQHTTVPAQYLGELIVAALAREVITLNKELAELDALISEKVTEHRHTKVLLSMPGFGPVLAAEFLGATGGDLEVFETADRFAGVAGLAPAPRDSGRITGNHHRPRRYDRRLLRVFYLSGLSALKSCPASRTYYDRKRGEGKTHIQAMLSLARRRLNVLWAMLRDGTTYAPVAAELKTA

SEQ ID NO: 291828 - protein, 324 aa, unidentified
MHTDQPSAPPIVIGIDVSKAELVIAVQPTGERWTSATTPAALDAVVTRLQAAHPTLIVLEASGGYEAPLVAACATAGLPVAVVNPRQVRAFAHAIGRSAKTDAIDAELLALFGLRVQPAPRPVPDAATQALAALVTRRRQLLEMLTAERQRLAQAPPTGPVTRDLRNHIRWLERRLQDVDDELDRTIQASPIWRVKEDLLRSVPGIGPTTARTLLAELPELGRLNRRAIAALVGLAPFNCDSGQRRGQRHIWGGRATVRASLYMAALVACRHNPPLAAFYQRLRARGKRPKVALVAVMRKLLTLLNAIVKHRTPWQPAQADLAV

SEQ ID NO: 291829 - protein, 368 aa, unidentified
MQDFTAALGKVTIGLDLGDKYSHYHTVDAMGNSTERDRLVTTPEVFRAHFSGMKPARIVVEAGTHSPWVSRLLAQLGHEVLVANPRQLPLIYCNTKKSDQTDPENLARVGRLDPDLLKPLEHRSKRTQVDLATLRARDSLVAARTKLINHVRGSVKPLGARVPACSAPHFHQKAPEFIPSELQAVLAPVVKMIEELTHEIRKYDKLIARELCGKHPATTVLQQVNGVGPLTALAFVLILADPRRFKDSRTVGAYLGLTPRKDESGEQQPQLRITKAGDPFLRRLLVSSAQYILGPFGPDSDLKRFGQALSRRGGKNAKKRAVVAVARKLAVLLHRLWLTGEVFEPLRKRPAAKRNLQAPSSSAPVTTH

SEQ ID NO: 291830 - protein, 349 aa, unidentified
MGEVITIGVDIAKLVFQVHGVDADGKVVIRRRIGRARVLEFFADLPPCRVGLEACATAHQWARELAKLGHDTRLMPPTYVKAYVKRGKNDAADAAAICEAVTRPSMRFVPIKSVEQQSMLMLHRARDLLIRQRTQLTNALRAHLAELGLVAAKGREGLHQLAAVVTECGNDRLPSDARFACQAIVTQLHSVQIEISGLDKRLSQTHRANTDSKRLATIPGFGVILSTAVAATMADPKAFRTGRDFAAWIGLVPRQNSTGGKERLGSISKQGDRYLRRLLVVGAISVINSARARPYKYPWVIELLGRRPTKVVAVALANKMARIAWAVLAKGETYRAPTRSSNAVVAAAA

SEQ ID NO: 291831 - protein, 430 aa, unidentified
MHNKNYISVGIDVSSAFSFMTILAPDETVILKPFKITHNNKDSLERAVSEIKKAEELYSLESRTFLESTGIYHFPLFCYLVDCGFNASIINPIITHSTKNGNIRKVKNDKIDSKGIAKLGLSKDVPVSQFPEKLVLELRSLTRKYYDLTDERSAHINKLKGDLHTVFPQYLDIFCDVTGKTSTMILRQYGTPDKILRGHKKTMIEKISKASRKGLAKASERYEKLCAAANAAKTFGCQIDSIYFNISLTLDLVEKLDSALDSILNRIRQLITFNKNEKFIQQIKLLNTIPGVGFLTAVTIMCEIGDFSAFRNPKQLFAYFGLDPEVSESGKFVGTQLHMSKRGSRIARRAIFAVALASIRTKRNGEGINPYLRKYYELKSVQKPKMVAIGAVMHKVCNVVFAVLRDEKAFELRSPEEHCKQYQRPALAAA

SEQ ID NO: 291832 - protein, 375 aa, unidentified
MAMVIIGVDPHKLSATIEVVDRHEKLLGTGRFATDRAGYLAMRAFAKAWPDRLWAVEGSNGAGRPLAQRLLEAGEHVVDVPAKLAARVRLFDTGHNRKTDARDAHSIAIVAVRTPTLRVLRVDGEPEALRMLSDRREELSRLRVQTVNRLHRLLAELVPGQTKKDLSAGQAKTILASVRPRDVAGKTRRRIAAEELADLVAIDAKLKKTTAELKVLVKARGSRLMDLRGVGPVVAARTLADVGDIARFADRNRFASWTGTAPLDASSGEQIRHRLSRAGNRRMNHMIHIAAISQIRCDTPGQAYYRRKIAAGKTPLEALRCLKRKISDAIYRQLLADAQRPDHDQPTTVTGTGPGGHCGASLISSAVDLPPHIDT

SEQ ID NO: 291833 - protein, 444 aa, unidentified
MAIRKREDEVFPNAAGIDIGASSHWVAVPRHLAEAAGDEPVREVGAMTDDLNALARWLVKLGVDAVAVESTGVYWIPVFEVLEQHGLTVWLVDARQMKYVPGRKSDVQDCQWLQKLMSLGLLRAAWRPSAEVCVLRAVARQRETLIAEQASWVQRMQKALVQMNIQLTEVITDVMGQTGQAIIRDVVAGQRDPKVLARHRNRRVKASEADIAKALTGNWRDEHLFVLKQALAMYDDISRHLAECDTKLDGLLDERSATKVDIGPTPRLGSKARGEHDIRQRLADWAGVDLTRINGLGVTVVMKLLTEVGPDVSRFATVKHFCSWLGLCPGTKISGGKVLSSGTKRSANRARQALKMAAQSLCRSESALGAFYRRLCARMDKPRANTATAHKLARMAYFMLTRGEAYVDQGQQHYEEQQRQRSIAALQRRAHALGFQINPLGTPA

SEQ ID NO: 291834 - protein, 344 aa, unidentified
MKYYVGLDVSLATTAICAVDENGAIIKEGVAASDPEEIANWLEQLGLSFQRVGLETGSTAAWLYSGLRNRGVPAICVDPRRLRAVTKTMRIKNDRNDARAIAHCMRVGWYTVVHVKSEVSQVVRMLLTNRRTLQSKQIDIENEIRGTLRVFGLKLTGTITAGRFEARVLELVATPHLEAMVRPMLVARAALRKQCAVLHKMMLEMVRKSATCRRLMTIPGVGAIAALTFLTTIDDPARFQRSRDVGAHLGLTPKKYASGETDRNGGISKCGDASMRAVLYQAALALLMRSKKYSAIRVWGLGVAKRRGLRRAAVAVARKLAVLMHRIWADGTKYRWHREAAIEA

SEQ ID NO: 291835 - protein, 349 aa, unidentified
MAMTIVEAAPGITGGVDTHLDTHVAAALDPLGRLVGTEAFSADAAGYKALFAWLENFGEVTKIGIEGTSSYGTGLVRFLRRKGVEVVEVNRQNRQSRRNQGKSDPLDAIEAARAAISGRASGSAKSKDGPVEAIRVLVIAKRSARQARVKAITQMRHLGFTAPEQLHCRLKGMTVTALVAECAGLRPARSGDPVTAATKASLSSLAHRVQSLDVELAELDEKIESLLVATLPDLLARFGIGPDTAAALLVAAGDNPQRLHSEAAWAHLCGVSPIPADSGKSAGHLRHHQGGDRQANSALWRIVMVRIAHDPETTAYFERRVKEGRTKRDVIRILKRYVAREVYRYLPRG

SEQ ID NO: 291836 - protein, 324 aa, unidentified
MTDAVLGIDVSKNTFDTNLGAGTKARSKSFANSPAGWHHLIAWLGEHKIGQVHACLEATGRHGLGIALALHEAGHVVSIVNPAQIRDFARTKLGRNKTDQVDAVHIREYAELFKPRPWTPPSPAMRRLCELQTIRAGTVAGLTEWKNRRGSGIMDDLALSLAKTTIQHFTSQLEAVDQAIAETIDNDVELSAKRDLLVSINGVGEALAGIVLAELPGPDILGSSAAVTAYAGLNPQQHQSGISVNRPVRISKIGNAVLRTALYMPALSAMRYNPAVAALADRLKAQGRLKGKQIVIAAMRKLLVLCFGVLKTGKEFDPAMAIGK

SEQ ID NO: 291837 - protein, 351 aa, unidentified
MMIIGVDYHPSFQTIAFLMEETGECGEQELNHSDGQAEKFYRDMKQRGISVRVGMEATGYSRWFERLLAELGFELWMGDPAEIKAKRVKKQKFDREDARLLLRLMRENNFPQIWVPGPENRDLRQLLWHRHRMVQMRTRIMNQLQALAMNEGYRWKKKLFSEQGRAQLGKLTLAPWASRRRQELLELLDRMNPTIAELTAAVEREARKRPEVLRLMTHPGVGPITALAYVLIIGTPTRFQRGKQIGTYVGMIPCEESSAHKQRLGHISKQGNSLLRFLLVEAAQAAARIHPDWRRRYKRLAMRRHKSIAKVAMGRRMAIKLYWMWRNGCEYSQSVKCGSYAGQLGIVHGVK

SEQ ID NO: 291838 - protein, 366 aa, unidentified
MWMEAPVKDHRTSVGLDVHARSVVACALDRDTGEVFERRLTPDYQDILDWLRSLPGRVVVTDEAGPTGFGLARLLLAAGVLCLVAAPSKLQRPSGDRVKTDARDAAHLCRLLHLGQIIEVTVPSAEQEAARDLVRAREDCRGDLMSARHRVSKLLLRQGIIYSGGRTWTGKHQTWLRTQRFDAAPLQLAYDTAVDTMLATVDRRDRLDDAITELAADSAYTPVVTRLGCLRGVSTLTAFGLAVEIGDWGRLTGRSIGAYLGLVPTEYSSGTSRSQGPITKTGNGHARRLLIEAAWHHRQPYRPGVDLRRRWDAASPAARARGQQANRRLHTRWCRFDARHKRPVVANTAIARELAGWCWSLAVLDT

SEQ ID NO: 291839 - protein, 351 aa, unidentified
MLISHYIGFDVHKKSISYCIKTADGRIVDEGRIPATRQALREWAQKRTAPWHGAMEATLFSGWIYDTLKPFATLLQMGNPSMMKAIGAAKKKSDKLDARTIADLVRCNLLPVCYVGPPEMRDLRRLLRYRNLVVGQAVQMKNRMSGMLMEVGAEYSKRRLHGKEYFNELLDQLEEVPESVKDLLQVSRGALEMFAATQRQLLDRLQKDPLLVKRVELLRSIPGVGEVTALTWALEVCDPKRFRSIGNAVSYCGLTSALVSSADKPKRGPISKQRNAHLQTVLIEAAKLAPRWNPQLAEVHERELKSGDRNRATLAVARKLVAYLLAVDKSGKRFEVRNPPVKEMEEVGQMA

SEQ ID NO: 291840 - protein, 421 aa, unidentified
MPDEAYELYVGVDWATEAHQVCLLSPDGQRLAELVVPHTGAGLAALRTQLQQRVSEPSRIAVAIEVPHGAVVDALLDHGCHVFAINPKQLDRFRDRHTVAGAKDDRRDAFVAGDALRTDRAAFRRLQAEDPRLFQVRELSRLHAELVEEHGRLTNRLREQLWRFYPQLLALSPAADEPWLWALLAQAPTPAQGRRLTVSAVRALLARHRIRRLAAEAVRTALQELALPVAAGTVEAASEHVGLLLPRLQLIHEQRTRCERRLEGLLEHLATPTAGEDPDEHRDVTILRSLPGVGRVVAATMLAEASRPLAARDYQSLRAHAGAAPVTRQSGKSRVVSMRRACNRRLRGAIFHWARNSIRLDAHSRAHYQRLRERHGHARALRGVGHARALRGVADRLLDVLITMLKTRTLYDPQRQQRRAA

SEQ ID NO: 291841 - protein, 365 aa, unidentified
MRIIHWIGIDDHADKWTIAQFRGDEERPAKEFELVPDESGYRRLIGFIKSLDGEARIVYEAGPCGYELYRRLSKAGLQCHVAAPSLTPRKPGERIKTNRRDAAKLGRYLRSNELTLIVVPDRGRESLRDLVRARHATQKDLVSIRHQIVKLLLRYGHRYRNGKAWTGRFWTWLNKITLEGEFSQLVLEEMIGAHKQRIERLGRYDAEIEAAAKRQEYAPYVAALCVLRGISTLSAMTLLSELGDLRRFATAPQLMAAVGLVPGEQSTGDKTTRLSITKTGNAHVRHIAVEAAWHYQRRITNGPTIRRKRKDQPQALLDIAQRCDLRLNRKFFRMTSRGKRSTVAAVAVARELVGFIWAIGQLVHP

SEQ ID NO: 291842 - protein, 340 aa, unidentified
MEQYVGLDVSQKETAICVIDAEGKRVWQGTCRSTPDAMAEAVRTKAPLAVKVAMETGPLAVWHWHALKAAGVPIVCIHARHAKAALSMQINKTDSNDAFGLAQIVRTGWYRPVDVKSMESHRLRLLVAARARVVSMRTGLYSQIRGLLKTFGVVLGPGKGNSFEQLVLRGIPNDHFVRVVVESLLSTWRHLSSELKKLNREIERAARAIPVCRRLMTVPGVGSLTAIAYATTVDEPSRFRRSKDLGPYLGMTPRKYQSGDVDRTGSISKCGDRTTRSLLFEAAGVLLFRNRRTCALKEWGLNLSRRAGTRKARVAVARKLAVLLHRLWTNGRVFEPYSTV

SEQ ID NO: 291843 - protein, 454 aa, unidentified
MERIADAALLVSGGVDTHGLTHAAAVVDRVGRVLGSEEFAASANGYKALLAWMRRFGALVKVGVEGTGSSGAGLARYLAAEGVEVVEVIRPNRQTRRRRGKSDPVDAVAAAMAALNGEASGTPKAKDGPVESLRALQVARRGALKASAQAANQLRDLLLTGPEQLRAKLGPLPTDQRVALAARFRPGELTDPGEATKAALAAIARRYQQLQAEIAQLDAALELLVRAAAPPAFLAKQGVGPRVAATLLTTLGDNPKRLGSEASFAALCGASPLDPSSGKQRRHRLNPGGDRQANSALWRIALTRMSHDPRTKAYVARRTAQGQDDQGDHPLPQALHRPRALQDARRRTQTAGRRRSFRPPSDSSRASSPPHSARSNRRGVCPAHRRAKEGAVDRDNSRNTAGAPDSATKDEASRPEQPLSGPPSSRPNQQVGVRKPPQNEPRTLPPREGTRLRT

SEQ ID NO: 291844 - protein, 398 aa, unidentified
MTESSDYESVQVFIGVDVDKDTHHAVAINRSDKRLFDKALPNDENKHRSLIPDLKQHGQILLVVDQPATIGALPVAVARSEGVLVGYLPGLAMRRIADLHAGEAKTDARDAAIIAEAARTLPHALRTLKLADEQIAELSMLCGFDDDLAAQITQASNRIRGLLTQIHPALERVLGPRLDHPAVLDLLQRYPSPEKLASLGEKKLAAQLCKLAPRLGKRLAADIAQALAEQTVVVPGTNAAAVVLPRLALQLIMLRKQRDEVALEVEQRVLAHPLYPVLTSMPGVGVRTAARLLTEVACRAFASDAHLAAYAGLAPVTRRSGSSIRGEHPSRRGNKALKRALFLSAFAALRDPISRAYYTRKMSQGKRHNQALIALARRRCDVLFAMMRDGTFYTPQAS

SEQ ID NO: 291845 - protein, 394 aa, unidentified
MNTITTTASTKAILAIDLGKYKSVACVHDPATGEYAFTTFETTRAELRKLIGQERPGVMVIEACLLAGWVHDLCGELGVRCLVANTASEAWKFKHLKRKTDKDDALRLAQLYLLGQLPTVTLPPVRVRQWRSLIACRQTWVGRRVAVQNRIRALFVAQGLPAPRGAKAWSATGLAGIATQAKPLGECGNDELWRGLLDLALTEYRQVSELVAQAESRLDALGKQSAEVILLETAPGLGPRTAEVVAAYVNDAARFKTSKQVSAYSGMVPRQHQSGEMDRRGRITKRGPALLRKMLVECAWCMVRYNTWARGVYQRLTGGGQRRKKQAVVALARKILVRCWAMLRDKKPWRDPQTGPKQPLPPSKQASPGRGAAASPREDAGSANADRCVTQTGV

SEQ ID NO: 291846 - protein, 412 aa, unidentified
MTAKDQFAAHVGLDWADKKHDVCVQFKNGDRIFHVIEHTPEALDIWLNELHQRAKGRIAIAVELKKGPVVYALQKYPFVTVFPVHALSLARYRQAFWPSGAKDDPQDAELALDLMLRYPHKIKAIEVDNPDIRLLQQLVEQRRLLVEDKRRFVNRLINTLKQYYPQPLEWFSHRDSSLFCELIIRWPSLQQLKRARSDTVRHFMNAKGGPAVAYTEQRVASIASAIPLTTDKTVIEANALMATALASQIKLTGDLIRTYDERIESLFDTLPDAELFKSLPGMGPCMGPRMLAALGDNRDRFNSAEEIQNYAGIAPVTERSGQKSWVHWRWQCAKFVRQTFVEWTAKTVNSSYWARLYYQGQREKGKSHQSAIRALAFKWIRIIYRCWKTRTRYDEAKYLLALEARKSPLLKP

SEQ ID NO: 291847 - protein, 388 aa, unidentified
MHVYVGVDIAKELHYAAIMDSDGVVSKPFSFENNDKGFNLLLSHLAPYNKESILIGYESTAHYQENLAYFLKSLGYRTTEINPLQTAALRKANIRNTKTDSVDARLICLALMNHHIQGDQRDSVRLDDLYQLCKMRMDTMKKRTTCKIQFVAIMDRIFPELASFFDNNLHTNTIYRLIDSFPLPSQIKKTRIDILTKLLHKASRGHFKKEKAQKLKDLADISVGIPSDIFAFQAQQLVHQIEFYTDQIQTIEERINTNPDVMSSPLMTIPGIGTFCVACILSAIKNINDFGAPCKILAYAGLDPVIRQSGKFTASHTRMSKRGNSLLRYALVWSAGNVVKNNHTFAEYYRHKTEDQGKSHYQALGHCAKKLVKSIYHMLKYNESFNLD

SEQ ID NO: 291848 - protein, 428 aa, unidentified
MTKRKAQSVFQTDDDQLYYERCAGIDVHKKLLVVCLRIGRKTESREFGTTTADIRDIVAWLKSNGCQMVAMESTGSYWKPLYNIFEQESLPAMVCNAYHIKNVPGRKTDWNDAFWIAKCLAQGLLKPSFVPDRRQRELRDMTRFRKTQIEERSRNINRLQKFLEGANIKLGSWLSDVEGKSATMLLELVIGKPDFTIDDVKGCMHKNLKSSPEELHAALDGYISPTQREFFAHVMNVIRTQTALIEKTDALIKSTLSQAETDAVIALDQIHGIGVVSAEQIIAETGIDMSHFRNQHAFSNWIGVAPGNNESAGKRKSGKTIHGNKTLKSTLTQCAKSARKVKDSFFCAQYHRLVSHRGKNRATMAVAHSIAIAIFFVLQGNEFKDLGADYYTQFNREKKINSHLKQLSKLGVNLPDEILQNARDRPQV

SEQ ID NO: 291849 - protein, 387 aa, unidentified
MPQPNDLSRSLVALDQDSTIIAVVEMSQSSWLVAGMLPGIERQPRKKLEPSPERLLALLHRWRDEAVKAGRKITRIALAFEAGRDGFWLARWLEAREVEAHVIHPSSVAVSREHRRAKTDRLDTELLKRGFLGWLRGERGHCTMARVPTITEEDAKRPNRERECLVGERTRIANRMKATLARLGVRNFKPTLRKAAERLATVRTPEGVLLPPNVLAEVQRDMARLGFVMSQIREIEQARQKRLEQEPETGPHTMARHLCRIVGIGIETADMLVHEVLSRPMRDRKAVARYAGLTGSPDESGTKRREQGLARAGNARVRRGMIQLAWRFLWLQKESALVRWYRARTADSRPGTRKTMIVALARKLLIALWRFVTTGETFEGVILRPAG

SEQ ID NO: 291850 - protein, 343 aa, unidentified
MQTIRTIGLDIAKSVFQVHGVDAAGQVVVRRQLKRRYVLAFFAKLPSCLIGIEACASSHHWSRELQALGHTVRLMPPAYVKPYVKRQKNDATDAEAICEAVTRANMRFVATKTPEQQSCLMLHRTRHLFIRQQTAVINAIRAHLAEFGIVAPVGRNGVEELLAVVADASDQRLPEVARACLAALGAQLRILKAQVLNFDRMITAWHRSNETSKRLDELPGVGPALATALVASIADPKVFRSGRDFSAWVGLVPKQSSSGGKQKLGNISKQGDRYLRGLFTAGALAVIRYAKIHGTDHRPWLAALLARRPTKVAAIALANKIARMAWAMMARGERYREPVALAA

SEQ ID NO: 291851 - protein, 391 aa, unidentified
MIYIGIDVAKDKHDCFITNSDSKVLFKAFTIFNNLDGFNDLYQKIESVMDDVTKVKVGLEATGHYSYNLLGYLIDKGLPTYVINPLHTNLYRKSLSLRQTKTDKVDARTIASMLMSDVNLKSYSDTSYHNEELKSLTRYRFDKVKERAKLKTSVSRLVCILFPELEKLVPTLHMASVYALLSEFPSAKHVATAHLTRLTNLLSKSSKGRYGKDTAITFRDSARASIGSNMPAKSLELKHTIKLIQELDSEIDEIENEIKIIMDEINSPILSIPGINYRMGAMIIAEIGDFNRFDSPDKILAYAGFSPSTYQSGQLDGAYAHMEKRGSRYLRYALYNATKYVCHWDPTFAAYLAKKRAEGKHYNVAISHAVKKLVQVIYHLEKTKQQYIKAA

SEQ ID NO: 291852 - protein, 428 aa, unidentified
MDQVNHNRLEEFRQLRQEVRHSGEYLIVGIDIAKDRHYAFFGTATGKTLLRRLVFSNDHEGFRKLLDQAEALRVQHGLKKVVYGMEPTANYHKPLGEYLIGLGRTVVLVSGVTVKRNRETLDGRWDKHDIKDSANVADLISQGKCLYYEHPSAELRGLRGLLSLKRRLKKQEHGYKVRIRNHLIAQYFPEMDRDYAQLGAEGLSIVRWCFPASQIVQLDVDPFIERVTSRRIRVEKRRRLEVIWEKAGESIGCDGVPGVEHEAKVMVEGLRQIREMIKETEEKILGLCKQFPAYPYILTIPGFGPDVSAKVLGAIGDPDRFQNGKQVLKMGGLDLSADRSGKDSDKATPVISKRGKADLRYALYQAAFIASTKNRDFMLYYTNKLRGREKEKGIHTKMIVKLSAKMLLIAWTLMKKKEAFDPAYLITK

SEQ ID NO: 291853 - protein, 343 aa, unidentified
MKLSRVGVDLAKNVYQLHGIDRHGETVWKRRLRRGQWLQALVDKAEPGCEIGMEACTGAHHWAREFQARGYTVKLIAPQFVKPYVKSNKNDANDAEAICEAMSRPHMRFVTVKSVEQQDIQATHRVRSEIKDQRNAKANQIRGLVAEYGLVAPTTLLALRRAIPCWLEDADNGLTDYFRSLLHGLWGDLIALHDRITELDKQIKTLADSNEVTQRLQQLRGVGPLVATALVATVGTGEQYQKGRQMAAALGLTPRQCSSGDKQRLLGISKRGDVYLRTMLIHGARAVVSQAKHREDRLSQWVTNISKRSHPNVAAVALANKTARMAWAMLRNEANYDPDFAIS

SEQ ID NO: 291854 - protein, 389 aa, unidentified
MEAYVGMDVHCKESVYVIQDGTGRVIGEGQVPTSWMGMLEFQERHGVAPGTKVALETGSVSFYVARLLMRLGLVPVVVDAHEVRLKAHRPNQKSDRRDAFELCEGLRRDIYRVIVHIPPPEVQQLREALARRRHFVQICTREVVSAKHLLRAEGLVELTGHLRSEPAWSRLVERLDFAPDLQVLIDCHRTAWLCAQAQVRRIEQHIGQIRTAHTASVTALQAIPGVGPIVAQTVVAAVSDPERFPTAKHVASFAGLVPSTHQSGERNHQGRITKRGSPELRAMLCEAAHHASRPEHPLNPYFAKLCARRGYRMAVVAVAHRLLRIMWAMMRSGTDFDVGRLGVEAGPFEVTVKRPYRLKKTRALAKAGPGRTAKTRSSTGTMIVPRAAV

SEQ ID NO: 291855 - protein, 361 aa, unidentified
MKAVPLRFGILKKRNGSEEKKMIRFYVGVDLHRNNFTYCMRLKNGEEKMGKLAIRELKGFARMLGKHAAVAVEATGNTWMFCQEMKEKVGRLVVVNPTQFKVISRSTKKTDKHDARILAEYLEKDMLPEVRMKDGLQSKISSLTQTREKLVQLRTVLKNKINNLFASRFIELRREELSSEKGLLKVLACRFDPITDTELRVMVNEIRSLNKSIDELDRTIEENGSKMDGFDNLKSIKGIGSKGAATLLSVIGKIEDFRSAKQLAAYIGIVPRVSDSNDTSHHGRITKLGSKIARTILVQCSLVAKRYSPYLHRFHESVKSRRGGAKANIALARKFLEIIYKTLKNNWIFEDFTKFKLAENN

SEQ ID NO: 291856 - protein, 353 aa, unidentified
MKYVGLDWAYRRAQWCAVAPAGAIAGEGRIAADRDGLARLVLELGDEVTACLEMMSGALWVRDELVACGWQVQVADARKVKTVAPLAAKTDKVDARLLAELSRRQLVPALWLPSLDERALRERLRRRMHLVRLRTSAKGRIFGLQTQWGVRISLRRLRRADGMTLLERAGMPAVWRHSISECLALIDFLDARIVPLDAELRPFAQADPRAVLLDTIPGVAELLALTIAVEIGEISRFAGPEKLVSYGRLAPRVRQSGEGRPHTGPLNKSGSRLLGWAAVEAAQHAWRESNPWHQLYLDVSRRSRNHNSAKAAVARKILIAAWHMLSRNEPFKPAPRSTEGTPVSASSRLALAA

SEQ ID NO: 291857 - protein, 352 aa, unidentified
MTVMTATSQTVVAGVDTHQQTHHAVVLDLDGRTLGNREFPAREAGYRGLLEWVAGFGVIDRIGVESTGSYGAGLTRLLLSAGIDVVEVNRPDKTTRAMQGKSDPIDAEAAARAVLTGRATARPKLTTGVVEAIRALKVSRDSAVKHRTAAISQLRDLATTAPGQLHDQLIQLTASRRVTKAAGFRPDLTRLTDPVEATKLALRNLARRVQDLTAEIDATDNALEKLVNATVPTLVAKRQIGTQTAAQLVITAGENLHRFRSEATFAKLTGVCPIPASSGKTKRMRLNRGGDRQANTALHMIAVGRLKDHQPTIDYRHRRKAQGLSDKDIIRCLKRFIAREVYTALKTDLLGT

SEQ ID NO: 291858 - protein, 455 aa, unidentified
MSQRKRKAVQFDALEQINLHAAGIDVHAEEIFVAVPQGRDAESVRSFPTFTVDLHRLADWLEKCGIETVAMESTGIYWIPLYEILEDRGFEVYLVNARHAKNVPGRKSDVSDCQWIQQLHTYGLLRASFRPPAEICSIRALVRHREMLVRYRAAHIQHIQKALQLMNIKLTNVLSDITGVTGMQIIRAILAGEHDPQVLASFRNSKCARSEAEIAKSLQGNYRREHLFALRQAVELYDMYDLQIQACDAELEALYRDFDPPRRPDQAANRPPKPSKGKRRKNQASFDLRLSLYQLTGVDLTQVDSIDALTAQTLVSEIGLDMNKWRTVKHFTSWLSLCPHNEVSAGKVKRRGTTNTRNRANAALRVAAQSLARSDSALGAYYRRMRAKHGSPKAVVATAHKLARIIYHMLKYTVDYVDLGAANYEAQHNARVIRNLQRKAAKLGFRLQPASNPVS

SEQ ID NO: 291859 - protein, 307 aa, unidentified
MSGIGIDVCKKHLDVAIFQGPARQFNNTAAGHCKLVRWLNTLPVTQVVLEATGGYELAALDALHQAALPVARANAQRARSLANTLGKAKTDRLDAAMLAYMAEKIDLHPYVPLAPWQRCLGEHVRARQQVVELLKMAKQQLLPVADKPLRKMLQGNIKQLVRSLARLDVLIAEQLKTLLIDHPHLGALKTLKGVGPVLLAVLMCRLPELGTLGGKQIARLVGVAPLSNDSGSVRGKRGIKGGRADIRQALYMAAMSAARHEPRLRDFYRSLRARGKEGKVALVAVMRKMLVILNARVRDERAAMRPA

SEQ ID NO: 291860 - protein, 343 aa, unidentified
MQTITTIGLDIAKSVFQVHGVDADGQVVVRRQLKRRYVLAFFEKLPPCLVGIEACASAHHWSRELQALGHTAKLIPPAYVKPYVKRHKNDAVDAEAICEAVTRANMRFVATKTPEQQSCLTLHRTRHLLMRQQTAVINAIRSHLAEFGIVAPVGRNGVEQLLGVVADSNDKRLPEVARACVAALGAQLRVLKVQILEFDRMIRAWHRSSEASMRLDQVPGVGPVLATALIASVADPKAFRSGRDFSAWIGLVPKQNSSGGKERLGNISKRGDRYLRSLFTTGALAVIRYAKIHGTKHRPWLTSLLARRPTKVAAIALANKLARMAWAMMAKGERYKEPAALAA

SEQ ID NO: 291861 - protein, 342 aa, unidentified
MHNPDVCGLDVSAKELVVMVRRGGKVEPHRSFSNTPKGHQELRRYLTRQRERVRVCMESTGLYGLDAALALQADSRIELMVANPRAVKDFSRALLQRSKTDPLDAWVLLEYAARMPFQRWQPPSAQGLQITALARRIHALTQQCTMEKNRLHAVAATETTLRVIVQDLRRSVRGLETAIARLSREAHKIVAATPELERRFLLLQSTPGIGPVSALQLLGELVLIPANCDVRQWVAYAGLDPRHHESGTSVHQKTRISKIGNRHIRRALYMPALTAARFAPPVRAFYLHLQARGKCKMVALVAVMRKLLHAIFGMFKYDAPFDGARLCPALSPATAPPAACAA

SEQ ID NO: 291862 - protein, 445 aa, unidentified
MTPCAPLLSTAEPDWAAFAAIDWASRKHFWSLAPCDGGPPESGTLDNTPEAVELWAMALRQRFAARPIAVAIEQKRGAVIYLLAKYAHFVVYPVPPSMAASYRQAFFPSGAKNDPGDAGLLLEILLHHRQRLRPRQPDTPATRLLQFLVEQRRQLVQQKVQQVQRLTDCLQQYFPQLRLWFDSLDSPLVTALLDRWPVLPQLQRAHPGTLHRFFVEHNCRREELIQQRIQAIYTAVAAIDDPVVIEACTRKTETLLHLICCLRQEVAGLEKRIRTLTEEHPDAPIFASFPGAGPATVPRLIAAFGTCRDAYANASDVQRISGVAPVNITSGNAKSTRMRRACPKFLRQTFHEFAAQSIPYSTWAKAYYQHYLRQNKSKHHAAVRSLANKWIRILYRCWKDHRLYDESIFLESQRRRGSLLGAELASLGTVQWRSQAGFQKLDDQP

SEQ ID NO: 291863 - protein, 309 aa, unidentified
MKESSKVIAFDAGKWRHRVFLDSQLKDVDNKKGALRSLLEAQPEGTIVAIESTGNYHRLATDLAYQMGFTVYVLNARRTAAFKRADKMRGKSDNIDARFIARYVCLFADSLHPYIPFPERLGRLRWLSKRRIDVASRKHDLQMSLRSSGLQSFAELEEAFDKLLAEIDAQMLEIAKEYPSYKRLLKIPGVGPVVAAGLLAVLEHYDFQKPDSFVAYCGLDPRPFESGTKVGKHKTSKFGDACLRRFLFLGAMSGQKCNAYKIYHQEAIDRGLKPMTSLMRIARKIAKLAWQAVKLNMEFQDEIFLKQLT

SEQ ID NO: 291864 - protein, 343 aa, unidentified
MQGITTVGLDIAKSVFQVHAIDAEGNVIVRRQLKRGGVLAFFQKLPPCLVGIEACASSHHWSRALQGLGHTVRLMPPAYVKPYVKRQKNDLADAEAICEAVTRPTMRFVATKTPEQQSCLMLHRTRHLFIRQQTAVINAIRAHLAEFGIVAPVGRKGVEQLLDVVADANDKRLPEMARVCVAALGAQLRTLKAQILEFDRQIMAWHRSNATSRRLDAIPGVGPALATALVASVADPKAFRSGRNFSAWVGLVPKQNSSGGKERLGSINKQGDRYLRSLFTAGALAVIRYAKIHGTRHRPWLTALLARRPTKVAAIALANKIARMAWAMLARGERYKEPIALAT

SEQ ID NO: 291865 - protein, 350 aa, unidentified
MIMIGADYHPAFQQIAFVDTETGELQERRLEQPEGAEKFYRELAAQGKRVRVGMEASGHARWFERLLAELNIELWIGDAGEIRRKRERKQKTDRQDAQHILRLLLKDDFPRIWVPSWENRDLRQLLWHRHRMVQARTRMRNQLQAVALNEGLRCKKKLWREAGRKQLEAFRLAPWASRRRQDLLELLDRLNPTIAALSQAMEQEVEKCPAAQRLMTHPGVGPLTALAFVLIIERADRFQCGKQIASYLGLVPLEDSSGNRRRLGHITKQGNSLLRFLLVEAAQVTVRSLPEWRSKYVHLTMRRGRKIAKVAMARKLAVRLYWMMRKEWDYGQLTKFGSYAGKPENRDGVK

SEQ ID NO: 291866 - protein, 413 aa, unidentified
MHVVYERCAGLDVHKRTVVSCAKIVDAAGGVQKASRTFSTMTTEVLRLRDWLKALGVTHIAMESTGVYWKPIYNLLEGHFELLVVNAQHIKAVPGRKTDVRDAEWIAELLLHGLLRPSFVPTAQQRVLRDLTRQRRSLLQERSRVINRLHKVLEDANIKLASVATDVLGKSARAMLEALLKEEEADPAALAQLALGKLRLKREQLTQALTGHLKPHHRVLIKEHLAHIDRLDEATRRLDQEIAGRMDLWEHWLQRLETIVGIKRRLAQEILAEIGTDMNRFPSARHLASWAGMCPGNNESAGKRFSGRTRKGNRWLRAALVEAAHGAAHSKATYLSAHYHRLATRRGAKKATIALGHTLLVIIYHVLRDDTDYADLGGNYFDERDRQAVERRLVRRLEQLGYQVSLTPTSPAA

SEQ ID NO: 291867 - protein, 344 aa, unidentified
MLYVGMDISSKTFVVHAINERKKVILKTAIAPSRQELRRLVKELGTEQKLFVFEAGNQLKWVADTLKSQEGVSLHVVHPNEVKWITASSGKTDKVDAKKLAELARGDLLPRKVHLVEGQARQLRELLSARTQVMQKRVSLLNSLRGYLKQEGVQLGEGFFRRSGWQEQLMTKRLSETLKTILIVFRASIEALRGAELELNERIAEIENKETKLLETIPGIGVLSARTVVAALDNVKRFDNRKAVAKYGALTPTIYQSGDVVQLGRINRDGRHEVRRVLLQCAHQLARMKSPAAKPLREFYERLARRTGKKKALVALARKLLTVAYGVLKSGLPFDPAKLLPRAA

SEQ ID NO: 291868 - protein, 341 aa, unidentified
MQITTIGLDIAKNVFQVHGIDAAENVIVRKQLRRGQIIAFFEALAPCLVGMEACATSHHWARELTKLGHEVRLMPAKDVKAYVKRNKNDAADAEAICEAVRRPTMRFVRIKSAEQQGQLMLHRARDLLMRQRTQLINALRAHLAEVGITAAQGREGIKELLAIIAQDEGSRLPVDAHASLTVLAAQLQAVQTTIGSIEKRIVAQHRSNEASKRLETIPGIGVIGATTITAVVTDPKAFRSGRDFAAWIGIVPRQDSTGGKQKLGPISKQGDQYLRRILIVGAHSVLRRARQQPEKYPWLTQLLARRPFKVVAVALANKMARIAWALLARGGTYRAPQLVAV

SEQ ID NO: 291869 - protein, 380 aa, unidentified
MEILYANCAGLDVHKKTVKVCLLRRPSTGQPHKEFRTYLTTTEELLQLGDWLKEQGCTHVAFEATGVYWKPVFNLLESSFELLVVNAHHIKQVPGRKTDVKDAEWIADLLQHGLLKASFIPSGPQREVRDLTRYRVRLTEEKAREVNRVQKTLEDTNLKLGDVVSDIMGKASRLILQAIADGESDPGRLAALAVGRVRAPQEQLEAALRGHVTDHHRFLLSEHLTQIRHLEQAIERVTAEITRRFTPPPPDEAPPSQKEEEATQEFSPASASPQESASSSPAALSWAAAVVLLCSIPGIGERAAMGILAEIGINMQQFPTAAHLASWAGVCPGNHESAGKRLSGKTRKGNPWLRCLLVQAAHSASHQKQCYLGSAISAHR

SEQ ID NO: 291870 - protein, 397 aa, unidentified
MIAVGIDVSKSKSTVAILNSDGEILAKPYDIHHVESDIDNLITYLRSLHDDVKIVMEATGHYHLPVLKKLHNADLFICVMNPYLMKKYGDNEIRRGKTDKKDAMRMAFYALEKSYSLTRYSSLEQKYLDLKFLSRQYNQRVSTKVKNRIYLGNLLDETMPGIENILMSKTINPENNMLYKFIEKYHDFDTIKSMGQKRFLNSYAKLAEKIGCRNYQRKALQIYELASDSITTRGSDPYTILSIEQCLTLLKQSEVAAKATMVQMQSIAQTLPEYPTVHAMNGVGDNLAPRLIAEIGDVRRFTSGKALNAFAGNDAPPFQSGQYESTNRHISKRGAPSLRKACYEVMQCLKMHKPDDPVYLFMIKKEEEGKPLNVAKMAAVNKFLRIYYARVMEIYKS

SEQ ID NO: 291871 - protein, 341 aa, unidentified
MQINTIGLDIAKNVFQVHGIDAEEKVVVRKQLRRGQVMQFFEGVPPCLVGLEACATSHYWARELTKLGHDVRLMPAKDVKAYIKRNKNDAADAEAICEAVRRPTMRFVQVKSAEQQAQLMQHRARDLLMHQRTQLINAMRSHLAELGIIAPQGREGVKELLAIVAKDANAHLPDDARASLIVLAAQLQALQTTIGSIEKRIVVQHRANKASKRLQTVPGIGPIGASAIAATVTNPKIFRSGRDFAAWIGLVPRQMSTGGKAKLGPISKQGDRYLRRILVVGAVSTLRRAKLNPERYPWVTRLLARRPFKVVAVALANKMARIAWALMISGKTCRSSWFATA

SEQ ID NO: 291872 - protein, 344 aa, unidentified
MEEIIRIGMDTSKSVFQLHGVNAVEQPVLRKKLSRREMVKFFEKTPPTTIALEACGGSHHWARLLSSFGHEVKLIAPQLAKPYVKRGKNDAADAEALCEAMSRPTMRFVPVKTADQQAALMLVGLRERLIRNRTQLANAIRGFAMEFGIAAAKGMCRIEPLLERIAADQSLPALARELFAMHGVEYRDLLAETKAVEEKLTALHRSDECSKRLAEIPGVGPVGASLLMMKTPDPRLFRSGRDFAAWIGLTPKDHSTAGKVRLGVITRAGDEMLRSILVVGATALLQHVRAGRSRHASRWLIELLQRKKPKLVAVALANKIARIAWKLMVSGETYRRTEGQSATF

SEQ ID NO: 291873 - protein, 403 aa, unidentified
MTEPQPGIYGGVDTHRDLHVAAVVDQTGRIRDVESFPATLAGYRRLLRWMRGHGELVRVGVEGTGSYGAGLARHLASEEVEVLEVNRPNRQTRRQRGKNDTVDAEAAARAALNGEATAAPKSGDGIVESIRAIRVAFCSTRNARTRVSNQLRDLIVCAPDQLRRDLEDLDGPARAERAARFRPGDPVDPTEGTKLAMRTLARQYQALTDDLDELRDQLDTLTQRANPALRAAVGVGADVASILLIAAGDNAERLTSDAALAALCGASPVEASSGKTVRHRLNQGGNRQANHALWRIAMVRLTCHPATRAYAQRRRAEGKSTREIIRCLKRYIAREIYRLLTNPHPVADRAELRERRTRAGISLATAANALNTQPSRLSEIERNTRPLQALEHRYRLWLDQNAA

SEQ ID NO: 291874 - protein, 385 aa, unidentified
MTIQPVAYKFIPRDYDVFAGLDVDKKSMSVVFADHQGAMRALRMAYRAEPLVNYVRKHFAGQRVAFAYEAGPTGFGLHDELVRQAYTCIVAAPSKVPRAPGERVKTNRLDSRKLAESLRGGQLQGIHVPPVVYRDLRHLVQLRDTHVRQLTASKLRIKSLLLYEGVPFPDPREKWTVRAMRELQRLPCSETVRFKLDDLLDTLHFHFQAAARATKQIRQHCLRDPELQQSIKLLLSLPGIGWIVASHLAARLGDPQQIKNGKQIAGFLGMVSSEHSTGEKENRGEITRSGDSRLRNKLIQSAWTAIKKDPELRDFYRRIYQRHPKKVAARKAIVAVARKLTTRVYVVLKEQRPYVMRPDSSIVPLTAAETVGPRDRLDSAQNDQS

SEQ ID NO: 291875 - protein, 422 aa, unidentified
MRSVALDVHLDFCEVAIVEDGELRSAGRIETKPCQIELFARSLGPDDRVALEVTGNAWEIARLIEPHVAQVLVVSPSDTGIRQARAKTDRLDARTLARLLAAGSLDGVWMPDRQTWVMRRRLSRRSQLVWARSRAKNQIHAVLMRQLVGRPPFADLFGVKGREWLSELQLPAEESETVSAAMRQIEFFDSEISEIERLIAQAAVDSAEIKRLMSVPGVNVIVAASFMAAIGDIHRFESPRKLAGYLGLDPLVRQSGVGPATHGHISKRGSVRARHALVEACWTTVRQPGPLHSFYQRIRARRGHSVAIVAAARKLACLFWCLLTREEDYAYQQPSLTRKKLRRLEIAAGAERYSAKAAGIWSANDAVRQAERELARQAEVAYARTVRDWHAVQAAKVGASVTPGRASNKPSKGEAARQTTSP

SEQ ID NO: 291876 - protein, 324 aa, unidentified
MTSAKKKLDFCVLFEGKVLREEQVSNHQQAVARLIGELKNDLEMDNEQFLICAEHTGQYTFPLVCACKSVECKLWLENPSQIKYSSGMQRGKNDKVDAKRIAIYASRFGDKVKYYDRPTEEIERLKQLERERALYVTDLAKYKGQMYDQKDFMPAALYRKKTKRMKGLIQELQAAIDAITAEMEKIIGSTEVLARQMELLMSIDGVGKVVALNVIIETEAFSRFDNPRKFCCHAGVAPFSYTSGSSQHSKNKVSHRANKNIKKLLHMAPVSVTHRKEGELKAYYMRKVEEGKNKMSVINALRAKIVARMFAVIKRNEVYTPIYS

SEQ ID NO: 291877 - protein, 365 aa, unidentified
MEKISTVKTKGKKILKGQLTIGLDLGDRSSCCCVLDENGEIIREQKIPTTPEGMQQAFGKMARSRIAMETGTHSPWVSRVLTELGHEVIVAHAQKVRLIVKSRRKDDRLDARTLARLARIDPELLSPVQHRSAQAQLHLAEIRARAGLVSARTALVNAARGLVKSYGERLRKCGTQQFGQETTSGLSAGLREALEPLMQEVESLNERIKEYDRRIEKMAKETYPETELLKQVKGVGDLIATTYVLTVEDPHRFRKSRDAGCFVGLQPGRRNSGESEPQMHITKEGDEYLRTLLVQGAHYILGPFGEDSDLRRWGLKLSARGGKNAKKRAVVAVARKLAVLLHRLWVSGEVYEPLRNSQKVMTAAA

SEQ ID NO: 291878 - protein, 440 aa, unidentified
MIPKSLYSGFSLCYRLVFPMADVDKVTVVSSLDIHKRSVVGHVLNVFFDKNENKFVAESRAVKQVPRSLTGLGDLADFLREFNVHTVVMESSGPYGLMVYYFLESEGFDVWMVPARDNKSRGGKKTDIEDAKRLARNFVAGSIRAYKLPSDPKVRALRTYVRARKKLVDQLVALKNMIIKTFDEACIDIKSIFSSLGKGFLMFLEGYLKGDSLDKIIERWPRLGKKREMLEIIMKTRLSEASLASLSSYLIIAKTIMKEIEKLDARIESLLAEFSDEVRLLLTVPGVGFKSAAVILAEIGNIKRFASAKKLASYAGLVPTVYQSGDEIIYGKLRSECNRRLRWILYEAALNAVKVSPWLRSFYERLIARGKKKKQALIAVARKIAVGIWHILTKRVPWKEAVRKNVRMPKKRRVPKVTVREALRILREAGYIVIKAKGSL

SEQ ID NO: 291879 - protein, 367 aa, unidentified
MKKISTVAVKQSRNISQPKLTIGLDLGDRNSWYCVLDESGQIQLEQRVRTTAKALQEVFGTMPRSRIALEIGTHSPWISRMLSDWGHEVIVANARKVRLIGESRKKDDRMDAQTLARLARIDPKLLSPVKHRSAKAQADLTVIRARAGLVRARTALVNTVRGLAKSYGERLRGCNVRNMNPEKAEGLSPELQTALEPLLNAIESLSERIVEYNERIEKLAQQSYPQVALLKQIKGVGTLIALTYRLTLEDPHRFRKSRDVGCYLGLQPGRRNSGQSEPQLHISKEGDPYLRTLLVQGAQHILGPFGVDCDLRRWGLKLAERGGRNGKKRAIVATARKLAVLLHHLWVSGEVYEPLHNCNRTTVAAAA

SEQ ID NO: 291880 - protein, 408 aa, unidentified
MNTLYVGIDVSSKSNVVYLMLPNGDKHSNFSVANSHEGSTQLVKRILSALTSHSLDTVLIGLEATSVYGDNLVYFLREDATLAPFNRKIHVLNPKQVKKFHDAYNDLPKNDYVDSFVIADCLRFGRINKEVYLGDYRYKALQNLTRARFFAVQNLIKEKQRFMNVLFKKYSTMTQEKVFSDTFSTTALAVYDEFESAEALANMDLHELTDFIIEKGKNRFPDPDAVAKAIQKAARSSYRLPKTVNDSVNQVLSISITSMKALESQIKEFDKAIKAQMELLPNVLISIPGIGPVYSAGIMAEIGDINRFDNQAALAKYAGLAWKQHQSGSFEAEVTRLIPSGNRFLKYYLYEAAFSLVRCDKEYSDFYHLKYKEVNRCQHKRALALTARKFVRLVFRLLKDNRLYVPAK

SEQ ID NO: 291881 - protein, 344 aa, unidentified
MDNHTQYSGFAGVDLAKKVMQIHFVTEDGEITDKSTKRAEFLDFFRNRGKCLIGMEACGSSQDWARKLEAMGHEVHLMSPKAVKSFVSGQKNDHNDAIGIYKAMFNGVRRVPVKSTEIRDLQTLRRIRSQVTKDKVKEINHVRGLLAEYGIVMGKSLKAFNKDISSALERLKERGDVSPLVAEELRTTVEAIKTKIKRQKKLDQEIEQLARGCKSYENFLKTPGVGPVTAAMLCVLLCDPSIFANGRQFAAYIGLAPRSRGSGGKNYVIGIPSKFNCDCESRAVFVECAQAIARCKNKSPWVEGILRRKPKKVALIAIANKLARQVWAMANKGESFKQMAILTA

SEQ ID NO: 291882 - protein, 428 aa, unidentified
MLGVGIDWAEEFHLVALGRPGGGVFEVVRIEHRPGAVDALVDRIAGLEPDPAEVRVVLETRHGLLVERLIEAGYLVVPVNPEMIAKRRGPAKKKDDAEDARLACLLALDPHETLRSLIPHGPVAAELRAVARDDDRAGRDERRLLNRLRADLLATFPAALSIAGEDMGAPRFLRMLQRWSTAESLGAATREELIGFARAQRTGYVERFADRVQQVMAVEQFTAPDHLVRAKVDTIQLLVAQVLLIKAQRRAWERRMSELLLGHRRGSSSIEPSGAGDEPGRAFPGGQIYLSFAGVGVRLAARIAGEIGDHIEQFDTPNSLQCYAGRAPVTRRSGKRDLVVAHRVACNHHLADATHKWAFASLRRSGWAKEFYDSQRARNKSHNAALRALGNRWLEVLWHCLHKGVPYDEDIHVANRRRFTPAPPTQAA

SEQ ID NO: 291883 - protein, 391 aa, unidentified
MDKAWAGVDAGKEFHWAHVLDASGRELLSRKVENDEADLSTLIDEALSLAEEVIWAVDQPGGSAALLLALLWERNQRVLYIPGLTVDRSRDAYRGESKTDAHDARVVADQARMRPDLGELEAGEQEIAELQLLLARRRDLITDQSRTITRLRETLVSLFPALERALDLNSKGPLTLLTHYQTSAQLRRAGHKRVATHLRNRGVKGSNKVADKALAAAKAQSVTLPAQELASRIVAELAKDVLGLKERICALDEKLEKRFFARPEARILTSLPGMGPILGAEFLVAVGDIRAFSSADRLAAYAGLVPAARDSGKRVGNNKRMRGGNKVLKRVFYQSAFASLRSAPESRVFYERKRAEGKRHTQALIALARRRVNVLWAMLRDGTAFESRSAA

SEQ ID NO: 291884 - protein, 353 aa, unidentified
MAYLEPPRVTVGVDTHKHVHVAAARDQLGRRLGVTIAPASRAGYGELLTWACGLGEVDVWGVEGTGSYGAGLVRFLAAHSQRVLEVNRPDRATRRRRGKSDPVDADAAARTVQAGEAIGTPKAQDGTVEMTRALRVARQTAVKARTQAINAIKALLVTAPVELREQLDGLPTTRLVRQAAALDPGQVATPTAAYMVAVRSLAARYQHLGAEIQLLTGELDRLTATHAPALRALLGVGPEVAAELLVCAGDNPARLHSEAAFAALCGTSPVEASSGKTRRHRLNRGGDRHANAALHRIVIVRLRWHQPTRDYVARRTAQGKTKKEILRCLKRYVAREVFAVLHQLAKQDQATAA

SEQ ID NO: 291885 - protein, 425 aa, unidentified
MEPERERRCGILLLKWEVTRVASRSMINGCFASLPWSGACSPASRQACSRAAALAVSIAFNAAGTSTAMAIVAQKHPFVIGVDTHARNHALSILACPHGETIDQAIFPATSAGLARAVSWAGQRTGGDLDVLWVIEGTGTYGARLARAAADAGYPVVEAPRMNARANRGIGKSDPLDARRIAQAALPLATTQLRQPRADTGVRAAVRVLIASRDHMSTERTATINALIALLRVTDLGIDARRPLTASQVTAVAAWRARTEDLATATARWEANRLAKRVTALDKDLTTITTRITDLLHHSPAGTLLEEPGIGPVTAAVALTAWSHLGRIRSEAAFASLAGVNPIPASSGNTIRHRINQGGDRRLNRALHMAVVTRMRMDPRTRTYVERRTTEGRTTKEIRRCLKRYLARQIYRHLNAAAQLTPDTP

SEQ ID NO: 291886 - protein, 343 aa, unidentified
MVVIGVDAHKRTHTMVAVDELGRTLGERTVAATSDGHLQAVQWAARWPGARFALEDCRHLTRRLEGDLLRAGFAVVRVHTRLMAAARRGGRQRGKSDPIDALAVAHAALREPDLPVACLDGPARTVKLLSDHRQDLVAERTRLCNRLRWHLHELDPGVDVPSRGLRRYHVLDGLAARLAVMDGVVARIAAGLVARCRELTGQVNALERELGTLVRRLAPALLAIPGCGVLSAAVIIGETATASRFRSRDAYARFTGTAPIPVWSGNTVRVRLNRGGNRAVNCALHMIAVTQARGIGPGKDYIARQLAAGKTTTEALRLLRRQLSDTVFRALLADEHRQAHRTA

SEQ ID NO: 291887 - protein, 390 aa, unidentified
MTTIVEIERAHVGGVDTHADVHVAAVIDPQGGLLGVESFRANPDGYKELSRWMRNFGTIGMVGVEGTGSYGAGLSRHLRSVGLVVVEVDRQNRQARRRQGKSDPLDAVEAARAAQSGRAFGVAKTRDGSVEAIRALMVARRSARESRTKAMNQIRQLIYTAPDELRERFVGTPPWRLAEGVAVLRVHADANPVRMATKTALATLGRRAVALDEEGSRLDALIARLVDNVAPELVQLVGVGYDTAALLLIAAGDNPSRLRSEATWAKLCGVSPLEASSGKVTRHRLNRGGDRQANHALWRIVLSRMSCHPPTKTYVARRTVRGQVQERDHAHTQALRCPGGLPLPAPGIAVRSGGPGPHTPAAASRRWPANDLPVRHSELHRLRRRDSPMA

SEQ ID NO: 291888 - protein, 324 aa, unidentified
MFYLGIDVAKAKIDCCLILVNSASKKKTKTFSNTPKGFEQLQTWLKQHAATSTQTIILMEATSIYHELLAKYLFDADYQVCVTNPARARYFAQSMSKLNKTDKVDSEVLARFAMTADLHFWQPLPQPIQFLNALLDRRAVLCEDLQREKNRLEKAESTFTMEPVLQSIHKSIRQLNKHIQGIDQQIDAHIDQNPDLRNDKELLSSIPAIADRTSLLMLSFLRSHTFESASQAAAFVGLVPIQKQSGSSIHGRSRLSKAGSSKIRAGLYMAAIVATRHNPHIRGMNERLLANGKTKMMAIGAAMRKLVHLCYGVLKHQQPYQADY

SEQ ID NO: 291889 - protein, 352 aa, unidentified
MSKMVIGIDLGDKRNYACALNYKGDVVDLCSIRNTADAIRKYLSNYNNNKDDMLVVMEAGTHSPWISRLIDQLGFTVMVGNPRKMRSIWAHELKTDARDAQMLARIGLFDTKLLYPINHRGIEAQAHLAIIKARDVLVRTRSALINHVRASVKSWGDRIPRCSAECFHKRVVDRIADALLPALEPIIGQIHQLTEQIRIYDTQIATLCAEVYPETGLLQQISGVGPLTSLTFVLTIENVDRFRKSRTVGAYLGLTPKIDQSGDSNKQLGLSKAGDRYLRRLLVGSAHFIMGPFGRDCELRRFGERLCERGGKNAKRRAVVAVARKLATKMHCIWRTGEIYNAFYNSGEKEAA

SEQ ID NO: 291890 - protein, 346 aa, unidentified
MNSTTVAVDLAKNVFELAVADAEWRIVERHRLNRTRFARFFVHRAPCQVVMEACGSAHHWARRLVAEGHTVRLLPAHYVKPYVGRSKTDRADAAALIEAARSSQIRAVPIKTLEQQQLQSLHRLRSQWLSTRQRYLATLRGILREFGIVIPLGPSVAKAQVGATLAAADSAIPEGLRPALAQMLQEIAPLEEKILSVERQLATLTRADERAQQLREIPGVGLLTSTALLSTVGDIQRFPSARHFACWLGLTPSERSSAERRRLGKISKQGDVYCRTLLVHGARSALLAAHRAQRAGKPLDRLRHWALNCERVRGHNKATVALANRRARIVWATWKYQRSFDGNWAA

SEQ ID NO: 291891 - protein, 343 aa, unidentified
MNITTVGIDLAKNVFQVHGVDERGKVVLRKSVKRAELTKVFANLRACLIGMEACGSAHYWARRLMELGHTVKLMAPQFVKPYVKTNKNDARDAEAICEAVTRPNMRFVPVKSVEQQTVLAVHRARQGFVVARTAQANQIRGLLYELGIVIPKGVRHLERRLPEILEDAENGLPDASRELFARLFEHFRELGAHVQELEHQIKAWHRESEASQRLEAIPGVGALTASALVASVGDAKTFKNGRQLAAWLGLVPRQASSGGKEQLLGISKRGDTYLRTLLIHGARAVMFHRMRRAADADGWLLKLLARRNRNIAAVALANKNARVVWALLAHQREYCANAIAAAA

SEQ ID NO: 291892 - protein, 368 aa, unidentified
MLKHSHYKVGCDAHKHYSFFSVFDGQGRAVQRTRVDHQRGAIRDFLARFPAGTPVALETVGNWYWIVDEIEAAQCTPLLAHALLAKKRMGYVHKTDKLDADGLATLLQMGTLPAVWIPPGDLRDERELPRTRIAFSKVRTMLKNRIHSTLAKYALSLHTDSDIFTAKWRPQLLAVLQQLPAETRRCVEQELELLELLQAHIHRLEERILKRVEITPTIRRVRSIPGPAEILSIVIERELGWIERFPSPKHLASYSGLVPRVSASGGKVHYGRMVQQSNHYLKWAFIEAANVIVRQRHHPNWIGKYVVRLFERTRQRKGHAVAVGATARYLAEATFWVLKKGEPYREPVSRHPAGLKSSVSPKQGQARA

SEQ ID NO: 291893 - protein, 318 aa, unidentified
MTQVALFVGIDVAKDKLDWCIRAVARATASNSPDGCAKLAAELKARGVTLAVMEASGGYERTMAAALRKQRVPVRIVDPKRIKDFARAAGRRAKNDPIDANTIAWFAHTFTLAAEDKPDREREHLAALVAERQDLVEIRTQCLNRNQHKAPVLCQHVRKNVLNEVKQGIAKLDAAIAAWIAKCPRLAARARLLASVPGLGRKSVAALLAWLPELGHITRQQIAALLGVAPFDNDSGEHAGIRHIAGGRRQLRNSLYMPLVGAATQHNPILKKYFKRLLASGKLKKVAILACMRKLIVILNVMLAREQSWNPQPTSAQP

SEQ ID NO: 291894 - protein, 340 aa, unidentified
MNATTYGLDIAKRVFQLYWVDAETGEIKNRRFGRDELITFLAQRPAGRVALEACGSAHWWARKIGALGHEVVLLHAQFIRPFVQTNKTDAADAQAIWTAVQQPGMRTVAAKTEDQQAMLSLHRMRSLLVKFRTMQINQLRGLLYEFGVTFRAGRVAGLDEIRQRMAELEDTLPRSIVLNLLEQLRRINMFEEDINQLEKRIGAWQKQEAACRAISEVPGIGRLTATALVATVGDAKTFRSGREFAAFLGLVPRQNGTGGKIRLGSISRRGDPYLRTLLIHGARSVLCHAKVPTAWQKAIQMRRPANVVAVALANKMARIAWAILAHETSYETYHVSHKPA

SEQ ID NO: 291895 - protein, 402 aa, unidentified
MNCVGIDVSKGKSMIAVMRPFGEVVVSPFEVRHTASELSELARLLKNLDGETRVVMESTGNYHAPVAWLLHGAGFYVSVVNAMLVHDYGNNSLRRGKTDKKDAVKLANYGLDHWLTLPRYVPEEDTRLMLKTCYRQYQQYSKVQTMLKNNLISLLDTAFPDVNRLFTSPPRADGSEKWVDFVATFWHCECVCGLSEKAFTAKYQRWCRKHRYNFSEEKALDIYASACGHFGVIPKTDTAKLLVEQAIFQLRATSAALAALKQEMQSLAASLPEYPVVMEMFGVGPTLGPQLMAEIGDVRRFHSKKALVAFAGIDAPPYQSGQIDVRSRSISKRGSASLRRALFLVMGVILQCAPGDEPVYQFMNKKRSEGKPYRVYMMASANKFLRIYYASVKAYLDSLEHA

SEQ ID NO: 291896 - protein, 312 aa, unidentified
MTDQIFVGVDVAKDWLDIHHASRGATRINNSHAAVRSFAARCAKEGAWVVFEASGGYDHQLRDALESAQVRFSRINPRQARDFARAMGVIGKTDRVDARMLAELGARLTPAPTQPLPPERRALQAQATRRRQLVEMRKQEATRLQQTADRVARADIRGVIAMFDRRIAKIEARMTDLVTADPELAAIERRLRTAPGVGPIVAATLIAELPELGQIDRRSIAALAGLAPIARDSGRRSGPRSIGGGRPIVRTILYLAALQASRRSPQFIHFRERLQAAGKSVKTAIIATARKLVVVLNAMLASGTDYRPTAVV

SEQ ID NO: 291897 - protein, 340 aa, unidentified
MIGVDPHKRSHTAVAVDNHENEIGRVEVRATRRQVEQLLRWAAPFGERVWAIESAGGLGYLLAQQLVTAGEEVIDVPATLAARVRVLGSGRSNKNDPNDSRSVAIAAMRAPGPVVVQPADHVAVLRLLAKRNLDLGRERNRVACRLHALLCELEAGGIGRELTVGKAERVLARVVPSSAVASAKVDMACELVEDLRRLDGQLAAMHRRIRDAIEASKTTLTELFGVGPVIACLVIGYTGDIGRFANNDRYASYNGTAPVEFSSGGRVVHRLSRRGNRTLNYAIHMAAISQIRHPHSEGRAFYERKLAENKTTREALRALKRRISDAMYRQLTNDAERRAA

SEQ ID NO: 291898 - protein, 368 aa, unidentified
MNTVKFIGMDVHKKTITVAIADEGRQNQPRIYGTINNDLSALDKFCRKMVSTANQLHFVYEAGPCGYGICRHLTEKGFDCMVAAPSLIPKKSGDRIKNDRRDAKMLARLHRADELTAVYVPNAQDEAMRDLSRAREDAVMVAKKAKQRLKAFLLRNRVVFTGSSQWSRAYFKWLADIAMPYPAQQVALQEYIYAVHESLNRVERLTDQIRQMVPGWRLAPIVSALQAARGVSLVVAVTVLAELGDLSRFEKPSQLMAHLGLVPSEHSSGESIKRGSITKTGNSHVRKILVEAAWAYRMQARVSRLLLKRQQGLPDQVCKIAWKAQLRLCARYRRLVAKGKTKQKVVTAIARELSAFLWAIAKQVQPLA

SEQ ID NO: 291899 - protein, 409 aa, unidentified
MLWGERRENGIIVAATKPTGCPMPQPNDLSRSLAALDENSTLIAVIEMSQSSWLVAGMIPGVERQPAKKLTPDEGGRLRLLHRWRGEAQKAGRTIDRIAVAYEAGRDGFWLARLLRAQGIEAHVIHPNSIAVSREHRRAKTDRLDTALLKRAFLGWLRGEREHCSMAAVPSLEEEDGKRPSRERENLVGERTRIGNRVKSTLARLGIRGFKPTLRTAAERLERLRTPEGEPVPPHTLAELRREMARLRLVAEQIREIETARLERLERQPNRGAHPMIRLLAQVRGLGIETADMLAREAFSRRLRDRRAVARYGGLTGAPDESGARRREKGLAKAGNARVRRGMIQLAWRFLRFQKDSALAQWYRARTADARGATRKALIIALARKLLVALWRLVTTGEVPHGVVLRPAS

SEQ ID NO: 291900 - protein, 359 aa, unidentified
MSNKVILNQSLGIDIAKDSFSYCFCFLNSDLSKDFELGEDLPNEEKGFKILEKRIKKSGVTKDSLTIVMEATGVYHEAIAYYLHDKGYRVSIMQSGRVKKYAQSLDQRSKTDALDSKMLSMLGCERKLTPWEPPSETMEVLRFLSRERATIIKERSIEKNRHHAMTAARFEHEKAIGRFDKRMKLLNIQIAEIEKELQELVSSDSVLKQKIAYLTSIPGVSFVSSITVIAETFGFSLISNSKQLVSYCGYDVVLRESGNYQGKTRISKKGNKHIRAVLHMPSMAAVRVNPTLKPFYERLKPKKAKPIVALVAVQRKMLILMYSLWKSNSYYDKEFEIKKAARKQILTAQDSHKNELVTS

SEQ ID NO: 291901 - protein, 320 aa, unidentified
MMAQNDPGVVGIDVAKDKVDACIRAFKLQQTWPSTAQGQRKLVAWLRKHQVNKAVMEASGGYERAWARLLREAGIEVRIVDPKRVRSFALSAGRLAKNDAIDAEMIAWFAETFNEAPSQAHDAAREELQSLVKARLDLIDFRMRLVSQSEHAAPGLVQKAQARILRSLTSEIAKLEAAISAKTKSTPDFAERAEIIQSVPGLAETSSATLVAGMPELGQVSDAIAAALIGAAPYDDDSGKRRGERHIKGGRRWVRNAIYMPCVGAATQNNPVLKAYYQRLLAKGKEPKVALIACMRKLIVILNTMIARRQKWDSSRYALN

SEQ ID NO: 291902 - protein, 402 aa, unidentified
MVGPVAHAIVGYTERLSRFVQSQYREDWSVTDRNTTRFVGLDVHKETIAIAVADGALPAQVLSTIPHNFATLLKTLRRLGPPESIVCCYEAGPTGYGLYRQLRDAGYSCHVVAPSLVPVQSGCRIKTDRRDAAKLAHYLRSGDLTFVYVPDEATEAVRDLERARDDAKIAERVTRHHLSKFLLRHGRIYLGKTSWNPAHMAWIAQEVFELPAHRQVLADYREAVELAGARVARLTARMAEAVEGWDKAPLVKALQALRGIDLVSAVTLVAEVGDFRRFAKAGDLMAFVGLVPSEHSSGGSRRQGRITRTGNSHVRRIVVEAAWHYRRQPRMSKAIRVRNDRVSPGVRGIAWKAQKRLHGRLNRLLGRNKPACQAVVAVARELVGFIWAIAQEEVLLAPARVA

SEQ ID NO: 291903 - protein, 318 aa, unidentified
MSSIVGMDVAKATLAVELIPANGTARQKHCANTAAGHAELIRWLARYATPPVAVGLEATGGYQEAVAIALHEAGHHVSVLHPTAIAAYSQSQLRRAKTDSTDAALIADYVRTQQPPRWVPPPPEARQLQALVRRLDALLEMQTQETNRLELAAPIGRPSIEATLAHLHDEIAAIKRQIADHIDQYPTLRTQRDLIVSIPGIGDTTAAIVLGELLDIARFTSARHLAAFTGLVPQIRQSGTSVRGRGTLSKLGASRLRKALYWPAITAIRHNAPLHRFAARLRAAGKPTMVIVAAVMRKLVHQIYGVLRSGRAFDPTSA

SEQ ID NO: 291904 - protein, 312 aa, unidentified
MTQACAAGVDVGRDYLDVGLAPSGRTFRASNSAAGVRAVVAGLRKAGAGRVVLESIGGLGRPLVRALAEAGFEVGVVDPKRVKALRTAEGKSAKTDDLDARLIARFALLMQDAARPVPGAEVYEIRALSTRRRQLVEMIAAEKVRLKQALDAPVAESCRQMIALLGQERLRIEDQLQTRLLKADGGAERSRLLQSIPGIGPAVSMTLMADLPELGQLDRKAVASLAGLAPHPNESGTRTGAARISGGRPCVRVALYMAAVSASRTDKGFRREYLALRQAGKPPKVAFVAIARRIAMAANSIIKSGRPWEVRA

SEQ ID NO: 291905 - protein, 451 aa, unidentified
MSLKTGRSGLPVVHEHAAGIDVGSRFHVVAVAADAASEPVQTFQAFTADLSRMADWLIGAGVTTVAMESTGVYWVPVYEILEQRGLEVILVNARDSRTVPGRKTDVNDAQWLQRLHACGLLRASFRPGRDIAALRTYLRLRERHLDYAAAHIQHMQKALTFMNLQLHHVVTDVTGTTGLKIIRAIVAGERDATTLAKMRDVRCKANSETLCAALRGNYQPEHVFALTQALQLYDFYQARVDECDVEIERSLSALNQGKSTPEAPLPNARHQTRLPNALNFDVRAALYQLTGTDLTQIHGIGPNLALRLIAECGTDLSRWHSAKHFTSWLTLSPGSKISGGKVLSAHSRKTNNRVTAHLRLAAVSVGRTSTALGAFYRRLAARIGKAKAVTATARKIAVLFYNAMRYGMAYADPGANHYEQRYRERVIKGLHRRAAEFGFELHRVEVAERVS

SEQ ID NO: 291906 - protein, 395 aa, unidentified
MEGKRFVGIDLAKRHYEACVLEEQRPIRRWSGKTDFEGRAQLARNLCAGDVVALEAGASAINLARRLMKVEGVEVVLLNPASLAIIYGSMKKTDKEDSLKLARIIQTMPKESLPIVALPSKEEEQARRLANQQMFLKQERTRMLNRLHGLFVEQGVTTITKKDLAKQKARSATLLQLSGVYRTMASQDCTLLAAIEEQIVLVNEEIHQMLCARQGEAEILMSIPGVGPVAALAFLGFIGNGDRFANASQVSYYAGLVPRVDFSGDSVHHVGHITKKGSPALRRALVQAAWSAVRTPMGSHFREVYDRIAARRGKRIAIVAVARKILELMYTLMKKHELYCYATAEQRQRKLKLYKLGSLQSGTVLNSTIGSPHAEEKRSQLCQLPIGYVHLCISS

SEQ ID NO: 291907 - protein, 316 aa, unidentified
MSQNYLGIDVSKSKFDVVLLVGEKSVSKEFANTPKGMKLLQGWLRSLRAGEVHACLEATGSYSDGIANFLYEAGYCVSVVNPFRTHSFRDAKLLRNKTDKVDAGMIAEFCRSERPEPWKPPSPQVIHLQALSRRIDALEEMRLMETNRLDTAPKQAKTSVKRMIRVLEKEIAALRKEAEDLIDSDPDLKQQDELLRSIPGVGKKTSMMLLSEVEFDRYDSARSVAAYAGVTPAKQDSGKQIKTRLSRVGAVRIRKGMYFPAIVAMTHNPIITEFASRLSKRGKRKMQIVCAAIRKLLHIAYGVLKHRTPFTPNPAF

SEQ ID NO: 291908 - protein, 413 aa, unidentified
MDVLHPRCCGLDVHKSSISACILLREAGRVQKHQRRFGAMTQELQELAEWLRQFGVSQVAMESSGVYWKPVWNILEGKFTVVLANAQHIKNVPGRKTDQKDAEWIAQLLQYGLLRPSYVPCEIIRDLRDLTRMRASLSQEASRISSRIQKVLEDANVKLASVATNVLGKSGRAMLEDIISGEDDPEHLASLALGHLRVKIPQLRLALEGKVRSHHRFLLRRLVDQIQFVEHEIGLLDERLEEIAQQRPELSQAVARWDTIPGIDRVAAWALLAEIGDNMAQFPTAGHLASWAALCPGNHESAGKRLRGTTRQGSPWLCRMACQCAWAAARTKNTYLTSQFRRLAARRGKKRAIIAVAHTIIVIGYHLQKNQSNYEDLGGNYFDRIHSDGLKRYLVKRLQQLGHKVTLEPMEAA

SEQ ID NO: 291909 - protein, 467 aa, unidentified
MKKLKAQDYLLKSVDCDEDAGGLPVVRNGAAGIDLGSEIHWVCAPRVDGAGREVARFGATTPELERMAAWLKERKVETVALESTGVYWIAPHEVLERHGFELVLVNTRELGRVPGRKKTDRVDCKWIQRLHSCGLLMGSFRPGEAVCMLRTLVRDRSTLVAEAADWLRRMQKSLDQMNVRVHRAVSDIDGLTGMAIMRAIVQGERDARQLAKLRNWRCHKSEEEIAEQLSGHWREDHLFSLRQALKMYDSIQERIGEYEREILKKLTEMETEQSRGQDVPKLNNTKKGKEIKSRGEEPMRQALYRISGVDLTTIDAISVGTVQVVMSEYGPDLSRFATEKQFVSHLTLAPNKPMSGGKAVTKKKRRGTASTRVAAALRMAALSMSRSQTALGAYYRQIARRIGGDVAVFATARKLATLIYRLLRWGQPYIDQGAQAYEMQYQARRIATLTATAQQLGYELTPKPCPA

SEQ ID NO: 291910 - protein, 414 aa, unidentified
MGSGCKFCIGRMNVNCVGIDVSKGKSMIAVMRPLGEMVIPPFEVRHTDAELCELSRRLGDLDGETRIVMEATGNYHLPVASFLYDSGFYVSVVNSMLVHGYGNNSLRRAKTDKKNAIKLANYGLDHWLALPRYIPEDEVRPMLKTTYRQYQQCAKVQTMLKNNLISLLDTAFPDANRLFTSPIRADGSEKWVDFVSSFWHCECVCGLSEKAFTARYQKWCKKHGYNFSQDKALDIYASACGHFSVMPKTTTAKLLVDQAVAQLRAASAALAVLRNEMQSLAASLPECPVVMGMFGVGPALGPQLMAEIGDVRHFHSKKALVAFAGIDAPPYQSGQMEVRSRSISKRGSSALRRSLFLVMSAILRCSPAHEPVYQFMDRKRAEGKPYRVYIMASANKFLRIYYATVKQYLDSLEA

SEQ ID NO: 291911 - protein, 527 aa, unidentified
MTSMLGCNRRRHSAPKSRSRRQSLQKPNGVIGPRVQKVGGERFAIVCVDPAKHRSEWMMADYFGNLLIEHQTLPHQAPFFVLAMEQIRQAQQKHRIQDTIVVVERTGNYYLPVKRAFSQAGFETRVVHPFATKQYRMPADPGNKTDETDLYAQHRAAVAGFGLCEFELESPYRQLQLRARHRRNLVEKAAALACQIRDHLHLAMPGYADLFDRLFERPTPLDIARRGDSPAMLLELGTAGLSQYLRVNQIRYQVRTIERVLAWARGASNLPIQDGPLHHAVWTDLYELYQHFRRKISALEQGLARDLTRTPYVRLLAIPGINAVSAAELAAEMGPIHRYANANAITGRSGLYPSRHQSDQTDNASGPIIRQANRRLRCVLMRIADNLACHSSYYRGQAELDQSRGVDKRASRVKIAKRFSRLVLACVAGDEPMRHPCFQQPDSILEKLRRFHHDHQTSLEHVMEDLQATVSQLPYNTRHHEAQIVAAVLEQQTKRRRGATAIGELMPAVLARLRVHITESEEPRDRP

SEQ ID NO: 291912 - protein, 341 aa, unidentified
MKSFIRIGIDLAKNFFQVHAIEREGAPAVARKLSRGKVLGFFAQAAPCRVGMEACGSSHYWAREIQALGHEVVLIPPAYTKPYVKRGKNDANDAAAICEAMSRPDMRFVPIKSADQQAVLMLHKTRELLVKQRTMTVNALRGHLSEFGLIAPKGIHRVKELLALALADETLPEAAKQASAMLASHSGGLDEKIDDLEKTIARASGNNQTSQLLDEIPAFGPLIASAIAALTPDPRVFRSGSDFSASLGITPSQHSSGGKDKLGAITKKGNRYLRKMLVVGCTSVLRVAHKHKGALAEWIVAMRARKPERVVAVALANKLARIAWAMMSTGESFRTELYTKA

SEQ ID NO: 291913 - protein, 435 aa, unidentified
MRLFVGDDWAQDHHDVELMDAAGQVLARRRLPEGVAGMARLHELIGQQLGADAEDAEVVIGIETDHGGWVAALVAAGYVVYAVNPLQASRYRERHGVSGAKSDRGDAHMLTDMVRTDSHQLRVVAGDSPAAGAVKVVARTHKTLIWERTRQVQRLRYQLREYFPAAVEAFADLDAPDALELLAKAPDPVRARRLTRAQVSAALKRARRRDIPAKATAILAALRSDQLGQPEAVTAAYAVTARSLIAVITVLNEQVKALESQVEADFGRHPDAEIYRSQPGLGSVLGARVLGEYGDDPHRYASGKARKNYAATSPLTRASGKKKVVTARYIRNDRLTDALMAQAFTALSVSPGARALYDAERARGTDYNPALRKVANRLVGILHGCLKTVSIQGWVARVRVRCPVQPAVAGSHGFPASARVMASRAVRPWFAVESR

SEQ ID NO: 291914 - protein, 451 aa, unidentified
MVSMSSDQTWMMIGSSELPLSVESAAGVVSEAAGVCVSVLGVLPAHAVRPNSRSTARARARYTDNGRQSNRGYRIQWEATMNSILYVGMDVYKENYTLCCYSFDRDKVEYRQTVPSDYRLILKYLEQVHGKYLEEVEFICGYEAGCLGYSLYHQLTDHGVKCIILAPTTMGITNTNRVKTDRKDASNIARCLAFHTYSAVYVPDGEDNAVKEYLRMRDDQKLALKKIKQQITAFVLRLGKQYTGSKSLWTENHLKWLRGLDLTLLEKETLQEYLITYDYLTDKLERLDARIEELARNERYGERVRRLGCFIGIKPHTALSLLVEVGDFRRFEKAPNFAGFLGLVPGEDSSGGGRNRLAITKAGNSHLRRLLVESSQSYSRGTIGFKSKELKKRQEGNPPEVVAYADRANERLRRRYYRMTLKNGTKRNVAIVAVARELACFIWGMMTDEIA

SEQ ID NO: 291915 - protein, 340 aa, unidentified
MTSYVGFDVSLAETSVRVLDAGGKVRFEGKVKSRPDDLIACVREHADDAERIGLETGQTAALLFRAMEAAGLPVVCLETRHAHKALSARNNKTDRNDARGLAELMRVGWYREAWVRGAPAHAIRSLLLGRRMLLATRRTLENTLRGAVKRFGLIITKTAGRTFKHRAAAAMELDPAYAAFARPIFAVLETVVDQIASYDRQLRAAARENETVGRLMTVPGIGHLTALAYYSNIEDPSRFKRSEDVGAYLGLTPRVHQSGEMDRTGRITKSGDSMTRSYLFEAANVILTRVTKPTPLRAWGLRLAERTGPKKAQVGIARKLAVMMHAIWSDGTEFEWRVAA

SEQ ID NO: 291916 - protein, 350 aa, unidentified
MTTIAEARPLVTGGVDTHSDVHVAAVVSDVGGVLGTEQFPTTAAGYRRLLRWMRAFGRLDRVGVEGTGTYGVSLAKHLRAENVTVVEVMRPNRQVRRRHGKTDVVDAIAAARAVLSGEANATPKTHDGPVEALRTLKLLQRSATKARTQAINQLRSLLVTAPDDLRARLRDLTQRELLQTCAAFRVSSEDDDLAAVTRFGLRELAQRALYLAERLVQVKLRLKRITEQIAPALTSLKGVGPDVASTLLLTAGDNPERLVNERSFASLCGASPVQAGSGKVQRHRLNRGGDRHANAALWRIALVRLNCDPRSKEYLAKRTTEGKSKAESIRCLKRYIAREIFAALTAPAAT

SEQ ID NO: 291917 - protein, 355 aa, unidentified
MHYAGIDYHKRYSVVHVLDESGETVGKGRINHDRPANFRDFFDSIGGSFSVVFEASMNWHWLHDILEEIDSIESIVMAHPYKTRIIAEAQVKSDKIDARLLAQLLRGDLICKAYACGREARHRKELVRQRAFWVRIRTSLRNRVHRLLGGEHDLQLPEVSDLFGRKGIGVSNKLELHEPARMQLKQNLRMLSELNQHIKTVEKSLDDEIGSDENVIRLKSIPGIGPIIAAVIVSEIDHIERFNSSNKFCSYAGLIPSSSSSGGKTHNGKLVARCNRWLRWAFVEAAWVAVGCDGYFGSLYRQHKARGKKPNTAIMIVARRMCQITYRLLTEKREYSAAPLNDKTFPGGSEVRMAV

SEQ ID NO: 291918 - protein, 413 aa, unidentified
MDKIYDICCGIDVHKKLIVACLNHKRKKELREFGATTRELMELAEWLQKNECEIVAMESTGSYWKPLYNIMESYGLHAIVVNPAHMKAVPGRKTDVKDAEWIAELLQHGLLQPSYIPSKDQRELRELVQYRKSLVGERTRELNRLQKMLEGANIKLSGTVTNINGKSARKILEYILSGNEIDEKKYDEIYEEKLIAHNLKASKEQILDDLKGFMSPLQRRMLKELLQHLDELNVHIENLNDEIDNFMKPEEKQASQVIQDVTGIGNTSAQTIVAVIGTDMERFPSDRHISSWAGLCPGDNVSAKKRKSGKIRKGNALLKSTLVLCAHAAVRHKSSYFHAQFKRISTHRGKKRAYVAVAHSILIAIYHILKDGVKYQDLGAEYYNQFNAERKIHAYLKKLKALGWEPPKEAVPA

SEQ ID NO: 291919 - protein, 392 aa, unidentified
MLYIGIDVASTKHDCCIIDGDGTVLNCNFTFDNSREGFDFFYDTVISYLPNKKLLYARIGLESTGHYSTNLTNFLKTKGFEITTFNPLHVNLYRKGQTLRKTKTDKTDAQFLAAMLFSDDSKSYTPVSYQMSELKSLVRHRFRLISLRSRLKVSVSRLVTILFPELHSLVWSIHQASSYALLLEYPTAKAISQCHLTKLTNLIKENSNGRYGRDKAILFRELALKSIGTNSLSVGFELQQTIRLINNLQEEINILDKHIKAIMKDINPPILTIPGISYTIGAIILAEIGDISNFATPAKLLAFAGLEPSTYQSGKFNAGKTPMVKRGSTYLRWAFLVAARLVAMRDTTFKNYFCKKKSEGKHYAVAISHVGKKLVRVVFHLLKTNSSFVPQS

SEQ ID NO: 291920 - protein, 387 aa, unidentified
MPQPNDLSRSLVTLEQDSTLIAVIEMGQSSWLVAGIVPGIERQPLKKLAADQDGLLQLLHRWRKEAAQAGHPIKRIAVAYEAGRDGFWLARWLRAREIEAYVIHPSSVPVSREHRRAKTDRLDTELLKRAFLGWLRGEPKHCSMAAIPTVEDEDARRPSRERESLVGECTRIVNRVKANLARLGIRGFRPRLAHAPKRLETLRTPEGTAVPANTLAELQRDMAHLRFVKQQIKEIETARAKRLEQASGGGRDAMVRLLARVVGIGIETADMLVQEVFSRKLRDRKAVARYAGLTGAPDESGQKRRERGLAKAGNARVRHAMIELAWGHLLHQKDSALAEWYERRTVDARGGTRKTMIVALARKLLIALWRLVTTGEAPAGLLLRPAA

SEQ ID NO: 291921 - protein, 391 aa, unidentified
MYFVGIDVSKYKHDCFIATETGEVIRDTFTFDNSGTGFTQFFSILETLNCPKSEIKVGFESTSHYMAPLMKHLSVKGYEFILLNPVIVSRFRRSTTLRRIKTDKIDAKTIAQVLASQDFESYHMQVYHFPELKSLTRLRDRLVKQRSYYLVMLTNVLDEVFPEFKEFFDDSLKSKTAFYLLDTYKIPSRMANMNSNSFDNLSKISRGHFSYAKFVKLKELAKNTIGSSSDADELEISSLLNIYKSINDEVGRVESKIEEIMTILDSPTVSIPGVGLMSAASIIAEFGDLSRFANADKMLAYAGLDVGRSQSGTADFKGKMVKHGSGYLRQALMNVVETMMIHAPVFYDFYHKKRDEGKAHRVALSHLARKLVRLIYKLETSHTRFNLTNSK

SEQ ID NO: 291922 - protein, 399 aa, unidentified
MKMNLSYELRVSVDVGCHNHSVAIGLSTGEILDEFSIAHEPEGFRKFFSRIEKQERKFGYPVSVAMEGFNGYARPLDTLVRAHDYRLFNINNLKLARFKEIFPGAAKTDPIDARKGLELFQLRDHLPMAKDVLQEVRKSPRENEILKRLSRRRRRLVNERVRVLNNIQADLQAVCPGLLAITVEANNLWFLRFITSTDDLRKLARVREATIRKIPGIGAKYASIILSWQKQAQFSHDVEWVGEMIQEDAVRILELHDKIKSLEARMEEIAQESQIAQTLSTIPGFGDICIAELAGEIGTIERFNNESSLALYLGMTNLDNSSGKQKGSKPPRQVNARAKAAMMTATDRHRKRVPQSQNYYEKKRSQGKKHNQALRALGRHLCRIIFKMLQENRGYLLPS

SEQ ID NO: 291923 - protein, 316 aa, unidentified
MIEEITVETTAQGYDELVEFAEEHPLRAWAIEGTGGHGAGLTRHLQRGEEFVIELDRPERAKRRNGAKSDPLDAVRAAREALARPRLGTPRRGGDRQALSVLLATRRSAVEGATVAQRQLFSLVIAAPEPLRARFRGQKLPAMVRTAAALRMHASWDTETTTTAAMLRTLAKRSQELSKEAAEHQRAIVAIVRSWRPDLLAQLGVGPIVAAVVLCAWSHPGRIHSEAAFAMLAGVAPIPANSGQTTTRYRLNPYGDRQLNRALHTVTVTRMACHQPTRDYRDRRTAEGKTSPEIKRCLKRYIARDLYRLLEHPQTT

SEQ ID NO: 291924 - protein, 384 aa, unidentified
MDQATPSTASANTLHCALELSKKSWLLAIQFPDREQPSLYPIAGGDAEKLMAKLTQARDRWAKMSGALPMITLCYEVGYDAFWLARCLKARGVECVVIDPGSLQVSRRGRRVKTDRVDVKTLLRTLIAWCRGERHVWSLVRIPSIDEEDLRRSHRERSRLVRERTAHINRIKGLLFAQGIRDINVKSRYKTLAVDELVTGDGHRLPPRLAGEIAREIRRLATVQEQIAEIERERDAAPTTCEATERKRDLLSQLKSIGPAISAFLSREVYYRQFANQRQVGSFLGLTPSPYDSGDEERCQGISRAGSGHARAVMIETAWLWIKHQPKSALSRWFVERTAGQSKRVRKIMIVAVARKLAIALWRYVELGLVPQGAILNPRMKARS

SEQ ID NO: 291925 - protein, 472 aa, unidentified
MRVQWYRVKKTYEKPQGGFLAIGPRYPGVLSDDGLVVLFTHWATHSGPRSYVRDSGMRRRAAGSRLQLNSHFRRKPMPTTTRHARTPALPQSMPVPPRVLYLALDLGQRHWTLAFTVGRGQRPRVRTIPGGDLARLTTELAAARRRFGLPPESPVVSCYEAGRDGFWVHRALLAHGVTNVVVDAASIEVPRRARRAKTDRLDARKLVTMLVRHAEGEREVWHVVHVPSEADEDRRHLERERQTLVAEHTGLVNRIQGLLATQGVVLTLRGDVPAQLAAVRRWDGTPLPPELRARLEREWARVTAVRAALRTLTARRHQRVTAATPAAADVPAVHLTRRLAALGAIGETTAWLLATEMFSWRAFRNRRQVGGFVGLTATPDQSGERVRELGLTRNGSVELRARVIELAWSWLRFQPGSALSQWYRRRYGSGTARLRRIGIVALARRLLIALWRYAIGGPLPAGAHQKGDAVAA

SEQ ID NO: 291926 - protein, 411 aa, unidentified
MTKEDFIYVGIDLHKETHTAVMIDCYNNKLGEITFPNRPADFPKLVTKVKKCNTDAKEVVYGLENAYGYGRALAVWLIDKGYLVKDVNTAISHRQAKHRGAMYRKSDSDDAGAIALATLNMLDKLPDACPNDAYWSLGQLVHRRDNIMKQRTRLVNQLHEQLCIAYPSYKQFFNDISRPTALYFWEHYPSRKYLKGKSVEDLRAELVPVSHNKCSTRTCEKILDAIAGDKVKNNAYQDARDMVTLSIVSDLQHYDKQLAEVDKMLEQMYKMLGCTLTTIPGVNVITAVKILAEIGDIKRFSNANKLAQFAGIAPLHLSSSGKGKDVATKQGNRRLQATIYFLAIQMVQISSKGTPRNPVVRAYYEKRKAEGKTSQQALICISRRLISIIYGMLKSGTEYRMPVMENTGETV

SEQ ID NO: 291927 - protein, 320 aa, unidentified
MALLQVFVGIDVSQDWLDVHVLPMRARFRKANTPEGWGELLDDLANHPQAQVAVEASGGYERGILGYLCEAGFTVHCLDPYRVRQFARAAGRRAKNDRIDAEIIARFLAAFTLHPTCIDPVVEELGEHVAYRRQLVEERISVANQARLLRDARLKRLSLHRLARLDVFIARLDKRLADLIAADPQLRAKAAVLRSLKGIGVTVAATVLALLPELGTIDRRKTAALVGVCPYDFESGKFAGQRRIAGGRKHLRNALYMATLTAVRHNPIIKAFYQRLIQNRAEKKPAIIAAMRKIVVILNARMRDHFAELANNEKLLLAAE

SEQ ID NO: 291928 - protein, 419 aa, unidentified
MRAHRNCCGLDVHKKIIAACLLTEDADGNSVTEKRLFGSMTRELHALAQWLCKAQVTAVAMEATGVYWMPVWNVLEQYGLQLLLINPEHYKAVRGKKTDLKDGTRIAELLQDGRLEGSYVPPVAIRVLRDLTRYRTKLIQHQSAIANRIQKLLEQCNIKLASVASDTLGVSAMAMLRALAQGETDATRMADMAKRQLRKKIPELQLALEGCLLPHHRLLLSEMIEDLDHVGAKITRIEQTIEQQMRPFQKSVNTWLTVPGIKHRLAWTLVAEVGPTVEAFPSAADMVSWAGVCPGNNQTAGKRKSGTTRAGNPWLRRALCEAAWAASKSKGTYLQAQFRRLAALRGPKRALIAVANSILTAGYYMLQRATTYQELGPDYFDKRNTLRTTNRLVKRLEALGHRVTLQPRFTAYAPQASGT

SEQ ID NO: 291929 - protein, 309 aa, unidentified
MNTQNKNIVAIDIAKSSLQIQTEKKAFCVTNDSTGLKRLHLLIKKLDHPYVVCEASGGYERLLVRTLHQWAVPVSVVNPAMVRAFAKSEGIKAKTDPIDARILLKFGQTKELRQTPCPDPHIEELAALMDRRTQLSDSLAREKNRLDKEPIYTRKWIEQTIEFISQQIQELELRIEEILTMNERLSKRVTRMTELKGVGKTTAYTILAYLPDLETMTRGQLVSLVGLAPYNKESGKTKSKSHIHGGRAKIRKCLFMAAQSAAQHNEVIHQYVSNLMKAGQPKKSALVAAMRKILICLRSLLKNPNFSLA

SEQ ID NO: 291930 - protein, 363 aa, unidentified
MVELSENFNPIRQEGLMERAKVSTEYCCGVDLHARTMYVTVVNRAGEVLVRQNMPNHFGQFVRVLRPFLPSVSVGVESTYNWYWLADGCHQADISFYLGHALYMKAIHSGKKKNDRIDSQTIADLLRCGFFPVAYPYPREMRATRDLLRRRHRYVSLRAEAYTHIQGTFSQHAMLGITGTDTKRKTTRRELPGEFEEPSLSMSVTCDLDMVDTLDAIITQIEQQIRALAKHHDRRAFSILMSVPGVGEMIALTILYEMHTAARFPSAQKLSSYARLVKVDHTSDGKWAGEGNPKIGNPHLKWAFTEIVQHGPRQSERLSRYYDKLKSRHRPGKARIVFAHKFAVAIYHMLKNGQAFDEKRFLS

SEQ ID NO: 291931 - protein, 365 aa, unidentified
MSKDIKKPAGETRRYVGIDLGDKKSRVCILDEGGQIVLQEWVVTTPEAFFKRFRGETKMDIAMEVGAHSRWASDLLRRCGHRVVVADPRQIGLITKSNAKSDKRDARTLAQLLRADARLLSPIEHRAEKLQMDLTVIRMRDNLIETRTRLVTSVRGVVKATGGRLPRGETTSFPQQVRDLIPEPLRPAVAPVLEVIDGLNEAAYEYDCLLEHWAGTRYEESSRLTQVKGVGTLTALTFLLTVGDKERFSRTRDIGPFVGLRPRLGQSGDNEPELRITKAGDGLLRKTLVECAQYMVGAFGQDSDLRRWGLKMIAAGNGSKRARQRAVVGVARRLAVLLMSLWKSGQSYDPLRHSRAQERSQEVAA

SEQ ID NO: 291932 - protein, 345 aa, unidentified
MKITTVGIDLAKNVFQVHGIDERGKAVLRKQLRRTQLAVFFGNLPRCVIGMEACASAHHWARTLQRFGHTVRLMAPQFVKPYVKTNKNDVADAEAICEAVGRPNMRFVPIKSIEQQAILSVHRVRQGFVKARTAQANQIRGLLGEFGLVIPQGIINVAKRVPEILEDASNELPVPFRHLIDRLTKHLKELDRQVKEFEGEIIAWHRSSELSRKLEKIPGIGPLAASALVASIADAHSFDNGRQVSAWLGLVPRQSSSGGKPTLLGMSKRGDAYLRTLLIHGARSAILAAKNKVDNTNGWLTNLLQRRHPNIAAVALANKNVRTVWAMLAHGREFKADYVPTRMAA

SEQ ID NO: 291933 - protein, 331 aa, unidentified
MFHYIGIDVSKQTLHLFDGQREHSFPNEPQLAAFDHFLTTHQPTDGEWVIIFEPTGAYSSYLRSYCARKGLKTHILHPLQSSYFAKAQGYRSKTDTIDARMLYATHRMLEPSGFQVPQVSVKVRQLGAWLSTYALLVKTEIQWRNHQQAGHREESADLALLGFLEEQEQVLKEKKASLLKTILQWLRQDEDLVQAMDHLCSIPGVGTITALHLLHLFMKYPVSDRNQLTALAGLDPVVKSSGTSLHQQASISKRGSHLLRRVLYCAAMTGVQHHPAWKLKYQGMVERGKVKNIGIVTIMRKILLHAYAVYREQRYYEDRSQAHSQKENAMA

SEQ ID NO: 291934 - protein, 422 aa, unidentified
MKLTWFVGIDWGSQKHQACVLDAAGKVLGEREFEHGGAGLSQMADWLLSFGAADESEVGVAVETPSGPVVESLMERGFVVHSINPKQLDRFRDRMSPAGAKDDRRDARVLASALRTDPHCLRQLEPTDPAIIELREWSRLDEDLTRERVRLANRMRQQLWRYYPQFLDAVDDDVAAPWVLDLWRRLPTPRAARRVREVTLTRVLKQHRIRRISASTLRDRLRAPAVKLAPGAAEAAVAHVRLVAERLALVNRQLDHAHRELGRLVDQLTGAAPADDPSASTEDEPSSQEPRDAAILLSLPGIGTKVLAALLAEGGDAVRRRDFGALRCLCGVAPVTRRSGKSMIVTRRLAAHNRLRDAAYHWARVAAHRDPASHDKYQSLRARGHGHARALRSVADRLLSVACAMLRDRARFDPHRVGSAAT

SEQ ID NO: 291935 - protein, 326 aa, unidentified
MQGKEASEQETKVKSSVGIDVSKDWLDVHVLPSGEVLRLPNTSEGIRRLKRWLARFDLALVVVEATGKWHRPLRRSLDASAIPVAVVDPFRVRMFAKAQGILAKTDRLDARVLAQFAAVMAPPVRAPAPAIFEELRELVVARASAVEQQTALKNQRSAATVKFLQRQLDRRIERADHDIEALDAAVRARVEADAGLARRYAILTSIAGIGFVTAMTMLASLPELGSSTVKQIAMLAGLAPIADQSGKREGVRVVWGGRANVRRILCLAALSAARCNADIAAFYRRMRAAGKPAKLALIAVARKLAVIANTLINQDRMWLPQAPKHA

SEQ ID NO: 291936 - protein, 452 aa, unidentified
MDQQTSVFNETRHKVAGLDIAGHADHYVCGPRRDDGGHDIAHFGTTTAELRRMLVWLQDRQVESVAVESTSVYWIPVADLLESSGIEVVLVDTREVRMVPGRKSDVKDCQWLQKLHSCGLLHGGFRPPESITAVRTLLREKENLTAARTQWIQQMQKSCDQMNIRIHHAVSDIDGKTGLAIIEAIISGRRDPVELAKLRDKRCKKTEAQIAEELTGVWREEHLFNLERAYRMLAFTDEQIALYDSKITEMYEKIADGLKRQIPPPQPEEKKLSAKKTVNAEGKRALLQITGFDMTAIAGIGYDTAAILVSELGTDFSRFPNERHFAAYIGLAPSLGKSAGKNVRQRKRCKNTSRAGRALRMAASTLYRSQSELGAFFRNVARRSDRKTAVKATARRMSHMIYRGVRYGVEYIDKGAETFEKRLREKAVRTVKFLIKSQNIKGMELAAVLGAN

SEQ ID NO: 291937 - protein, 347 aa, unidentified
MEQMQLYAGLDMHSETITGTIKDEQGNPVRVLKVETSKEGVKKLFERLRKKQITAVFEASRNWPHYAGLIQQYCDKVVMAHPLKVRAIASAKIKTDTIDSNVLSDLLRANLIPESYMPPLDIVELRELLRYRAGLSRLRGELKTKAKNILSREGKKCEFDEVTGKRARLWLNNLVINDLNRKELDYTVALIDNLTAEINKFDVVIEREQYKYPESDILKSVVGISTFSALMILAEMADIGRFPSPDKLASYAGLVPSTYQSSQTQYSGRITKRGNAHLRWILTQCAHASIKSRYSHKLKTFYLRIERKKGKQKAVIATARKMLTTIWHLLNKNEYYAYRDIPSKNGL

SEQ ID NO: 291938 - protein, 343 aa, unidentified
MTKIITIGLDLAKNVFQLHGIDASGAVVLRRQLRRAAVEKFFARLPPCLVGVEACGSAHHWARVIGRYGHEVRLMPPAYVKPYIKRNKNDGRDAEGVCEAVSRPTMRFVAVKSVEQQATLAVHSTRALLVRQRTMAANALRAALGELGIVAAQGYEGLRELMARLEEPSEEIPEMMRGALLVLARHWQALDADERVLEQQIAKAARCDRDARRLMKVPGVGPIIASTVLAKVPDAKVFRCGRDFAAWIGLTGKDHGTGGKHRPGRISKQGDRVLRALLISGASAHLRQQKRRGVSDPWLRDLLARRPYKVAMVALAAKTARIIWAMLVKAEPYRDRASAPAAA

SEQ ID NO: 291939 - protein, 344 aa, unidentified
MGDVSTIGLDIAKSVFQVHGVDVVGAVVIRKRVSRAKVLEYFGELLPCLVGIEACPSRASLGPRVAGLGHTVRLIPPSYVKAYLKRSKNDANDAAAICEAVTRPSMRFVPIKTKEQQTALMLHRTRQLLVRQRTMLSNALRGHLAELGIVSAKGRNGTAELLRIIADGADSRISAAVRSILDVLARQHSAIGTEIASIDKSIMALHRACEASRRLAEIPGIGPVGATALVAEIGDWNTFSSGRSLAAWIGLVPKQHTTGGKDRLGSITKQGNRYLRWLLVVGAMAVIRYARKHGTQKRPWLARLMERRPTKVAAVALANKIARMAWAIMVRGERYKEPKLLLAA

SEQ ID NO: 291940 - protein, 345 aa, unidentified
MNHVAIDLGSKESQVCIRQADGTIVVEKKHPTRRLGEWLQQWPTSRVILETSSEAFKIADAARAAGHEVKVVPATLAKQLGVGERGIKTDQRDARKLSEVSCRIDLPSVHIPSTEARELRSMLRSRELLITNRTSAVNHVRGWLRTQLGRIRSGATATFPDRVRARATESQQPVPAHIEEVLMVIDCLNIQVLSADRRVKQLARESPICRRLMTIPGVGPVTSLTFVAAIDDVSRFSSAHRVQSYLGLTPGENSSSERERRTSITKAGSTSVRRTLIQAAWAAYLRAPNEPMVRWATRIADRRGKFIAVVALARKLAGIMFALWRDQTSYLASKSAVSEINVLAA

SEQ ID NO: 291941 - protein, 400 aa, unidentified
MISVGIDVSKEKSTVCILKPYGEILSKPFEIQHVEQELNGLSAMLLRLEDEVRVVMEATGIYHLPVLSYLQEKGIFVAVINPFEMKEYRCQGLRRVKTDKQDAITISNYGVDHWYRLKNYEADTGIYEELKLLGRQYRHYMRMRVESVLELTHLLDYTMPGIKALLKGWNETNGKDKLSDFAEEYWHYDNITKKSEKQFINNYLKWAEKKGYHQNQDKAAEIYALAKEGIPTLSSSTPSVKMLVQEAVRVLREVDNTLMRILTQMQELAKTMPEYPVVRAMGGVGNVLAPKLIAEIGDVRRFHNGKALVAHAGIDAPPYQSGQFTGTERKISKRGSSSLRKIGYEVMRCLKTHTAPEDDAVYQFILKKEREGKSKRAAKIAGLNKFLRIYYARVMEVYQQ

SEQ ID NO: 291942 - protein, 432 aa, unidentified
MPPSIRQTTPRHDAGKGNSNMIAVGIDIGKEKHAAAILDADGRLLAKPAFFDNTHDGARRLWALIARHAPGGHVRVGMEATGNCWKPFHDFLAAKGAEVDVMNPIVSSASMAGDVRGRKTDKRDAVVIAGIVARGERPSYRPEGEAERALKCLTRQRRLLVDGRSGMKNRLRDQLLESFPEFPALFKGLFSKLPLALLDKWPGAAELARARRGSVAKVVKANSRGKDAEKEAARIIAAAKDSICFAHPPPKSAALCIRSTLRALRDLDAGIEEVDAEIQSCERPEMARLLDGIKGAGQALPMVIASEFGGLGRFERSPTTGARAGMAKRMLAFAGCEPRIRESGKWKGQSKVSKRGSGQLRLALYLIANTIRMNDDYFRAVYDEKIKTKHHSVALFYVIRKLLEVLCSLHRSGRKYSPTCAGRSCEQPVSLG

SEQ ID NO: 291943 - protein, 344 aa, unidentified
MNKLSRVGVDLAKNVFQLHGVDRNDKAVWSRRLKRDQWINVLLQKADSDCEIGMEACSGAHHWARLLMQKGFTVKLIAPQFVKPYVKSNKNDAKDAEAICEAMSRPHMRFVPVKSVEQQDIQAAHRIRTELIHQRTAKANQIRGLMSEYGLVAPKQLDHLRRAIPVWLEDGDNGLTMRFRHLLHGLWGDLKTLDERVSELDEEITSMAQTDPVTQRLQQLRGVGPMIATALVASIGDARQFTNGRQMSASLGLTPKQHSSGNKERLLGISKRGDSYLRSLLIHGARSAIYAAKGKDDRLSLWVNKLVERRHMNVAAVALANKTVRVAWAMLTQDTDYDPDYVTA

SEQ ID NO: 291944 - protein, 346 aa, unidentified
MTIVEDRPVITGGVDTHADMHVAAALDPVGGLLGVREFPATAAGYASLLRWLAEFGDVALVGIEGTGSYGAGLARHLAAASIRVVEVDRADRQDRHRQGKSDPLDAVSAARAAQSGRASGVPKGRDGAVEAIRALMVAKRSARHERTQAINQARALIVTGPDELRGRFAGHSPAALVDAIAALRPRPGDVPGYAIRVALRELGRRAQFLDAQLERLDELIGPLVAARAPGLLGLHGVGPDTAALLLVAAGDHPERLRSESSWAHLCGVAPIPASSGKTSRHRLNRGGNREANHALWRIVITRMSSHPATRAYVARRTKEGLSKKEIIRCLKRYVAREVYHQLRHSA

SEQ ID NO: 291945 - protein, 358 aa, unidentified
MAGPQPIVADVYTYVVGVDTHAATHHYAIIEARTGGLIDHAEFPTHTAGLLRAADWIARRTAEATAGEVDRVLVSIEGTRSYGAQLTAVLSQTGYRVVDAPTPKRERGSGKNDQIDAVVAARGSLHKHLDQLADARSGETSATLQVLLSARNSITGERTRAINALTALLRVHDLGVDARRKPTRQTIRSIAAWRTRRGDTPTQAVARREAIRLATRILALDAEATSNDKQLHDIVAATAPTLLDLPGVGPVNAATVLTAWSHPGRVRNEASFAKIAGVCPLEVSSGRRHEHRLNRTGDRQLNRALHSIASNRMKHHPATRDYVARRTAESLTKPRIRRCLKRYIAREIYRHLAALDTL

SEQ ID NO: 291946 - protein, 428 aa, unidentified
MSENSTTHPEPEFVAFVGIDWADQKHAWCSQRAGATQREHGEVEHTPEMVEVWVSQLAQRFGPGPIAVAVEQGKGALVYMLSKYECLHLFPVPSTMSASMRKSLYPSGSKDDPRDAELLLDLLLQHRNKLRRLMPDDEVTRRIQNLVEERRNLVDEKTTQLNRLTGYLKVYFPQMLEWFEKLDTKLVCDLLERWPSLEELQKVPPAELRKFFGQHRGRHQELTERRLEGIGQAMPAIRDRAVLEAKRAMVQVSAQLLRILLEGIANLDSKIEEAASAHPDFFIFESLPGAGSALAPRLLAAFGSQRDRYGSAEEVQTHSGIAPVMEKSGKKKWVHFRWACPKFLRQSFHEWAGHSISQSTWARAYYQQQRGRGKDHHAAVRALAFKWIRILFRCWQDRAAYDENKYLAALARRGSPLSSVLTVTAATL

SEQ ID NO: 291947 - protein, 354 aa, unidentified
MPRKSNDTVAVLGIDIGKNVFHLIGLNKRGAIVLRQKLSRRQLEARLANMPPCLIGMEACVGAHHLSRKLKALGHDPRLMPAKYVKAFLKGNKNDFRDAEAIAEAVQRPTMRFVATKTAEQLDLQALHRVRSRLVGERTAIVNEIRAFLLDRGIAIAKGLHRLRTVLPGILATRTDVLAPRLLHLIEDLIGDWRRLDERIDNVSLEIGMLAQDDTGCERLMTVPGIGPIISSATVAAIGTGDVFCKGRDFGAWLGLVPKQISTGDRTILGKISKRGNKYLRTLFVQAARVVLLRPANWERYGLKPWIEAAARRLHHNVLAIALANKLARIAWSVLHHGRNFEVRKMSDATSQPA

SEQ ID NO: 291948 - protein, 342 aa, unidentified
MQITTIGLDIAKNVFQVHGIDAAEKVVVRKQLRRSQVLEFFKALPPCLVGMEACATAHYWARELTKLGHKVRLMPAKDVKAYVKRNKNDAADAEAICEAVRRPTMRFVQVKSAEQQSQLMLHRTRDLLMRQRTQVINALRAHLGELGITAAQGKAGLTELLAIIAGSADERLPTEAHASLMVLAAELQAMRTLIASIEKRIIAHHRSDEASKRLRSIPGIGLVGATAIVATITDPKAFRSGRDLAAWIGLVPRQDSTGGKQKLGPISKRGDRYLRRILVVGAHAVLKLVRQKPEKYPWLTQLLARKPFKVVAIALANKMARIAWALLVKGGPYRARALVAAA

SEQ ID NO: 291949 - protein, 322 aa, unidentified
MSVAVLGIDIAKQKFDVALLVEGKTKHKTCKNSTEGFATLSLWLEKQGVQKVHACLEATGNYGEDLAIYLHEAGHTVSIVNPARIKGFGQSELIRTKTDKIDAALIARFCLVMTPGPWSPPSPEIRALRALVRRVDSLVDMRSQEKNRISTAHESVCLLIREHIAYLDQEIKKIRQQIADLIGQNPNLKQKKDLLDSIPALGKVTIPAILAELDDLNKFNHVSELVAFIGLAPKETLSGSSIKGKPRLCKIGHARLRKALYMPALVSIQCNPVMIAFYNRLKDKGKNGKVIVCAIMRKLVHVIFGVLKSGQKYDPNFKPVSA

SEQ ID NO: 291950 - protein, 354 aa, unidentified
MNTIKYIGIDVHQATSVFAIRDHQGKVIGEAVLETKPAAIIDFLKGQRGTVWATFEEGTYANWLYDVIHPHVAKLLVCDPRKNKLDGNKTDKIDARRLAELLRLNALTAVYHGQDNTRPLKELARSYVSLQQDSTRVMNRVKAIFRGRGIPCSGTSIYQPENRKEWLEKLKDKGAQIRAKRLLEQLESLEPLCVEAQKDLVREGRKHQSYKILRRIPGLGPIRVSLILAFVMTPHRFRNKRQFWTYVGFSVVRRGSAEYEITQGELKRSKRKPLPKGLNNNYNHVLKNVFKGAALSAAYRGPFKQLFDKRVADGKTPNLVLLTLARKIASITLALWKKGERFDIKRHRLSEQTT

SEQ ID NO: 291951 - protein, 425 aa, unidentified
MNYKQNEKINQVKESTLVIGIDIGSTTQYARAFDWRGIELGKVFTFSNSREGFESFKAWMQHLQDKYRKSDVIVGIEPTGHYWFDLGAYLEDEGILLVMVNPYAVKQTKELDDNSQSKNDRKDPKVIAKLVTEGRYSAPYTPDGVYADLRIMVANRKRLIREMTQIKNRFARWFAIYFPEYTDVFGDYEAQSSMLLLKKVCTPEAIVELGAEKINQIWRDAKLRAVGMKRATTLCETAKRSIGLKKGSSAARYEMKLLLEDYEYKKAQLDAVMEEIEKLCRKIPESEQMLAIKGIGVITVAGFLAEVGDVRRFESPRQIQKLAGLSLRENSSGKHKGQTTISKRGRSNLRAVLFNAAIPLIATNPEFKSLHEYYTTRANNPLKKKQSVIAISCKLIRVFYAILAKGVTYDAQKLISDIHRQPQAA

SEQ ID NO: 291952 - protein, 448 aa, unidentified
MQPEEIPDDDHELVIERVCAIDVAKASGKVCVRTPHPNRPDRRTSRVWDVSATSRAVTELAEHLIGEGIERVTVESTSDYWRIWFYLLEAAGLDVQLVNAREVKNVPGRPKTDKLDAVWLAKLTEKGMLRPSFVPPVEVRQLRDYTRLRVDLTRERTRYWQRMEKLLEDALIKVSSVVSRLDSMSVRDMLEALIAGERDPRRLAELARGKMRPKRAALIEALTGRFDDHHAELARLLLSQIDALSSHIDTLTRRIDELLAILTDPRRGPDDGYRIGDDGAAPFVNGLQAAERLAEITGIGPVSAPVILAEIGTDMTRFPTAAHLVSWAKLSPRTIQSGATQRGGKTGKGNPYLKGVLGEAAAVAARTDTFLGERYRRIVKRRGKLKALVAVARSILVVVWNLLADPTAHFRDLGADYHTRRADTDRRLRNHLAQLAALGYRVTVEPAA

SEQ ID NO: 291953 - protein, 343 aa, unidentified
MQTVTTIGFDIAKSVFQVHGVDAAGQMVVRRQLKRRQVIAFFQKLPPCLVGIEACASSHYWSRELQALGHSVRLMPPAYVRPYVKRQKNDMADAEAICEAVTRANMRFVPTKTAEQQSGLMLHRTRHLFMRQQTSVINAIRAHLAEFGIVAPVGRRGVEELLRVIADPNDKRLPEVVRACLAALGSQLLSLKQQILDFDRMIMAWHRSNQTSKRLNCIPGVGPLLSTALVASVPDPKTFRSGRNFSAWIGLVPKQNSSGGRDKLGRISKQGDRYLRGLFVAGALAVIRYAKIHGTKHRPWLTALLARRHTKVAAIALANKLARMAWAMMATGERYNYPASLKV

SEQ ID NO: 291954 - protein, 354 aa, unidentified
MDNIKYIGLDVHRDTISAAVLNGSGRLIQQSVLMTRAAAILDFIGGVRGTLHVTFEEGTHSAWLYDLLSRRVEKLVVCNPRRNALLKSGNKGDAIDARKLAELLRAGLLSAVYHGETSALEVQQLARSYTMLTEDTTRVMTRIKAVFRGQAIACTGRKLYGHHRNEYLAALGVCALRRRAERLYLQLDALQLLRRQARHDLVVECRKHTAAKWLQTVPFLGPLRAAVLIARVQTPHRFRTKRQFWNYCGLALETRDSAEYRVIDGQLERKKRPTLIRGLNWNYNHELKNVFKGAANAASVGQGEFRKFYLGLLKKGMRPEMARLTLARKIAAIALKIWKKGESFNAELLKSKAA

SEQ ID NO: 291955 - protein, 350 aa, unidentified
MTMVGGLDVHRHQITFDYVDDDGLVHWGQIRPATRHTLRVWLGEHCPQRDAEFALEGCTGWRYVSDELAAAGVGVHLGDPAEIAALRGPKKRAKTDRADARLLRTLLLEGRFPESWIPPAHVLEVRTLGRLYCALTEERRAWRQRIHAQLFHQGCPPIRALLSAAGREALAGAELSAVGRQYVDAALWRIDELSAEIEPLRTQIVNFARRQAGCRALQTHYGIGWLCAAIIWAEIGDARRFTSSDQLVRYAGMDVTVYSSDNKRAPGHLSRQGSPELRWAAFEAAKCAARRGSPDYAYYRRLAAKHERHNGKNPTLAVERKILRRCYHTLRELGAPALALPDTSSQQAAA

SEQ ID NO: 291956 - protein, 411 aa, unidentified
MRLYCASPKGICSVGSLLCVEGEVRFMNNTLFVGIDISKRSNVATFMNCEGKVVGRLTFSNNGSGADRLVAKILSYYEKEDFEAIRIGMENTSVYSKNLVWFLYEHEALNEHKLSIIPLNAIMVANYKKSFLDMDKDDITDSFAIADFIRIRPGLLPFKLDDRQEALKIMTRSRYNYVQALSRMKSQFLTRLFLSFSEMEAGKPFYSIFSKTSLSLLEEEFTLDELAEKPIPELVEFLQEKGGGKFQNPEEIAKVLKKAASSSYRVPAMVRESLNRTMASDMEIMRILENEIHNCDKNIEKLMKSVPAILVSIPGIGPVLAAGIMSEIGDISRFQKQESLGKMAGFKWKRNQSGKKESEDKAAVLSGNKKLRYYLVEAANRVRIHDPATWTARRCTWASAPFSLLTYSVFP

SEQ ID NO: 291957 - protein, 420 aa, unidentified
MSFKIFRFNCCGLDVHKTWIYACIGITDSNGRTDYKQARFSSFSKGLKELCDWLAKYNCSEVCMESTGKYWIPVFNVLEKANNSVILAHPKYTKPQKGNKTDRKDAKWICDLFMCEMIKPSFIPPADIRHLRDLVRYRFKLTCMITGEKNRAQNCLTVSNLKLDDVFSDVFGKSSRSITEYMLAHPGEIFDVAPFVDSRCKTPMEEIQAAVDGAISPEQAIKLRQCLNHIDELEKHLEEIEREILRLSDKYQAALDLIRTVPGFDKNPMTAIQILSEIGGDMSVFPSAKHLVSWAGCCPRNDQSNKRIKSTRISRAGNYIKPILVQVANGLLRSKKHPEITGRYKRIKSHRGHKKAIIAICRMLLTAIWHILSDLKPYTAEGFLESLPVNKAKVLTTSQALNLLKQRGYTIKDDIVPAMN

SEQ ID NO: 291958 - protein, 344 aa, unidentified
MEHFAGLDVSVKETSVCIVDDMGRIVREAKVASEPEALLAVLNNPSYRFRRIGLEAGPLSQWLYSALGEANLPVICVETRHMRAVLKAQINKTDRNDARGIAQMMRAGLYRPVHVKTLRSQKLRMLLTHRKLLQSKAIAIENDLRGTLRNFGLKVGVVGAIQFEARIKQLVENLPDLALLVEPLLVVRRVLREQIAVLHRRLLHIVRDDEVCRRLMTIPGVGPVVALTFRATIDVPARFRNSRAVGAVLGLTPCRHQSGESDRTGAISKCGDEMMRVMLYEAAQILLVRSTRWSWLKVWAMQIARRCGLKKAIVALARRLAVIMHRIWVDGTEFRWARQAAAAA

SEQ ID NO: 291959 - protein, 489 aa, unidentified
MPARRKGYAITAANEQNQRIIDEYRANAGKVGGPFAGIPWLLLTTTGAKSGKQTISPMAYTVAGDRLLVYASAAAWISPGGQPATPFTGEQTPTGFAALPRRLQATALSPTATLVVLEATGSDWVALAVARHEAGDRVAVVDPRQAHHCAKAQLRRAKTDALDARDLTQRAAALRPAPRTPPPAVYHEARQRLVARDGLLTLRTQARHQRHALLQWPVVVAAVREHRDALIADLDRRVAALEAESAAVRKERVWAESLACLTSAPGIGLVTASWLLVGTLHFALCAGPEALTADAGLAPVPRESGRGIRGRPAIGHDGNGRLRTALSRATRSAARHNPPSRPATSACAPPASRSRWRAAPPPGSCCTRPGRAAVRCNGSTRITISTTTIPCPTAPLDRAARDICRRLCRPPQRVGVSAPTRQTLTNAPLRALTSNLDFGLSRSLRRRSTARPSSALRGRTALLPYRDRGWTYKKPFAPTIRAAPAPARR

SEQ ID NO: 291960 - protein, 342 aa, unidentified
MRITTIGVDLAKNIFQVHAETAGGQVVFNRALRRSQVLTFFERLEPCLVGMEACATSHHWAREISKLGHDVRLMPPTYVKPYVKRGKSDASDAAAICEAVTRPAMRFVAIKTVEQQAVLSQHRARQALIGQRTQLANLLRSLIGEFGCTIRRGVNHVTAFAIEARAGTLASVPDSVRTTIVLLCEQFLALRERIGMLDKMILAASRQDERVKLLQTIPGVGPITASAVVATIGDPGRFQSGRDFAAWIGLTPLNTSSGGKERLGRITKMGDRYLRRLFVAGMTARIGHARRRPDYVEPWVMALLSRKPTRLATIAMANKTARIIWAVLTRHEPYQTQQLRTA

SEQ ID NO: 291961 - protein, 343 aa, unidentified
MQAITTVGLDIAKSVFQVHGVDAAGKVIVRRQLKRRHVLPFFQRLPACVVGIEACATSHHWSRELRALGHTVRLMPPAYVKPYVKRQKNDAADAEAICEAVTRANMRFVATKAPEQQACLMLHRTRHLFIRQQTSVINAIRAHMAEFGIVARVGRTGVAELLEVAADPTDRRLPEVARTCVTALGVQLRMLKAQILEFDRRIRAWHQSNQMSKRLDQVPGIGPALATALVASVPDPKAFRSGRNFSAWIGLVPKQHSSGGKDRLGSISKQGDRYLRGLFTAGALAVIRYAKIHGTEHRPWLTALLARRPTKVAAIALANKLARMAWAIMAKGERYKEPAALAA

SEQ ID NO: 291962 - protein, 359 aa, unidentified
MRYVGIDYHKRYSVLCATDERGQELKQRRISGNSATGFAQFFSELGEESKVVMEACWNWGWLYDLLAKIDGIDEVMLAHPYKTRLIAEAQIKTDRLDAQMLAKLLRGDLIAQSHAPSAATRARKHLLRQRLFWVRLRTMLRNRMHAILDRQQGLERPQLKNFFSRRGQTWLEEVQLPCAEDQPLLTQDLEVAELLEEKIKQLDRSIGQSQSEEEKLLESIPGIGPLFSSVIATEIDGVGRFNSATKLAAYAGVVPTTHASGGRVFNGRLLWQCNKWLRWALIEASWSAIQFSGYFGSIYRCARARGKNKNIAITMVAHRMIKIIWLLLAERRPYTETLPDRSEDGMTVVVRRKVLGLAS

SEQ ID NO: 291963 - protein, 377 aa, unidentified
MTNISATSSNERSIYAALELSKNSWLLAIQVPGRENPSLHPIKGGDIEGLMAKLDAARQRVAKDTGQTPAVTLCYEAGYDGFWLARFLEQRGLACLVMEPASLRVNRRARRVKTDRIDVESILHTLIAWCRGERHVCSMVVIPSVEEEDLRRSHRERDRLIRERTAHINRIKGLLFGQGIRGINVKSRTKTLMPSRLVTGDGRPLPERLGREISREIERLAQVQAQIVEIERERDHSATSCAATERKCHDLLRLKGLGPSLSSTLTREVYYRQFTNRRQVASYIGIAPSAYDSGEGHRNQGISKAGNRLARVAMVEAAWLWLRHQPDSALSQWFHHRTQGQKGRIRRIMIVALARKLAIALWRYLETGLIPAGAVVK

SEQ ID NO: 291964 - protein, 309 aa, unidentified
MEITVGIDVSKKRLDVYVHPTGELFSLGNDEAGLADLIERLGGVKPDCIGMEATGGYEKLAAASLTEADLPVVVINPAQVRHYGKALGARAKTDSLDARLIALFVAATEPELRPLVDTETAALAELMARRRQLVGMLVAEKNRLGRLPPGKVRLSVVRIIAALNEELAKLDSDLGGLIEQSPIWRDKQNLLASVPGIGERIARALLADLPELGQLDRRTIAALAGLAPFTRQSGQWRGRSFIAGGRAAPRAALFIGAMVAARHNGPLRAFYQRLVAAGKPKRLAMVAVARKLLTILNAIIRDRKPWQNA

SEQ ID NO: 291965 - protein, 316 aa, unidentified
MSQFSVFVGIDVSKDHLDVHLLPEGQSWRVANDETGCAELSERLSGLTGSMLVVMEATNVFWRLAATRLASAGLSAAVVNPRQVRDFAKATGQRAKTDAIDAYVLALFAQRIEPPVRALPSEQCQVAAELLSRRAQLMGMLVAEKNRLSTARAAKVRKDISATIAFLEKRLAALDEEIDQWLKSTPIDQSRVNLLKSFSGIGERTAKSLLISLPELGSLSGKQIGALAGLAPFARDSGNKRGERHIGGGRSVVRAALYMPAITAIRCNAVIRTLYERLIDAGKHHYVAITACMRKMLVILNAMLKSNQPWKDPQKV

SEQ ID NO: 291966 - protein, 366 aa, unidentified
MKKTSTVRVNGNMIFKGHKLTIGVDLGDRWSNYCVLDEAGEILLEQKLATTPEGMKQTFERIPRSLIAMETGTHSPWVSRLLKELGHEVLVAHAQRVELISKSTRKDDRHDARTLARLARIDPELLGPVRHRSAKAQIHLTVIRARAALVSARTALVNAARGLVKSYGQRLPKCGTQQVSRELGAKLNAELREVLEPLLKEIESLNERIKEYDERMEKIAKESYPHVELLKQVKGVGTQIALTYVLTLDDPHRFPKSREVGCFLGLRPGRRDSGQSQPQMHISKEGDPYLRTMLVQGAHYILGPFGEDSDLRRWGLRLAERGGKNAKKRAVVAVARKLAVLLHRLWVSAEVYEPLRNSQKAMRAVA

SEQ ID NO: 291967 - protein, 366 aa, unidentified
MDAIYIGVDFHARQQTTCYLKTETGELVISELKHQDKEQVRAFYQQFPSPVIVGLEASGYSPWFEALLEQLGCEVWLGHATEIRRRARWRQKNDRRDAELIWDLMVHDEFPRLHRPAATSREVLRMLRYRQKLIKLRTMAKNSLQAIALQAGLAKGKQLFTAAGQEEFKSAALSPVLQWQREHWFALLRPLNQQLLETMVWFKAQSKDDLRIQRLRTHPGIGLLTALCLLHTLQPVERFRNPRKVAAYAGFDPVERSSAERQHFLGISKAGSRLLRYLLVEAVQTAVRYDEDLKRFYKRVAERRGRPKAKVAAARKLLIRAYIMMRDEIDYAEFRHRAVAVRLARGGQGPSNVPAVLIGQPASPGA

SEQ ID NO: 291968 - protein, 320 aa, unidentified
MTDIVTHTDRIATIGMDLGKRSFHLIGMDARGKVMMRQQLSRGRLERHMANLQPCLVGIEACAGAHHIGRRLSTFGHNVRLIPGQYVKPFRKGQKNDYRDAEAIAEAVQRPTMRFVPIKSAEQLDLQALHRIRSRLVSHRTAVINQLRGFLLECGVTVPQGPARLREILPSVLAQRTDVLSPRMIRLIEELADDWRRLDDRVDAVTSEVQTLARQDECCRRLTSVPGIGALTASAVVATIGNGAAFSKGRDFGAWLGLVPKQLSQATERYSADSANAATSTCARYSSSGLAPCWQSPAAGRSLGSKNGWQQPSSASTITS

SEQ ID NO: 291969 - protein, 417 aa, unidentified
MIRAVIECCAGIDVGKKILVACVMTGPADGEAREETHKYGTTNAGLQQLRDWLSSRGCTHVVMESTGAYWKPIFNVLEEVPGMEVVLANSQQVRNLRGHKTDPNDSRWLAHLLRHGMIRPSYIPPRYIRELREFTRRRKQLVRAGVQERNRVQAVLEDANIKIGNVLTDIFGLSGQLMMEALIEGQATADQIAELAQRQARKKIPQIQAAIEGHRMTEAQRVLIRFSMAHLAFLEQQIAQLDEQIFGHIERCRLGRTHALLQTVPGVKRLAAAAILAEMGPDMDVFGTGSRCSSWAGVSPGNNESAGKRKRAPVLRGNPWLRSTLVECAWGASHRNQSTFQARYQRLAPRIGHKRAIVAVAHGLLLTVFEVLRSNEPYSALGADRMPPEKTKRLIRHHSKRIIALHRWFTQTSRSAT

SEQ ID NO: 291970 - protein, 340 aa, unidentified
MQITTVGLDLAKSVFQVHAIDAGGEVVVRRALRRAQMLPFFEKLEPCLVGMEACGTSHHWARELARLGHAVRLMPPAYVKAYVKRGKTDAADAEAICEAVSRPTMRFVAIKSIDQQAALSLHRGRDLLVRQRTQLVNLIRGLLAEFGVNIPRGITHALAFARRIVAGDVEAVPPLAAKVVGALATQALAVQDQVHGLERELMAWYRANALARRIATVPGVGLLGATALAATVTDPGQFRSGRQFAAWLGLTPRLNSSGGKERLGGISKMGDRYLRRLLIVGMTSLVRQAKRGPGTTDPRLALLLARKPVRVATVAMANKAARVIWAIMTRGGVYRAPQAA

SEQ ID NO: 291971 - protein, 368 aa, unidentified
MKSTTIIAFDQHAATTVAAVLLPGQRTSALHTLTSDSATILRFVEHLRRQGGVHCCYEAGPCGFELQRALSARGIPCDLIAPALIPRRAGDRIKTDRRDAGQLAVLYRAGALTAIHIPTEQEEAARDLLRCREDIRADLLRARHRLSKFLLRHGRRFTATKKAWSRRHDAWLRAQTWPIAALDQTHRAYLRAVDEVVARLCAVEEDLRALLDLEPLKPRVERLRCFRGIDDLTALTIAAELGDPRRFATAPSVMAFVGLVPSEHSSGTKRAQGAITKTGNAHLRRVLVEAAWHYRHHPFVSAVVRHRQRGAPAHVIAHAWTAQQRLHRRYQRLAARGKPKQHIVTAVARELTGFVWAALTQPSDRPTS

SEQ ID NO: 291972 - protein, 331 aa, unidentified
MDTDTGEFQEKRLAHPAEAEKFYRALVGQKVRVGMEASGHARWFERLVAELQFELRIGDAAEIRTKRVRKQKTDRQDAQLILRLLLEDRFPQIWVPSWENRDLRQLLWHRHRMVQARTRIMNQLQGVALNEGLRCKKRLWRAWGREQLEAFRLAPWASRRRHDLLELLDRLTPTIAELTQAIEQEVEKCPEAQRLQTHPGVGALTALAFVLIIGKAERFQCGKQIASYLGLVPLEKSSGNQRRLGHITKQGSTLLRFLLVEAAQVTARSLPEWRSKYYHLTMRRGRKIAKVAMARKLAIRLYWMMRKEWDYGQLTKFGSYAGKPENRDGVK

SEQ ID NO: 291973 - protein, 391 aa, unidentified
MQDEEDFNMSLQNAPNINVDGKMDVSNIHFINENAGGAFMAKYNIGVDYHKKFSYLVVKEEKGRVLRSGQITNSKKAVADFLKPFKDDSTAVLESCRNWCVMHDWLEDIVDDVILANPYKVKAIAEAKIKTDKIDATVLADLLRADLVPQAYIAKRPVRDMRNLLRERIYFVRLRTMTKNRITTIFDRYPEEVRKEKAKTDLFGKKGRAQLENIELRPADSALINRELNFIDFINVFIKEVEEVIAENFQISKNAKYLKTIPGIGQFFSMLIDAEVGDINRFRNEKKFAAYIGLVPSTYSSGGNTVNGRIIKRGNKLLRRAFIEAVIPAIAHDEYMRWEYDKLRERMNYNKAKTAMARKLSSIAFKCLKEQRNYKKFNKIELEYKKLGRAS

SEQ ID NO: 291974 - protein, 394 aa, unidentified
MLAANERPEVPTAIRIDLGAIFVSLELSRSKWLITSVSPGGGEKMSKHAVAAEDIAGLLARFSELKRKTQGRTGRCFPIIVIQEAGLDGFWIHRVLQAEGIESHVVDPASIATSRRRRRAKTDKIDGEALVRALLAYKRGEPRVCAMLRVPTPEEEDRRRISRERKALTNERVISEIRIKGLLFSQGISGYQPLRQDRRKRLEELRTGDGRALPAHLKAQVSRELDRLELLIGQIKAVEAERDVMLAAAPVGSAHGADCEQGAPAMLLALKGIGQEFAAVLWTEGLSRHFDNRRQVAAYAGLAPTPWQSGQIDHDQGVSKSGNPRLRTTLIQLAWLWLRHQPDSALSLWFKQRVKQNDGRLKKQTIVALARKLCVALWKYVNAGVVIEGAVMTA

SEQ ID NO: 291975 - protein, 418 aa, unidentified
MNEDGNTRGSRRYIALDIHKKYSVLGGVDREGRVVLQAVRVEHADLEGWLRKNLRSTDHVVFESTTNAWHVYDLLEPLVERVVVANPARVKQIAQARVKTDVRDTFILARLLAANLVPDVWVPPAHVREMRQLLSQRRQLVETHTQIVNRMHSVAHRHHLSHARGKRFNEKNTLWQKDKRLSKVEQFQLELEMENRVYIEKQIGRIGKEVAKMSHQKLWAESMTYLMQLPGFGVITGMTVLAAIGEVQRFGSAKHLASYSGLTGGLDQSGTHLVQKGITKEGPKELRWAMVEVAQRAVKSDPHWTRKFQEMEKRMHRNQAIVAVARQLLELVWYVLTRHQAYRHFSQERIAYKYLTWAWQMDEAARDGLTRQQFTRYYLMRLGIGHDLTRIALDPKHPRKIANEAELLAIRPELQHIE

SEQ ID NO: 291976 - protein, 385 aa, unidentified
MTAQSRVQKFIPRDYEIFAGLDVDKQSIAVTFADNAKLVKSLSLPHSSEYLVNYVRKHFPEKRIAFVYEAGPTGFGLYDDLVGEGYPCLVVAPSMVPTAPGQRVKTNRLDSKKLSEGLRGGQLRSIHVPSSSYRELRHLVQLRDTHVRQLTASKCRIKALLLYEGIAWPATDGKWSARVLRELQALACSTTVRFKLNDLIVTLQFHFHSAANAQKEIRRFCQTDAELQQSIRLLTSIPGIGWIVASHLVARLGDWREINNVRQIAGYLGLVSSEHSTGDKVNRGSITRSGDSRLRNKLIQGAWVAISKDPELREFYRRIYQRHPKKVAARKAIVAVARKLTTRIYAVLKQQRPYEFRVDTSAAPLTAEETGGPRERLDMQQSEQP

SEQ ID NO: 291977 - protein, 355 aa, unidentified
MKRTTKYVGLDVHQATTVASVRDRSGRVIARAILPTDEAALNEFFQGMRGSVNVAFEEGTQAQWLHDLLAPLTHSVTVCNLRGEPRRPGNKADVKDADSVSRRLLNGDLRSVYHGSANRALLHDCARAYLNAVEDGTRAMLRLKALYRARAISVAGEQVYSLEHRAEWLSRLGDAGARLRAELLMEQIDLLRKLRPRARLAMVREARLDPAYAILRSIPFLGPVRVSLLLATMKTPWRFRTKRNLWAYAGLAVVTETSAEYTYAHGRPVRRGRKPLTRGLNKNYNRFLKNVLKSAAAASLGRPGPFRDLYDRMVGGGMREDMARLTLARKFAAIALRLWKRGELFHATRLSVQTT

SEQ ID NO: 291978 - protein, 436 aa, unidentified
MTSHCQSYNYKSQEVILLSFKILKNNCCGLDVHKTWIFACIGITDPYNRTEYKQARFSSYTKGLQELCDWLAKYNCNDVCMESTGKYWIPVFNILEKNNIWVTLSHPKYTKPQKGNKTDRKDARWICDLYMCGMVKPSFIPPADIRQLRDLVRYRFKLICMITGEKNRAHNCLTVSNLKLDDVFSDIFGKSSRSITEQILQHPGEYFDVAPFVHGRCKTPIEEIQAAVDGAVSNEQAVKLRQCLNHIDELEMHKTEIEREILRLSEKYEDALSLIRTVPGFDKNPMTAIQVLSEIGGDMSVFPTAKNLVSWAGCCPRNDQSNHKIKSTRISRAGSYFKPVLVQVANALIKSKKNPEFATRYRRIKARRGHKKAIIAICRMILTAIWHILSDLKPYTPEGFLAPPSVNESKVLTTSQALNLLKQRGYVINDAASPVI

SEQ ID NO: 291979 - protein, 339 aa, unidentified
MKLYTAFDLHSSNSYLAIIDEQGQRVHKKKLTNDPELIIEALKPYKEQVAGVVVESTYNWYWLVDTLMNEGYAVHLANPNAIQKYSGLKYSDDQHDAFWLAEMLRLGILPEGYIYPKEERPIRDLLRKRRHLVRLRTSLIISLQNIISRNCGFKLRVDYVKALRRDRVAPLLDRHEDLALAGAVSKESIDFLTRQIKKIETVIEEHVELQEPYRNLLTIPGVGKILALTIMLETGPISRFPNVGNYASYCRKVSSKWISNDKAKGKGNKKSGNKYLAWAFSEAAELGRRFHDEPRAYYNRKMQKTNFMTAHAALAHKLARAAYYVIRDGVPFAPEKLFA

SEQ ID NO: 291980 - protein, 324 aa, unidentified
MFVGMNLHKKYTQYAVMDDAGVVVDEGRMENDPNRLRAFSDSLGEAKVVIESSSTWYWVYRILSEKHEVILSNPAKTKATAWAKVKTDRIDSVTLANLLRGGYIPESYVPPRETMELRELVRYRANLVRQRSQLKNRIHTYLLMNNVTMEGKPFMKEFVGELRKVEDYRVQGYLRLIEAVSREMEDVSKVIAEKAMGNEDAKLLMTIPGISFYSALLMASEIGDVNRFQDSSSLVSYAGLSPSTHSSGGTTYHGGITKQGSPYLRWILNQCVRVHMRVEPDGTVATFYSRLARKKGNSKAIVAASAKLLKVAYWVLRERREYHS

SEQ ID NO: 291981 - protein, 343 aa, unidentified
MEYGAIDLHSKESEIRIVSAEGAVVLHRRIATRRDLLQAVFGARPGLRILLESGTESEWVAQYLESLGHEVIVADPNYAPMYAHRGRGIKTDRRDVMALVEANRRGLYRVAHRVSAAHRTVRRHLQVRDQLVRMRTQIINVMRGQLRSEGLRIRSGRAESFVTRYQALELPAPLQAVLDPLVRGLAALEPLIAAADAWAQQTAQGDAVARRLMTAPGVGPITALSFQSALDTVARFRGPGAVSAYLGVVPHEDSSGERQRRGSITKAGPSHMRAVLVQASWALWRSPRSSAALHAWVHCLADRRGKRIAIVALARRLTRILFAMWRDGRDFQPGRVSRVVVAA

SEQ ID NO: 291982 - protein, 430 aa, unidentified
MNYTQNQKIEQVTESTLVLGVDIGSSEHYVRAFDYRGRELTRKVFRFSTDINGFNSFYDWVTQICIKHGKNEAMIGCEPTGHYWYTFYQFVKDYGMKLAFVNPASVKKAKELDDNSPKKTDLKDPKTIAKLVIDGRYSFTYVSEGIYAEIREVTSSRDRIMKELNAASNRIQRWLKIYFPEYLTVYKKFDTTTGMMILEEVPLPTMVTALGVDNIIKIWREHKVRGKGASFNRAKTLVDAAHDSVGKSGGQGAVMEIQMLLEDYKVKKQQLEMVTSVMEELIMQIPNAEKMLSVDGVGLVTVAGFISEVGDISRFKNPKQIQKYAGFELVENSSGKHKGRTTISKRGRKKLRKIIYQVVLPLIQSNKEFRSIYDYYRKRIKNPLKGRQAMIAVGCKLIRVFFAIMTKGVVYNGSKMIEDIHRPTQLPQAA

SEQ ID NO: 291983 - protein, 347 aa, unidentified
MNSVGIDLHRNRSHIAVIDEHGELSVSRRIVNDRDTFLEVLGALEGDSMIAVEATYGWEWLAELLEDAGYDVHLAHPSRTRAIAAARVKTDAVDARTLAHLLRADLLPEAYIAPRELRDLRELLRHRAALTAMRAALKNRIHAILAKHGITRQHSDLFGKGGRQFLAELRLREAPRRRLDSLLSLIDDFDREITATTKEIEQHAKADDRVDVLTQIRGVGRYTAMLIIAEVGDISRFPSARHLCSWAGLTPTVRSSDGKARLGRISRQGSPALRWALVEAAQKSTTGGDRLREHFERISRRRGRKVAKVAVARHILTLSYYGLRDGEIRCLARRSRASTTEKLAASA

SEQ ID NO: 291984 - protein, 425 aa, unidentified
MKKRPYRAVPVKNVDVADIRERLSGQRLVVGVDVAKVDFVATLMTERGENLVTVKWKHPTETEAFVGLLREVSATRLEVALEPTGTYGDALMHLVSKAGAEIFLVSAKRAHDAAEVFDGVPSFHDAKSSVLIAKLHLSGVSRPRRVRGDEERQLAAALRTMDMYQDQFQSHINRLEAILATHWPEVPQLLGLDSATLLALLATFGSPQLVAAESQEACALMRRTGRNLLREDKIQAVVCSAQGTVGVPAIAAESEALMEQAKDMQRCKEALCRARGRVEQLSCAHEATRPLAAVVGKVTAAVVISEIGDPVQFLAAAIFAKAAGLNLKERSSGKHKGKLKLSKRGSSMARKYLYLAAWRLVQRDPVVAAWYERKVERDGGIRNKALVAVMRKLTKALWHVRKGEPFDSSKLFDVSRLGFAECEAA

SEQ ID NO: 291985 - protein, 416 aa, unidentified
MKLFIGLDVSSKKLDTCFLTDSKEILFEGSLSNDLIGASEIKQRILDYQETFGFCQIVIGMESTSVYSFHPAMFFYLDEDLKLLPVEVTVENPYRIKQYSRMFDQDKTDKIDAQIIADYLRVDLHTLSPIKEEVYVGLQRLTRSRYQLVTQMVEAKQHFLENLTYKCNTLSKELANEDNKTSIFGASIMNLLTEGITLDEFSEMSLEAAVELLQKLGKGRFKNPEQLVKSIQKAVRSSYRLGKVTKNSIDLVLGIIANEIKFLKKQIKEIEKAITALLETIPEAQCLLSVPGLGAVYTAGLIAEIGQIERFDDQSKLAKYAGLTWTKNQSGNSQSENTPLNRSGNRYFRYYLIEATNRVRSTLPEFKEYYQKKRNEVPKHKHKRALVLTGRKFVRLIDALLRNGQFYQPAKVVIEK

SEQ ID NO: 291986 - protein, 354 aa, unidentified
MQSQIIATPKLFIGMDIHKKSWSVHLRTDLFDHKGFNMPPEPEKLADYVNSHFADHEVSLTYEAGCCGFSAARYFLNMGWAVKVVNANDVPRSDKQLYQKTDKLDCRNLCKQLQRDQLHGIYIPTESEEQLKSWLRQRNEIVKQLRKAKSQIKGLLLFHGITIPDQFDNPNWSRDFLTWLKNIQWAHTTGTGGMNSKLRVLEMLKSEYLQTSNELRAYCRKNHKKDYYLLKSIPGIGGLLSAAILAELGDIRRFKNEREFRSCIGLIPGIHQSSETIIKMSLTPRCKALLRSYLIESSWIAIRKDPELQAYYRKHAGKNSKNVIVKVAHKICCRILSVIKNETPYQINHKCVQQ

SEQ ID NO: 291987 - protein, 316 aa, unidentified
MSKSSLFVGIDVAKAQLDVALRPTGERWAVPNDDTSIAVLVSQLEAAHPTLIVLEATGGCQRAVVAALAAAGLPVVVVHPRQTRDFAKATGPLAKTDALDARALAHFAEAVRPTPRPLPSAQEAGLRALLARRRQLVGMRTAEGNRLSSAPAQVQADLTAHIAWLDQRVATLDDTLDTTLRARPIWRARATLYRSVPGMGPVSARTLCLDLPELGTLSRQRMAALAGVAPFNCDSGTMRGRRAIWGGRAPLRATLYMATFVAVRHHPVLQACDERLLAAGKAKKVALVACMRKLLTILNAMVKHQTPWQPQEVAIA

SEQ ID NO: 291988 - protein, 342 aa, unidentified
MPRTSTVHAVTTIGMDMGKNTLHMIGLDKRGAIVLREKVSRGRIASRLANMPSCLIGIEAGLATHYVARELAALGHDVKQVPPTYAKPFRQGHKNDFRDAHSVAEAVQRPTTRFVPAKTDEQLDLQALHRVRSRLVSERTAVINQIRGFLLERGIIVRQGLRFLRQALPYILAKRTDVLSPRMVRIIADLASDWRQLDERIEPVTDEIETLAKSDDGCRRVMTVPGIGPIISSAMVAAIGNGAAFARGRDFSAWIGLVPKQMSTGDRTILGRITKRGNGYLRTLFVQAARVILLRPASWPKHSFWVWLARAAQRLHRNVLAAALANKLARIAWTVLAQGRGW

SEQ ID NO: 291989 - protein, 450 aa, unidentified
MAKQKKRKHGKVERILPVMRSNAAGIDMGATEAVVAVPADRDAESVRSFPTFTQDLHALVDWLQQCRVDTVAMESTGVYWIPLFQILEARGIEVHLVNAQHVHKVPGRKSDVLDCQWLQYLHSVGLLKASFRPEHAVCEIRSLMRHRENLVQMACVHVQHMQKSLDQMNLQIHHVISDITGVTGLAIVDAIVAGNTNPKELAKLRDYRIKASLETVTKSLVGDYRPEHIFTLKQSLTAYRYYQQLIADCDQEVHRRILDFDSKNGDLTATIDAADAAQTPPAGFDLHHHLERIFGVDVTRIPGFDTLRIQTIFSELGADLSKFPTDDSFCSWLNLCPKDGTSAGRRIRGSKIKTRNRVTLAFRLAALSLHNNKSYLGDYYRAQRARHGALKATKNAAHKLARIFYHLVTTRQPYDETVFAKFETRNQQRRLKKLQSLARQYGYTLVEARA

SEQ ID NO: 291990 - protein, 365 aa, unidentified
MNQYSADYENGVTAGLDLGDKYSQVCVVENVEGKVIEEKRIKSTTSAMAKYFASYKPMRIAMETGTHSPWLSRMLKEQGHEVVVANARELRLIYKSKHKNDRADAEKLALLARSDLRLLSPVHHRSKAASNHLAILQAREGLVKARTDLINQVRGLVKANGKRLRKCSTEAFAAKVGDEIPEGLQAALLPLIEVIASLTEKIKGFDKRIKELCDEEYSHTELLRQVKGVGVISALAFVLILEDPERFDKSRSVGAYLGLTSGERQSGEQDIKLRITKQGNEFLRKLLVQCSHYLLGPFGEDSDLRRYGQKLAAGGGNGAKKRAVVAVARKLSVLLHHLWVTGLVYEPLYQHHQKARRQDALAKAA

SEQ ID NO: 291991 - protein, 349 aa, unidentified
MRFYTNTHNYYCGIDLHAKTMYLCILDREGRTLLHKNMRSRPEDFLDAVEPYRDDLVVAVECIFTWYWLADLCQREEIEFVLGHALYMKAIHGGKAKNDKIDAFKIATLLRGGNLPKAYVYPPKMRATRDLLRRRLHLVRRRANLLAHIQNTHHQYNLTPPAAKIAYKANREGVAEAFGEPDARKSVEVDFTLIGHYDSLLRDIELHLERRAKQHDPQAYHRLRSVPGIGKILALTILYEIQDIRRFPRVQDFLSYSRLVKCEHSSAGKKLGTGGAKIGNAHLKWAFSEAAALFLRNNPEGQKHVRRLAGKHGKSKALSILAAKIGRAVYLILSKERVFDMERFMAKAA

SEQ ID NO: 291992 - protein, 490 aa, unidentified
MAAKTLAHGMGTYFKDCAHPKSKWPKCPHLYKIQFRDAAGKQRGEAGFETDTAAITRLSDVYNAKRAAPGRAGRAARVAKYGAMRFEEYAAEWRDSQRHLEISSLLARARITDDLDGLHQLLELLTTHGDTANTLVPVAIETSRGLLVACLRATGRPIYAINPMAAARYRDRHTVTRKKSDHLDAMVLANILRTDRAAHRPLPDDSELAQAIAVLARAQQDAVWDRTQAGNKLRSHLREYFPGFLAAFQHNREGISSNVARAVLAAAPTPDQAAKLTRTQLRALLKKAGRQRGIETEAERLRDALRIPQMRQPHPVELAMGRQTIALLRQLDAACTSVDDLAEATVESFDTHPDAEIITSFPGLGSLTGARVLAEIGDDRSRFTDAKGLKAFAGAAPVTRASGISLAVTACRVKNQRLASVGYVWAFASLTASPGARAHYDRRRADGDRHTAAQRNLFNRMLGCLHHCLTQRSVYDEGTAFPPPALRAAA

SEQ ID NO: 291993 - protein, 353 aa, unidentified
MKCDKYMGMDVHQAMTVVVVLDGDGKVILETMVATEAAPIIRLVQSLSGPLHVTFEETTQAAWLHDVIRHFVTEVVVCDPRRNKLLAEGSKTDKVDARKLADLLRTGMLRSVYHGHEVTRKLKELVRAYETLSGDSRRTMTRIKAIFRGRGIRTAGRGVYQPKQREQWLEMLTEPGIQQRAAWLYEQLDQLRVLRRKAKQVMLEESRKHRAVGLLKTIPELGCIRAAFIVATVDTPHRFRTKRQFWSYVGLAVVTHMSSEYEMKAGQVVRRRKPLATRGLNHNCNHRLKEVFIGAATSASQHKSYESVRERLNHNGMRAEMARLTLARKIAAIALMVWKKGVEFDPKKLNATT

SEQ ID NO: 291994 - protein, 341 aa, unidentified
MSTVALVGIDLGKHSFHLHGQDKAGREVFRKKTTRQQMMRLLGKLPSCTVVMEACAGAHFIARQLKVFGHEVKLISPRFVRPFVKGNKNDFLDAEAICEAASRPTMRFVTPKTEAQQTLSVLHRMRESLVRDRAKTANQAHGFLLEFGISLPKGLSLVRQLPCTLAEHELPPRLVRLLSRLHEHFCYLDEQIKALDKEMASQLAEDDLGSRLLTIPCVGPITASLLCAEMGDGRQYGGSRDFAASVGLVPRQYSTGGRANLLGISKRGDKNLRRLLVQCARVYLQRLAFQQGALADWVRSLRERRHSNGVVCALANKFARIAWAIAAKHSEFEAGPGATAA

SEQ ID NO: 291995 - protein, 373 aa, unidentified
MKYSTVYVGMDVHKESFSLCCYTNEKEQAEYPQKVDGHYSKVINYIEAMRFHYGDDALFICGYEAGCLGFTLYRQLTDHNVKCVILAPTTMLQQKGKKKVKTDKRDAALIARCLAHHDYSPVHIPTEQDEQTKEYIRMRDDHKLALKKVKQQILSFCLRHNYRFDGTANHWTQAHLRWLKSLKPKGLYAEILQEYLLTYDNLTDKLERFDNRIEELASNETYQENVHKLSCFIGVRTVTALAVLTEIGDFKRFASAQHFASYIGLTPGEDSSGNDQHRLWITKAGNRHVRSLLVEAAQSYSRGQIGFKSKALKTRQNGNPPEAIAYADKANERLRRKYYRMVLKNNKKTNVAKTAVARELACFMWGMITGNVA

SEQ ID NO: 291996 - protein, 332 aa, unidentified
MNKYKETFGVDISKDVFDVQGSASGHKQFKNEAKGFVSFLKTLPQGSLVVMEATGYYHYRLAQFLYKNKVMVSVVNPLSVKRFIQMKLAKVKTDKSDAKAICDYGLAIEVPLYNALTDVQSECLQLFRLLDSYLKKRTATKNKLHGEETLGIPSRFVYRSLKRNLKHLNKEIEGIDQRLLALVKEEQQQQLSLLTTVPGIGLKTALFLIVVTDGFSKFETASQLCSYVGITPTIRESGSSVRGRSRISKVGNKKLRNLLFLCAFNACKHNKACREMYERIVNKGKSKKLALIAVANKLLKQSFAIAKSGRPYDQNYVSVLKFTVGVCELIVA

SEQ ID NO: 291997 - protein, 338 aa, unidentified
MKETAVVYIGIDVSKETLDIDAGNLGVTRIGNTPAEIRKALKAIARKVPAGGRPHACFESTGQCHAALAAECQRAGMRHSVLNPHKVACFAKSVAHAKTDAVDASIIRRYAEVRRPEPAPPPSKAAAGLDALLVLREAVVKANVALRAVLATVKDAAAGKPARKAIACNGKQIAEYDRLIAEAVKADAETSAFVDALRSVKGVGELTAAKFAAWMPEVGTLGRRRVAALAGLAPHTRESGKWKGQSRIGGGRKGIRDALYMPATTARRHDPRMKKAYKALRARGKIHKVAQAAVMRMLFCRIEGVAKDYRTKRNTAQLPAPPSSLPPSPPAPPLLPVL

SEQ ID NO: 291998 - protein, 343 aa, unidentified
MNEVITIGVDLAKNVFQVHGIDAEGSVIFRRQLRRGQMLPFFKKQPPCLVGMEACATSHHWARQLIGLGHEVKLMPPRYVKPYVKRNKNDMADAEAICEAVTRPTMRFVEVKSPEQQSVLMLHRTRHLFVRQRTTLINALRAHLAEFGIVAGVGRNGLERLLHVIEDGEDDRVPPTARDCLLALRDQLEMVKQQILGADRCILAWHRGSEVSRRLDDIPGVGPLIATALVASVPDPHIFKSGRDLSAWIGLVPKQNSTGGKDRLGHISKAGNRYLRTMLVVGALSVIRRAKQVGYTKRPWLTKLLERRSTKIAAIALANKNARTAWAMMAHGTFYKEPVSQAD

SEQ ID NO: 291999 - protein, 380 aa, unidentified
MNRIIKIGMDVHSKTFTLCALEPNILGDNHIFGIVKVPADYREVVKFINALKKKLGPQDDYMIECGYEAGCLGYTLYDQLKAVGVKCVILPTTMMTQNGKRVKTDARDAKLIAECLAYNKYNPVYVLTDEDEADKEFIRMRDSHKEQLKKVKQQIHAFCLRHVGRYAKTPWTSAHLKWLSSLKLSEKLRRVLDGYLTLYTMLTNMIEQFDGEIEELAEESGHSEDIRHLVCLRGIKKHTALAIFSEIGDLHRFRKGDIFAAFLGLAPGEHSSAEDINRTGISKAGNSHIRKLLIESAKGLCRDRVGYKSKALKARQAGNPVDILTYADRANIRLQQRYYHLIRKGKPVNVAVTAVARELACFIWGMTTGNFAPRAVGNKV

SEQ ID NO: 292000 - protein, 400 aa, unidentified
MLSIGIDVSKGKSTVCGMKPGGEIVYAPFEVQHTREGMSELVSLLRSSGEEVRAVLESTGSYHCPVVAALLENGIFVSVVNSLRMKRFCSQSIRKVKTDRIDAMQIALYGLAYWQELQPARLPEDTYRELQLLARQYYQMTSLLIKAKVDFNAICDQVLPGMQELMSDHAGRHKLSDFVLRYRHTTHILEMGETRFRKDYCKWAEKKGYRNCERMAALIFATAQNGIPVLPNAPSTQIVITEAIRVLHTVEASRDAILTQMQALAKTLPEYSLVREMPCIGDTLAPRLIAEIGDVRRFHSKRALIAYAGIDAPPYQSGKFRANNRHISKRGNRYLRKTGYEVMQSYVMHKPANDPIFTFIEKKRGEGKSGKLAMVAGLNKFLRVYYGKVTELYRSLPAIE

SEQ ID NO: 292001 - protein, 350 aa, unidentified
MSRTSNATAVTIGIDPGKNTLHLIGLDARGAIVLREKVARDRIVVRLANVPPCLIGIEAGMGTHYVTRELLALGHDVRQVPPVYAKPFRQSHKNDFRDAHAIAEAVQRPTTRCVPAKTDEQLDLQALHRVRHRLVGQRTAVINQIRCFLLEHGITVRQRLHWLRHALPDILAQRADVLSPRMLRILEDLAQDWRRLDDRIEAVTSEIEALCKSTDACRHLMTIPGIGPIISSAVVAAIGNGTAFTRGRDFAAWLGLVPKQMSTGDRTILGRITKRGNRYLRMLFMQAARVVLVWPTKWMKHSFGPWLAAAAQRLHHNVLATALANKLARIAWSVLAQDRTYEARVSPGAA

SEQ ID NO: 292002 - protein, 335 aa, unidentified
MRTFALDVHKNFSEVAVHEGGQVRRVGRVETRDLRAFAAALEPTDHVVLESTSVSWAIVDLLAEHAGKITMSNPMQTKAIAQAKVKTDKVDAKVLAKLGAADFVAEVWVPDTETRALRRRVAHRASLVRQRSALRNQVHAILARNLLALEATDLFGKKGRALLGAVELPEHESEQLASALRLHDALQGEVQRLERTLAGHALKRQSVRRLMTIPGVGSITALSILSVIGEVSRFPSARHLVGYLGLDPKVRSRASGRLARVTSRARAKPMRAGCSSRRPMPRCARPGPCGPSTGASGPAAVRRSRSWPPPASSPRCAGTCSPERRTAASRLRRSP

SEQ ID NO: 292003 - protein, 422 aa, unidentified
MSYCPVAGIDVSKRFSDMCILSPDNKIFAQEKIYHDETSINRANALLQKAERLFFSKPVIVMESTSHYHLILFQFFSEHGYDVIVVNPLQSNSMKDFSIRKRKTDRVDAFKLAMMYRTKTLRPSQIPQTATRALRQLCRHRAELLNDVSSYKNRLTALLDQTFPGYDKVFSDVGGVTSCAVLVRFPTLTILLVEEESELVEVIAAASKSGYSFAKKKAGLLISAAQKAQTLGIHSCADETLIVCTIQMLRTLSESVLQIETAIDNLLAQIKEMRNNVSLLQSIPGIGSHSAALLLGEIGDISLFKKPKQLAAYWALDPTERQSGSFRGTKNKLSKRGFPYARAALHMGVVNSICKRGKDSAANPVLLSYYEKKCKNKPAKVAQAASMHKLVFIIFAVLRDQKPFELKTPEQHAVEQGFVKAA

SEQ ID NO: 292004 - protein, 437 aa, unidentified
MLDISGIFRSNGETGSLAFSPLLSRGTERRYGAGGEDGNFVAAFYRWSAAMPQPNDLSRSLVALDQNSTIIAVVELSHSSWLVGGIVPGIERQPRKKLEPSPERLLALLHRWRDEAVRAGCKITRIALAFEAGRDGFWLARWLAARGVEAHVIHASSLAVSREHRRAKTDRLDTELLKRGFLGWLRGERGHCSMARVPTIAEEDAKRPNRERDCLVGERTRIVNRIKSTLARLGIHTFKPTLRKAADRLATVHTPEGVPLPPNTLAELQRDMARLGCVVSQIKEIEDVRQKRLEQQHETGPHAMVRLLARIVGVGVETADMLVHEVLSRPMRDRRAVARYAGLTGSPDESGAQRREQGLARAGNARVRRGMIQLAWRFLMFQKESALALWYRARTADSRKGTRKTMIVALARKLIIALWRFVTTGEPLEGVVLRPAT

SEQ ID NO: 292005 - protein, 430 aa, unidentified
MYERVAGIDVHKKMIKVAIRSPGDKPWTRKTEILEYRTFYGVLQEMARELRRRGVTHVVMEASGVYTEPVYYALCEQDFTEVAVINPVHAKALKGHKTDAKDCARLAELFECGLLRGSCIPSAEQKEVRDLTRYRIKTVQARTSEIQRLGKALESAGIKLGSVASEITGKAATAMIEALIDGERRGGVLADLAIGRMRSAGKLADHSMALTGRFTGHHATLCRLHLDRINVFDDAVDGLDDRIAAGAARWQREAGLLKSVPGFGDVVSCAWLAEIGPAPHKWFSRHEKLASWVTLCPGNNISAKKRKHGRTGDAGIYIKPMLIQAAWSAIRVRGRLQARYNRLVRRFGGDKNPAAKKKAITAIAHTLLKIAYQVLKSGTPYQDLGADFYTRRNSPEEQQKYLERQLQKLHPGCTITITISPPEAALTPGA

SEQ ID NO: 292006 - protein, 337 aa, unidentified
MDRIITLGIDLAKSVFQLHGVDADGRVLLRRQLRRSQMLEFFQRLPPCLIGVEACASAHYWARELAKLGHHVRLMQPSYVKGYVKRGKTDAADAEAICEAVSRPSMRFVPVKSEDTQALLMTHKAREFLVRQQTQIVNAMRAHLGEFGIVVPKGIHNVERLIMACEQADLPAPARKALSLLADQLVDTQRKIEHLTADIRANAKVNEDAQRLQTIPGIGPITASALVSALPDIADFQSGRDLSAWLGLTPKPHSTGGKERLGRISKMGNKYLRRLLYLGAIAQVSARRRGEAGDDWLWKIIQRKKPKQAAIALANRMARTAYALMKNKTEFRAAQAA

SEQ ID NO: 292007 - protein, 351 aa, unidentified
MVIVGTDVHKRTHTFVAVNEAGAKLGEKVVPATTDGHHTALQWARSQFGDDLLWGIEDCRNLSARLERDLLSAGQRVVRVAPKLMAQTRACARTRGKSDPIDALAVAHAVLRYPDLPVAAHDPVSRELKLLVDRREDLVAQRTSTINRLLGRIHELDPARTPKSGALDRTKTRNELGNWLDTLHGLLAELARDELDDITRLTDTINALAARIGQHVHDVAPELLALQGCGELTAAKLVGETAGVKRFKSEAAFARHSGTAPIPVWSGNTAGRVRLTRSGNRQLNAALYRIAITQIRIADSPGQLYYRKRLAHGDSSTEALRCLKRRLARIVYRRLHTDEQARLNDPQPAAA

SEQ ID NO: 292008 - protein, 345 aa, unidentified
MMVVLGTDAHKRNHTVVAADEAGVEVGSVTATATPEGHLKLVRWAASWEQRRWAIEDCRQLSHRLEADLLQLGEQVVRVPPKMMAGVRRSARTRGKSDPIDALAVARAALREPDLPVAQLDGPSRELRLLVDYRESLVKDRTAAQNRLRWRLHELVPGYDPAAGSLNRYKTLTEIEELLAAHTSMVATLGRREVARIRELTREANALERDISQRVTQQVPKLLEIPGCGGLTAAKLVGEAADITRFRNRDAYAMWAGTAPIPVWSANNQRFRLNRGDNRQTNAAIHRIAITQLRIHPDAQAFIKRRLETGSTKREALRLLKRKLANVVYRTLLADSQQPALKTAA

SEQ ID NO: 292009 - protein, 343 aa, unidentified
MQTVTTIGLDIAKSVFQVHGIDAAGRVVIRRQLKRRFVLSFFEKLPPCLVGIEACASSHHWSRELQALGHRVRLMPPAYVKPYVKRQKNDSTDAEAICEAVTRPNMRFVPTKTVEQQSCLMLHRARHLLIRQQTAVINSIRAYLVEFGIVAPVGRRGVEHLLEVVADADDHQLPEVARMCLVALGSQLRALKAQILEFDRRIMAWHRSNATSKQLDAIPGVGPALATALVASIADPKAFRSGRDFSAWVGLVPKQNSSGGKDKLGSISKQGDRYLRSLFTAGALAVIRYAKIHGTRHRPWLTALLARRPTKVAAIALANKLARMAWAMMARNEHYREPAALAA

SEQ ID NO: 292010 - protein, 293 aa, unidentified
MQGNGRWIGLDLSKKTYEMCYFDQQGKVGRSGGETTKGGRAKLYAKVKPEDIVAMEVNSLAFVMEKEMRQIGCTVVILDASQLSVIYASTKKTDKEDALKLARLVKIYEKEDLPIVDVPTDKEYYRRKLIKEYKTLKGDRTREINRLHALFVQCGITTIKRSNVQTEVNRQDVLPQLFEYEARQAKRVCERLRVLEAQIEELDQLIKKECKEDKDIQRLQTIPGVGDKTALAFAAYVGDGKRFNNGNEVANYVGLVPRVDCSGTINKYGHITKKGNKIVRALLYQAAQVDSTE

SEQ ID NO: 292011 - protein, 349 aa, unidentified
MAMTIVEAPPGITGGVDTHLDKHVTAALDPLGRLVGTESFDADAAGYKALLVWLEDFGEVTKVGIEGTGSYGVGLSRFLRRKGIEVVEVNRPNRQSRRNQGKTDSLDAVEAARAAISGRASGVGKTKDGPVEAIRVLVVAKRSARQARVKAIVQMRHLGFTAPDQLHSRLKGLSVTALVAEGAKLRATKSADTVTAATKASLSSLAHRIQGLDLEIAELDEKIESLLLATAPDLMARFGVGPDTAASLLVAAGDNPERLHSEAAWAHLCGVSPVPADSGKNAGHLRRHTGGDRQANSALWRIAMVRIAHDPETTQYFERRVKEGRTKRDVIRILQRYIAREVYRYLPRG

SEQ ID NO: 292012 - protein, 322 aa, unidentified
MSLPNPLCVGIDVSKATLDIATTSEFAQFTTGNDADGFDAIVAELRKHSVALILMEATGGLEAAVACSLQAEGFDVAVVNPRQARDFARAMGYLAKTDRIDARVLAQMAEVINRHPERERFIRALPDAERQVLAAMVVRRRQLITMLVAERNRQHPAHPQSRKSINIIIQALENELARIDEDMNRHIQSRFKELTERLSSIKGVGTMTAAALLAEVPELGNLSRREISALIGVAPVNRGSGTMRGRRTIFGGRAGSRAALYMAALVATRFNPVIKAFYMRLLAAGKAKKVALVACMRKLLTILNAMLRKNEEWNESYHHVAP

SEQ ID NO: 292013 - protein, 429 aa, unidentified
MEVMHERVAGLDVHKATIVGCVRVQVGREVRRECRTFATTTDGLVALLAWLTAARCTHVAMEATGVYWMPVWKILSDGDFVLIVANAAHIKNVPGRKTDLNDAMWIADLMACGLINASFVPEEDLQELRSLMRSRKQLTREQTRHVQRMQKTLTEANIRLDSVICDIMGASGRRIVEAMIAGVRDPHQLAALASKRVKATAQELHDALHGRLTDHHRFVLKLHLGQWDGLDAAIRGIDVEVDARITRMDAQLKAAAGQGAKAVPFRELIRLLCTIPGVGVLAAIVILAEIGRDMSRFPTAGHLVAWAGMCPGQNESAGRRKAARLRKGDPWLKTTLVQCAWAAKRKKDSYYKAQFFRIQSRRGPQKAVCAVAASILTAIYHILKDGTEHRDLGADYFNRRSPAAQTTRLVAQLTKLGFEVQLQPIAKAA

SEQ ID NO: 292014 - protein, 405 aa, unidentified
MFVGIDWAAQQHAICVLDQAGKPVTAFEVAHTAEGFDQLTSRLRRLGPPAGLAVAIERPDGRLVDHLLEAGHPVVPVSPNQIKAWRDAEVLSGAKTDAGDAMVIAEYLRLRHHRLRVLQPCSPETRALRAVVRARTDLVDQRVAASMKLAACLDAFWPGALQVFADVDSEIALAFLERYPTPQSAAHLGEARMRAFCVKHGYCGRRHPAELVARLRAAPAGLAGGPEAEARRDAVLAMVKVLRALNAAIKGLDRSVAAHLGEHPDAPIFTSLPRSGQINAAQVLAEWGDCRPAYDCPDAVAALAGAAPVTKKSGKHHAVAFRWACNKRFRAAICTFADNSRHASPWAAKLYADARARGCDHPHAIRILARAWIRVIWRCWMDRVPYDPAKHGAARRLAEMTAIAG

SEQ ID NO: 292015 - protein, 315 aa, unidentified
MMNEQTYCGIDVAKRHFVIGLSTQKRTKTETNNPKGIAHTIEYLRRFSVDLIVLESTGGLELPLAKALHRTGFRVVIANLRQTNQFAMSQSLAKTDNKDAKMLAFYAQMLAMRDNVAQQLYIPPTPEQEQLEALVSRRNQLIEMRFAEKNRLEQVHSTQVFSVEQHIDYLSLRIDELDREIEQHLKHFDDTIKKFKDIKGLGTQTIAVLMSMLPELGQYTHKQIASLVGVAPHPKESGNTKWKSRCSGGRKAVRNALYMATFVCVRFEPKLKQFYERLRANGKAFKVAINACMRKLLTILNAIVRDDSQWDAHAL

SEQ ID NO: 292016 - protein, 388 aa, unidentified
MEEYSGAFVAFDLAKTKHAVAIAEPGRTGEVRFLGEVENTPARMERTIKKLAARYGRLQVCFEAGPTGYGLYRQIQELGHDCLVVAPALIPKRAGERVKTNRRDAVTLARLHRAGELTGVWVPDPVHEAIRDLVRAREAGMDDLRRKRQQLLSFLLRQGRIYSGGGHWTLAHRRWLASQAFDHPARQIVFQEGVDGIDDAAQRLRRLDEQLVIIVPSWSLAPVVQAYQAMRGASFLVAVIFAAEIGDVRRFETPRQLMSFLGLVPGERSTGDTVRRQGLSLAGNRRARRALIEAAWTYRYPARVSETLRVRLEEVPKPVRDIAWSGYSPPCSRVSSRSPVPSMCGSCGRFSGLLELVDVAVLDHPHVVVSGNREPGSDPERPKLPPRL

SEQ ID NO: 292017 - protein, 421 aa, unidentified
MLILYQRCAAIDIGKDVIAVAVRLPGDGAEHRQTIKQTFKTFYGVLKHAARWLTEQQVTHVAMEATGIYSMPVYHALIEHGQFEKVLVCNAGHVRNVPGRKTDLSDAEWLVHLLECGLLRGSFIPPAQIKAARDVIRYRTKLTESRTSELQRLGNVLQDAGIKVDSVASTITTRSVRAMVEALIDGERRPVLLAELAKGRMRARIPDLQRALEGRFDDHHALMCRLHLDHLDHLEEMIARLDTQIQDMMQPFRAQRELLTTIAGIGPFAAAAIISEAGADIGETFPSAGHFASWIGVCPGNHESAGKRHSGKPRKGNQHLQHVLVECAWAASRTPGYLQSLYRCHVRKFGGSRNPTAKNKAIVAVAHKLAIIIWHVLATGKPYTDLGADYLDRRIDPAKETRRLIARLQALGHTVTIEPAA

SEQ ID NO: 292018 - protein, 343 aa, unidentified
MHYIGMDCHITTLDFAVVNETGKVTKTSKVATSAKNFMEFAKSVRQPRTVYMEEGTLAAWALEVCVRFGEKLVITDPKKNRWIGSSGQKDDTIDALKLAQLARGGYIKEIHHPVGQRRRFRELMIAYHDTNRNVTRIKNKIKAKFRQNGVQCTGQTVYSKAHREEWRQKLPQDSTLLVILDGLWLQLDQTERTEKDILSIAKAQGKQYPEIRLFEEIPGIGFINAATISAILETPHRFADKRKVWMYAGLGIVRRSSGGKLYTEKLTNEYNRLLKYTAKQAAQAAIQAKDNPFRRAYLEMTLIKGIAPHRAILTIARDILSTMWAMWRNGEKYNPDIDKKVKT

SEQ ID NO: 292019 - protein, 423 aa, unidentified
MKNSAANKLRQVPKGSLIVGIDPHQKKHAAVAMTQDFTTRCKFKFDNSQEGYNMALDRLREEMMKTGCQGVMFAIEAGGHYWRNLAYFLDNKGLSFRFINPFSLKRRREGKDLNRRKNDYRDSEVAAQLLCTGEFTESKLKQGVYAELQATHNAYRRMVKEKTRINNLIKGLLDGLFPEFNRVFKNPCCLNALSVLATCSIPSLIVSITEDEFVNLIRVNHQGLLKKKKLRALYHVARTSVGIEEGAKSVSNEISFLVEKLRLIKHQIQSLEETLIHLVDQTEEGQYLLSIRGLNYISVAGLLAELGCFRLYHSAKQMIKMAGSNPTEKESAGKRGSRTPMSKKGRPALRHCAWTAVVPMLRFNTDFRAWAKQRRERPAHANPLCGKEILGAALNRLLRLGFALVKKRAYYQVSMPELAPVVA

SEQ ID NO: 292020 - protein, 311 aa, unidentified
MTLPQDVIGVDIAKDWIDVFFLSARRAERVPMATAELRAFAARARGALVVFEASGGYEHPLAEALGAADVTYARVNPRQAREFARATGRLAKTDRVDARVLAEMGRALALRPTPPADPGRARLAGLMGRRDDLGAMLRAEMARLRQARDASVRRDIGSMIALLRRRIGKLEAEIAAVIGADEALSDRSRLLRTMPGVGPLLAASLLARLPELGRLDRRAIASLAGLAPHACDSGRFRGKRRIWGGRAEVRRTLCLAGFIASRYDPALRAFRRKLQEVGKPVKLAIVACARKLITVLNAMLRDQREHRPGTG

SEQ ID NO: 292021 - protein, 411 aa, unidentified
MRRVIGMDIHRTFAEVVVWEDGRLRHHGRVDMTRSGLEGFGRSLRRTDEVVVEATGNAMAVVRVLSPYVGRVIVANPMQVKAIAHARIKTDKIDAGVLAQLHASGFLPEVWVPDERTERLRRLIARRNQVVRHRTRVKNEVHGILQAHLVPKCPHADLFNRRGRAWLERQVLPDDERTAIARHIREIDRLAEDLADLDRDVAREAVDDVQVRRLQTITGVNAIVASGIIAAVGDIRRFREPQRLVSYFGLNPRVRQSGLGLAQYGRISKHGRSHARAMLVEAAWAAAKAPGPLRAFFLRIRNKRGHQVAAVAVARKLAVLIWHLLTKEQDYFWARPALVAAKQRQLALKAGAPGERGVGRRGSAYAYNVKELRNSEKAAAENAERAYELMVRHWRPRGPKRRTVATKEERL

SEQ ID NO: 292022 - protein, 430 aa, unidentified
MKSNTQNAKIEAITEKTLVLGIDVGSETHYARAFDYRGVEYSKKPFKFSNTEAGFVTFKAWVLDIKEKHGKDKVIPGMEPTGHYWFNLGKFLQDNEMKPVLVNPHHVKKSKELDDNHPTKNDRKDPKVIAGLVREGRYMIPYLPDGVYADLRTASNIRFQLQAELTRIQNRINRWFNIYFPEYKTVYGKPDAKSGILILKEAPLPEDILTLGIDGVNQIWRDAKLRAVGKARAKTLIEAAEHSVGSKEGAVSARMEIRMLLEDYESRNIRLQEVMGLIEGLVNQIPMAEKLLEIKGVGIKTVSGFLAEVGDIRRFNDPKELQKLAGLALVENSSGKHKGKTTISRRGRKRLRYLLFEVAMSLVAKNPEFRELHNYYTTRRLNPLKKMQSLMAVATKLIRVFYAMLTKGVDYDPKKMVSDIRRPEAYLQAA

SEQ ID NO: 292023 - protein, 356 aa, unidentified
MNEGSWVGLDVHARSVVAGVIDAGSGEVRSLRVPPGCDATVAWLKTLPAPVRAVYEAGPTGYRLARACEGAGISCVVAAPSKIRPAADRVKTDRRDAERLARLLRLGEITPVRVPGPDEEAARDLVRAREDARGDLMRARHRLSKLLLRHGSVYDATAWTKAHDAWLRKQRFQGGPLAIVFDECYGRMLDAKTRRDALDKAITELAATPPYVDVVERLVCLRGVSTLTAFALTVELGDWSRFRPESLGPFLGLTPSENSSGERRRQGAITKAGNSHARRLLIEAAWHHQRPPRLSVTLERRRVGRSLTVRAQADRSARRLHQRWHALERRGKRRSIVVVAVGRELAGHCWALATME

SEQ ID NO: 292024 - protein, 313 aa, unidentified
MIITLRCVGIDVSKRRLDIFDEGIGVSERVANAPHAIAELVARWRCDALVVFEATGVYDLELREALRQAGVRFARINPARARDFARASGQLAKTDPIDARMLAVFARAMRPSPEQVSSPARNALARLAKRRDQLVHMRAQEKNRRSEAGDRAMVERICRLIEVLDREIAEIEADISALIKAEPEISHDAQLIRSLPGVGPVACMQLIAQMPEIGHVGPKQAAALAGLAPFNVDSGAYRGKRKIGGGRKRVCNALYMAALNAVRRADRFKAFYARLRQAGKPAKLALIAVARRLLTILNAMMRDRKAYIPDQQT

SEQ ID NO: 292025 - protein, 344 aa, unidentified
MEHYAGLDVSIKETSVCVIDGTGRVVREVKVPTEPEAILAVLSDEDFNIKRIGLEAGPLSQWLYGELAEAGLPMICVETRHMRAALSAQVNKSDRNDARGIAHMMRVGLYRPVHVKTPASQKRRMLLTSRQLLQAKARDIENDLRGTLRNFGLKVGIVGAIKFEARIRELVANHPDLATIVDSLLVARRVLREQLSVLHRHLLAVVRDDEVCRRLMTMPGVGPVVALTFRATVDVPARFTNSKTVGAIFGLTPRRHQSGEIDRMGGISKCGDAMMRTVLFEAAQAMLTRTIKWSWLKAWGMKIARHRGMKRAVVAVARRMAVVMHRMWMDGTDFQWKREEVAAA

SEQ ID NO: 292026 - protein, 380 aa, unidentified
MKIMAGIDLHSNNAVCGLVDQEGRRLLHKKVPCELGRVLGVLEPYKEQLEIVGVESTFNWYWLVDGLQEQGYPVALVNPAAMDQYSGLKHTDDQSDAFFIGELARLGILPRAHIYDRKIRPVRDLLRRRMLLVHHRTSLLLSLESLHARNTGQSLSPGCVKALGPEEAAELFSHPADQLVAKEEARHIQELGKSITAVEKVVHGEVDKLRSYNQLKTIPGIGPILALTITLETGDIKRFASAGDYASYCRTVDSQRLSNGHKKGENNAKCGNKYLAWAYVEAANFARRFDLACRQFFDRKLGKRNRAVATKALACKLSKAAWHVMSQDVSFDPEKAFPIGPPTMVKSVAGSQAGQSKQGDVVAAASKRFELFKAERPQTL

SEQ ID NO: 292027 - protein, 332 aa, unidentified
MYSIGLDISKSSINVFISNKKLDLEIENNLKSLKSLYSKLKKIYKKEIDKVVFVFEPTGSYSELLYQFCVDKNIKVFMINPKQARNFARAIAQRNKSDLIDARVLAQAISIAREDEIITPTIDPIVEEIKDLIKYYKLKVKLRVQLSNHLESLVVKGSNKALIKQIKKELESLKKEEDKIIESIYSIIKNNEALLNKYNSIISIKGIGKIAAIVLLHLFIKYPNANQKEIVSLTGLDPITKESGTSLKGKSRISKAGARIYRGSLFMAVMSATRHNKQMKAFYERLKANGKHTTVAQIAVMRKLVIIAHSLYKSNEVYDEDKYEKFAGLHNN

SEQ ID NO: 292028 - protein, 366 aa, unidentified
MKKTNTMPIRRARKLKEQQLTIGLDLGDRSSFYCVLNGAGDVIVEERVTTSPEAMKQTFGKMPPSRIALETGTHSPWVSRLLSEPGHEVIVAHARNVRLIGESRRKDDRLDAQALARLARIDPQLLSPIQHRSAQAQADLSVIRARYALVRARTALVCAARGLTKSFGERIRGRNPKGFKPATGETLSPQLQVALGPLLGALETITARIREYDAQIEELAKESYPEVALLKQVKGVGTLIALTYILTLEDPRRFRKSRDAGCYVGLQPGRRNSGQSEPQLHITREGDSYLRMVLVQGAQHILGPFGEDSDLRRWGLKLAEHGGKSGKKRAIIAVARKLAVLLHHLWISCEAYEPFHNTQKEKLAAA

SEQ ID NO: 292029 - protein, 343 aa, unidentified
MDHFAGLDVSVKETSICIVDETGRIVGEVKVASEPEALLQMLMNPAYHFKRIGLEAGPLSQWLFSALGEAGLPVICVETRHMQAVLKAQINKTDRNDARGIAQMMRVGLYRPVHVKTLRSQKLRMLLTHRKLLQSKAIAIDNDLRGTLRNFGLKVGMVGKVKFEARIKELVENFPDLAVLVEPLLVVRRVLREQLGILHRRLLAIVRDDDVCRRLMTTPGVGPVVALTYRATVDVPARFRNSKAVGAVFGLTPSKYQSGEINRTGAISRCGDEMMRMMLYEAAQSMLVHSARWSWLKAWAMKIARHRGMKKAIVALARRLAVVMHRIWVDGAEFRWTREVVAA

SEQ ID NO: 292030 - protein, 390 aa, unidentified
MILVGIDVAKDKHDCCIINSDGNFPEEVFSILNNREGYETLYKRICSLAVDFTKVKVGLESTGHYSSNLLAFLLDKHLTAYVINPLRVNLFHKGQSLRRTKTDKIDSRNIAHLLMTDSSLKPYSLSSYHMEELKSLTRYRGTKVRERTKLKISIARLVTILFPELEQLVSSIHIHSIYAMLEKFPGSAYIAAAHLTRLTALLLKASRGRFGRETAIRIRDTARQSIGAVSPAKSMELQHTIAHLRVYDQEIGEIESEIEKIMDDVNSPITSVPGIGMQMGAVILAEIGSFRRFDSPDKILAYAGMSPSMYQSGKLTGSYSRMEKRGSRYLRYALFNVTRYVCHYDPGFTAYLSKKRKEGKHYYVAISHAVKRLVRVLYAMEISGNRYQTA

SEQ ID NO: 292031 - protein, 414 aa, unidentified
MNSCLFVGVDTHKDSHTAAVLDGYFDVVSVVTFANDREGFTRLEGRLKKISRGRDILFGLEDSQGLGSFLAAYLVGNGYTTLEINPVTTDRGRKHTVSRDKSDEVDAIVIAKTLIRERASLYPVRIDRNSVALREMVGYRQLMVSEATRIKNRLHIVLFNQYKGVLGCFGSPFGKCALAFFLRYPDPKSLEDIDLNSLSDFLKIHSKGRFSDKKARAILSSIDTSIADSLTDTRDRIISSHIKRLVDIQEELEEIKEALTHLVKASSYWCLVSIPGIDIVTAAKIISSVGDISRFSSASKLARFCGIAPREKSTGRKKKYEKSKYGNKFLHSTIYYVALAHISRTRNGADKNPLSRAYFLKKVSEGKTKKEAITCLTRRLVDIIFAVMRDRSIYNFSKSASTKKHEPELDPVAA

SEQ ID NO: 292032 - protein, 409 aa, unidentified
MDGMIERCAGLDIHQATIVATVRVPDERGGRRVETHTFETTTVALLTLRDWLQAFGVTHVAMESTGVYWKPIYVLLEDGFTLLLVNMQHLKQVPGRKSDVKDSEWLAHLLECGLLRRSLVPPAPIRDLRDLTRYRKKQIEDRTQEVNRLYRVLEEAGMKLASVMSDVMGRSGRAMLDALLGGTTDPIALADLARGRLRSKIPALRDALRGQFRAHHAFLIGQILTKIDFLEEAITTLNDEIDRHVAPFASTVERLMTIPGWGRRTATTVFVETGGDMSCFPSAAHLCSWGAVCPGLDESAGKRRTGKTRDGNRYLRGALLESALASTRAKGTALQARYRRVKSHRGHKKAVVAVAHQMLEIAFYIMRDGTTYHELGAEYFARRDRDRTLRRSVKQLEALGYRVTLEEAA

SEQ ID NO: 292033 - protein, 415 aa, unidentified
MALKIVYKICCGIDVHKNFVVACIAKTDKQGITTYESHHFSTYTKGLKELLKWLLDRNCKDVCMESTGKYWIPVYNVLEKDCSIVLAHPKYVKAIRGKKTDKKDAKWIADLFKHDLVAGSFMPPADIRQLRDLMRYRFKLTCFKSSEKNRYQNCLTVSNIQLASVVSDTFGKSSQKILDKILENPDDASFDIESLIHGSMKDKLPKLELAIDGYITPEQAAKLKIIKEHFDNLESRKAELEELILALASPYQQEIAIILTAPGFKNTFSAISVISEIGTNMEAFPSAKHLCSWAGLTPTNNESAGKKKSVRVSKAGCYIKPLLVQCANAVVTSKKHPEIRNRYLRLKKRRGHKKAIIAIARMLLTALYHMLKNGENYNAELYRKSDLPPVNREITVEQALMIARNQGYKIKSATA

SEQ ID NO: 292034 - protein, 429 aa, unidentified
MGRVIGLDLSKHTAEVAVLWPGAEAPQRWRFPAEPAAIRAFARQLGPEDRVALESCTNAFAFHRLLSQHSGSVVVSNPLKTRIIAEAKVKTDKIDAEVLARLLAADFLPAVWVPDSRTDHLRHLVFHRHGLVAQRTQVKNRIHAILHRNLIAPVMTDLLGTTGRAFLGKVDLPAPERELLDADLRTFDFLEGEITAAEKSFAHAALDDSEVRRLMTVPGLALASAVGLKAAIGDVRRFKRPSNLVSYFGLNPSVYQSGLKVYTGHISRRGRSHARSICVEASHQLVRAPGPFHAFFLRLQRRKGYNVALTAVARKLVVLIWHMLTRGEDYRYAPPFRTREKLSRLRYLATGQRSARGTKPDPGLDKQAATKGEAEYLQFIKERFGVKGPQGVDHPNQKPGPRAVARSRSSATGVRRSAKEKQRSLPKGS

SEQ ID NO: 292035 - protein, 349 aa, unidentified
MGIVCRIGLDIAKNFFQAHGMDKHGKEVLTKKLKRAEVLPFFANLPPCLIGLEACAGAHYWARELAKLDAGHTVRLISPRLIKPFVINNKTDAADARAICEVVGRPVTRFVTVKTVEQQDMLAWHRIRERKVRGRTALVNQARALLGEQGIIMPQGITHVRKLLPLIIEDLDNKLSMSARDYMSELYTELVGYDEAIAKYESRIKAFAKANEACQRLQKIPGIGPLTSTAIVAQMGNAKEFKNGRAFAACLGLTPKEHSSGGKQKLLGITKRGNSYIRKLLIQGARIVLRYGLQRPEEDASPRLQWLRSLFGRRGRQIAAVALANKTARIIWALLSSGEAYQPSSVQGG

SEQ ID NO: 292036 - protein, 425 aa, unidentified
MRLVYPVCCGVDVHKTFLVATIITTTNSIFPKYRQKRFSTYYSGLLDFKQWLLDNNCKDVCMESTGKYWVPVWNVLEAASINVVIANPKWVSAVKGNKDDKKDSKWIGDLFRMGLVPGSYIPIKDIRILREFTRYRSKLVSMRSSEKNRFQNAFTVCNLTLDAVVSDMFGVSATAIENYLLDTDTVDPNYCVFLLRGSLKKKASDVVEAVKGFNMTAEQKERVRIVQGHFDDIDKRIAQIDNVIAGLVADYEGQIALLCTIPGIDRRLAITIISEIGTDMSEFGSSRRLCRWAGLTPGNNESAGKKKSVRICRAGVYLKPALVEAAHAAVKATQKSPYFRTKYERIMKRRGKKRAIIAIARMMLTAIFAMLQSGEVFNPCDLHKFDMPEELRKKQTLSSAKDAVKLLVSLGLVPEGFISLEPLAG

SEQ ID NO: 292037 - protein, 367 aa, unidentified
MEQLTTIGIDLAKSVFQIHGVDAEGAIVVKRKLRRAQVLTFFAGLGPCLVGMEACAGAHYWARELSALGHEVRIMPPSYVKPYVKRGKTDAADAEAICEAVTRPTMRFVPVKSAERQAALLNHKTRDFLVRQRTQLLNTIRAHLSEFGIVVAKGIHNVGRLLEAAKDLPEAARPAVDMLADQLRETQEKIDDLTARIEAAQKTDPFARRLAAIPGIGAITASAIAATTPEVDNFRSARDYAAWLGLTPQPYSSGGKERLGRISKAGNRYLRRLLYLGASCRRHAFGVTAQISARRAGRPGDDWRSPLCLHQWRTMAHRMLEKKPVKVVAVALANRMARVVWAFAIGLERMATDGSLRSGESYRTNPA

SEQ ID NO: 292038 - protein, 421 aa, unidentified
MPNIEIGVDSMVKENFIYVGIDLHKETHTAVMIDCYNQKLGEITFPNRPADFPKLVTKVKKCNTDAKEVVYGLENAYGYGRPLAVWLIDKGYFVKDVNTAISHRQAKHRGAMYRKSDSDDAEAIALATLNMLDKLPDACPNDAYWSLGQLVHRRDNIMKQRTRLVNQLHEQLCIAYTSYKQFFNDISRPTALYFWEHYPSRKYLKGKSVEDLRAELVPVSHNKCSTKTCEKILDAVASDKVKNNAYQDARDMVTLSIVSDLQHYDIQLAEVDKMLEQMYKMLGCTLTTIPGVNVITAVKILAEIGDIKRFSNANKLAQFAGIAPLHLSSSGKGKDLATKQGNRRLQATIYFLAIQMVQISSKGTPRNPVVRAYYEKRKAEGKTSQQALICISRRLISVIYGMLKNGTEYRMPVVENAGEKL

SEQ ID NO: 292039 - protein, 355 aa, unidentified
MSQEKYIGMDVHQASISAAVMDAQGKVIMECLLETKAATILEFVQGLQGTLSMTFEEGTSAAWLHDLLKPHVSQLVVCDPRKAALLKEGNKSDRIDARKLAEMLRTHQLHSVYHGEHGMRTLKELGRSYLTITQDVTRVMNRIKALYRSWAIPCAGTAVYASRHRTEWLAKIVEPGVRVRAERLYQQLDLLQPVRLQARRELLLESHKHSAVKLLRQIPSIGPIRSALLVALLQTPHRFRTKRQLWAYSGFAVETHDSGEYRSVRGKLQRNRERITVRGLNHNHNKDVKNLFKSAAVSASTRPGPLQDFYAALVSKGMRPTMARLTLARKMAAVSLTIWKRGVSFDPQQLHRQAA

SEQ ID NO: 292040 - protein, 321 aa, unidentified
MTKTTTDPAPARFVGCDVGKRHIVVFDSASGKTQQIENKRRAIAALARSLDKDCLALCEATGGHEAALLEALAEAGIPAHRADARKVKAFIRSWGTLGKSDSIDARALARYGAERHEHLRLWSVPDRQRARLQALVRTRRDLVDERTAHNNRLAAPGGKTVAPYLKKLIACLERQIQRIEADIQALLDDCEELDRCHRALTDIKGIGQTTAATLIALMPELGTLTRREAAALAGLAPHPNQSGLTDGYRRTRGGRKEVKQALFMAALSASRHHPTLAPFRKRLIKDGKKPIVAATAVMRRLVVIANAKIRDEFNQNIKLAA

SEQ ID NO: 292041 - protein, 430 aa, unidentified
MSLDRSVEQEPQFAAFVGVDWADQKHVWSLQGAGSQKRESGELEHAPEAVEVWVAQLCQRFAQGPIAVALEQSRGALVFMLSKYERLHLFPVPSTMAGNMREALYPSGAKDDPRDADLLLDLLLKHRDKLRRLSPDTEATRRVQNLVEERRKLVDEKTEQINRLTSHLKIYFPQMLDWFDRLDREAACALLERWPTLEELQKVPPVKVRAFLCKHHCRDQGVIERRIVGIRQAVPAIRDRAVIEAKSAVVQVIAQLIRILVQGIGKLDRKIEEETAAHPDFFIFDSLPGAGPALAPRLLSAFGSQRAGYGSAQEVQAYSGIAPVIERSGKKKWVHFRWAAPKFLRQSFHEWAGRSIAQSQWARAYYEQQRQRGKGHHAAVRALAFKWIRVAFRCWKNRVAYDESMYLATLARRASLQSGSTIPLSAAKTL

SEQ ID NO: 292042 - protein, 358 aa, unidentified
MTSMTSSTTRVVVGGVDTHGQTHHAAVIDEVGRQLGDREFTANPVGYRALADWLGKHGTVTMIGVEGTGTYGAGLARHLRTVGVTVVEVDRADRKSRRAHGKSDPLDAYAAARAVLSGSAAGVPKLRDGRVEAIRALRVARSSAVKARSQATNQVKALIISGPPELREQLRHLPTAKMIDSCARLRPGHQLGDPAQATKTALRRLARRHQLLSEEISDADLEIAQLVADVAPNLLSLRGVGPEVAGQLLTSAGDNPDRITSEAAFAHLCGAAPVPASSGRVQRHRLNRGGDRHANNALYIVVLNRLRYDARTRAYAERRTQEGLSKPEIIRCLKRYVAREIYRVLILTPTENRALAAA

SEQ ID NO: 292043 - protein, 350 aa, unidentified
MPEIATIGLDIAKNVFQLHGVDRSGKIVLRKALRRSQVPGFFSTLPPCLIGMEACATVHHWARTLMAFGHDVRLIPPAYVKPYLRRQKNDAADAAAICEAVTRPTMRFVPVKSPQQQSTLMLHGARDLLIGQRTALINALRGHFAELGIVVAQGARNTRQLIALIHDNASPDLPVTARIALQPLAAMLIGIEAQIAKLDKAILAAHRSDPVSVRLATIPGIGPIVASCLSASVPDASLFQGSREFAAYLGLVPRQHSTGGKPRLGSISKMGNRHLRKLLVVGAHAALYSMKSGKTRTALADWARSLLAKKPFKVVAVALANKMARIAWAVMARSTAYEPRSQGAAASAAS

SEQ ID NO: 292044 - protein, 587 aa, unidentified
MPATSAAPLDRIGVGIDTARYGHRVSFLRPDRQPAARPLTVLENHQGYQDLRQRLEQLHRLHPQAQFNVRIDAAGQYAANLEHFLRSLALPMTISVGEPKRNKDYQKAHFPKRTTDDTESQAMARFAVVEQPDATLSVPPQLGLLREVASRLQAQVKQTTQTVNRLHNLMARAFPELATLVNDFSAGWVLQLLDRYPTAQRLAAAQLRSIEQVAYLPGEKAEPLHQAAKASVASLRGDVAEALVREAVTQVRHSLVHEENLRKLLEGAFEELPPSGHVQVATIPGIGMATAAVLVAKIIDIERFTTPEHLVGYFGAFPEEDTSGVDKYGKPIPPGTMCMSHKGNDLARAYLWNAARSASQHNPAVRALYKRLRAKGKRGDVALGHCMRKLLHLVFAVWKTNQPFDENHFPWEPTAETPPAVAATATAEAAGNDKAVGHKQDAPAPTVVTTATATVEEPTTSVKPPAPSPACPAEARPQVDFDFLRKQITMEQVLRHLGVLEGLRGRGQQLRGCCPVHMPASAKERTFSVHLGKNAFQCFQAECGAKGNVLDLWAAVRKLPLYEAALDLAATFHLRVNREEEPVGGTR

SEQ ID NO: 292045 - protein, 412 aa, unidentified
MEVVYACCCGLDVHAKTVVACLVTKGRKEIRTFATMTDELLQLGDWLSSAGCTHVAIESTGVYWKPVFNILESLLTVILVNARHIKAVPGRKTDVRDCEWLADLLRHGLLKASFIPPREIRELRELLRYRQTVVTEHTAVANRITKLIESANIKLGQVASEVLGLSGRLMLRALAAGETNAETLAELAQGKLKSKKAELRRALEGCLTQVQRWVLTELLTRVEELEAALTRVETRIGEEVAACPDPFVPEAVELLESIPGVGKRTAQTIVAEIGVEMSRFPSAKHLASWAGVCPGNHESAGKRKSGHPTKGNKSVRTILVEAAWAATHAKGTFLQAKYHRLVKRMPKQKALGAIAHRLLVISYHLLSRRVPYAELGTAPVDEQQVTRQRRRLVEQLVGLGVKVTLDEGGAVA

SEQ ID NO: 292046 - protein, 364 aa, unidentified
MRKTTKIVALDQHMESMTVALLGSRQRTPVIYGNIANTPAAVAKLARGLDDGKTRLRFCYEAGPCGYGVFRQLTQMGHECTVVAPSMIPRRPGERIKTDRRDAASLARLHRLGERTPVWVPDEEQEAIRDLVRCREDAKHAQRRVKQRLNSFLLRHGRVHGGRSRWTQAHFRWLEQQSFDHPAQQIAFEEYVDAVKDAGQRVAQLETEMSRALDGWSLEPVVRGVDLIVAMTVMSELGDLTRFDSPAQLMAYVGLVPIEHSSGRSRRQGAITRTGNGHVRRVLAQSAWCYNHPARKTAALQRKAEKTSLAVQDIAWKAQKRLCHRFYSMMARGKTPCKVATAVGRELLGFIWAIACETMPRQAA

SEQ ID NO: 292047 - protein, 341 aa, unidentified
MNGGKNVVGIDIAKRVFQLHWIDRETGEIVSLQIKRERFFEHAANRQSCLIGKEACGGAQPWARKLTAMGHPVRLLPGKAVKPFVTGNKNDRQDARAIWTAVQEPDVKAVAIKTEEQQAILAPHRMRSQLVKFRTAQINGLRRLLTEYGEVMPQGKAGVRKDLAEALARLADRLPAMVIDTLREQWARIKKLDGEIAAIKQRIQLWLKQDDACKRIAEIPGVGPLTATAAEAILGDARAFKSGREFAAFAVLAPRQIGTGGRIKLLGISKRGGTCLRTPLIHSARSVLTHAKDPGPWVTELRQRRLLNVAVVALANKMARTIWAMLAHERTHQKEFVSQPV

SEQ ID NO: 292048 - protein, 377 aa, unidentified
MGKITTYVGLDVHKKSIVAAMAMAGEGEARLLGSVAHEPEAVARLMRRLGSPKGVLVCYEAGPCGYALQRQVESLGITCVVVAPSLIPRKPGDRVKTDRRDALKLARLLRAGELTPVWAPDPAQEALRDLTRAREAAKGDVLRARHRIAKMLLRLGVRQPPEIKACWTQKHEKWLAGLTFNTMEQTVVWECLLEALGQAMERLRRLTEALVQGAARSKHARLVAGLQCLRGVGLVTAATWVAELGDVAGRFPLARPLMGYAGLGVKEWSSGQRERRGAITKAGNSHVRFAAVEAAWHYRHRPQESRALRKRREGQPEAVVAIARKAEDRLHQRLRRLVRKGKADTCAVTAAARELLGFVWAIAWELASSEQPERAAA

SEQ ID NO: 292049 - protein, 409 aa, unidentified
MRYYLGVDWADQTHAVWVVDERGAKVALRTVPHTAEGLSEWGRELDEWRAQGIELWAAIERPEGRVVDVLLDHGVVVYPVNPKALDRARDRFRQSEAKSDPFDARVLADFLRTDHLHLRALQPSSEAAQELKLLTDDYQRQIRQQTRLVNQLTTTLKAYYPRGLEVAELTTALARAFLQAYPTPATLTALTERQWQRWARAHRLSETRTQELWVVLQRPQLPVPLHVVRAKARLMQSLVAQLMVVMEGVGAYREAIEDFFARLPAAQWIRTLPIGDHGITAPTLWARLGDAPGRWESFRHLQAQAGTVPVTIRSGKQQVVRFRFACDKSLRYVIDHVAFLSLRWSEWARAYYDEQRARGHSYRQALRALSAKWLKIIFVMWERQVPYDEQYHLAMMTRQQLRQRQKKVA

SEQ ID NO: 292050 - protein, 350 aa, unidentified
MIIIGCDYHPGFQQIAYLNSDTGELNECRLGHKEEAEQFYHDLKTRGLPVRVGMEASGHARWFERWLAELQFELWIGDAAAVRAKRVRKQKTDRQDAQLLLQLLLENRFPRIWVPDAENRDLRQLLWHRHRLVQMRTRIMNQLHVVALNEGVRRKKALWRPAGRAQLESLVLAPWASRRRRDLLDLLDQLTPKIQELTCRLEEVVEKRPIARRLQTHPGVGPLTALAYELVIGTPERFQCAKQIASYVGLVPSEESSGDRRRLGHISKQGNVLLRFLLVEAAQVTVRSNPQSRGQFFHLAMRRGRKIAKVAMARKLAVELYWMWRRGWDYEKMQQLGSHAGEPGHPHGVQ

SEQ ID NO: 292051 - protein, 456 aa, unidentified
MVSAKKAKNKSAMSSELQRVNPRAAGIDIGSEAHYVAVSPEVADEPVRCFGCYTPDLHEMALWLKGWNIETVVMESTGVYWIPVFQVLESHGFDVSLVDARHVNSVPGRETDVDDCQWLQKLHSFGLLRSCYLPDAEMVPLRAYWRYRAELVEMASKQILLMQKALEQMNVQLHKALSDITGVTGMAIIRAIVAGERNPAVLAKMRDKAVKKSEDEIVRALSGEWRDEQLFLLGAALDLFDLYHTKMAECDKKTEECMRSFEDKSEPGKPAPKPNKQKRRKNEPHFDLQSELYRMAGVDLTAIDGISSITALTVISECGTDLNDFASEKHFSSWLGMCPHNVITGGKVHKRSTRKVQSRTAKALRLAAQSLHHSNTALGAFYRRMKYRLGAAKATTATAHKLACLIFRMIRYGMDYVDRGQEQYNQQYQERVLKNLRKHADAMGYALVNLATGEVS

SEQ ID NO: 292052 - protein, 434 aa, unidentified
MEEVTGEPLYRDRVCGIDIGKAELYATIRVPSDKDPARRASETRRFATTRRGVLALADWLRCWQVPAAVMEATGDYWKGPFYRLEAEGFECVLADAKQVKNLPGRPKRDPSDSSWLAQCSERGAVRPCFVPDPEFRVIRLHTRYRRDLTEERTREKNRAEKLLESAAIKLSSVVTDLHGVTGRDIMDHLIAGERNAKALAQLARARARRKITELEHALEGAEFFTPEHAALLKAMLERIDGLTAEIGKLSEVIERLLAPYEEPLAQAESMPGWGRRSAEDAVAETGADMSKFPTGGHLSSWGGRTPLDHQSGKRNGRARHKKGNKYLGAITGETAVAAGKTQTREGARYRKLARSRGKNKACVAVGNTQLKVYHKLLSNPGMRYQDLGPDYYERRAQTRRKIAYHVRELEELGLEVTLCRPGPAQDDPEPTQAA

SEQ ID NO: 292053 - protein, 362 aa, unidentified
MTKAMSLVGLDVHSRQTHAAVLVPDTGEMTVSKLRMEPVEVVGFLEGLGSGVRAVYEAGPTGFGLARTAQERGIEVRVVAPGSIPKGSGDRVKTDRRDAIRLARLLAAGELSFAFVPSVEDEHFRDLVRAIEDARGDLMRARHRLGKFLLRRGERYPGPGVNWSAKHLGWLRGLHFDDACSQATFVDYLTSVELLMARRSSLISALEQQIPDCAHAPVIARLRCFRGIDTLTAAGLCAEIGDFARFAKPTLLSGFLGVVPSERTSDTKRRQGSITKAGPGHARRLLVESAHHYRHRPFIGQTLARRQAEADPRVIEIAWRAQRRLYARWEHLHHQRRKPAGVVAIACARELAAFCWEAATLD

SEQ ID NO: 292054 - protein, 438 aa, unidentified
MSNKVIFNLDELFISVGIDVGADFSWMSIALPNQQFVGKPYKILHNSIDSLTTAVSKIKEAEELYSLESRIFLESTGIYHYPLFCYLRDKGFNCSVINPIITKNSTNINIRKVHNDRFDSTKAALVGLKPDLKVSLMPSDLALNCRNLCREYYDLMDNRSAYVNKLQGELRMVFPQYLGIFSKVTINTSLTLLETYTSPSAFLKADKQEIIDIIKSTARFGLTYAQNKYNAIIQAATDANQFGYIIDSNIKRIRLYISFIRKYDEEINNILESLHELVDANEDADFVKQIHLIETFKGAGFLSAVSIMGEIGDFSAFSKPKQLFAYFGLDPAVKQSGKFEGTKVQMSKRGSAIARRVIHTLTLQSISISRNGEAKNPVLREYYLKKCDSKPKLVAMGAVSHKVCNMIFAILRDNKSFEIITPQEHIKQYNAAKCDIAA

SEQ ID NO: 292055 - protein, 408 aa, unidentified
MNTLYVGIDVSSKSNVVYLMLPNGDKHSNFSVANSHEGSTLLVKKIYSALTSHSLDTVLIGLEATSVYGDNLVYFLREDATLAPFNRKIHVLNPKQVKKFHDTYNDLPKNDYVDSFVIADCLRFGRINKEVYMGEYRYKALQNLTRARFFAVQNLVKEKQRFMNVLFKKYSTMTQEKVFSDAFSTTALAVYDEFESAEALANMDLHELTDFIIEKGKNRFPDPDAVAKAIQKAARSSYRLPKTVNDSVNQVLSISITSMKALESQIKEFDKAIIALMELLPNVLISIPGIGPVYSAGIMAEIGDINRFDNQASLAKYAGLAWKQHQSGGFEAEVTRLIPSGNRFLKYYLCEAAFSLVRCDKKYSDFYHLKYKEVNRCQHKRALALTVRKFVRLVFRLLKDNRLYCPAK

SEQ ID NO: 292056 - protein, 439 aa, unidentified
MRTDQTFTTAREELVLAVSLELASVKWKVALHDGRRKKPAVHTVAQPHAAARLQAVLSLIEAQKGKWSLPEGVRGVVIYEAGQDAFWISRALQARHLECYVVDSASIPVERHKRRAKTDRLDAIKLVINLRAWLRGERDRMHVVHVPSPQDEASRQLMRDRGQLQKEVLQHRDRMRKLLATLGCWDEVDHKAFAGRLTRDEVRCHDGSALLRELRERLLRECERLALAQQQLAALEKTRHASLPAPARERIDRLQRLKAIGPIGASRLALELFWREFHNRRQVGACVGLVPQPFDSEESQVDQGISKQGNRRVRALLIEMAWSWLRYQPGSALTHWFNQRTQGTGPNRRARRIAIVAVARRLAVAVWRYLKDGLVPEGAQLKSVRASKILQQRDHARFRNSKHWRFEVTMPVRTLGYQHSRFYRWVMLLEKFQRNAHTG

SEQ ID NO: 292057 - protein, 344 aa, unidentified
MENYAGIDVSLELSSVCVVDAHGKILKEAKVASEPDAFVEFFEKLGFAVKRIGLEAGPLSQWLHAGLKRAGFETVLLETRHVKAALAAMTVKTDRKDARGIAQLIRMGWFRPVHAKSIGAQEIRALLVARKQLLGRLIDVELSIRGILRGFGLKVGPVTRKNFEARIRELVAGQATLERIATSMLSARSALKAEYGRLHKAVLAIVRDDAVCRRLMTVPGVGPLVAITYKSAIDDPHRILKSKAAGALFGLTPKKYQSGEKDVTGGITLAGDEIVRTALYEAANVLLSRITRFSKLKRWGMDVAKRRGSKRAKVALARKLAVILHRIWVDGTTYRWAEAGSIAA

SEQ ID NO: 292058 - protein, 349 aa, unidentified
MLKYSLGIDISKNDFHACLSVIEVNQQVKVKASRKFSNHEQGFKDLISWLGNHRKELSVPLVIVMEATGVYYESCAMFLFKKGLQVAIVLPNKAKKYFQAVGLKTKNDKIDAAGLARMGAEQCLELWQPMDEFFYTLRALTRHYQSLQELKTNIGNQLHADEHSIYSNKKVMKHLKKLITTIENELLETADEIDKQLYINPEIAKKVQFITDIKGVGNLTVAATLGETNGFALFSSISQLISYAGYDVVENQSGNHNGKTRISKKGNSHLRRAMHMPAFNMVRYDVGDFKPFFERLFERHHQKMKAYVAVQKKLLVLIYTIWKKNEPFKPKKPVTQNTSGEKETEPSFA

SEQ ID NO: 292059 - protein, 360 aa, unidentified
MNATTVAVDLAKSVFQLAVADEHWRIVETQRLTRTQFERWFANRSVGLVIMEACGSAHPWARWLGGLGIAVRLLPAQYVRAYVRRNKTDATDAVALLEAARASDIRPVRVKSVEQQALQGLHRIRSLWMGTRTSRINALRGFLREFGIAVPVGARTGLEAISRVLADPASAVPELIRGSARLLVEEIRLLEARIAQLERELAALARLSPACTMLLSIPGIGLLTATALVAATSGDVTHFKDARHFASWFGLTPREHSSGSSRFLGKISKRGDRYLRMLLTHGARSVLRAAKVAEAAEREVCGVRRWALDVQRRSNHNKAACALANKLARICYATLRDKTPFGETQQLNRKITRESFVMPA

SEQ ID NO: 292060 - protein, 339 aa, unidentified
MTSVTVGLDTAKSIFHVVEKNASGRILKKVKLPRNKLVNYFANKEACTIAIEACGACHYWSRAFSQLGHRVMIIAPQYVAQHRIGNKNDFNDAQALADVAQREDVRTVPPKSIEQQDAQLLHRVRERYVKQRTALGNQIRGLLAEYGIVIPRGISSLRKALPFVLEDSENELTSLVRMMLDELNCELITWDDKIKNIDKLFVQQARENDQCQKLQTMTGVGPLISSILWVALGDGKNFKNGRHFAAWCGLVPKQHSTGDKARLLGISKRGNAYLRTQLINGARSALKHAKNKDDRLSVWAVNLEARAGFNKACVALANKMARMAWAMVVKQEEYKTQAV

SEQ ID NO: 292061 - protein, 367 aa, unidentified
MKKNSTVKQSPKRAKVLARGPITIGVDLGDKSSRYCVLDENGQVQGEGSVATTKKGMAGKFGCLKRCRMVMEVGTHSPWLSRLLSSLGHEVIVANARQVQLISASSRKDDRMDAQTLARLARVDPQLLRPIRHRGEKAQQDLLLIRVRAALVEARTSLVNTARGLAKAMGERLPSCDTDSLGVEQLEPLPERLRAQLQPLLRQVESLTEEIQEADRKVEQIARTEYPETQLLRQVSGVGPWIALTFLLTLEDRDRFEKSRDVGCYVGLRPKRSESGESQPQLRITKEGDIYLRKLLVQGAHCILSRRGPDTDLKRWGLRLAERGGKNAKKRAVVAVARKLAVLLHRLWVTAEVYEPLRNSAAKKAAA

SEQ ID NO: 292062 - protein, 350 aa, unidentified
MDRYIGLDAHASSCTAGVVGPSGRHLQSQVLETSACSLIAFLKTLPRPRHLCLEEGTHAGWLHDVLSPHVEELVIAGVDHSRGPKSDRRDAFALADALRVGAITTRVYKGLGEFRKLRELSRAYTMIVSDSIRCQNRIKSVYRSRGIPTAGKDVYRVSDRKEWLAKLPTEPRHLVAILCDQLDATRELVTKTGKQMLREARTHAIFHRLKTCPGMGPVRVAQMLPIVVTPYRFASKRSFWAYAGMGIVMRSSSDWVRTERGSWVRAETQQTRGLTRRYNHRLKQIFKGAATTIIGRARPDDPLFAHYQRLLDGGTKPNLAKLTIARQVASITLSMWRSNEDYDPRRLQMT

SEQ ID NO: 292063 - protein, 400 aa, unidentified
MMTPDDIDVWVGLDVGKSAHHAHALDHDGNTLYDKPLKQDEKAIRTMLGKLSKHGRVLLVVDQPNTIGSLPLTVARNMGIAVAYLPGTAMRRTAQLLPGDAKTDRRDAHVIAWAALKLPETLRDAGPDDETLAALKLLAGHDEDLAHESTRHVNRLRSLLLQTHPAFERALKGERITRDATLALLERYGGPMGVKRAGIEDVKDWAKSNGLRAGRIIDDMFKAIGEQTVTVPGTLMAETIIPSIAHDIKTIRDRRREVDRQVEKLLEDHPLLTVLTSMPGIGVRTASNILLGIGGDIANFKLSAHLAAYAGISPVTGQSGTSIKGERPSRRGNKRLKNALWQTAFVASTKHPPSVAYYKRKREQGKHHNAAIICLARRRCDVIYSMLKNGTLYQEPALVA

SEQ ID NO: 292064 - protein, 346 aa, unidentified
MTIVEDTRAITGGVDTNAGMHVAAALDPLGGLLGVREFPATAAGYADLLSWLAGFGTVALVGVEGTGSYGAGLARHLAAAGIRVVEVDRSDRQDRYRQGKSDPLDAVSAARAAQSGRAAGAPKGRDGAVEAIRALMVAKRSARAGRTQAINQARALIVTGPDELRARFARHTATQLAAGLAALRPRPGDVPGYATRVALRELGRRARFLDAQIGHLDELIVPLVAGRAPGLLGLYGVGADTAALLLIAAGDHPERLRSEAAWAHLCGTAPIPASSGKVTRWRLNRGGNREANHALWRIVITRMSSHPATRAYVARRSKEGLSKKEIIRCLKRYVAREVYPYLRPAR

SEQ ID NO: 292065 - protein, 364 aa, unidentified
MRDNITIGMDLGDKFHIAVVFDADGNELDTTKVVNTKDGISKYFKRFKGASVAIEAGTHSPWVSRLLEEIGCRVYVGNPRKLRFIWDSKDKSDERDARMLGMVCRLEPRLLHPLQHRGSKAQADRVMIKSRDILVQSRTKLVNHARGVVKTTGERLPKCSSDSFAKRCADHVPKDLWPALEPLFSIIGHLSEQIHELDAKINQMCRQHYPEAERLQQVPGVGPVTALCYVLTIEDPARFSKSRQIGPFLGLTPRRDQSGDTDKQLRITKAGDKYLRQLLVGSAQYILGPFAPDSHLRRHGLAIAARGGKNAKKRAAVAVARKLAVLMHRLWTSDQAYDPCYGKCQQKLPPNKKITEDAQYLAEA

SEQ ID NO: 292066 - protein, 414 aa, unidentified
MKKHTYRAKNVNKINWKQVQENATNEPLLFAIDVAKEKQYALLSNVSGTVSELIWWKHPEQTLEIIDILESFSSPLVVVMESTGTYGDAMRYQFRRSGFGLYQISAKRVSDAQEIFDGVPSQHDAKAAILITRLHRNGISKPWVELTDVERNLNALRREFDLHQSQYRRNQNRLEAYLSRHWPEVHYCLELDSVTLENLLIEYGSPERIAADKETVALQMRAWGKSQLSDEKINRVIVGACHTLGQPCTAIERQYLQALAEEMRHSRLQQKQAKKAIELMIKSDSHLQEMGQLIGLVTTAILLSCHLDPRHYDCASSYLKAFGLNLKEKSSGKHVGQLKLTKRGSSIARSYLYYATLRLIKLDPIAKAWYLNKVDPRAKNKTVIAVMRKLVKSLWHVGRGETFDASKLFTISAS

SEQ ID NO: 292067 - protein, 326 aa, unidentified
MEHELHYIGIDTAKEKLDVDVLRPDGRHRTKKFANTTKGHDELVSWLKGHKIDHAHICIEATGIYMEPVAECLYDAGYIVSVINPALGKAFAQSEGLRNKTDTVDARMLAEFCRQKRPAAREAPHPLERALRAPVVRHQALTDMHTQELNRTETAREVQRPSIDAHLLWLEAELKRLEKQIKDLTDDDPDMKHRRKLLESIPGIGEKTSAVLLAYIGLKDRFAHARQFAAFAGLTPRRYESGSSVRGASRMSKAGHVSLRRALYMPAMVATSKTEWGRAFRDRLAANGKKGKVILGAMMRKLAQVAYGVLKSGVPFDASRHNPVAA

SEQ ID NO: 292068 - protein, 339 aa, unidentified
MGLHCAVDLHGNNGFYAVVDENGRRLMSKRLPNSLPEILTVLSPYRDRLEHGIVVESTFNWYWLVDGLEANGYRPRLANPAAAEQYNGLKNTDDKTDAFFLAEMSRLDILPEGFIYPKEERPVRDMLRRRLLLVRHRTAHILSFQNLVARERGEEISANRIMKLWPEGVKQFFEDDRLVLMGQTNIEAIRFLTKQIHMLENTVLAEAKLKPEYEKLLTVPGIGRILALTIMLETGDIGRFKKVGNYSSYCRCVKSARISNEKKKGENNRKNGSRYLSWAYVEAANFIRRYCPEAKRWHQRKAARSKQVIATKALASKICKASYFIIRDHVDFDVKKIFG

SEQ ID NO: 292069 - protein, 418 aa, unidentified
MQGETRYLLFVGDDWSEEHHDVEVQDEAGRKLAVRRLPEGAAGIARLHELIAAHLGADGDPGQVVVAIETDRGLWVQALAAAGYQVFGLNPRQVARFKERYNLSGAKSDAADAHALADMVRAERHQLRAVAADTAGAQAVKVAARAHQTLIWERTRHTLRLRSALREFFPAALAVYGDLGLTAADTLELLTRAPDPAAAAKLTTAQISAALRRARRRDVAAKAKAMKDALRVPQLAQPAPVTAAYAAAVQASAAVLITLNDQIRRLEAQVEAHFLQHPDAEIYLSQPGIGPVNGARVLAEFGDAPGRYTSAKARKNYAGSSPITRASGRSKVVLSRYIRNDRLADALQSQAFSALTASPGARACYDKQRARGLGHNPALRQLSNRLVGILHGCLKTRTRYNEATAWPNAAAHTEPLAA

SEQ ID NO: 292070 - protein, 443 aa, unidentified
MSDLAVLDPRAAFVDVGSEKMHVSIAGGSPAVFGTVTSQIHELRDYLAEHQVRSVAMEATGVYWLPLYGVLEAAGMEVVMVDGRQTRNLPGRKTDMKDCQWGATLHAHGLLRAGFVPPAHIRRLQDYLRLRGDHIAAAAGHVQHMQKALERMNIKLHEVISSLTGASGLAVIRAILAGERDPQVLVGLCDIRIRNVKAERVVESLRGDWAQEHLFALAQAVQSWDHYQGLIAACDRQIAVVLRQMPDAKVPPSAASTKTGKPRTRPGVNAPDIADLREILAQICGAKDLTTLPAHSEYSVLQLIGEVGTDLTKWRTEKHFTSWLGLAPGSAQSGKRKASVKRRRNRAGQIFCVMARALARSKHVALGGFYRRMAARRGGLVANKALARKLATLFWRVMVKGLDFVETGVAQYEAKVLETKHRILQRLARQLGHHVVPIPATMT

SEQ ID NO: 292071 - protein, 407 aa, unidentified
MKKIAGIDVHKQVLMVVIADAANPELVLQKGKFGTGQAELERLRMVLQQAEVTEVVMESTAQYWRPVWSEWEPHFTLHLAHAQSNRAPKGRKSDWADAKRLVKRFAAEELFLSFVPEPEQRDWRMLTRARYALIRDHVHLQNQIEALLEQASIKLSSVVSDLFGVSGLRILWALSQGQTDPAKLADLADGHLRCGREVLVDALRGHFGEVHRHLLEQALQRLRMLSEQVAALNKLAAKRMQPHASTVQRLIEVPGVGAEAAQAIVAEIGPTAAAFPSSAQLASWMGVCPGTQESAGQNYSGRCAKGNRYIRSVLCQVAHAAVRTKGSHLQTVFRRFLAKLSCYNKAIWAVAHKICKIIWHILHNGARYLESGGALNPKAAQKAIQHHLKALSRLGYVLPSPTPDPQV

SEQ ID NO: 292072 - protein, 380 aa, unidentified
MNTTTVGIDLAKSVFAVCEGDYRGHGSRSSILKSGEFLKWLRTLPTGTVVAMEACSSAHSWGRTMQALGLEPRLIAAEFVRPYRKNQRIKNDTRDAEAVLTALHAPGMRFVTIKTEDQQQRLAWHRLREGWKAERTALFNRIRGLLTEFGIVVELGAAKIRRKLAELESDAAYPQSIQLMAQSVRAQIGILDQRLAECERQIARQSKSDPAVARLRSRPGIGPLTADAIVATVGNARQFKNGRQFAASLGITPRQHGSGGKTHLGAITRRGDSYLRCLLVQGARCVLQAALRLHKNKPNTLNRLQLWMITLHERVGYHKAAVAIANKHARQVWAMITRGEAYNAEAYKDWEAAHATVRPGDIQEASDYDLSTAALAAASV

SEQ ID NO: 292073 - protein, 340 aa, unidentified
MGEITTIGVDLAKHVFQVHGVDADGVAVLRKQLRRSQVLSFFRRLPRCVVGMEACATAHYWARELDALGHEVRLMPAQYVKAYVKRNKNDAADAEAICEAVVRPTMRFVPVKTAEQQAALLLHRARERLVRERTALVNALRGHLAEFGVIAALGLSNVDKLIAIIRDESDARLPALAHKVLQVLATQIEQLEAAVAALEKQLMAWHKSNPVSQRLATIPGIGPIIATAIAATVVDPIAFRSGREFAAWLGLVPRQNSTGGKNRLGGISKRGNQYLRRLLINGASANLLRSKATNADPWVIGLRRRRPSLVVAVALANKTARIAWAVMHRQENYQRMAAAA

SEQ ID NO: 292074 - protein, 340 aa, unidentified
MNYYAGIDVSLEASSVCVIDAGGKIVREGKVASEPAALIAWFGALGLSVTRIGLEAGPLSQWLYAALRQAGLAVELLETRHVRNAFKTMPVKTDRKDAQGIAELMRLGWFRPVHCKSMDAQEMRAMLTARKLLQKALHEVEMSLRGVLRGFGFKVGKVAPAQFEARIKELVEGHPNLETIAASLLAVRATLRREFNGFEKRLRAMARSDTRARLLMSVPGVGTIVALTYAAAIDDPARFTSSKTVGAHFGLTPTRYQSGETDRSGRISKIGDGSVRAALYESSHIIITKPIKGCTDLKSWAMRIAKRAGMKKAKVALARKLAVIMHRMLADGTTFTTQSA

SEQ ID NO: 292075 - protein, 412 aa, unidentified
MEVLYACCCGIDVHAKMLVACVLKQGKKAVRTFSAMTEDLLRLLDWLTQEGCTHVAIESTGVYWRPVFNILEGAMDVILTNARDAKGFKARKTDVIDAEWLADLLRHGLLKPSFIPPPPIRELRELTRYRESLVREQTALANRIQKLIESANIKLGQVASDALGVSGKLMLRALAAGETDAEKMSHLAHTSLKRKQPQLQQALEGRVTHAQRWILGQLLDQYDQVEAARQRAEERITQEVESSPDPFVPEAVQLLDTIPGVGETVAQIIGAESGVDMGRFPTDNHVASGAGMGPGNHASAGKRQSGKTTKGSRYLRAALVQAAWAASHQKGTYLAAQYKRFVKRMGKKKALVAVGHSILLIGYHVLQDRVKYQDLGGDYFNRRNVDKQRKRLIRQLESLGVKVTVEEVKEAA

SEQ ID NO: 292076 - protein, 337 aa, unidentified
MQVITIGLDIAKSVFQVHGVDRHGRVVLRKRLARAKVLAFFANLPRCVIGLEACGGAHHWARELRKLGHEARLMPPQYVKAYVKTNKHDAADAEACCEAVQRPSMRWVPVKTEAQQATLMLHRVRDQLIGQRTATINALRGHLAELGIVAAQRQAGLRELMTALGEVEDDRMPPLAREVLQTLVAHLRDLAGKLAELDRRLVAMTRTDPICRALAEVPGVGPVIATAFAATVPEARGFRSGRHLAAWLGLVPRQHATGGKEHRLGLSKRGDAYLRRQLIHGARALVKVSPGRTGKLWSWINGLRERRPFNVVVAAVANKLARIIWAMLSHGEAYRAA

SEQ ID NO: 292077 - protein, 363 aa, unidentified
MNATAALPIVGVDLAKSVFQLAVADGTWRVVEQQRLTRLQFERWFVNRAVGLVVMEACGSAHHWARWLNGLGIEVRLLPAAYIRAYVKRNKTDAADACALLEAARCAEIVPVRIKSVEQQALQAMHRTRSLWMATRTSRINALRGFCREFGIVIAQGSRLGVEQIGRVLADPHSAVPPLLRRSMSLLVEEIRLLEVRIAQLERELTALARQSPACTTLLSIPGIGLLTATAMVAATSGEVSHYRDARHFASWFGLTPKEHSSGGTRRLGRISKRGDRYLRMLLTHGARSVLRAASVTVQAGKNVDGLRQRALNVQRRSNHNKATCALANKLARICYATLHDHEPYGAAHLNKKVVRTAFALPA

SEQ ID NO: 292078 - protein, 324 aa, unidentified
MSPVVGIDVAKRSFDLAIDLANGKYRTKAKLPNDPKGFQILQTWLQTHAQADSWIVMEATGTYHEALAEFVYGLGYRVCVLNPAQMALYARSQLTRVKTDRSDAKLIASYGQRHAAQLRPWQPDPPALKRLKALVRRRDDLLQMLQMERNRLDVAALVVRDSLLENIGQLQARIAQIERAIDDQIDQDPTLRGQRELLVSIDGIAGTSAALMLAELGNVERFAHASAVTAFAGLNPRLQESGKRQGQVCISRTGSPRLRAGLFLPALVAMTHNPVVRALKLRMRERGKANKQIICAAMRKLLHIAYGVLKSRTPFDPQKTLACS

SEQ ID NO: 292079 - protein, 345 aa, unidentified
MQVTTTIGLDIAKSVFQVHGVDAAGAAVMRHRLTRSKLLKFFGKLPSCLIGIEACASSHHWARELIALGHTVKLMPAQYVKPYVKRGKNDAADAEAICEAVTRPTMRFVAVKSPEQQSAMMLHRVRLILMRQRTQITNAIRSHLAEFGIVSPVGREGIDKLLDIVADAEDSRVPPEARLCLEMLAVQLRVVKAQILENDRQITIRARETEVGRRLMAIPGVGPVLASAFVATVADPAIFKTGRGLAAWIGLVPRQNSSGGKERLGGITKAGNRYLRQMLVVGAMAVIRHAERNGSRRPWLVQLLARKATKLAAIALANRTARMVWALMTSGESYRDPGVPALAAA

SEQ ID NO: 292080 - protein, 350 aa, unidentified
MSSASVPSTIATIGLDLGKNTFHLVGLDRRGAIVLQLKLSRTQLERRLANVPRCLIGMEACSGSHHIGRRLTELGHAVRLIPAQYVKPFLKGHKNDYRDAEAIAEAVQRPTMRFVAIKTPEQMDLLALHRVRSRLVGQRTGLINQIRGFLIERGITVRQGVMPLRKALPDILSSNAEVLSPRMVRLIADLAQDWRRLDERIESVSAEIEALAQQDDSCQRLMTVPGVGPIISSAVVAAIGNGSGFKQGRDFGAWLGLVPKQESTGDRTILGKISKRGNKYLRTLFVQAAHVVLVRRPATAKRGLWPWIEQASRRLHRNMLAIALANKLARIAWAVLARGRAYEPKVSAHA

SEQ ID NO: 292081 - protein, 408 aa, unidentified
MYYVGIDWADQKHDITILDHDGNVVVKGLTIRKNYAGFEQLLARLQSLSDRPQDFKIGIETPHNLLVDFLYDHGYAVFTLFPGAMRSFRIRYRASGARDDVFDAFVLANVVRNDPLCWRPVEFGSEVIREIRLLVRDQHALQQVYVLWNNSLRSALKDYYPEYIHFFNDVACPTSLEFLDSYPTFESARHLSQEQLTRFFHKQHFYNRKRVNKIYDLLQQKHLHVAPVLIRAREFKALMCAENLKRVAKDLHLYELRLKELVEDHPDGQLFMSFPGVSYLTAARLLAMFGENRDLYSDVSPLQGMAGTCPVTDRTGENRRGPIYFRRQCNKLYRDISHNLAFSSLRQATWALVYYRHHRARGKTHSHALRCLANLNLRILFAMWKTRTHYQEQIYLAQKARHGLTNQK

SEQ ID NO: 292082 - protein, 316 aa, unidentified
MEHAAKEASFVGIDVSKDRLDIHVRPSGRAFAVARDGTGLDQLVDDLRHLAPALIVLEATGGFELTVAAALAGAALPLAVVNPRQIRDFARATGRLAKTDALDAQVIALFAERIRPEPRPIASADRQVLAELIARRRQVVEMIGMETNRLHQARNPRVQRMLRATLKTLKAQLAELDRDIDDTIKRSLVWQAADDLLTSVPGVGDVTSHTLIADLPELGQLDRRRIAALVGVAPINRDSGQMRGRRTIAGGRIDVRNVLFMATLTAIRWNPVISRHYQALVDRGRPKKVALVACMRRLLGILNAMIRSSTPWQCAA

SEQ ID NO: 292083 - protein, 311 aa, unidentified
MTEHTIGVDISKSHLDVFDAERREATRFENSISGFRAFEKWLGKAHIARVVYEPTGPYHRNFEERFCDKLPLVKVNPLQARRFAEACGTRAKTDALDARGLARMGGTLELEPDIPVAKVTRILKDLQVARAALIKERTRLNNRAHVQTNPVLKRQTKARLALVEKQLCELDREIDALITADKTSARRRQIVQSIPGLGSVASAAILTYLPEIGTLDRRQVGSLAGVVPYNRDSGQWRAKSFISGGRKPLRDALYMPALVAMRYNPDLKAKYEALRAAGKPAKVAIVAIMRKLIETANALVKADRIWVPKTS

SEQ ID NO: 292084 - protein, 401 aa, unidentified
MVSDFRKGRYNLMKIFVGIDIAKLNHFAAAISSDGEILIEPFKFTNDADGFQLLVSKLESFDKNSIIIGLESTAHYGDNLVRYLVAEFYQVCVLNPIKTCQMRKNNIRKTKTDKVDTFVIAKTLMMQDDLRFITFFDLDMMDLKALGRFRQKTIKQRTRLKIQLTTYVDQVFPEIQYFFKSGLHQHAVYALLKEAPSPKEIASMHMTHLANLLKVNSHGHFTKELAKELRVLAQKSVGANDSAISIQITQTIQQIELLDSQLEKIEAEMTDIMKFNDSVIMTIPGIGYINGGMILGEIGDIHRFSNPNKLLAFAGLDPSVYQSGNFQAKTTRMSKRGSRVLRYALVNAAWNVVRNNATFKAYYDAKRAEGRSHYNALGHCSGKLVRVIWKMLTDNVEFNLK

SEQ ID NO: 292085 - protein, 371 aa, unidentified
MEQSSKTLYVGLDVHKESIAVAYVPEDRGAEVVSLGPIGTRQCDIDKLIRRLESKGAALVFVYEAGPCGYGLYRSLTAKGFACHVVAPSLIPRKAGDRVKTDRRDAMTLARLMRSGDLSAIYVPGVEDEALRDLSRGRDDAMQDLKRSKRRLKSFLLRQDIRYEGRATWTAAHLRWLAEVVCATPPQQIVFQEYLRAVSEQHERRQRMEHELHEAVQGWRLYPMVQAIQALRGVELTSAVIVMTELGVLTRFENPRQLMSYLGLTPSEYSSGARRHQGGITKAGNSHARRALVEGAWAYRYPAKVSRHLQLRLEKLPAEVQAIGWKAQVRLCRRYRQLTARGKHVNQVVVAIAREMAAFAWAIARLVPLAS

SEQ ID NO: 292086 - protein, 377 aa, unidentified
MGDYSEAFVGLDTSKLRNAVAIAAAGRGGEVRFFGEIENTPAATAKLVRKLSVKYKRLTFCYEAGPTGYGLHRQIKDLGFECVVVAPSLIPKRPGDKVKTNRRDALSLAKLLRADELTPVWVPDGRHEAMRDLTRARETAMLDLRTKRQHVSAFLLRLGRPYPESRKTWTKAHVSWIASQTLEHPQQRLVLEEMMLAIRQAQERLARLEQAIAAAVPEWSLAPVVTALMAMRGIDLVSATTLLAEIGDLSRFRTPTELMAYLGLVPSENSTGDTVKRGPITKAGNRRARRMLVECSWSYQHPPRVGQAKQPKVDAAPPAVREIAWKAQCRLYRRYRTLIRKGKLKTVAIVAVARELAGFIWAVARAATTAPVAAAPA

SEQ ID NO: 292087 - protein, 452 aa, unidentified
MEEKEISMEIVNPHAAGIDVGSRSHWVAVGQREQDIREFGVFNQDLFEMAEWLIERHIKTIAMESTGTYWQNLYAVLISKGFHVILCNGKFTKNIKGKKTDVKDCQWIQKLHSLGLLTSSFLPDGKTEQLRTYCRQRANLLHSAASTSKKMQKYLRLLNLRLDVVVKDICGLTGLNIIRSICEGETKPEKLASLRHGNCRKSEIEIAKALQSNGRKDYLFALRQELDTYDHLQKKVTECDKMIEETLNEIIENDDNKRQHFIEPKVYKRINKNTPKDIDLNLKSYQMFEGIDLLAIEGMSYSTVLAIMSEIGIEGIRKFPSAKQFTSWLRLAPNNKVSGGKVLSSKVPKGSNRLKIALRNAANAIGNLKESTPLRDFFQRINFRKGRVSAISATARKLAVIIWNMVVKGVQYVNPEGYLFLDQKRKLGMVKRIQKQIAKFDLTPDDLGIVST

SEQ ID NO: 292088 - protein, 344 aa, unidentified
MKINRIGVDIAKSVFHVHGIDRHGNVFWQAKLKRDEWIAALCENAEPGTEVGMEACASAHHWGRELQKRGYKVRLIAAQFVKPFVKSNKNDRVDAEAISEAMSRPSMRFVTIKSVAQQDIQAMHRIRSELVGQRTSKANHIRGLVGEYGIVAPKGIGQLRRALPCWLEDAENGLSEDFRTQLSDLWHDLLHLDERVDALGKRLARVVKEDPVARRLSTLRGVGPLGASALAVALGDGSAYASGKDFASSLGLVPRQHSTGGKERLLGISKRGNSYIRALLVHGARSVMSHSKDRDDPLSQWVNGLAARKHANVAAVALANKTARIAWALVRHQREYEPGIAVST

SEQ ID NO: 292089 - protein, 462 aa, unidentified
MARSKPKASRPAHPAPALPPQLAAANLHAAGIDVGAEAHFVAVPPSDDPQPVRGFGAFTADLEALAAWLVACAITTVALESTGVYWIPLFELLEARGFEVLLVDPQQVQKIKGRPKSDVHDCQWIQRLHTFGLLAGAFRPADQVCVLRSYLRQRAMLLTHAAQHIQHMQKALTQMNIKLQHVVSDITGVTGLAIIRAILAGERHAETLAQLRDYRCKHDEATIARALQGNWREEHLFALAQAVALYDVYHQKITECDRHIEAYLQTFVDRSDGQPLPPPSRPRKRGGNQPAFAVREPLHRISGVDLTQIEGIDETTSLVILSEIGLDMTRWPTVKHFTSWLGLCPHHRVSGGKVLSRRTKPCANRAATALRLAAACLHHSQSALGAFFRRMKARMGAPKAITATAHKLARLIYTMLKYGTAYVRQGMDEYEQQYRDRMVKNMTRRAKALGYTLVKAPEGNPV

SEQ ID NO: 292090 - protein, 337 aa, unidentified
MKYCGIDLHSNNSVVVVSGEEDRIVFQKRLPNDLGQIRAVLEPHREELEGVVIESTYNWYWLVDGLMDAGYRVHLAHPSAIKKYEGLKYSGDFADAGHLAQLLRLGLLAEGYIYPREARGARDLARKRMQLVRYRTAQILSIENILARQTGARMSGEAVKRLTAEQVEGLGFAPDVALAVEANRAVSQTLGQQIEGLEKRLRERVSLRGEFKLLKTVPGIGETLATTIMLEIGTLARFTQVGNFSSYCRCVDSLRESNDKKKGEGNTKNGNKYLAWAFVEAANFARRYCPQAKSFYERKKRKTNAIPATKALAHKLARACYHMLREQKAFDVSRCFG

SEQ ID NO: 292091 - protein, 392 aa, unidentified
MVVSVGIDVSKDKHDCFIVNSEGEILVDVFTIPNTMDGFNSLLQRIGDCTTPQDKIKIGLEATGHYSYNLLGFLLDNGLSTYVLNPLRTNLYRKSLSLRKTKTDRVDARTIASMLLSDAGLKPYTDTAYHNEELKSLTRYRFDKVKERSKLKSSISRLVCILFPELEKLVPSLHLASVYALLEEFPGAKQVAAAHLTRLKALLETASKGHYKRDMALEIRDAARNSIGSQMPAKSLELQHTIRLIRELDNEITEIEEQIQSIMDELHSPITSIPGMGFRMAAMILAEVGDFTRFDSPDKLLAYAGMSPSIYQSGQIKNCYPHMEKRGSRYLRYALYNATKYVCQWDPTFSHYLAKKRAEGKHYNVALSHAAKKLVRLIFAMEKSRTTYCLAA

SEQ ID NO: 292092 - protein, 334 aa, unidentified
MEKLAVFVGLDYHKDSVQVCVLDGGGKVLGNRTCDNDPRRVVDYVATHGGVRGAAMESCEGAADFAEGLIAAAGWSVDLAHPGYVHRLRQNPDKTDYSDARLLADLERVGYVPKVWLAPQAIRELRRLVRYRRQLVNERRNVKLRVRALLRAHRRGCAAPRWGVAWFQWMRGVELPEQSRWILDRHLDRLQQLNGDIQGVERRLDVATKDDAVVQKLMTLPGVGPVTAWVLRAEVGRFDRFRSGKQLARFCGLTPWNASSGSRQADAGLIRACNHDLRSVLIEAGHRLKRCDSRWSALANQLRQAGKPGSVIAAAVANRWMRWLYYEMTAALAA

SEQ ID NO: 292093 - protein, 344 aa, unidentified
MKDVRILGVDLGKNSCSIVGLDGAGRVLLRRRTRREGVIALAAKLPGCVVAMEACCGAHHLGRLLVEQGHEVRLMSPEYVRPYVKAQKNDDRDAEAIAEAATRPTMRFVALKSEAQLDVQVLHRVRDRLVGQRTSLTNQIRSILLERGIVVPQGRRSLLEALAVLSSEPDGSRVGTRVQRLLDDMLDQWRALDARIKALDDEFAEMARNDPAARRLATIPGIGVLNATALVAAIGDGRTFSRGRDLSAWLGLVPHQATTGGRPKLLGITKRGSKYLRKLVIQGARAALPSLARTATPLGGWLRGLLARAHGNTVVVALASKLIRIAWALLRNETRFVAGGAAVA

SEQ ID NO: 292094 - protein, 370 aa, unidentified
MQESTTLFVGLDVHKDSISVAHAEANRPDPPHFVGSIGTRQCDIDKLVRRLHSKASCLLFAYEAGPCGYVLHRYLSAKGLECRIVAPSLIPKRPGDRVKNDRRDAVEIARLLRSGDLTPIYVPSVDDEAMRDLCRARDAARVTLKAAKLRLKSFLLRQGLHYTGRANWNDAHRRYLAKVVCPTPAQQIVFQESVRAVDEQVDRLQRIEQELLELAPKWRLYPVIEALQALRGMQWIVALTVVAELGDITRFDKPRKLAAFVGLIPSEYSSGETRRQGPITKAGNARARRALIEAAWAYRYNAKISEHIQKRIEKLPTSVQTIGWKAQVRLCKRFRRLTSRGKHSNVAVTAIARELLAFMWAIAKEVPITA

SEQ ID NO: 292095 - protein, 323 aa, unidentified
MQGQKSPERSAQMGVYVGIDVCKDWLDVYLHPIGQAFRVSNSSDGLKALKRRIAAVQVELIVMEATGKFHRQAHRTLHAAGFAVAVVNPLRARLFAEAVGQLAKTDRLDARLLALMAQTLEPSALAPTPEALEALQELARARAAAIIDQTALSNQRGASQTAFLKAELGRRLKTLAGHIERLDAEIERRIGADPMLKRRYDILITIPGVGPVAAVALVVGLPELGACSAKAATLLAGLAPLACDSGEKTGERHIKGGRAFVRTSIYLAAVAAARFNPQLSDDYKRLRDAGKKAKVAITAIMRKLVVLANVLIKEDRPWTPIHA

SEQ ID NO: 292096 - protein, 386 aa, unidentified
MPKANNCSRSTTVFDQNSTLIAVIEMSLSSWLVAGAVPGVERHPLKKLDVDEDALLKLLLRWRDEAVKAGRKIERIAVAFEAGRDGFWLARWLLARGVEAHVIHPTSVAVSREHRRAKTDRLDTELLKRVFLGWLRGEPDHCSMSAIPTLEQEDAKRPNRERETLVGERTRIVNRMKACLIRLGIRSFKPTLRKAPERLEALRTPEGAPLPPNTQAEMRRDMARLRFVENQIKEIEAARMQKLEQAPAEGPHAMIRLLARVIGVGVETADMLVNEILSRNLRDQKAVARYAGLTGSPDESGKRSREKGLSRVGNARVRRGMIQLAWRFLMFQKESALAQWYHGVTKDARGATRKTMIVALARKLLIALWRMVTIGEVPEGVVMRTA

SEQ ID NO: 292097 - protein, 422 aa, unidentified
MDEAVKPTTKSEDKHMKIHKYLGLDVHQDDSIIAIAEGERTGEVRVYGKVSSDLYATEKALRKIRGEHGVLHVAYEAGPTGFVLYRRLRQLGIDCIVVAPSKTPQPKGGRQKTNRRDALQLARLHRAGELTGIHVPDEVDESVRDLTRARSDASRDLKRAKQRLKSFLLRQGYHYTGKANWSEAHQRYLRELVLPLPALKAVLEEYLQAIDRCTERLTRLEELLVAQVPQWRLYPAVQALMCLRGFELVAASILVAEINDVHRFAHPRGLMAYLGLVPSEASTGNTRRLGAITKAGNAQARWILVEAVQSADHPPKVSAPLALRQQGQPEAYRALGWKTQVRLYKRYWHLTRRGVMAAKVKVALARELVGFVWDLLRQVPVPAAPDRAAAPVLPSATTPAPVSRSATRRHQPGAPLPALVGN

SEQ ID NO: 292098 - protein, 408 aa, unidentified
MNAVGIDVSKGKSMVAALRPMGEVALLPQEFLHTEVGLEQMAYAIIALGEDTRVIMEATGRYHEPVAAALHEYGIYVCVLNPLFIKQSGGGSIRKVKSDKADAMKIAKYGLDNWVDLREYTPMDTVRQQLKLCSRQYNLYMKTVVSLQNNLISLTDKTFPGVNELFSSPERADGHQKWVDFVMTFWHCDCICRVSEKVFTERYQKWCKRKGYHCSVEKALDIYASSCGHFTTLPKNDNTKLLIVTAAQQLLAGKTTLAALRAEMTRLASQLPEYETVRAMYGVGETTAAQLMAEIGDVRRFPHRSSIVGFAGIDPAVNQSGKHETQSTSTTKRGSPHLRKTLYQIVCTYLRKAPADEPVYQFLDKKRAEGKPYFVYMTAAQNKFLRIYYARVKECLETFDAHQKNTQG

SEQ ID NO: 292099 - protein, 459 aa, unidentified
MKKSISKRKKSTPKVSIDQNWSVLNPNAAGIDLGSREHWVAVPPEREAQSVRCFGTTTPELEALAEWLKKCQVSHVAMEATGVYWIPVYQLLERKGFKVLLVNARQIKNVSGRKTDVEDCQWIQRLHTYGLLGGSFRPADAYCVVRSLVRYRDELIAGSTTQVQHLQKALLQMNVQLRGVLSDICGESGLAIIGAILQGQRDPLQMAALAHRRVKASREQLAQALVGDYRSEHLFVLQMAYELYQVYQQKISRCEQELAAALERLPDRVNLQERPLAAKPKAKKLDPDLRLNLYRKLGVDLTAIESIGTTVALTVATEVGPDLGAFPTERHFCSWLGLSPDHRITGGRILSSHTRRVANRLSDALRLAATSLEHSASALGAFYRRMKRKLGAPQAITATAHKLARIIYRLLTHGEAYVRQGLEEYEQKTKARALKAIQKTAATFGFKLVPQESLAKVVS

SEQ ID NO: 292100 - protein, 414 aa, unidentified
MSEIPQCTRFVGIDLHKHFVVVAAVDAQQNLVHKPSRRISLDDFPTWDAQHLGAQDAVVLEATSNAWWCHDQVAPLVGRAVVANPLQVKWIAAAAVKTDKHDAIKLAKLLAANLIPEVWVPPQPVRELRALLSHRYALVRQQTATKNRLHSILHRHNLTPPAGDLFAQHNREWWDHLDASPTERLRARHDVATLEHLRQQLTDLDTELGRLSMITPWREQLPYLVQLPGFALLSAMTVLAAIGTISRFPSAKKLVGYAGLGAGVHNSGQSHRDGHITKQGRRDLRRVLIQSAWAAVNTQPYWKTEFERLARRKPQGVAIVAIARKLLVAVWHVLSERAADHHADPVMVAAKLMRWSWQLTPEQRGGLTSRQFIRYGLLHLRLGDDLRRFTYGGQPRAVAPPEDILALFPELRAD

SEQ ID NO: 292101 - protein, 322 aa, unidentified
MDISKTTFDVAYRSGDSVKTRKWEYTEGQMEEFSKTLDRECVVVMEATGVYHTRLASYLYTKGIGVSVVNPLSAKNFARMLMRRTKTDRADSKLLLEYGETMELEMWEPREQWCVEVQQAYAMLESKNRELTATRNRMEALTHSECASKLCMEMCESDIERLSKDIRALEKEIERLADDNNSKGMEVLESIPGIGRRTACLLLALTGSMRKFDNHRQVSSYFGMCPRVYESGTSVKGKAKICKMGLESIRKMLYLCALSAKTYNKACRELYERLLEKGKPKKLALIAVANKLVKQAFAILKSGRPFDENHVSEKNVQKSLAY

SEQ ID NO: 292102 - protein, 340 aa, unidentified
MKHIGMDVHSTTTDACVRNSRGVPVLQRRIQTTQKEIINFITGIKGPKRVVVEEDQMADWVTRVLQPYVNEVIRCQPQYNKLISSSEDKCDKMDARTLSELLYLDRIKPVHHPEMMYRSLREAVRAYWVASRDLTRAKNRLKGWYLFNGLHERGDSIYSKRNRSKHLEAMQQKGANTELAELLYEHMDTCRRLKAKHIQLMRKTAQPVKDSVKLLMTMPAIGPINGYTLASLLENGWRFPNKRKLWRYTGLSLRRYESRDFGFKGASKTGNRLLKRVAMSAAITIVAQGKPNGLLALWERDIRQSVNPKRARRNLARKIVVIAQHLLRSKQEYIDERVIA

SEQ ID NO: 292103 - protein, 445 aa, unidentified
MTLSQLDEKRIQIKNKIIIGIDPANEKHQGYIIDEYGISIGKTFSFGNNHNGITTKLWYQLKKRLDPEQICPDKLIFAIEASLDFWQILAAYLENKGYKVALVSPLTTKKTRALPGNDFSRTDPKDARLVAENTKEGFFHWYRKDTAREKAMKTLSLTYNKIRKDLQSNQARLRSQIKRIFPEFLEIVTLNTETGIHLLSKYLYPEEYITMDIETTFNEISKISWRYTQTKLLELQTSATNSIGIPKSIEEKIADKITVTTLITLIKTLKQQQKIIKKELVKMAKESSYFEIITSLHGISDLTASLFLAEVVNPDKYDHFKQIQKLAGLNLRLNTSGNSRSYYKINKIGNSRLRWVVFQMTTETSKYIPEIRIKYLKRQLKQPGYTKNITACSGKLLQLLFCLMKNKQPYEYRAETQVLLVDLEEQYYRKTKKYKTKKSAEPNYA

SEQ ID NO: 292104 - protein, 339 aa, unidentified
MYYSGIDQHKRDCMITTYDGDGHRVKQQRVPNSRPQLRRYFSAFPGPHRAVVESTGFWYWLADLLDDLGVELTLAHATRLKAIAAAKVKTDRLDSDLLAQLLRADLIPEAHRIAREARGPRDLLRLRVRLVEKRVSCLNSLERIREKHHDANRDPLDAWYQHQVDVSDAQVALLTQQIHDLEVTLHPHLIPNPDVQRLLWVPGIGKVNAFTIWTEVDGVARFPTEGQFLSYSRVVPGADNSGGRTRHRPGAKAGNRYLKLAFSHASVRAIQYYPVIKAFYQKQRRRKPVIVARTIVAAELARIVYQVLTKQEAFNGTFRGVPLQRTKTRQWPRLATPAV

SEQ ID NO: 292105 - protein, 350 aa, unidentified
MVCSKIAIGFFIGPVWLKEPKGSHRKEGSRKMSKYSMVCAGIDVGKHKLDVACGGRSERLQVDNTADGHRKLSAWLGRQRVKRVGVEATGGYEQAMVVQLRHAGFEVIVFQPAQVRAYARFHLQLAKNDKIDAALIAACTSDTKKVFAPPDPRLAPWAQRLSFIDQITEDIVRLKTRCESCRDERIRRYWREDIARLKKLQKSELKALVAEIRQHRDLAERLDLIASVDGIGLPTAVVILVRMPEIGRISREQVAALAGLAPFDADSGQQHGARHIKGGRARLRRSLYAAALPAALRWNTRLIPLYRRLMAAGKEHKAALIACARKLLIYANTVVERGTPWVREQASLRP

SEQ ID NO: 292106 - protein, 280 aa, unidentified
MFSLPIFVGLDYHQKIIQVCVMDQTRKILTNQSVGNDPCEVIRVVAPFGANVHATIEASTGAAEFAEQLINKTHWCVELAHPGYVARMKQTPDKSDWTDAKLLADLTRAGYIPRVWLAPKSIRELRELVRHRHGLVEQRKQVKLRIRALLRNHRIVCPHSPWTIKGKAWLLDEANIPSQNVMFLLRDHFDTIDHFDKKVSNVTEKMQAEVMDDSVVKQLLQQPGIGMAALLRWWHWAITMRALVGRFDRFRTGKQLTHFCAVCPRNNSSAGKYCLAGVPA

SEQ ID NO: 292107 - protein, 389 aa, unidentified
MIYVGIDVAKDKHDCCILGSEADKLFPVFTIPNNKAGFDELYEKMFSVTDDKTKIKVGLEATGHYSLNLLGSLIDKGLPTCVINPLHTNLYRKGLSLRKTKTDKVDARSIAMMLMTNKTLKPYSDISYHNEELKSLTRYRFDKVQERAKLKSSVARLVNILFPELEKLVPSLHMTSVYALLSKLPGASYITECHLTHLKNLLETTSKGHYGRDMAITLRNTARDSIGSVIPAKSMELKHTIHLIEVMTEEIDEIEGSIKSIMDTCNSPIMTIPGISYRMGAMILAEIGDFSRFNYADQILAFAGLSPSTYQSGQLDSSYSHMEKRGSRYLRYALFNAAKFVCKWDENFGAYLSKKIGEGKHYNVAIGHATKKLVRTIYRMELTGEAYRR

SEQ ID NO: 292108 - protein, 375 aa, unidentified
MYRIIKIGMDVHSKNYTLCAMEPLIGEEDRIFANIQVTADYKNILMFIEQLKMKLGMSDEYDIQCGYEAGCLGYSLYNQLTAAGVKCVILAPTTMLTQQGKRVKTDARDALMIAQCLSYGGYHAVYIPTQEDDSVKEYLRMRDDHKEALKKIKQQINALCLRHGHHYEGTTWTIKHVTWLRKLELPSLYRETLDEYMASFDEQTAKIERFDQRIKELSSQEQYWEKVKKLCCFLGIKTHTALSLIVETGDFSRFAKGNTYAAFLGLAPGEHSSGEKTNRTGISKAGNRHLRQLLIEASRGICKGAVGHKSKELRARQNGNTAEVIAYADRGNTRLRSRYYKFIRHGKKKNVAVAATARELACFIWGMMTDNISCA

SEQ ID NO: 292109 - protein, 405 aa, unidentified
MDIAKRTHYACMVDERGMILKKSFPVHQTNQGFEYFYECILSAKKQFGKTDVIIGIEPTGHYWLNLAYFLDDRGISLVVCNPMHVKKSKELDDNLQTKNDAKDALVIARLVKDGRYSYPRILRKTEAELRVGSTLKGNLTEELNTIKNKMIRWTDRYFPEFQEVFPAFGKMALAVLECTPFPNEIANQEPSELLATYRSVEGMKSPQLPKTKKLIENARTSIGVTEGQQMARIEIATLVQRYRQLEKELESLQEQLTEFIQETAEYEYLQTVPGLGDATIIDLLSEIGSFAHYNHPRQLLKLAGLTLRENSSGQHKGQKRISKRGRSQLRALLFRVMMPMVRHNKAFKQLHEYYTTRQVNPLRKKQSIVVLCGKLLKVLHAICTKHMAFDAEQMMKEIPTLNRAA

SEQ ID NO: 292110 - protein, 365 aa, unidentified
MLSIGIDVSKGKSTVCGMKPGGEIVYAPFEVQHTREGMLELVSLLRSSGEEVRAVLESTGSYHCPVVAALLENGIFVSVVNSLRMKRFCSQSIRKVKTDRIDAMQIALYGPAYWQELQPTRLPEDTYWELQLLARQYYQMTSLLIKAKVDFNALCDQVLPGMQELMNDHAGRHKLSDFVLRYRHTTHILEMGETRFRKDYCKWAEKKGYRNRERMAVLIFATAQNGIPVLPDAPSTQIVITEAIRVLHTVEASRDAILTQMQALAKTLPEYSLVREMPCIGDTLAPRLIAEIGDVRRFHSKRALIAYAGIDAPPYQSGKFCANNRHISKRGNRYLRKTGYEVMQSYVMHKPANDPIFMFIEKKTR

SEQ ID NO: 292111 - protein, 347 aa, unidentified
MAIIGGLDIHRAQLTFEYLDTETGELNSGQIRPGNRQALRAWLKERFSGRQDVAFALEGCTGWRYVVEEIQRAGAEAHLAEPAETSFLRGNKKRAKTDKTDARLLRLLLAQQRLPESWIPPEPVLEVRALSRLYVALMEERRAWQQRIQAQLYHQGVPAIGSLFTAEGRRALAGADLSPAGRQMVTTALKSIDSLSEQIDPLRRQLQAIGRHQPGARSLQAHYGIGALLAVIIWAELGDCRRFSHSDQAVRFAGLDVSVWSSDGKRSAGHLSRQGSAELRWALFEAAECASRSRSPDHDYYLSTRDRLSATRSTLSVARKLVRRCFHTLRALGDNAIALPADALKAA

SEQ ID NO: 292112 - protein, 355 aa, unidentified
MNQLKNTPISFKGQHFFTGLDVHRKNWKVNIRINKTTIKRYTMDPSPEQLAKFLKTHYPDGIYHSVYEAGFCGYWIHRRLLELGIDNIVVNAADIPTSHKEKDRRDDKIDSAKLARELENGSLKGIYIPTPRQQSLRSISRLRYQHRNHATRIKNRIKMFLHFHGIKIPEDFNNSYWSSVFIKWLKSLEFEYSFDSQYLCQYIQALEYQRGMMKDVLLEMRDHCKQNNILKCIRSVTGLGVISAFTIYAELIDMKRFKDLDHLASYVGLVPSRDGSGDREGVKGLTPRHSRYIRYLLIECAWRAVGADPALTQAYATLTTKMSKQKAIIKIAKKMLNRIRYVWLNERKYITAIVK

SEQ ID NO: 292113 - protein, 347 aa, unidentified
MEKIIKQVLGIDVAQKELVVCLGRMYDDWTPQLYSSGTFANNKKGFDSMINWVNKQKAETGSVRYVMEATGVYHESLAYYLEEKGYEVSIVLPNKMSNYLRTLEVKTITDKTASEGIARFGLERKLDTWKRPKQVYKSLKQLTRERDQIVEERTMAKNQLHAEQAEAYPNPSSVDRVKTRIKLFDKQIAEILKEITVVIEQDKEVNGYIETICSIPGVGRLTAATVLAETNGFNLIRNKRQLTSYAGLDVREKQSGTSVKGKPSISKKGNRHLRKAMHLPALAAIRHEKRFKAVFVRLVSKHGIKMKAAVAVQRKLLEMIYTVFSKNKIYDKNYIKMNEVELEKNPA

SEQ ID NO: 292114 - protein, 345 aa, unidentified
MPALTNRPAYQLFVGIDIAASTFAAVWTTDGSPRDRARSFPQTPTGFAALQEQLQATGFAAAHTLVVLEATGSYWIALAVALHQASYVVSVVNPAQVHNYAKSLPRRGKTDLLDAHVLAQFAAERKPAPWTPPPQVYHELRQRLVMRDGLLEMRQQARRERHALLQWPLVIPAVQEHLDTVIAELDKHLAELEAEIAQVLAEGAWAESASLLLSITGIGVVTSAWLLVGTLNFQGCASAASASAYVGLVPLEHESGSSVHGRAQIGHGGQKRLRTALYLATLNAARFNPVIKAQYQRLRAAGKPMKVARCAAARKLLHLAWAVVTKRQPFDPTYGMGIAEERQAA

SEQ ID NO: 292115 - protein, 341 aa, unidentified
MDHCFVGLDVSKEETAVCVRTRGGKIKAAFKTPTDPDAICQSLNRCDADIQCVVVETGRMANWLYSELSQRGLPMVCIDARQAHAVLSQMHNKTDENDAAMLAELARTGFYKRIEVKGRIAQERRALLRAREVAIKTRMNVENTIRGLLAGFGVRLPKHLKTYDQRVRHVLDDQPILAGIILPLLRLRTEALRQVAALTKDMSRIARSDEACQRLMTIPGIGAVSAVTFVATIDTPDRFCRSRSVGAYVGLTSRRHQSGDIDYGGRISRRGDRMLRTVLYEAANSLMCRVKSGAGQNLKDWAIALKKRTSHKKAVVALARKLAVIMHAIWKDGTEFEPQEA

SEQ ID NO: 292116 - protein, 408 aa, unidentified
MEVLYPQCAGLDVHKDSVVACARLQEGAVVQQEVETFGTTTTALIALADWLKERKVTHVAMEATGIYWRSPWHVLEEDFTLVLANAAHIKNVPGRKTDVNDATWISDLLAHGLIRSSFVPPTPIQELRSLMRTRKQLVRERAQHVLRIQKTLEDANLKIASVVSDITGTSGRAILEALIAGETRPEALLAVTTGRLKANRKSLIEALRGRVHASHRFLLKLHLGQFDALTEALAAIDAEVGALLEPFREQAKRLTTIPGVGEIGAEVILSEVGDDMTRFPSVGHLISWAGLCPRNDESAGKRRSTRLRPGAPWLKTILVQCAWAAVRVKTSYLRAQFFRLKSRRGPGKAIVAVAASILTSVYFILRDDVDYHDLGPDHFERSDKTRITNRLVRGLMNLGYEVDLKATA

SEQ ID NO: 292117 - protein, 409 aa, unidentified
MDLVIARCAGLDVHQATVVATERTPDDRGGRRRTTETFGTMTPDLLALREWLQAHGVTHVALESTGVYWKPVYYVLEDAFTLLLINMQDLKRVPGRKTDVRDSEWLAQLLECGLLKSSFVPPPPIRELRDLTRYRLQQVRDRAQEVNRLCKVLEDAGLKLTTVITDVMGVSGRAMLRALVAGTTDPGVLADLARGKLRQKLPALQRALQGRFRAHHAFLLQQILTKIDFLDETVERVTAEIDRRLAPFEATLAALDTIPGIDRVGAISIVAETGGDMSRFPSAEHLCSWAAICPGQNESAGKRRSGKTRQGNRYLRGTLVQAGLAASRSNGTALQARYHRVKRHRGHKKAVIAVGHSILAIAYYIMRDGRTYHELGADYFDKRHAERAVRRHVRQLEALGFQVTIEKAA

SEQ ID NO: 292118 - protein, 392 aa, unidentified
MIIVGIDVASEKHDCFMLQKETGLVFRASSVTIGNTEEGYKKLHADIQSFCGATGDSDVRIGLESTGIYHTNIITFLIAQNYKVMMINPILTNMARKAAKVHSAKNDNLDAKTICRYLVDHPDEFSPYTPTLYHTSMLKSIARKRYFITEDLRKAKMAVNNIVQLIFPEFKKLFSNIYGESALAILKEYPSVKKLAKARVSRLAALIHGRCKCTAEQLIDAAKHSIGLSDDWYTFELEDAIAELEHIQKRIAAFDAQIKRYVNEICPNILTIPGVGYVTAGLILGEIGDISRFRSPDALVSFSGLDLTVYQSGKYKALHVSPSKKGSVYLRYALFQVSRVIWQCNSTFRDYYGKKQAEGKHHYVILGHIQKKLARVIFSVLKNNSAFQERPA

SEQ ID NO: 292119 - protein, 349 aa, unidentified
MSQNLNSAVAVIGIDIGKNSFHVVGLDDRGAIVLRQKWSRGQIEARLANLPPCLIGMEACVGAHHLSRKLKALAHDARLMPAKYVRPYSKGQKNDFRDAEAIAEAVQRPTMKFVATKTVEQLDLQALHRVRERLVSQRTGIINQIRAFLLERGVAIRQGLRFLRAELPRILATSPDVLSARMVRVIRDLAEDWRRLDERIDQLSSEIAVLARQDAGCERLMSVPGIGPIISSAMVAAIGTGEAFSKGRDFAAWLGLIPKQISTGDRTILGKISKRGNRYLRVLFVQAAWVVLIKPMSWERHGLRSWIEAAKKRLHRNVLAIALANKLARIAWGVLAGGRIFEASKLQAA

SEQ ID NO: 292120 - protein, 316 aa, unidentified
MSEPESWIGIDVAKAALDVADTSTARPWQVTNDEAGIAVLVAELLGRQPTLVVLEATGGHERAVTAALAVAAIPVAVVNPRQVRDFAKATGQLAKSDALDARLLALFAQRVQPTPRPLPDETAQDLAALLARRRQVLEMRTAEVNRRASLASRLRPALDAHVLWLSQQLAELDRDLDQTLRESPLWQEKQELLRSIPGIGPVVARTLLGDLPELGTLTRWEVAALAGVAPLNADSGTRQGKRRTWGGRATVRAALYMAAVVAARCNPLIRPLYQRLCDQGKPTKVALVACMRKLLTIANAILRDGVPWDHDRVRTA

SEQ ID NO: 292121 - protein, 345 aa, unidentified
MSQITRIGIDTSKAVFTLHCVDDAGRAILQTNLRRAQMPTFFKKLAPTEIAMEACGSSHHWARELSALGHEVHLMPPQYVKPFVKRAKNDRNDAEAICEAAGRPGMRFVLVKSAELQGQAMVLKVRETLVGQRTQLANALRGHAAEFGVIAGKGIKRIAPLLEAIEAEIAIPAEAKEMLALLGREIEHFDTRLAKIDVKLTAMHKANLLSQLLATIPGIGRIIALTFAIEVDPMTFNSGRHLAAWIGLTPKEHSTGGKQRMGGISRAGNERLRRLLVTGATAVIRFAARPGNKQANEWLLKLLGRKPRKLAAVALANKMARTVWAMMRSGEVYRRQSSLAGAVSV

SEQ ID NO: 292122 - protein, 412 aa, unidentified
MQVVYVRCAGLDVHKKTVSACVSVCEAVGAKRQQTRMFETFTQDLLRLADWLKECGVTHVAMEATSVYWRPVWAVLEGHFEQMLVNPQHIKAVPGRKTDTKDCEWIADLLQHGLLKGSFVPPTPIQDLRDLTRYRAELRQSQNRVANRIQKLLEQANVKLSSVATNTLGVSGRRMLQAIIAGADDPQQLAQLARGRLKVKIPQLKQALEGRVREHHRFLLAEYLNEWDVLEDRIRRMEAEIDTRIRPFEAAVTLWQTLPGVDRVTACNLVAEIGVDMKPFPTAQHLASWAALCPGNHESAGKRKSGKTRDGNKWLRRSLCQAAWAAARTKDCYLSAQFKRLAARRGMKRALMAVAHSMLIIGYYVLKTGHGYRELGGNYLEQINKNQLQRYLVKRLERLGLRVSLEPLTAAA

SEQ ID NO: 292123 - protein, 428 aa, unidentified
MTAQRECSEEVARVAIDVAKAWNVVLMETAAGKRRRFRVANNRSDHDRLVQLLKDQNVRCQIALEPTGNYHRPLAHRLLSEGFEVYLVSSVAAARFREAMFNSWDKNDPKDAAVILELLKQGRVQHYHDPVAVGIHDLQEISKTYVQVTMARTRLQHSLLTHHLPLYWPEFGRYWHSSRADWFVRFLIRFPVPAAVRRLDREAFIQEAGPLVGRKVNKRAQLDEIYELAGETIALPIDPGSFAIQAFRLQLERYLSLNGLRKRLEEWAEEALAASEDFVLLRTIPGIGSVLALIILAEAGDLRRFGHHRQFLKFCGLDLAKSQSGASRGREKLSKRGNARLRYAFWLAGTVAVRMRENSFREKYQRYIGSDPTDADLKRKALTAVMAKMARVAYAVVKTKTPYRTYFEAAVPSGSIPLSRAVEAVRTS

SEQ ID NO: 292124 - protein, 323 aa, unidentified
MQGKVSFQEDAMPVVYAGVDVSKEWLDVHLHPLGESRRFSNDKTGIRQLKRLLARHQPKSIVMEATGKFHRPAHRSLWLDGFAVAVVDPLRARMFARACGYLAKTDRLDARFLALLAESLRPPADTPPSPHIEALQELVNARSAAKCDITALQNRSKTATTALLRGELNRLVRRLEQHVERLDKEIERCVGEDPQLCRKAEILTSIPGIGRVTALALMAGMDELGSCSGKQAAMLAGLAPIANDSGARTGRRSIRAGRPAPRRALYMAALSARRYNPALARFADTLKAAGKPAKVILVAIMRKLLVLANCLLAHDRIWTPNPP

SEQ ID NO: 292125 - protein, 417 aa, unidentified
MDSDKEIVCGADIHRDFLIATMISRSGLKLQERFNMNQDGLLAFRSWILAHRCQRLAVESTGGFWYPIFIILEGHVEFILANAYQIRNIEHKKTDKLDSERIAIYCLNNLITPSRIYPKDYRDLRSITRAREALVNARSKVKNQIHQSLSTCCIKLSSVISDSFGKSGRYIIDRLLEGKTIDQIISGIPSKRVRKKEDELREAIRNGIDPVQVFLIKANLDVIDDISEKIKILEAEIAVKVKPFEKDLEIVLSVPGVGFISAATIIAEIGDYRDFSSADKIAKYFGIVPSVYQSAGKLRTGNITKTGSKHMRRILVEVAKAISRTKKNSKLKRFFLRILARCGKKNIAAVALARKVLCILHHLLMNHEIYQEPDVKKTKPRIPSSVSPISMMDIDEMIKVISQAGYLVEKDLKEGCG

SEQ ID NO: 292126 - protein, 363 aa, unidentified
MQTIYIGVDFHARQQTICYLTTETGELVTCELKHQDKEAVRAFYAAFRGQVIVGLEASGYSPWFERLLEELGYEVWLGHATEIRRRARWRQKNDRRDAELILDLMLHNEFPRLHRPALQSREVMRMLRYRHKLIKMRTMSKNSLQALALQAGVAKRSGLFTRAGKQELDAALMSPAMQWQREHWLQLLQPLDQQVLEAMAWLKAQSKDDVCIARLRTHPGIGLLSSLCLVHTLQPVARFGNTRKVAAYAGFDPVERSSAEHKRFLGISKAGSRLLRHLMVEAANIAVRKDEDLKRFYQRVAARRGRPKAKVAVARKLLIRAYIMLRDEIDYAEFRRRAVAARLARLRHRPNVPAVVIGQPAST

SEQ ID NO: 292127 - protein, 322 aa, unidentified
MKMAKPIIISAGIDTSKDKLDTAIHGRAGGLVVENTPAGWQQLAAWLQQSGVERIGIEATGGYERGVLRYLQQVRFNVVLLQPLQVKAFAQMRLRRAKSDKLDAALIADFTHTMDATNKMPPDGRFDGLGELLTYIEQIEEDIARFKTRLEHMRDERVRQNIKDQIRSFTKQRLAEMRRLRDQIFAHADLKRRYNLVLSIPAIGIRTALSLVVRMPELGLVSREQAASLAGVAPFVQQSGKHQGQMHIGGGRARLRRSLFMAAFTGAFHWNPALMALYQRLVARGKGHKCAIIACARKLLIYANTVLARGTPWEKNSQLAAA

SEQ ID NO: 292128 - protein, 340 aa, unidentified
MERRYIGIDLHRNRFTCCIRLGNERTYVTEWRLEDLGRFVKKLRPSDEVAVEITSNTRLFHDAVAPQVARVVVVDTNQFRVISQSVKKTDPNDARLLSLYLSKGLLPEVRMKDKEHGQLASLTQTRDTLVKLRTALKNKVNNILSARGLNLAKEALSSEKKLTEVLELPFDEIVRIELRVIVEQIRSLNRSIAELEKTIGEEGSKLEGHKGLSSIKGIGKITGAILLSVIGDVNDFPDEGHLASYFGIVPRVSNSNETERSGRIHKRGTKLGRTALVQSALIAAHYSPYLKRFYEQVKARRGPGKAIIALARKFLGIIYRTLKNQWVFEDFPNFVLAEES

SEQ ID NO: 292129 - protein, 337 aa, unidentified
MEREYVGIDLHRRRSVIIRKNAAGELISKVHIDNSAEALVAAVAAAGPGPEVVIEATFGWYWAVDLLQEMGAHVHLAHPLGNNWGNRRVKNDERDAADLVDLLRLGRLAESWIAPPEVRELRELVRYRHKLVRLRAGLKAQVHAVMGKHGVLPTRVDMFGPGGTAQLDALELPDGYARRLASLRALIKTYDKDIAELDRTIATCLVNHRGYHVIQSLNGVGPIVAAVLVTEIGDIGRFPSPDRLCSWAGMTPRHRESDTKVKRGSITKQGSRLIRWAAVEAVSKNHGDDIIKAAYRRIAERRGANIAKIAAARRLLTLVYYGLRDGEIRCLTGPARG

SEQ ID NO: 292130 - protein, 371 aa, unidentified
MKEYNMFIGMDVHKNSIEIAIAQRSRNGEVRSYGKIDGTLDALDKVVRKLVSKGGPLHFVYEAGPCGYEIYRHLTAKGYDCAVVAPSRIPRKSGDRIKNDRRDACMLARLDRAGELTPVYVPFAEDEAIRDLTRAREDAKIDEKRSKQRLKSFLLRTGLRYTSKSSWSKAHMRWLSDIKIPHPSQQIVLQEYIDTITECSLRVQRLTEHLRQRLTQWRMFPVVKALQALRGVSLIVSATTVAEIGDLKRFDNPSELMSYLGLVPSEHSSGEKTRRGSITKSGNGHVRRVLVEAAWAYRLPARVSRVLLKRQEGLPQKVCQISWKAQVRLCSRYRRLWAKGKPKQVVVTAIARELCAFMWAIGNEIETPAVT

SEQ ID NO: 292131 - protein, 405 aa, unidentified
MNAVGIDVSKGKSTVTIRKPGDVVLMSPCDIPHTQSAINDLIKQIKSLEGETKVCMEHTGRYYEPVATWLSDAGIFVSAVNPILIRDFGDDSLRTPKTDKADSKKIARYTLDRWAKLKQYGIMDKTRNQLKTMNRQFGFYMAQKTAMKNNLIALIDQTYPGANDFFDSPACNDGSQKWVDFIHTYWHVDCVRSKSLNAFTEHYQNWCKRKNYNFSAEKAAKIYQISSDLIAVFPKNDITKMLIWQAVALLNTASKTVESLRSKMNELASTLPEYPVVMDMNGVGATLGPQLIAEIGDVSRFTHREALTAFAGVDPGKNDSGKHIQNSVRTSKKGSPYLRKALFQIMDSLIKRSPVDDPVYAFMDKKRSEGKPYYVYMTAGANKFLRIYYGRVREYLSNLSNNETI

SEQ ID NO: 292132 - protein, 341 aa, unidentified
MGSYVGLDVADKQTAICVIDDAGEKRWEGKVRTAPELIAATVRERAPDAVRIGLETGPLCVWLWHALNEAGLPIVALHARQTSAALALQANKTDRNDAAGLARIVRSGWYKAVAVKSLDAHKLRALLATRDQLVGMSTSLVNKIRSTLKTFGVLLGSGRGSAFEKKVREAMPDDPIVRTLIESLLRLWRTVREQRQAIDSRLIAFARHDPVCRLLTTAPGVGAITAISFMTTIGDPRRFGRSADVGAYLGLTPKQYQSGDVKVIGRISKCGDTLTRKLLFEAATVVIARLKRPLAIKTWGEQIARRSGVHKARVAVARKLATVLHQMWLRGEPFRLDLAAA

SEQ ID NO: 292133 - protein, 339 aa, unidentified
MNVTTIGIDLAKNTFSLHGVDSRGKMVFRKTLSRGKLLPFLAQQPPCLIGMEACSGAHHWARSLQALGHRVGIMAPRFVAPYRKGGKNDGNDAEAICEAVGRPGMRWVPVKSDEQQAILCLHRIRQGLIKERTALINQLRGLLSEFGLIMPKGRYSAQHDIPGILEDAENGLPMLTRKLLHDTWLRLRTLNEQVLAYDRELNHLVRDSEPAKRLMTVPGIGAITATALLASVGDPRQFRNGRQFAAWLGLTPRQYTTGGKIRLGRITKKGDAYLRTLLIHGTRAVLSTVKDKQDRLSIWTKTLIERRGYKRAAVALAAKNARILWALMVRGETYQRKAV

SEQ ID NO: 292134 - protein, 373 aa, unidentified
MPTNLRYVGLDVHAETIAVAVAEPGGEVRPLGIIPNRPEAVAKLVRKLGPREPLRVCYEAGPCGYVLYWQLTKLGVHCDVVAPTLVPTKPGDRVKTDRRDAAKLAHCYRAGDLTPVWVPDAAHEALRDLVRAREAAKQDQLRARHRLGKFLLRHGRRPPEDVKPWTQRHRRWLDALQFELPAHRATLADYLYEIDHAAARVARLDAALDEAVQAAPAPMRAVIAALQTLRGIRQVIAATIVSEVGSLSRFPHPRELMGYSGTVPSEHSSGSHVHRGAITKTGNAHLRRVLVEAAWAYRFSPKCAKGLRQRQRGQPEVITALAWKAQQRLCSRYRRLLARGKPTPHVITAIARELVGFVWAIGVAVEREQAMAA

SEQ ID NO: 292135 - protein, 429 aa, unidentified
MNFRPIAGIDVGKFFSEMAILSPSNEVVARMKIHHDSSTDVERAVELLIKTEKDFASRPFVVMESTGHYHKILFHSLCKAGFEVSVTNPIQTDSIKNIGIRKVKNDKVDARKIALLYRFQELRTTNIPSEDIECLRSLCRQYYKLSDELTAYKNRLTGIVDQLMLNFKDVFSNIFSKASIAILEEYHTPAHILKANRSMLISLIQKNSRRSLKWSTAKYELLVSKARDFAPLSIHNSSNLAMLGVYISMVRTLEDNLEKVLKAIRTLIAEDMAKDMPMLALILELLQSLPGVGLLTAATILAEIGDFSAFKKPGKLVAYFGIDPSVMQSGEFTGTRNRMSKRGSRLLRRVIFTVALANIRTKRNKKALNPVMLEFYKQKCQSKPKKVALGSIMRKLVCYIFAVLRDRKPYQLRDPQEHAQMLAKKHVAA

SEQ ID NO: 292136 - protein, 300 aa, unidentified
MKLHVLGIDLGKTVFHLVGLDSTGKVVIRKKCSRTQLLAFTANLQVQLIGMESCSGSHFLGRALREQGHEVRLMPAQYVKPYVQTNKSDFLDAEAIAEAVQRPRMRFVPIKTEEQLDLQALHRVRERWVMRRTAVVNQIRSLLLERGLTLPKGRSYVDRQLPRILEDGELRLSGSFRVLLAQPALIAAVGNASAFQKGRNLAAWMGIVPGEYSTGGKQKLLGISKRGNKYLRTLFIQGARSVLQQRHKQAPGLSHWLAQLLGRTHQNVVIVALANKLVRMAWAVLCKNERYRAPVLAVTT

SEQ ID NO: 292137 - protein, 336 aa, unidentified
MALYCGIDLHSNNHLVVVIDENDQRLEERRLGNELLQTLSLLEPYRDQLAGVAIESTINGYWLADGLQDAGFRVDLVTPAGIKQYEGLKYSDDRYDAFWLAHLMRLGLLKTGYIYPREQRAIRDLLRRRMQLVRTGSRQLICAQSQIWRSTGIRIGCNQLKKADVVVTLPDVDTQCAVESHLRVYQSIAREISLLEQRVMAQTQPKTDYEILTSMTGVGPILGTTILLETGEISRFKQVGHYASYCRCVKSEKTSNGKKKGEGNAKSGNKYLSWAFSEAAHFAVRYEPLAKRFYDRKRRRTHGIVAIRSVAHKLARAAYYMLKEQTRFDATRLFAS

SEQ ID NO: 292138 - protein, 317 aa, unidentified
MKTVPHSQCVVHHGVDVAKTELVIDCAGSIKRFGNHAKGIAGLLAAAGKSEGVPHLVCEATGGYEQAMAKAALRAGMRVSVVPPQRVRNFARSMGRIAKSDPIDAKVITRFGQVTNPEPLQPKDSARQKLDELMRARAELLDSQQRERNRLEHHGDPAIQRMFKTLIARLDKQIAAIDERCAALISADPTLSRADALLREVPCVGPQVSRSLLAFLPELGQVGRRAIAALTGLAPYDRDSGKMQGKRFIQGGRAPVRRVLYMAAVVAIRYNPVLHDFYQRLRKEGKPGKVAVVAVARKLIVHLNTKMASLLKNPVAA

SEQ ID NO: 292139 - protein, 329 aa, unidentified
MTTTQAVVGVDVSKATLAVCHQVGAHVQHLEVANTSAGFRQLVRCGGASSLYVLEATGPYYLAVAYHLVAAGAQVAVLNPLVVKHFIQMHLGKGKSDRKDAQWLLRYGQQQATPRWQPEETVLVECRQAEQVVELLIRQKTMIHNALEALQAQPVVSPAVLEQLRQTLLHLEEQVQQLETKLLTTIEARYPPEMQLLCSIPGIGRKTAAYLLLFAGGFTSFQNYRQLIAKAGLCPREFSSGTSVRGKARISRMGGALIRSKLFMCSWSARRANGACRALYDRLVAKGKNGKLALIAVCNKLLKQAYAIVTSGVPYQADFTKKVSAPLAF

SEQ ID NO: 292140 - protein, 315 aa, unidentified
MIIPLRCVGIDVSKSMLDIFDDAVGKPERIANAPQPITEQVARWRCADNVFVVFEATGVYDCMLAEALHQAGIRFARINPARARDFARAGGRLAKTDAIDARMLAVFARAMGPVADPPPEPARNTLASFAKRRDQLVHIRAQEKNRRSEVRDPVMAEDITLHIDFLSRQITAIEARIEALIKAEPEICEQARLLRSAPGIGPVACMQLIAQMPELGRVGPKQVAALAGLAPFNVDSGSYRGKRAIGGGRKRIRDAVYMGALNAVRRDPTLKSFYQKLRAAGKPAKLALIAVARKLLTILNAMLRDRKIYAIAGST

SEQ ID NO: 292141 - protein, 391 aa, unidentified
MSMYFIGIDISKYKHDCCIISAADQKVVSKVTIKNNKAGFNELLTIIHSLANPADIRIGFESTAHYALNLELFLENSLLTFMEVNPVLISEYKKSKTLRRTKTDSVDCESIARWLMTVEYKPHSKGFYHAYSLKSLTRLRDKLIRQRSFYLVKITNVLDHTFPEFKPFFNERLSKTALYLLENYGSAEKMARMNSASYEKLRSLSRGKFSPQQFLRLKELAANTVGVNNSIFDVELNSLLSLYQSLVKEIDTIEKEINKLIEEVHPHYMSVPGIGPLSAAVIYSEYGDISNFTNPGQMLAFAGIEPGINESGTESHGGKMVKRGSSQLRYTLINCCLPLIRFDMTFATYYAKKRGEGKPHRVAITHVAKKLIRVIYALERQDIDFNAQKLR

SEQ ID NO: 292142 - protein, 385 aa, unidentified
MQANTTKAPAAIRVDLAAIFVSLELSRSKWLVTSLSPGGGERMSRHLVSGGDIPGLLDHFAELQRKAEVRTGQSFRVISIQEAGLDGFWIHRVLEREGIESYVVDPASIATSRRRRRAKTDRIDGEALVRALLAYNRGEPRVCAMLRVPTPEEEDRRRLVRERKALTNERIRHVNRIKGLLFSQGVSGYEPLKGDRRKCLDALITGDGRPLPPALMAQISRELDRIELLIQQIKDVEEARDALLVAADEPTPALLLNLKGIGPEFAAVLWSEGLSRKFDNRRQVAAYAGLVPTPWQSGQINCEQGVSKSGNPRLRSTLVQVAWLWVRHQPNSALSQWFSARVIQNGGRYKKTAIIALARKLFVALWKYVNAGVVIEGALLTKPSA

SEQ ID NO: 292143 - protein, 371 aa, unidentified
MLSKKIVYVGVDVDDTAFHGAGIILETGELFEFKCKPDHGVLRKKLNELFGDRYEIHLCYEACYLGYSLCRFLRKACIQCDVIAPSLIPVKAGARVKTDRLDAAKLAEYYAKGLLTPIYVPNETDEEVRDLVRSRHFLVKQRTMLKTHILSTCKRYDIKFKEETGIKTLWTDQHISWLKTKAKTQQRPVCQIDIETLLAQYTGLAESIEKLDTAVSHIAEGERYKKAKDALNTFRGIDTLSAMTIISEIGDIRRFAHPRQLTSYVGLDVAEYSSGGKERKKGITKTGNKHIRTILTESCQMASRPPILSKRIKQFRAGQPQAAVDIADRCMNRLYKKSVRMLFSGKHINKIKTACAREMLGFIWEAMRLVT

SEQ ID NO: 292144 - protein, 372 aa, unidentified
MQSQTKNTITADFTGQNFYAGIDYHKKQWTVTMRLSGTYLKTYTMQPSPQALAKHLQSNYPNGNYFSVYEAGFCGTSAHVQLCALGIKNIIINPADLPMTHKHKTTKTDYHDSRALAEYLEAGKLKGIHIFSVEQQELRSLCRLRSNKRKDTTRCKNRIKGILMYYGVIIPEQYQGKKCWSKRFINWLKEQKLTTTAGEQCLEVLVADLEYQRAQMLGVLKSVKDLLLQVFKKTWDVLLSVPGIGPVCTIILLAEIGDMKRFSSEPHLACFFGLLPSVASSDETIIEKGINPRCNKYLRSMIIEAAWVAIRQSPSLLAYYKKHSHMDSNKAIIKVARKLVMIIRAVWLTETPYQEGYQSEKKGKEQPLLLNA

SEQ ID NO: 292145 - protein, 474 aa, unidentified
MEKYYLGCDVSKGYCDFVILDQGKNVQESSFQLDDTFEGHVELCRVIHNFLLYHPDSMIYAGLESTGGYENNWYQLLWKLQGQYNIQVARLNPLGVHNYAKAALNRNTTDKISARHVAEYLITHEEMVSYNREDYYAGLRRQWKFVRFLKKQKAGLLNQLESLLYNTHPHILTYCKDGMPEWVLKLTENYPTALSLAGARAGEVAEIPYVSEKRAEELIKAAQRSIASASDPCTEQLVRTVAGQILQLQSTIKGQEKLMMGSCKIPEIALLKSFTGIGNFSALGLMLEIGTVERFRSVKALASYFGLHPVYRQSGDGLWGFRMSKMGRKEPRWILFMVAQCAIIKNQMIRELYLDYLRKGKTKMQAIGIIMHKILRIIYGMLKNSTSYDPRIDRANRNTAVHEEAIQRPDKSRRFQGHDNHAPVSRRQTKKRKEQAESQNDTIIENGIITPAHEKDNAVSSGDSREREKTLVST

SEQ ID NO: 292146 - protein, 455 aa, unidentified
MKGKRSYAATDVEHFDVSVLVPLLTMGCIVAIDVAKTKFMAAIATAAGEVLKLIKFEHPRQTALFLRLLAALQEAERKPKVVMEPTGTYGDAVRYRCHQLGVSVHMMPPKHTHDFAEVLDGVPSMHDAKAAVVLARLQAIKPARAWVPESEERRDLRAWVDQRRPMTRTLRLYQGHLEATLARHWPEIGMHVDVYHSRSWIALMKELPGPDAITAARERATEVLRKASRGKLSSERIAAIVDSAQGTTGVPMTSGEQQKLHAIVEQLEVQTQRLEAVDAKLSELIEKDEVLARMATLVGPACASAIGALVGSPLAFANARAFEKAMGLNLKEKSSGNVQGRLSITKRGPGEVRHLLYLAALRLLKADATTLAWYRARKSHQAGLSIKAVVAVTRKLARALWHVARGAAFEPSKLFDTRRLDLTSVQVKTTKKGAEASHVASAGTALPRRCSSHVA

SEQ ID NO: 292147 - protein, 410 aa, unidentified
MKIIYDICCGIDVHAKTVVVCLIKNGKKEIKTFSTMTEDLLELLDWLVKVDCRQVAIESTGVYWKPVFNILEGSLEVILVNAHDVKVVPGRKTDVRDCEWLADLLRHGLLKASFIPPLYIRELRELTRYRQSLVKEQTAVANRIQKVIESGNIKLGQVASDVLGVSGRAMLRDLAKGETDTEKLANLARHRLKQKKPQLQKALKGHLTDAQRWVLGEMLIRLDELEAAIVKVDERVRTEVRDCTNPFVQEAVKLLDTIPGIGEQIAEVIVSEIGVDMERFPTDGHLASWAGMCPGNNESAGKRKSGKTTKGNVYLRVALVQAAWAAAHTKDTYLSAQYKRLIRRMGKQKALVVVGHSILTIIYYVLLRKKNYQELGGDYFDRQSTQAQRIRLIHKLESLGLKVTVEEQAA

SEQ ID NO: 292148 - protein, 360 aa, unidentified
MAKTKSVRPPFVVGGVDTHKDLHVAAVVDENNRVLGSDFFATTRQGYRQMLTWMASFGTVARIGVECTGSYGAGLLRHLQNAGITVLEVTAPDKMERRRRGKSDTIDAESAAHAAFSLIRTVTPKTRSGMIEALRVLKVCRKTAVAARRIALQMIQMNIVSSPDELRDQLRNLTRMQLIRTLAAWRPDVTANRNVQDAYRIALKSLARRYLELHDEIADLDIMIASIVDELAPELIKRNAIGYESASQLLITAGDNPQRLQSEPGFAALCGVSPVPVSSGKTNRHRLNRGGDRAANSALHIIAIGRLRTDTKTQEYVAKRVAEGHSKMEALRCLKRYIAREVFTLLRNQNRQINSTQITT

SEQ ID NO: 292149 - protein, 394 aa, unidentified
MNRTGERNNSLNGADNREDKMTYIGVDLHKDSMTIVCCDKQGEFIRKERIPCKCVGKIEEFFAQPQLHPCTVVVEAIGFYHWLFDLLEGKVEKLVLANPVETRKYCWDQAKTDFRDARKLALMLAGGEFERNKSLSCFVPDKTLRTFRELTRYRHNLVDRHTSLANSAHRILLKNNLAGPKNINGKSLESFLSRFGEKFSVYHKNFLMQISENLFYNERQIKQVEQEIQPFLHMDRFKQFYDILTSIPGIGDTVSASLISEIGDFSRFDHPDKLASYAGLCPRVFASDKTVRYGKITKKGSVFIRKSLINAAWVSIREDEKPRRIFNRVCKRAGRKKAVVAIARKLLVWIWYLVAEGEKWHAISTRPDSLTSNKSGVTLVRLLKHAPYRVNSQA

SEQ ID NO: 292150 - protein, 272 aa, unidentified
MEHELHYIGIDTAKEKLDVDVLRPDGRHRTKKFANTTKGHDELVSWLKGHKIDHAHICIEATGTYMEPVAECLYDAGYIVSVINPALGKAFAQSEGLRNKTDTVDARMLAEFCRQKRPAAWEAPHPLERALRAPVVRHRALTDMHTQELNRTETAREVQRPSIDAHLLWLEAELKRLEKQIKDLTDDDPDMKHRRKLLESIPGIGEKTSAVLLAYIGLKDRFAHARQFAAFAGLTPRRYESGSSVRGASRMSKAGHVSLRRALYMPANGSHQ

SEQ ID NO: 292151 - protein, 361 aa, unidentified
MNTMVVGWDLHRKFSQLSLQQRNESGEVRVVERARLEHADRESMRRWLAKLPRGTPVAMEGAFGWPWVADLLTELGLDPHLGHPPAIKVLAKNEAKADRCDADRLGRFWLRGILPESYLATPAVRQLRERLRYRMALVRLRTGVKNRIQAILHRLGILHSFSDLFGLQGRSWLNELSLPDASREVLDGLLVLIDQLNELIDQLESWMENNLSDDAVVRWLMSLPGIGRILAHVIRAEIGELERFPTARHLVSYAGLAPLSDDSADRHGRRHIAIACNHTLRWALIEGAGCLLRSKKAPEKLLRLHHRLTLGGRVNKSQAKVAVARELGVLVYVLWKKGETYCEHPAIRPGTPSAARHVARE

SEQ ID NO: 292152 - protein, 349 aa, unidentified
MTEAYDGRQVVGMDLHRRRSVLVRMTEDGRKLETARIDNSPAALRTVLARAGSSPRVVVEATYGWYWAADTLQAAGAEVHLAHPLGVKAFTYRRVKNDERDCADLADLLRMGRLAEAWIAPPQVRELRELTRYRIKLVRMRSSAKDQVHAVLAKLGIPVPCSDLFGAFGLAWLDGLRLPQPYGGKVTSLRQLTGWLTAEVSMLDEVIADFLGDWPPYQAVLRLPGIGPVLAAVVIAEIGDVSRFPSPGHLCSWAGLTPRHRESDVKVARGHITKQGSPALRWATVEAIQHQPAGSPPRELKDAIIARRGTEARNIAKVAAARKLLTCVFYAMRDGEVRSLAARSAAEAA

SEQ ID NO: 292153 - protein, 296 aa, unidentified
MLSTKYIGMDIHKETISIAVMSSVGKSVMECVIETKANTILQFIHGLRGDLHVTFEEGTWAAWLYDLLKPHVTEVLVCDPRKNALLKQGSKSDKIDARKLAELLRLNHLKPVYHGEHGVRTLKELARSYLTITQDLTRVRNRLKAVYRSWAIPCTGTQVYAPRHRSEWLGKISEAGVRRRAEHYYQQLDALRPLRQEVRRDLLTESQKHKAWKLLRQIPGIGAIRAALLIALIQTPHRFRTKRQLWTYSGLGLETYDSAQYCVVEGQLQRSKRPVTLRGLNQNHNHDLKASSKVRH

SEQ ID NO: 292154 - protein, 367 aa, unidentified
MFSSDYTVGCDAHKHFSLFAVLDVRGNLVQRTRVDHQPGAIRGFLEALPEGTAVAMESVGNWYWIVDEIEAAGCLPLLANPAKAKVMMGNVHKTDKLDAQGLATLQYLGKLPSVWIPPAEIRDERELPRTRMAFAKHRAMVKNRIRSTLGKYCLALETDSDIFTPKWRPDLESLLEQLPPETGRCVRQQLQILDALTHHIQQLEERILERLRITPTIQLVQSVPGPAKVLAIVIDREVGSVERFPSPHHFAGYCGLVPKVSASAGRAHYGRMVKQCNTYPKWAFIEAANVIVAHRHHPKWRRKYVVHLYERTRRRKGHAVAVGALARYLAESTYWVLTKGEPYREPPHWRPAGAKSPVSPSQEQARA

SEQ ID NO: 292155 - protein, 408 aa, unidentified
MKASYYLGLDVAKHKVRAALRGPNGVFLFEHDLPVNAAGRRELLALLEQHLPEAASLLVLLEATGVLHLHWAAALTRAGYTVLVLNPLMARRLYTVKNSIRDNKTDPVDARGLCAIGALHGAELLEKYRFLLRPQQLALQRLHTVRKALRNALTNLKKTYGSLLDLSFPELGGLMEKDGVGLRALLAQAPTPAAIARKRRATLEKDWRLRAKAAQLHALAADSIADPALAAASAPALRAVLQSIAALEARLRALDQEIDQRALQSGDPKRQALLQTIPGFGPVVAASVLAHLPEELLHAGNRRTAATRLQAFMGNDPRLQQSGQWTGQIKMSKRGVEMLRTAFFQAAFSASQHDQELKAFYQRKRSEGKKHEVALSHLMRILTRRLVAVLRSQQPYRPKEVLPLQHAA

SEQ ID NO: 292156 - protein, 375 aa, unidentified
MNYNTVYVGMDVHKESFTLCCMTLEMEKAKYTMKTGADYKKILVYLDTMRGKFYGEDTHFICGYEAGCLGYTLYHQLTAANVECIILAPSTMSVEGGKGKKRIKTDKRDAENIAKCLAHRLYSPVHIPTDEELQIKEYVRMRDDHKHQLKSIKQQILSFCLRHNLKCDTSKSNWTIAHLKWLRSLQIEPLYKEILSEYLTTYDQLTDKIGRFDKRIEQLAQGDNYRENVEHLRCFIGIETHTALSIVAEVGDFKRFTDAGKFASYLGLTPGEDSSGDTRNRLGITKAGKRHLRRLLTEAAQCYARGSAGHKSKTLKARQSGNPTEVIAYADKANERLRRKYYKMVLNGKNRNTAKTAIARELACFVWGMMTNNIA

SEQ ID NO: 292157 - protein, 383 aa, unidentified
MQPINTVNPTILLAIELSASTWLVAARVPGAEKPHLHRIDGGDTAALLALISSLRARVARRLDAPQIGVVCCFEAGRDGFWLHRLLTAHGVASHILEPTSILVNRRARRAKTDRLDAEGMLRVLAAYLRGDHQACSMVRVPTLDEEDAKRTHRERENLVHERLRIENRIEALLFTQGIRKRPSLRSWERDLDMLRTGDGREIPHHLRAELDRLRRRLVTTLELIREVEAERDQAAEAKPQDQACRKIAALCRIRGIGANFAAVLTREVFYRSFDNRRQIASYVGITPMPYQSGGMDRDRRISRAGNPRARTTMIQLAWLWLRYQPGSELAEWFRERVGTLAGRTRRIAIVAMARKLLIALWRYAETGVIPAGAEIRAETIVAA

SEQ ID NO: 292158 - protein, 419 aa, unidentified
MAFKILRKNCCGLDVHKTWIYACIGITDANGRTEYKQARFSSFPKGLRDLADWLAKYNCSDVCMESTGKYWIPVFNILEKTCWVTLAHPKYTKPQKGNKTDRKDAKWICDLYMCDMVKPSFIPPPDIRQLRDLMRYRTKLTNMLTGEKNRALNCLTISNLKLDDVFSDVFGKSSRSIIQYILEHPGEQFDVAPFLDRRCKHPVEEIQAAVDGTISREQIAKLRECLRHIDQLNEHKENIEIEILHLAQCYPCQLELLRTVPGFSSAPLTAVALISEIGVDMSVFPSAKHLVSWAGCCPRNDQSSKTVKSTRISRAGCYLKPLLVQIANAVIKSDKYPECRERYRRIKARRGHKKAIIAVCRMLLTAIWNVLSKLTPYSAKGYLEDKLTEHSVLISKSQGLELLRKRGYIFKDELPADSG

SEQ ID NO: 292159 - protein, 362 aa, unidentified
MLTDERTTVGLDVHARSVVAEAVDWSTGQVFSATLVPDSGEVLAWVARLPGPVAVTYEAGPTGFGLARAFTAVGIRCVVVAPSKLERPPGDRVKTDRRDARRLARLLHIGEVTGIRVPTVGQEDARDLVRAREATRADLMRARHRLSKLLLRQGIVYSGGRAWTAQHERWLRKQRPESPGARTAFDEYFDTVLATTARRDRLDQAIAVTAAEPAWAPVVNRLCAVRGIAALTGLGLAVEIGDWDRFDGSSIGAYLGLVPTESSSGASRSQGSITKTGNTHARRLLVEAAWQQQRPLRPPSKALRARRDLVGPAVRARAQAADRRLHQRWQAMAARRKPPNKIAVAVARELAGWCWSLAVMPD

SEQ ID NO: 292160 - protein, 318 aa, unidentified
MQTSIVFIGVDVGKFELQVAASDGEIVTGVLPNNRSSIVGWLKRLPATSVIAMEATGGYQELLARTAHERGFEVYVLNPTHVHHYAISLGNRGKTDRLDAAVIAQYIAQHHKKLHRYEPISPELQEVRALQALRSTVVRVGTSLRLSAQRHGCVSSHQKKALASLTAWSEQLEREMIAKIKAQNDWAKTYGLLTGICGIGPITGVALTSLFSRIDFASSDAAVAFCGLDPRPNESGRKVGRRRLSKQGDKAARTLLYNAASSAARTEQFKDYYAMLRVRGLASTAALVIIARKLLRIAYGVWRTGHPFDPEKLRPTTA

SEQ ID NO: 292161 - protein, 336 aa, unidentified
MQITTLGIDLAKSIFQLHGIDAEGKVLLRKKLRRQALLSFLAGLPPCLVGMEACATAHFWAREVAALGHEVRLIPPAYVKPYVKRQKNDMADAEAICEAVSRPNMHFVAIKSADQQAVLMLHRSRELLVRHRIAMINALRAHLAEFGIVAARGAHKMRDLVGELQSEETEIPEVGRTALLSLVRQLDALETEIANLDREIHAWHRQSEISSRLATIPGVGVITATAAAATVADASLFTSARQFAAWLGLVPRQASSGGKDRLGRITKMGDGYLRKLLVIGATSIIRSAGKADPRTREWVQALLERKSARLASVALANKMARVVWALLSKGESYRTV

SEQ ID NO: 292162 - protein, 338 aa, unidentified
MIVIGVDVHKQSLTAVAVDEAGRMLDEQTVAVADGALVAWASTLCGERLWALEDCRQLTRTLERELLSVGEELVRVPPKLMAPERRAGRARGKSDPIDALAVARAALREPSLSRPREDEQPFRDLKLLVDHRDDLVDERRRAQQRLRWHLHQLDPAFAVPAKSLDRPTHLDRVGRWLARRPPEVQVRVARDLVVRCRSLTRAIVELDRELQQCTAQLAPALLELPGCGAITAAKLLAEIGPIGRFDTDAQLARHGGVAPLEASSGRVQRHRLDRGGNRQLNCALYRIAITQGRYYPEARAYLERKQAEGKSRREAIRCLKRQLARVVFNTLKASPALT

SEQ ID NO: 292163 - protein, 322 aa, unidentified
MEPTIVGIDIAKKKFDVALPLGEKAKSAAFHNTAAGFAIFARWLTKHDVERAHVCMEATGTYGEELALYLYRAGHVVSVVNPAKIKGFAQSELSRTKTDKADAALIARFCRAMKPEAWQPPAPEVKKLQALVRRLEELSGMLTQERNRLATADEVVRPSIEGVILVLQERIKHLRQLISDHIDQNPKLRANRDLLQSIPGIGPTTSAIILAEFGDVERFGDARHMASFCGLTPRHRQSGSSVRGKSRLSKTGSSRIRKALYMPALVAMKHNPVVAALRERLKGYGKCNMVIVGAAMRKLVHIIFGVLKSARPFDATIAMSQS

SEQ ID NO: 292164 - protein, 340 aa, unidentified
MPRQSKDTVATLGIDIGKNTFHLVGLNKRGAIVLRQKLSRRQLEARLANLPPCLIGMEACVGAHHLSRRLKAFGHDAKLMPAKYVKAFLKGNKNDYRDAEAIAEAVQRPTMRFVATKTAEQLDLQALHRVRSRLVSERTAIANEIRAFLLDRGIAVAQGLHRLRLALPDILATRTDLLAPRLLHILNDLIGDWRRLDERIHAVSLEIQLLAQDDPSCERLMTVPGIGPIISSATVAAIGTGDAFSKGRDFGAWLGLVPKQISTGDRTILGKISKRGNRYLRTLFVQAARVVLLRPATWERHGLQPWIAAAAQRLHHNVLAIALANKLARIAWSVLQDPPF

SEQ ID NO: 292165 - protein, 407 aa, unidentified
MEVVYRCCCGIDVHKKVIVACLVNGGKQELREFGTTTSEIKTLANWLTESGCEMIAMESTGVFWKPLYNLFELMDLDAMIVNAAHMKALPGRKTDVKDAEWIADLLRHGLLKASYIPNREQRELREITRYRKSLTEERCREVNRLQKILEGANIKLDSVVKDITGKSARKLLQRIIDDDIPDSDEVSKLVHGRMRPKLDQIVASIEGITTLLQRKLLAQIIDHIDDLNSRIGELDKLVQEYMAEYEAAIEAIDEIPGIARRSAEVILAEIGLDMGRFPSAAHLCSWAGACPGNYQSAGRREHGRTTKGNKALKTILTQCAKSAKTVKSSYFFAQYQRISARRGKNRATLAVAHSMLIAIYHILKNKTAFHDLGSDYYDSFNRDRKINSYLKRLKALGWEPDAIPSSA

SEQ ID NO: 292166 - protein, 325 aa, unidentified
MRLYCGLDIHKNFHVGCIMDENGSVVKEGKFDNSKDGIDGFFSGFAVERVVMESTGFWWPVYESLEAKGYKVVLAHPYRVKAIASAKLKTDKVDSKMLAHLLRADLIPESYIPSKQMRDLRKLVRHRSNLVRIRVIIKNKIKAYLLREGIRTTGSYIFSERGRKAIMNGDIEEAKSYLPVLESVDRQVKESEVRIKNIARNRKETSLLLTIPGVGAYTALLLFAEIADIKRFCHPKKLLSYAGLAPMVRESAGKGNAKLSHESNHLIKGILTEIVGISIKYPGRIQKHYYKIRKKKGWRIARISTARYMLSIVHAMLTSMQPYSP

SEQ ID NO: 292167 - protein, 389 aa, unidentified
MKIYVGIDIAKLNHFAAAVSSDGEILIEPFKFTNDYDGFYLLLSKLAPLDQNSIIIGLESTAHYGDNLVRFLISKDFKVCVLNPIQTSFMRKNNVRKTKTDKVDTFVIAKTLMMQDSLRFLTLEDLDYLELKELGRFRQKLVKQRTRLKIQLTSYVDQVFPELQYFFKSGLHQHSVYALLKEAPTPNAIASMHMTHLAHILEVASHGHFGKDKARDLRVLAQKSVGVNDSSLSIQITHTIEQIELLDSQLFHTELEMANLVTCLHSVIMTIPGIGFVNGGLILGEIGDIHRFSEPKKLLAFAGLDPSVHQSGNFQAKKTRMSKRGSRVLRYALMNAAHNVVKNNTTFKDYYDSKKAEGRSHYNALGHCAGKLVRVIWKMLTDNVEFNLE

SEQ ID NO: 292168 - protein, 391 aa, unidentified
MLICGIDIGKNHHEASIIDETGRLLAKSLRFTNTTDGGEKLLNYFAGCNLEKQVITVGMEATGHYWLSLYCFLFDKGYQVNVINPIQSDAIRNLFLRKTKNDSKDSFLIAETIRIGRFSTTELADEDILSMRQLCRHRMDLVDYIADQKRKIIGVMDRVFPEYQTVFSDMFGKTSTELLNKAVTPEEILEIPTDELAALLKKSSRGRYGLEKAEQIKGLAKTSFGITISTSALTMQLRQLLEMIELLERQLTELEIEIDGYLLKMDSCITTCPGIGNVLGAVILSEIGDITRFSEPKKLVAFVGIDPSVKQSGEFTGTQNKMSKRGSPHLRRAIWLAANVAAFHDPVLSAFYQKKRNEGKHHYTALGAVARKLTFIIYAVLRDKKPYVPNC

SEQ ID NO: 292169 - protein, 389 aa, unidentified
MLTMTYPTTASEQTYIEVTGGVDTHKDTHTAAALDASGRLLGHREFAATAAGYAALLAWLGTLGQLVRVGVEGSGVYGAGLARFLQAAGVELVEVDRPDRKTRRWQGKSDPVDAEAAARAAQAGRASGVPKTRGGKVDALRALRVARRSAVAARADAQRQIKALIVTAPDALRMTLRELGDRELIAHCATRRPDRAAAGDPTVATMLALRALARRHQQLSVEIDELDAVIGPLVTAINPTLIGLSGVGTDVAGQLLVTAGDNPQRLRSEAAFAMLCGAAPLPASSGRTHRHRLNRGGDRQANAALYRIVLCRLRWDPRTRAYAQRRTTEGMSKPEIIRCLKRYIAREIYTALLNPQPSSVPAITSTAPEESTWSARSAARTNDVDTDKR

SEQ ID NO: 292170 - protein, 344 aa, unidentified
MEAIVTIGLDIAKSVFQVHGVDADGAVLIRRRLTRGKVLTFFEKLPPCLVGLEACATAHYWGRELRKLGHDVRLMPPSYVKPYVKRQKNDAADAEAICEAVTRANMRFVEIKSPEQQGVMSLHRVRQMLMRQRTQISNAIRGHLGEFGRVAPIGRNGLAQLIAIVADPNDNTLPDDVRAAVAMLAVQLRLLNEQILELDRRVRASARATDVGRRLMEVPGVGPVLASALVAAVPDPKAFKSGRNLAAWIGLVPRQNSSGGKERLGGITKQGDRYLRQMLVVGALAVIRYAQRHGTRRPWLVQLLARRTTKVAAVALANKTARMIWAIMTTGERYREPGPASAVA

SEQ ID NO: 292171 - protein, 370 aa, unidentified
MELSCRLQAAGQGRTRARCPLALVVGQVRGEPEPCWPVSSTRTVVRAALESLLAFARMSQNTPPTIYCGLDIAKPNLQLDLLGRAYELPNTPAGHRRLRQLLAPQATAHVVCEATGGYERPVVAALHAAAIPVSVVNPGWVRSFAKAQGIRAKTDAIDAQVLSAYGRALHPQATPERSATEQHLTELIRRRNQLTDALVAERLKATGLTLPVLQRQAKSLVRRLEKDIAQVEALLAKLRQASPELEAKTAKLQAVVGVGQITALSVLAECPELGTLNRRQVAALAGLAPHPRESGTWKGHRKTGGGRPAVRRALYMAALVAARSNRHLKAFYQRLKSAGKASKVALTAVMRKLIILLNQILKNPNFVLQN

SEQ ID NO: 292172 - protein, 350 aa, unidentified
MLYTGLDLHKSFSYITIMNDRGEVIGQKKLPSNGEILDFLKGFEDSMEVAIEATPSWYWLYDCLEDEGFEVKLSHPLRTKAIAYAKVKTDKVDSATLAHLLRSNLLPLSYVPEKPVRLNRELLRYRASLVKIQTRIKNKIHTILAKNNVSHYYTDLFGKAGMAFLHSLPLPENYKIALEGYLCVLETVRHEIGGASKRVQQLAEDDQDSMLLMTIPGVGYYSALLIKSEIGDVKRFPSAKQLCSYAGLVPSTHASGNVCYHGHITKQGSRWLRWILIEAAIHVVKRTGPLRRFYFKIERKKGGQIAKVATTRKLLEWIYHILKDSKSFQEVEKVVEAIGRGELVNSSGNA

SEQ ID NO: 292173 - protein, 418 aa, unidentified
MWFVGIDWSHQKLDYELRDAAGRVVSSGDVRSTAEGLADLFVKLDRHAPPERIAIAFEAVNLAWVQALSDRGYTLYPLNPKMVKAFRETLSAAGDKSDSIDRSVLARLLATLHTQFKPWRPDAPEIVALRIACQDRLRLVEERTAKVNELQAILKAFYPAVLGLFGKLSSRVALQFLRQFPTQQQMHSLTPKRLASWLRRQHYTAIGRLEEMQAVLGRASIEVPAHLQQAKAQRIGYLAASLLELDDEIKRHERIIEQAFDALPEARLYRSLPGAGPALAPALAACFGRDPQRFASAESARAFLGTAPVTWQSGRSRVVAFRRACWKFGRRTLHMFAGTSLADCAWAKAFYRQQRASGHRHHESLRAVAHKWVKIILAMRKTGEPYDESRFLDSRRHNPVTSSPANPEIAVLAQGSLT

SEQ ID NO: 292174 - protein, 344 aa, unidentified
MQRYLGIDPHRDSCTLSLVSAQGKKTKQFVVPTEGSALVRSVRDLRGELHVCVEEGEWSEWLSEILSPFVERLVVCQPKKRRGPKSDASESRELAERLRTNRTGPPVYKPPRPWARLREAVRLESKLTQDVTRTKLRLNSLYRRRGLVSPRDALYSPRHRAEWVAKLPASSRPSAEIWGEEIDALGELQRKAKSQMLEAARTFPIWRTLQTAPGIGEKRAAILVATVVTPHRFRNKRLFWSYCGLGVVTRTSSDWVQHTGQWVRAPVVQTRGLNRACNRPLKAVFKGASMTVRRMLPPNPLLDHYDRMLLAGTKPNLAQLTMARKIAAIVLAMWKTESEYKIMS

SEQ ID NO: 292175 - protein, 352 aa, unidentified
MRFYTGQHQYYCGIDLHTKNMYVCILDQAGKILVHKNLTTSPQALLQILEPFQPDVAVTVECIFTWYWIADLCQEENIPFILGHALYMKAIHGAKTKNDKIDSHKIAVLLRGGMIPMAYVYPAEMRSTRDLLRRRMHFMYKRSELLSHIQNTRSQYNLPEFNKCISRKRNRAGISEQFEDVSVRKSIDLNLTLIKQYDILLNDVELYLTRHAKEHDPNNLYLLHTIPGVGKILALVLLYEIHDINRFERVQNFTSYSRLIKPQKKSAGKVTGSGNRKIGNAYLKWAFSEATLLLIREKQEIKELHLKLKNKHGKARALAIISHKIGRAVYYMLKNKQAFDMQYFLKIKDRAA

SEQ ID NO: 292176 - protein, 418 aa, unidentified
MKPWNELTHFAALDWADDHHDLVVVDAKGQIVLELTFSHTAEGWHQAQQAMTPWADLPVAIETSAGPAVDQLLQRGFVVYPVMPKAAARYRERKRPSGSKDDRHDAWSLAEALRTDGQGWRALSPLDPLTVQLRALCRDEIALIEQRTALVNQLLAALKEYYPAVLQAFEDWTAPYTWAFVLAFPTPEALAQAGKRKWEKFLHTHKLWRPQTASERLKIFAQAQSFKGTPAISAAKSLLVQSLARLLQTLEQQLGLYRARIQKLFDQHPDHDLFGSLPGAGPKLAPRLLAELAGSDWQQIKQVQARAGTAPVTYESGKIKRVKIRRACTLPLRATLHLWADLSRRYSTWAAAYYQAHRDKGQTHACALRCLAHRWLEIVGAMSRTHTAYNAEHHLRQIQNHGSWVLALVTKTAPKPGE

SEQ ID NO: 292177 - protein, 424 aa, unidentified
MTIMTTASEIIKIDPAVTSIYAGVDTHRDTHHVALVDHVGRAVADKEFLATGAGYRQIIGFLHHNGPVDAIGVEGTGSYGAELARVLRSEGFTVLEVMRPNRQRRRLSGKSDPLDALQAAMTVLAGRGLATPKERDSHAESLRILLSERSLVVKSRSATMNQIHALLVAADDTVRSDYRRHSGNKLVTMLTTTRPSVGTDPAHVTRQFLKRLAARHQALSKDVVALDIQLDALVRLLNPSLREAKGVGPVVAATLLTTVGDNPDRIGGKAQFAALCGVAPMPASSGQRVRHRLSRGGDRRANHAIHRIVLVRFSHHDERTMAYFERRRAEGLSDRDITRCLKRHVANEVFDLITHPAPASTTGQLLRQQRQELSIPITDLAQALNVPYQRLRRLEIGQRTDAELAARCQTWLTATSQHKDSTAA

SEQ ID NO: 292178 - protein, 349 aa, unidentified
MRFYNGRHQHWCGIDLHAKTMYLCILDRDGQVLLHRNVPSSPAAFLEAVAPFREDLVVAVECIFTWYWLADLCAKEGIAFVLGHALYMKAIHGGKAKNDRIDALKIATLLRGGMLPQAYVYPAGMRATRDLLRRRLHLVRKRGQLLAHIQMTSHQYNLPPLGKRIAYPSNREGVAAHFEDRVVKKSIAVDLALLERYDALLTDLELYLVRQAKQHDANAFHRLRTIPGVGKVLALTILYEIHDVHRFERVQQFASYARLVKCAKESAGKKLGSSGAKMGNVHLKWAFSEAAVLFVRHCAEGKKLLARLEKRHGKGKALSILAHKLGRAAYFMLAREKAFDLQRFAATAV

SEQ ID NO: 292179 - protein, 349 aa, unidentified
MEQFVGLDVSQKLTHVCVVDREGKALWRGSSSTTPEDIAAAVRAHAPGAVRIGFETGALSTWLWHGLKKIGLPIVCLDARHAKAVLSMQVNKSDRNDAFGLAQIVRTGWYREVGVKSVESHQIRAVLGARAQLVGMRTDLRNQIRGLLKVFGVVLERHSDKSFEDRVKEVAGAAPDILATSLRSLLAILQPVCTQIALLDRLTMTQAKETAMARHLMSVPGVGPVTAMAFVTAVEDPARFRKSRSVGAYFGLTPRRYQSGEVDASGRISKCGDPLVRAYLFEAATALLSTCRKWSALKAWGLRIAKRSGINKARIAVARKLAVILHQMWTTGEDFRWSNKGNETEVAAA

SEQ ID NO: 292180 - protein, 385 aa, unidentified
MFGSPSLERLDGMKRLAATNVVAQGPHKQTNAVKSRKWRPAVEHIGLDVHQRESQLCIVTEQGEVLEQRIRTERGRLAEVLGGRARAKILLEASTESEWVARCLEQMGHEVVVADPNFAPMYGGRNRRVKTDKRDARALADACMTGTYRKAHRTTESRRQLKAQLAVRDALVRERARHIVLIGALVRQQGLRVTTGSAETFLARLTKVDLSEEVRNVVAPLMAVMRTLNEQIQVVDAKLERLASDDEQVASLCTMPSVGPVTAVAFVANVDDPKRFAGAHQLEAYLGLVPSEMSSGEKQRRGRITKVGSPRMRALLVQVALSTMRLRKATTAGLWEWASRIEVRRGRKVAAVALARKVAGILYAMMRDGSHFKPRVSREAMTNAA

SEQ ID NO: 292181 - protein, 355 aa, unidentified
MASITLLGIDLAKDVFQLHGLDELGRPQLKRTLRRRALVQFVAKLPACTIAMEACSSSHHFSRKFQQNGHEVKIISPQFVKPFVQGNKNDAADAEAICEAASRRNMRFVATKSVVQQDIQCLHRVRKRLVHNRTALTNEIRSIVGEFGIVFAKKRSALVEGIKGLLNGSCPREELSSEGLTLLQDLYSELLELEQRIENCELKLKKISSQPQCQRLFKVGGLGLLSVTALAVALADPGQFKNGRNFAAWLGLAPRHQGTGGKNRILGISKRGDMDLRTLLIHGARAKLRGINAKCRAERKLDPLEDWAYRLCQRQGYNKATVALANKNARIAWSISAHKTEFESHKAVASLKKGA

SEQ ID NO: 292182 - protein, 310 aa, unidentified
MAVYSTGEIRSFGNDDASIAKATTWLKQVNPAIIVMEATGGMEVSLYVALQEANLPLAVINPRQIRDFAKSMGILAKTDKVDAKVLARYAATIQPEARPLPDEEARQLNTLVRRRCQLVEMIIAESNRATITRDKAMKQRINAHIDWLKQELAGIDKDISQMMKENPVWHAKDKLLQSVPGVGPVLSATFIAELSELGILNRKKIAALVGVAPFNRDSGKHRGERSIWGGRCRVRQPLYMAALSAVRFNPTIRIFYERLLANGKEKKVALTACMHKLLIMLNVMLKHNSYWSCNYAIFNNTCIPDAKTVA

SEQ ID NO: 292183 - protein, 357 aa, unidentified
MNKISAINAAVKTFAIDLAKLKLQVHGYDHAGQRCFAKALSRIQTTALFLDLGRPVKVVMEACSSGHYWGRQLLALGHEVALIPPQFVKPLRIGNKTDGNDADAIYEASLRPKCRPVPVKAIEQQDLMLTQLERDRLIKQRTALTNQMRGVLAERGLVFGKGLKALSEGLREVLARSPDEEVTARCLEWLQTQLTDWQRLDERLKDCERRMNRDFRSHPRCQPLKEADGIGVQTALCFLALVGDGSQFASGRALGAWVGLTPLEASSGERRFLGAITKRGDSTLRWLLVNGGRTLAAQAKRKAKNGLPLNERDTWLLGLIQRAGFNKAAVAMANKNARILWAMLRNGEAFRSPLMAA

SEQ ID NO: 292184 - protein, 334 aa, unidentified
MKKFNVFTGIDVSKSTLDFCIIDAKANVLIQGKTENNSHGIKLLLNHFKKLKVSLNEVLFSFENTGVYSMPLNIFLSERKCDFAEIPALEIKKSKGITRGKSDKTDAKDIALYGLRNLDKITLSSVPQIEILQLKFLFAEREKVIEAIKTFDSTNEAEGFLPNSVFKIVNPINRKILTHLKKALKSIEEKINKIIEQNEKLKQQKALLKSIPGIGDVTALYFLLATKGFSVFKDWRKFACYSGIAPFEYSSGSSVRARTKVNHFADKKIKSLLHLVALNAIKYDAELKEYYQRKRDEGKHTLLVLNNIKCKIVSRAFAVISRESPFVNTYKFAS

SEQ ID NO: 292185 - protein, 338 aa, unidentified
MTTGLAAGTYELFVGIDIAATTAEVSTQRPGAKASRSFTMDQTPEGFHRLVHTLQAPGNEPSHVLVVMEATGSYWMSLATRLVHEGFRVSVIHPSQAHHFAKALLKRAKTDAIDAQTLAQLAMVLQPEPWMPPPQIYYALQQRLAQRDDLLNLRQQVRNQLHALDQHPEVIASVRTRMENLLVLFQSQMDEVEGEIAAALNQDSAWAAAAERLQSIKGVGWVTAAWTLVTTLNFTTCDTVDALTAYAGLAPMPRQSGSSVWHRPSIGHSGNGRLRTAFYMATLTAARFNPAIKAFYNRLLEAGKPEKVARCAAARKLLHIAWAVVKKDQPFDPNYAQG

SEQ ID NO: 292186 - protein, 344 aa, unidentified
MQVTTIGLDIAKNVFQVHGIDASEQVVVRKQLRRGQVLGFFKALPPCLIGMEACATAHYWARELTKLGHQVRQMPAKDVKAYVKRNKNDAADAEAICEAVRRPTMRFVPVKTAEQQGRLMLHRARDLLMRQRTQLINGLRAHMAELGIVAGQGREGIKELLRIIAGERDARLPADAHTSLVVLAAGVQAVQTMIGSIERRIVAQHRSDEASKRLRSVPGIGIIGATAIAATIPDPKAFRSGRDFAAWIGLVPRQVSTGGKQKLGPISKQGDQYLRRILVVGAHAILKRARHQPEKYPWVTRLLGRKPFRVVAVALANKMARVAWALLAKGGTYRAPALAIAAAV

SEQ ID NO: 292187 - protein, 468 aa, unidentified
MNHNQQRKRTGKSERRVSTSLFERIQPDAAGVDCGQKSHFVAVPPERDPEPVREFRTFTADLQRLAQWLAQCGVKTVAMESTGVYWIPLYEILEQRGFEVVLVNARDVHNVRGRKSDVKDCEWLQQLHSVGLLRASFRPAAAMVPLRSYLRQRAILVEELTARIQRMQKALTEMNLMLHIVVSDITGVTGLKIIHAILAGARDPQRLAVHRDGRCHASHQELVAALTGNYREEHLFSLRQNFTAYQFHLQQIAECDSEIEALLNTLAAQQPPPSAALPAPRAKATKKHAPAFDIRTPLHVLTGGADLSQIHSIGPQAALQLIAEIGTDMSRWPTEHHFASWTTLAPNNKISGGRLLSSRTPPSANRAAAILRRCAMSLGRTSTALGAFYRRLAVRIGKAKAITATARKLALLVYRVLSGNLVYNDPGATAYHQLNRVRELKSLRKRAKLLGFDLLDQSTGELLVNPVS

SEQ ID NO: 292188 - protein, 322 aa, unidentified
MNKVKIYYGIDISKDVFDVCDSHGTHYQFSNAYKGFKQFVKVLEDNGHCVMEATGYYHYQLAYYLLEHSVIVSVENPLSVKRFIQMKLAKVKTDKSDAKMICDYGQNVELKLWKGESKTQQECLQITRLLSLYFKQSTALKNKIHGEEVLGKPSKLVLFSLKRSLKQVRSEIKTLEKKVHEMVKIEHQELLTLLESIPGMGRKTSIMLIVLTDGFDRFQSAKQLCSFAGLTPIIRQSGSSVRGRPRISKVGNQKLRNLLFMCSFTACQHNKACKAIFDRITNKGKSKKLALMAVCNKLLKQAFAISQSRIRYDANYVSVLKG

SEQ ID NO: 292189 - protein, 492 aa, unidentified
MWFVGIDWGNRAHEVVAIDETGARGGTLRVPHTAEGLAQLVHWLEELTTRPCAGAEAVHPVDPERVACVIETSSGLLVAGVLQAGFPVYPVNPKTLGQRRNAAGAKTDQIDAFLLARTGRSAFGLLRRFTLPSPLLLDLKDLTRDQDHLIHMQTRLVNQLTACLNAAYPAGLTLFSTLQQRATLLFLQRSPTLQEAQAATVEELTAFLRTMPYFPGAVTVAQRLSARLHEAQLVVPPATARAKAYLIQALLSQLLPLLEHIAGYDAEIARLFALHADHAVFVSLPGAGKRLAPRLLVGWGDDRERSTSAASMQGLAGTAPVTWQSGQYRIAHRRTACDTSLRQTLHQFAWHSTEKDAWAQAYYTRKRSEGKSHSVAVRALAKSVGARHPCDVARLHPLRSAHLSAHLSRRPSGAWARGGMASVARYLLVAVSVAEASAARCEQPTLARVRGEGPGRGERVSQCSSARPSLAAGGRGTRFFSFFAKRSFFSFR

SEQ ID NO: 292190 - protein, 351 aa, unidentified
MTILAEQFVHVIGVDTHKLTLSAAVLNASGGLREVCEVGASAAGHRQLMTLASRYAGPVLWAVEGTGSYGASLTEHLLAAGQTVTEVDRPKRGARKRGKSDQIDAIRAGRDGLAMSHLNPPRRRREREQLRVLLTTRAELVKTRTSLSNHLQQLVVTSSEGLRGHLLETRDQAHSSERLSHKCLSLRVGHQLTTEEQTRVRTMREVAQLIEELTTRTDAYQTQIKALVEQLAPGMLGQPGLGPLTAAQVLLSWSHAGRLTNEAAFAALAGVAPIPASSGQTVRFRLNRGGDRKLNAALHIVVLNRCRYHPPTRDYMARRLSQGKTTREIRRCLKRYLARQLFRFLGRLDKG

SEQ ID NO: 292191 - protein, 376 aa, unidentified
MSNVRFIGLDVHAETIAVAVAEPDGEVRSVGVIPNRPESIRKLVKKLGPAEQLRVCYEAGPTGYVVYWQLTALGVKCEVVAPTLVPVKAGDRVKTDRRDAMKLARSYRAGDLTAVWVPDAAHEALRDLVRAREAAKKDQLRARHRLGKFLLRHGRRPATKINAWTQKHLAWVKTVHFEHAAQEVTLLDYLNEVEHEAGRLERLERAIDDAVKTTPERMRGVVEALQALRGIAQVSAVTIVAEVGELSRFTKPRQLMGYGGAVASEETSGQRTRRGGITKTGNAHLRRIVIEAAWAYQHRPSIGAALRKRQATVSPEVKEIAWKAQHRLHARYRHLTAKGKCKQEVVTAVGRELLGFIWAIGVKVEAQGGRQQSVAA

SEQ ID NO: 292192 - protein, 412 aa, unidentified
MDVMYPQCCGLDVHKKTVTACLITSIEGLEPVKEIRTFRTMTADLLALADWLQEAGCTHVAMESTGVYWRPVYNLLEGQFALLVVNAQHIKAVPGRKTDVKDAAWIAELLRHGLWRGSFIPSNPQRQLRELTRYRSTLVQDRARTLNRLQAVLEDANLKLASVVTDIYGVSARAMLEAILAGERDGEALADLARGRLRAKRDQLKEALEGRVTAHQSFLLTEHLSTLEYLDEAIARVSGEIDQRLIADQEAIALLDTIPGVGQRAAEIRIAEIGTAMSRLPSAKHLASWAGMCPGNYASGGKRLSGKTRKGSRWLRQVLVAIAHVAAKTKNTYLAAQYKRIAARRGKKRALIAVGHPILTIVYMMLTRKQPYQDLGAAYFDQREQQRVERRLVQRVERLGYEVSLQPRALAS

SEQ ID NO: 292193 - protein, 337 aa, unidentified
MPTLTIGLDIAKNVFQIHGVDRHGKVVIQRKLRRSDVLKFFAKLESGLVGIEACHGSHFWARELTALGHTVRLLPTQYVKPFLIGGKNDANDAAAICAAVTRPGIHFVAIKSAEQQSLQSVHRMRQRLILERTAKSNQIRSMFAEEGVIFPIGLPQLRKGVVALVNDLDSGITTLLRRLGSMYLEQLKALQQWLDELATEIAEIFKSNEACQRLATVPGIGPVIATALVSSVGDPSQFRNGRQFAAWLGLTPMQRSSGGKTRLGGITKRGDTYLRTLLVQGARAVMHFVSRRNDRHSQWIKSVMQRRHVSIAAIALANKTARIAWAILTGNGCFRAA

SEQ ID NO: 292194 - protein, 316 aa, unidentified
MDHKQSVYGVDVSAAQLVIGRYDSEALVEIGNAPEPIAAWLTSLRRGSIVAMEATGRYHQLLAHLAQAAGMLVYVLNPQGLKHYARAVGVRGKTDRIDAQLIARYVVHERNKLHPWAPAAPETEALSQLLTRRQKLVNARQTLMQSLSGVSALKSEREALRATLKRMITNLELLIVREIARAPELAQLHRRLVSVVGIGPLVAAGLVAALARVRFSRVDSFIAYTGLDPRPDDSGNRRGRRRLTKHGPPLLRSLLYTAGMAAAHSKLFRARYAELLARGLQTTEAIVILARKLARIAFALYRSGESFDPRKHLRTA

SEQ ID NO: 292195 - protein, 445 aa, unidentified
MSESLISATSEPAWAAFAAIDWADQKNFWRLVPAGSQRYEQGELENTPEAVEAWAADLQQRFGGRPIALCLEQSRGALVYMLTKYPHLVLFPVHPTTAARYRETFCPSGAKSDPSDTASLLDLLMRHRERLTALQPDTVETRLLHFLVEERRRTVDEKTRQSNRLTDCLKMYFPQILGWFDDVTTPLVGDLLERWPVLEQLQRAHPGTLRRFFHAHNCRSQELLEERIAAIAQAIPATRDQAVLEAGMMTARGLVKLLAALRGNIAAFDERIAELVRAHPDAALFASLPGAGPVLVPRLIAAFGTRRDRYQNADEMQRYSGIAPVKIASGKTELVHFRYACPKFLRQTFHEFASHSIGQSEWAKAYYEHLRNDEKKDHHPAVRALAFKWIRIIYRCWKDGKDYDEQVHQKSLRRRGSLLGTALASATSVGWKTVAGFQKLSENNA

SEQ ID NO: 292196 - protein, 339 aa, unidentified
MNVVRIGLDVAKNVFQVHGVDETGAVVVRRRLRRPEVIAFFAQLPRCLVGLEACSASHHWAREIIAVGHEVRIMPARYVKPYVQRGKSDALDAEAICEAVGRPTMRFAAIKSVEQQSALTLHRTREILVKQETMLANLIRGCLGEFGIVAPLGIRRVTELIAIVRDESDTRLPPEARSAMILVAGQLEDLQRRIRKVERAIHLWHRQSEASRRLATIPGVGPITASAVVATVGNVDAFKSASHFAAFLGLTPKEHSTGGKQRLGRISKQGDVYIRRLLILGGTALVRYARGPGATSWAAALLRRRPTRVVTVALANKAARIIWALLARGGVYQAPLAPA

SEQ ID NO: 292197 - protein, 313 aa, unidentified
MTLSPCFIGIDISKSQLDVCVRTAGEERRLAFANDRQGIKALCARLRRLKPERIVLEATGGYERMVMQALQSASLPVCRVNPRQVRHFGRAIGVLAKTDRLDAALLARYAEVLKPPLTSATGKTIEVLRALVTRRRQLRDMRSAESCRSKQAISQALRDEIETHIQTLTAAITKLGKQIRSLLAEHRETAQRITLLRSTPGIGPVAAATLVAELPELGTLTKKQIAALVGVAPFACESGQWRGRQRCAGGRKSVRDMLFMVALTATRTRSSFADFYQRLRDAGKPAKCALTAVIRKIVVTLNAMLRDGKAFGT

SEQ ID NO: 292198 - protein, 440 aa, unidentified
MPVRKREDEVFPNAAGIDVGASSHWVAVPPHLAEESVREFGAMTDDLNAMADWLLACGVDTVALESTGVYWIPVYEVLEQRGLKVWLVDARQMKYVPGRKSDVQDCQWLQKLMSLGFLRAAWRPDGEVCVVRAVARQREVLLVDQASWVQRMQKSLVQMNIQLTEVLTDVMGMTGQAIIRDIIAGERDPKALARHRDRRVKASAEEITKALTGNWRDEHLFVLRQALAMYDDIARHLAECDSKLQALLRALGQRNVDLGKVPRAGSKLRQEFDARQTLANWAGVDLTRINGLGLTAVMKILSELGPDLSRFATVKHFCSWLGLCPGTKISGGKVLSAKTKRSANRVRQALKMAAMSLSHSDSALGAFYRRLCSRMDKPSANTATAHKLARMVYFMLTRGEDFVDQGQQRYEEQQRQRSIAALKRRAAALGFQINPTSVAA

SEQ ID NO: 292199 - protein, 401 aa, unidentified
MKRACGLDVHKDTIFCATYDGNKHGPVTEYSTLTSSIRAMGEALRSEGVDGIAMESTGMYWIPVWNILEEIGFDLMLVNPYLIKQMPGRKSDVKDAQWIATLLHKGLLRSSLVPCKEIRELRTYSRKYVKLQQRQTSVLQEMERTMEMCSIRITSFVSNISGKSVLRVIEQIVQGETTPDVLVESIHGRIVNAHTKQNIKESLTGFITEHHRFILELSLQEYELLVSQSNKCLLKMEELCNEHYKNEMKLLLTIPGISHISAMIVLAETGADMKAFENSGKFSGWTGLRPRNDESAGKYKSTATTKGNRFLRAVLVQIAWAASRTKGTYFKEKFNRLAMRKSRKKALIAIARKVGVLIWNVLYYEQAYNPEKLIVYDPGKLHAKISYHQKEYDRLQKLVQK

SEQ ID NO: 292200 - protein, 422 aa, unidentified
MKNVTDLGQEVKGQKWLMALERASWILGIDVGKEQLSCALLLKDETFRCRFDVEASLHGFQMMLERVKTETKGDGAVMFALEPTGHYWMVLGQFFEDHNQSYVLVHPLVVARSREVKQLNRGKTDAFDARLIAELACRGAVTRTQIPEDDWATIRFYAREYMDREKEIAREKNRMMSYLETTLPGFLEIFPKPLGMNSRACLRVLTNFREVLQGDIVQFESQARKNLTGKRLMTSRVRRLFEMLQRGDALGLRAGRKTLLWRIINSLDRLELYEKQQDMASKALISLYEQCEFKPYLDSVWGTSPLTNSLVLGFMGDPTSYDTPASLIKMAGCDPVPNESGKFKGKASISHRGRNLLRKAGDRISFLLEKRNSVFRNFLHHLTARPKNKLTKRQARIACINKYFRIIWVLCNHRVLFNPALA

SEQ ID NO: 292201 - protein, 419 aa, unidentified
MSFKILKNNCCGLDVHKTWIYACIGITDSFKRTEYKQARFSSFTKGLQELCLWLAKYNCIDVCMESTGKYWIPVFNVLEKNNIFVTLSHPKYTKPQKGNKTDRKDAKWICDLYMCGMVKPSFIPPADIRQLRDLVRYRFKLTCMITGEKNRAHNCLTVSNLKLDDVFSDIFGKSSRSITEQILQHPGEVFDVAPFVDSRCKTPIEEIQAAVDGAISHEQAVKLRQCLNHIDELEKHQAEIEREIFRLSQKYESVLGLIRTIPGFDKNPLTAIQVLSEIGADMSVFPTAKNLVSWAGCCPRNDQSSRKIKSTRISRAGSYFKPVLVQVANALIKSKKHSEFTNRYKRIKARRGHKKAIIAICRMILTAIWHILTDLKPYTPEGFLDSRPVNKEKVLTTSQALNLLKQRGYFIKDDPLSVS

SEQ ID NO: 292202 - protein, 379 aa, unidentified
MMYVGIDVSKGKSNICILDVNKLVVEEFEIKHTKEGFAELEKHLKSDMMIGMETTGNYCKTLYNHLKSKYNVCYVDNAQMKVFSKLKNPDKKNDKIDARLIALYLASDFKKIEATRMNELKDLSRLYQKTIKQLTRYKFMFKDQINIIFPEMDQEFELSTGKTIQYLLLKYPTPEIIKNLSYEEIELAMTENLSKYGSLTYKDKTLKKIKELAENSVGIKDYPTTCFQQTVKMLLFHQEAINELKKKLEESLKKTPYYKVIDEFGYNIVSLSTIVGEVGDIRRFPTHKHFASYCGFDISEKQSGSYQSHSCYITKRGNKILRSTFYNLVPVHLRYKTELSKFFYRLRDEKGKHAKKCMVATARKLAVQTYFLMLNCHTQ

SEQ ID NO: 292203 - protein, 322 aa, unidentified
MSGAVVGIDIAKRKFDVALFLKGKFKHKACMNNKQGFEDLSRWLKKQGVEHVRVCMEATGTYGDELATYLYDAGHLVSIVNPVRIKGFAQSELLRTKNDKVDAGLIARFCVAMNPGTWTPPPPEIRRLQSLVRRADALIDMRTQEQNRLGTTHETIEPSIKEHIGYLDQEIEKLKRQIAEVIDHDPNLRGKRDLLDSIPGLGETTIAVILSALHVFEGVKCVQKTVAFIGLAPKETLSGSSLKGKSRICKIGHARLRKALFMPALVAMRYNPVMIDFYRRLKEKGKNGKVIVCAIMRKLVHLIYGILKSGKPFDQNYKQNFA

SEQ ID NO: 292204 - protein, 422 aa, unidentified
MLAATQDEEQIIARVAALDIGKAELVCCVRVPAERNPRKRLQEVSTHSTMSRSLAELANRLVDLRIERVVMEATSDYWKPVFYLLEAHGLEPWLINARDVRHLPGRPKTDVLDSVWLCKVAERQMIRPSFVPPAPIRRLRDLTRYRIDLVGARTAEKNRVEKLLEDACIKLSVVASDIFGVSGREMMAALIAGERNPGVLAQMARTRMRTKITELEESFTGHFDDHHRFLLARMLARIDGIDADIAAVDEQIEAHLAPFAGTAERLDEIPGIGPVAAAVILAEIGVDMSRFPTEGHLCAWAKFSPGISSSAGKTKGNGSTGHGNRYLARVLGEAAVGVRRTDTFLGERYRRIARRRGKKRAIVAVGRSILIIIWHLLHDPDARFHDLGADHFSRCTDPESRKRGHIRQLEALGYTVTLAPAA

SEQ ID NO: 292205 - protein, 348 aa, unidentified
MRFYTNTHQHYCGIDLHARAMYLCILDRDGQILLHRNMKATPEAFLSAVAPFREDLVIGVECIFSWYWLADLCAEEGIHFVLGHALYMKAIHGGKAKNDKLDSKKIAVLLRGGMLPQAYVYPKRLRATRDLLRRRNHLSRKRAELLAHIQNTASQYNLPPLGARVDRKGERDSIPDHFPDPIVRRSIELDLSLIAHYDGLLRTLEQELSQMAKVHDGFSYQLLRSIPGVGRILSLVLLYEIDTIDRFPRVNEFLSYSRLVKPKKESNGKVYGHSGKKIGNPHLKWAFSEAAVLFLRKNPDGQQFVERLAKKHGKGKALSILAARLGRAVYVMLKRREPFDPVKFMTQT

SEQ ID NO: 292206 - protein, 312 aa, unidentified
MNNDTIGVDVSKDHLDAHRLADGATRRFANTKGGYKALIKWLTETPLYRVVFEPTGPYHRAVERALGIAGVPFVKVNPRQARRFAEATGKLAKTDRLDAAILARMGAMLELEARPARSELLLELKELYVAREALVKDRTAAKNRGKALTLSLLKRQNAQRLEQIDRQIATVEAAILQIIEANVSLADRFAILTSIPGVSNITASALLIAMPELGALEAGQAANLAGLAPIARQSGRWTGRSFIRGGRADVRQALYMPALVAARFNPDMKTKYAHLIQTGKPAKVALTAIMRKLVVLANALLKANRPWTPKTA

SEQ ID NO: 292207 - protein, 321 aa, unidentified
MTYVGIDVSKATFVVAYSSAKSSETKTFKNTTKGIREFIRTISPEENHCVLEATGNYSMLLVYLLSKAGFTVCMENPLKIKNFARVMLSVVKTDEIDARLIALYGERMQPAPFKLHSDSLLLLKQKRTVLRQLKKQLIANRNLEGSLKVLPFIDSKCKKVLEKTIKFLEKQIEEMEEELTSLAEIEYKKQMDLLTSIKGIGATLAAALIIATGGFTYFDNAKQLTRYLGLSPTYQQSGTSVNVKGHINRNGDAYLRSQLYIGAMASLRCNTECKACFDRLRSNGKPGKLAIVAVANKLIRQAFAVVAHEKKYIDGYKSVKP

SEQ ID NO: 292208 - protein, 345 aa, unidentified
MELHALGIDLGKAVFHAVGLNRRGDVVMRKKFSRTQLLRFTANLNVDLIGMESCGGAHYLGRSLREPGHEVRVTPAQYVKPFVKTNKNDFIDAEAIAEAVGRSTMRFVPIKSDDQLDMQSLHRVRERWVMRRTAAVNQIRSLLLERGVTLRKGRKYLDQQLPGILEDAELKLSGALRTLLAQLKLELDQLAERIGEMDRAIRQTAGELEGCRQMQAIPGVGPVTATAIVAAIGSGCTFAKGRDFAAWIGLVPGEYSTGGKQRLLGISKRGNPYLRRLFVQGARAVLQMRSKQAPGLSCWLERLSSRKHSNVAAIALANKLARISWAVLAKGEAYRPPMLASTPAS

SEQ ID NO: 292209 - protein, 326 aa, unidentified
MIKNTNYFGIDISKDVFDVSGADGNHHQFKNDLSGFKKLLRLTNEFSHCVMESTGVYHLRLCYYLEEKGIAVSVENPLSIKRFIQMRLTKIKTDKRDSQMIYEYAVNSGVELRLWKGQSETQIACSQIISLTNLYTKQTTALKNKLQTEESMGSPCSIVIRSLKRSLKHLKNEIDKLEDSLLELVKLDNQDLLTRVESIPGIGRKSSMLLIVLTGGFERFNKSSELCSFAGLTPMIRESGSSIRSRSRISKMGNRRLRKTLFMCSLSAKKYNKACKEIFDRIVAKGKSKKVALIAVCNKLLKQAFALAKSGLIYDKNYRSVLVKLN

SEQ ID NO: 292210 - protein, 326 aa, unidentified
MYLCILDQEGNKRLHCNVRAKPCNFLGAIDGFRDDLVVGAECMFTWYWLADLCLDEKIKFILGHALYMKAIHGGKKKDDKLDSEKIARLMRGGTFPLSYVYPRQMRATRDLVRRRMFLVRRRSELLAHVQLTNQQYNHDPFEKMLQYASNRDVLDRFEQPSVRLSVEADLKTVDHYDKLLTQLEKNLVRQATLHDPRSCSLLRTIPGIGKILSLVLLYEIHTIDRFASVGDFLSYARLVTPKQTSDGKVTGHGGGKIGNVHLKWAFSEAVLWMLRNCDDAKGFLKRKEKKYGKARAMTLLARKIARAVYQMLKRKEPFDAVKFFAC

SEQ ID NO: 292211 - protein, 322 aa, unidentified
MHPLQLGIDVAKAKLDCALRLTSGKFRHKVVDNTPAGFKTLDDWLAKEGAAALQVCMEATGIYWEAVAEHLAARPETTVSVINPAQIKAFGASRMVRTKTDKVDAKLIAQFCAERTPEPWQAPTPAEKTLRALVLRLDALQTMRTQESNRLEVARESVAEGIAQHLKWLDDEIARISKAIRDHIDNDPTLRDKHRLLDSIPGLGERTTAVLLAFIAEPARFENARQAVAFAGLDPRQHESGSSVRGKPRLSKVGHSFLRKALYMPAMVALYRTDWGKLFRQRLASQGKPPMLIIGAMMRKLVQVSYGVLKSGQAFQPGLHGA

SEQ ID NO: 292212 - protein, 374 aa, unidentified
MATTRRTECSAADAPLYVALELSAREWKLACAPSGGVAPRLRTLRDGARLDLPRELAQARRHFGLAATAPVVSCYEAGRDGFWIHRYLTGLGVRNVVVDAASIEVTRRARQVKTDRLDAVRLLDLLVRAEAGRAAWRVVRVPPEAAEDARHVIRERRTVRADRTRVRNRLRGLLATQGVRLALRADFVTRLAAARRWDGTPLGPGLQHRLTREWETLQAIEARLAVVEPRPATRRQPAPPAVAALQHLCGIGDAGAWTLGLEVLSWRTFRNRREVGSFLGLTPTPYASGTQRREQGISKVGPPALRALLVQLAWQWRRHQPRSALAQWYAQRFADGGPRARRIGIVALARKLWIALWRFVTQGVIPEGAVLKAA

SEQ ID NO: 292213 - protein, 340 aa, unidentified
MNVTTVGIDLAKNVFSVHGVRRDGKVLLRRSVGRADLLPMFAQMPPCLIGMEACSGAHHFARELRRLGHDARIMAPRFVAPYRKSGKNDGNDAEAICEAVGRPNMRFVAVKSVEQQAVLMLHRVRKEVSDQRTALINQLRGMLCEFGVVLPRGRYSFRHKLAPALEDTGNAIPELARRLFREVNERIRALDEQILAYDRELEALARHSEAAQRLMEMPGVGSITATAIVASVADMKVFKSGREFAAWLGLVPRQYSTGGKMRLGRITKQGDVYLRTLLIHGTRAVLAALGTKDDRLSNWIRSLIERRGYRKAAVALAAKHARMIWAMLAKGEPYRRASAV

SEQ ID NO: 292214 - protein, 423 aa, unidentified
MNKLCCTPTGAVLVAIDMSKNRQEVLIERPEGGRRRRMTVMATKEDYDNFAEQLAAIGRPIVVGFEATGNYHRTLAHRLLTAGFELRLISSVALARTREALHNGWDKNDSKDAQVILHMLRIGATQRYVDPLAAGINDLQELSKTHEVVSKMKTQTWHRILTHYLPLYFPEIARFAGNSRSDWFLALIERFPTPTSITALDRDAFSAEAWPLIGRKVSKARLINDVYETACSSAALPVPEDSIAITMFRMVIAQGRSLIHQRDEIERLAHARLAEHLDYQLLRNIPGIGPINALTILAEAGDLRRFNHHRQFLKFCGLDLATCQSGTFRGRTKLSKYGNARLHRTFWMAAQVAARQRDNSFRDKLGRYTAGHADDADRRRKAMTALTAKMARVAHAVVKTGTEYRPFLERSDARWKDPSLQVP

SEQ ID NO: 292215 - protein, 341 aa, unidentified
MSESALIGIDLGKHSFHLHGQDSASREVFRKKFSRPQMMQFFGNLPACTVVMEACAGAHFVARELIAMGHQAKLISPQFVRPFVKGNKNDFVDAEAICEAASRPSMRFVTPKTEAQQTLAVLHRLRESLVHDRTKAANQMHGFLLEFGISLPKGLAIMKRLASILAEHELPVRLTVLLQRLHNHFVYLDEQIKELDKELTSQLAADDLGSRLLSLPCVGPITASLLAVEMGDGQQFKCSRDFAASVGLVPRQYSTGGKANLLGISKRGDKHLRQLLVQCARVYLQRLDCQRGRLADWVRSMLGRRHSNVVACALANKLARIAWALAAHHTQYETGSDALNA

SEQ ID NO: 292216 - protein, 316 aa, unidentified
MNTKTNQSINIGVDTGKFQLDIYIRPLDIYFTVSNDDKGIKEALNEIKKHKPERIIIGATGRLEMPFIMACAKSDLPFVIANPVHVKRFAGAIGQRAKTDKLDAKLIAHYGEAIKPSLSQLKPENIQLMSDLVARRNQLIVMQTMEKNRLQILPKELAMTIKPILTAFKNQIDKIENKIVKLIESCPEYQAKNHLLQSMKGIGKIAAASIISNLPELGYMTNKQASALVGVAPINRESGRFKGMRKIQGGRHQVRTVLYMAMMSAIQSNPVFKSQYQKLVAAGKPKKVALIACVRKMIVILNSMLRDGVIWEAPKV

SEQ ID NO: 292217 - protein, 353 aa, unidentified
MNAPDIIVGVDTHKQSHAAVAITGLGVRLAEVTICASTRGYQDLEAWASSLGAIRAFAVEGTGSYGAGLSRFLRERGHAVHEVCRPDRRTRHQHGKTDYLDAEGAACALLSGRRAAVPKSGTNEVEMIRHLKVARDTAVKARTQAMLTLKSLIVEAPAGLREQLEAVGGKRALLRHLAALRPVELTNTVASAEVSLRAIARRWLALDEEIKSHDAHLERLVRRRAPAMVEAHGIGVGTAAEMLVLVGDNPERIRSEAALAKLCGACPVPASSGKTTRHRLNRSGNRQANAALHRVVVVRMRAHAPTTDYVRRRTAEGKSKAEIIRCLKRFVAREIFGHLCASPKPVSGRPEAA

SEQ ID NO: 292218 - protein, 383 aa, unidentified
MKSVCGLDVHKDSVYLCILSEFGELIEKVFGVLTYQLEEMRDLMLHHHVVEVSMESTSVYWIPIWRVLSPHFKLNLANPYFIKQLPGRKSDVKDAQWIAECTMKELIRGSFVPPEIIQQLRQYDRRIFDLNEEIVRKLSKLDAVLQRCNIRLSNYVSNVDSKSYKAVVRAISQGITDPEELVKLIHGRIIKHHGIDVITASLKGVVSLAEIDMISQLRDELDMAEAHKEKCQARMLEICEKEFPEELKRLQTIPGIKERAATSLIAEIGTDMNKFETANHLASWSGLKPRNDESNKKIKSRSITHGNVYLRKTIIECAWAASRTKDCFFSRFSYHQTQVRKKNKMKVLVAVARKMLIAVWHVLHDNTNYIDFTTDRKTSRTKG

SEQ ID NO: 292219 - protein, 394 aa, unidentified
MKLVGIDVGKNSHHFCVMDKETGEFNVTPSSFSNNKEGFDFLINSLKPYSKKSILLGMEDTGHYHVALLKFLLSNGYTVALINPKTTDLTRKMEGGITKNDKLDTITICDVLDTPERKKQYRITKVDRFDLYEQRQLTRHHHNLKEELNIYCNRLQKSIDLVFPEFNTLFGSKYGVVYMNLLKTFGSAEAIASTDIRTIRKCFEIKGRGNRISLTPEKLKECAKNSIGISSEVETIQIKHLVSQITLIKEQIAEIDKKIEEFSIPNNSPILSIPGISHFSGTSILAELGDIGNYSKPSQIIKFAGVAPYHYESSQFTAQHTAITKKGSKYLRKTLYQVILPVINNNPVFKKYYRLKISQGKGHRCAQGHCIRKLLRVIYHLLETGQSFDPALLR

SEQ ID NO: 292220 - protein, 345 aa, unidentified
MTEAYDGRQVVGMDLHRRRSVLVRMTGDGRKLETVRIENSPAALRSVLARAGKNPRVVIEATYGWYWAVDVLAAAGGGGHLAHPLGVKAFSYRRVKNDERDCADLADLLRLGRLPEAWIAPPPVRALREVTRYRHKLVGQRTSCKDQVHAVLAKAGIPVTRSDIFGRGGGIWLDGLPLPQPYAGKTASLRALIAVLDGEIARLEEQAAAMLAGERGYAAIRQLPGIGPVLGAVIAAEIGDITRFRHPGQLASWAGLTPRHYESDTRVIRGHVSKQGSRMLRWALVEAIQRQPAGTRPRQVKDAIIARRGPEVRGIAKTAAARTMLTQVFYGMRDGHIRRATSQAA

SEQ ID NO: 292221 - protein, 372 aa, unidentified
MFKTNFPQAREICKEARESKYYFGLDLHLKTIAVTILDKGGKKRYQKKRCLNRDFIELIKRYKGKKTLICESSIGWKLLKDALERSEIRDYILIVLDPRKTSAWTKSSGIKNDKIDSHVLAYMGLRGNLESLLIYQLEDEYLENYKLVVTRDKYIKQRVMVKNELRSIEQNYDVNPYTGEEIGSKIKIEKIRNKLENTIGHLDIKIKEIDKEIKEISKDDEIVDILLSIPGIGILNAFSIRYKIGNIDRFGSHKKLASYFGLGIRQYQSGDSDRRGNITKTGDVMIRKNLIEGCRTIKIHHPEYVLLYCPNVDTIRYSKSSSYRNKITVNIARKTIKFIYRCWKSKIRFDINKYTLMRKEMNLIKNIEYANN

SEQ ID NO: 292222 - protein, 367 aa, unidentified
MKKGSTAAKQRVRNISGQTLTIGLDLGDRNRWYCVLDEAGRIQLEQRVRTNAKALQEVFGAMPRNRIALEIGTHSPWVSRLLSELGHEVIVANARKVRLMGESRKKDDRLDAQTLARLARIDPELLYPVKHRSAQAQADLMMIRGRAGLVRARTGLVNTARGLAKSYGERLRGCNARHLNPEKAEGLSPELQAALEPLLNAIESLSERIVEYNERIEKLAQQDYPQVALLKQGKGVGTLIALTYLLTLEDPHRFQKSRDVGCYLGLQPGRRNSGRSEPQLHISKEGDPYLRTLLVQGAQHILGPFGIDCDLRRWGLRLAERGGKSGKKRAIVATARKLAVLLHHLWVSGEAYEPLHNRNRGAVAAAA

SEQ ID NO: 292223 - protein, 438 aa, unidentified
MSNKFIFNLDDLFISVGIDVGADFSWMSIALPNQQLVGKPYKILHNQMNSLATAVSKIKEAEELYSLESRIFLESTGIYHYPLFCYLRDKGFNCSVINPIITKNSTNINIRKVHNDRFDSKKAALVGLKPDLKVSLMPSDLALNCRNLCREYYDLMDNRSAYVNKLQGELRMAFPQYLGIFSKVTINTSLTLLETYTSPSAFLEADKQEIIDIIKSTARFGLTYAQNKYNAIIQAATDANQFGYIIDSNIKRIRLYISFIRKYDEEINNILESLHELVDANEDADFVKQIHLIETFKGAGFLSAVSIMGEIGDFSAFSKPKQLFAYFGLDPAVKQSGKFEGTKVQMSKRGSAIARRVIHTLTLQSISISRNGEAKNPVLREYYLKKCDSKPKLVAMGAVSHKVCNMIFAILRDNKSFEIITPQEHIKQYNASKCDMAA

SEQ ID NO: 292224 - protein, 391 aa, unidentified
MFYIGVDIAKNNHEASIIDSNGKLVSESFSFSNSIRGLEKFQKFISSFSIDFNNCIIGMEATGHYWLSLYSFLIDLEFSCIVINPIQSDAFRKMYIRQTKNDSVDSFVIAQILRFGEFSVSHFSDEDTFALRNLSRFRFALVDEASDWKRKLVAILDQVFPEYSSLFSNIYGVTSKELLSKYPLPEDMISIPADELAKLLSKCSKGRFGIDKAKEIQEKASNSFGIKFALKSFSFQIKQIIAQISFLEDQILEIEEEISSMINSLCPVITSITGIGDVLGAAIFSEIGDISRFERANQLVAYAGLDVAVKQSGNFNATDTKISKRGSPYLRRAIWLAASVAAFKDPALSVYYQKLRQRGKAHGTAIGAVARKLTNIIFAVLRDNKAYIPNI

SEQ ID NO: 292225 - protein, 347 aa, unidentified
MRFYTQQHPFYCGIDLHARTMYLCILDQAGETLLHRNMPATPEALLKAITPYRDQIVLAAECMFTWYWLADLCADHGIPFVLGHALYMKAIHGGKAKNDKIDAHKIAVLLRGGMLPQAYVYPAEMRATRDLLRRRMHLARKRGALLAHVHNTNSQYNLPAIGKKITYKANRDGVAERFADPAVQKSIEVDLALITYYDALLRDVELTIGKTAKHHDAQTLYLLQTVPGIGKILSLVLLYEIHDIERFPRVQDFASYCRLVKCAKESAGKRSGTSGSKIGNAHLKWAFSEAAVLFLRDNPAAQKFLARLEHKHSKGKALTILAHKLARAVYYMLKRQTAFDLDTFLRG

SEQ ID NO: 292226 - protein, 346 aa, unidentified
MKECNVIAIDLAKDIFQACIMNTHGKIIFNQEFTRKKLITWLPQQAVSLVAMESCGGSSYWARFALSLGHEVMVIPPRQVKPFRTGQKTDSNDAIAIAVASQAANIKPARYLNVEQQGLQSIDKMREMLDKQKLQISNQIRGLLLEFGIVIAKTASSFKSRIPEILEDAENELSIPLRESLTQMWILYAQIEENVEQFDRQLKQLAQQDDSCQRLMKLEGVGPITAVRLKLQLGHKEHFQNGRQASACIGLTPKQYSSGGKTKLGSISKISCDQSLRSALFMGAWSVVTKLKKRPAKTQKEHWLKTLILRRGVNCASIALANKTVRTAYALLKHGTDYEPIPIAMN

SEQ ID NO: 292227 - protein, 409 aa, unidentified
MEVVHEVCCGLDVHKKSVTACVLWASGRRRQTRAFGTFTRELLELGDWLRACGVTHVAMESTGVYWKPVWNLLEGQFEVLLVNAQHIKAVPGRKTDQKDSEWIADRLQRGLLRASFVPPTPIRELRDLTRYRASLAQEINRIANRIQKVLEDANIKLASVATDALGASGRAMLEAMIQGEQDSQRLAEMSRGLLRNKIPELQEALQGRVTAHHRFLLRELLDHLYFVQSKMQRIEQEVAERLGPFQSEVARLCTIPGVDRVTAWGLLAEIGLSMKQFPDAQHLASWAGLCPGSHESAGKRKSGKIRKGSLWLRRCLCQGAWAVSTKKNNYLSALYRRLAARRGSKRATIAVAHKLLVIAYHILRDGTCYSDLGADYFDRLNPEGLRRRLTKRLEGLGFKVTLGPLAQVA

SEQ ID NO: 292228 - protein, 347 aa, unidentified
MRKIAYLSMDVHARNCVLGDMDGNGKFRGNRSFTTCEINIIKALKAIKAKKKYLVMEAGPMSNWAAQVANDHTTKVFICDPRENALIYKSSHKHDKVDTKKLCRLLRLNEFKEVYRPENDQRALFKAAVQHYQDFRDQLKALKQKTKAMYRQWGIINVFTDSVYSVSGRDKFLQQVKHRPIYLQLKRLYTLLDATAAMKQEAEKSMASLGRNYPEIKEFKKIPGMGIIGPHTFDAYIQTPHRFAKRNRLWKYCRLAVTDRTSDGKPLGFKRLDKSGVSELKAVSYRAFLSAMKGDNEVRRFYLNSLQRTHDRKHARLNTQRKILSVMLSIWKKGEAYRAELFLDPSI

SEQ ID NO: 292229 - protein, 420 aa, unidentified
MESNKAKKVKTINEKTMIVTLDIGKGFHYAYFRAPSGKDIKPFRFYNLKKDFDNFWKKLSKFKKEHRLKEIVTGFESTGPYAEPLFHFLRHKPVKLVQINPVHSKRLKDLTDNSPSKTDRKDPRVIADVISLGHALTLVVPEGPSAELRRLTQARERVLKRRTAALNQIQDLIFVMFPEFLTIMKNISTKTAAYLIKQYPAPEDIVTLGVGPLAKIIRKISRGKLGEKRAQELYNAAKNSVGIVEGKRSILVEIEYLISRIDADSRFIANLEKQMGMYLEKIPYSHSLYSIKGFGTVTVAGLIGEVGDFKKFDTISEIMKLAGLDLYEVSSGKHRGHRHISKRGRPLMRKLLFFAAINAVKSNGIMHEPYQQMLERGKPKVKALTAISRKLLRIVFALVRDETVYEENHNKMYHDLKLAA

SEQ ID NO: 292230 - protein, 417 aa, unidentified
MNHLPKTIPIQRYIGIDSHKHYVMVGGMNARREWNLRPRKVQMPRFRAWATQNLKASDTVVLETTANVWDIYDIVAPLVSKTVVANAYKVRQIAEARVKTDKEDVKRLLTLLIADIVPEVWVPPMHVRELRSLISFRWRIGKQLTMSKNRLHSVVQRFNLKPPEGNLLAEKNQDWWDEQEFSELTGFQVELDLEIIAHLEGQKAKIDQKLAELSNIQPWSDEMVFLMQIPGFGLLTGMILLSAVGDISRFSHPKKLVGYAGLGAGVHSSGQKHQEKSITKQGRKELRWVLVQAAWAAVRSDPYWKAQYQRLTKVKHPNKAIVAIARRLLVSAWHILTKHEPYRRADDETIAYKMMIWSQRMDEKALRGLSRQQFIKYGLLRLGVGQDLTRIERKGVPRRIAPTDEVLELRPELKPPG

SEQ ID NO: 292231 - protein, 427 aa, unidentified
MSEQQQSADEKAQFAAYVGIDWADQKHVWSLQVAATGKREHGDVGHSPEAVEEWINGLMARFPGQQLAVALEQARGALLNMLSKYQQLVLFPVHPATISRLRAALYPSGAKDDPKDADLVLDMLVYHRERLRPLVPDTVETRELRFLVEQRRGLVDQRTDQSNRLTSALKQYYPQILDWFDDPAAPLVAAFLSRWPTVEMLQKARPETLVHFFHEHNCRSQELIDQRLEQIRKVVPATRDQAVLESSIVLTHWVCKIIAVLNQGIADLDERIRPLAKAHPDYPIFDSLPGAGEVMVPRLIAAFGTNRDRFSNASHVQNFSGIAPVTETSGHSEWIHMRWACSKFLRQTFHEWAGHSIPQSEWARAYYRQQIDKGNGHHAAVRSLAAKWIRIVYRCWVNRTPYDERVYLDALRRHGSPLVSAMAKATA

SEQ ID NO: 292232 - protein, 349 aa, unidentified
MAVKKRKESLDLFIGIDLHKQRWHVTITTGDVELFSGSIPGQWVALRRILDRYKGHRIHAVYEAGYFGFWLYDRLMEYGCDCCVTPPSLVPKEYGNRVKTDRRDSRKLAHLFAKGLLKRVWVPSEEERFHRQVIRRRQLVGDRVRVQNRIKAELYFCGIDFTAPMGKWTNNFCETLKAIEFNNRWMTESFHRLLEEYEFLCSHITKQTTLLEELSETELYRERVAILRSIPGIGTLAAMELLLELHDVSRFRRAEQVAAYVGLTPSHYSSAEHIRMGRITCIGKNSLRATLVQASWQLIRKDGVIREKYERIKVRAGGKRAIIAIARTLLLRTRRMLIDNQPYVVGLVA

SEQ ID NO: 292233 - protein, 420 aa, unidentified
MTSPDVIPADAVLVAIDIAKVRNEVLIEDPSHTRRRRLQVLNNRAEHDRLIEILRAYGRPVICGFEATGNYHRPIGWRLAEAGFEVRLVSSLALARTREALHNSWDKNDPKDAQVILHMLRIQATQRYHDPLRAGINDVQELSKTHEAIARTKTEIQHRILTHYLPLYFPEIDRFRGNSRSDWFFAFLDAFPTPASVTALTKEEFVAAAWDVVGRKVSKSQILMDIYETARTSIGLPLPLDAPAIRMFRMVIAEARSLIRQRNEIETQADELLRHSQDYQLLRQIPGIGPINALTIIAEAGDLRRFHHHRQFLKFCGLDLSTQQSGQYRGQTRLSKFGNARLRRTLWIAGQVAIRQRENGFRHKFERYIARDRDNPDLRRKAMTAITAKMARVVHAVVKGGSDYRPFVEGRVPGGRTSVS

SEQ ID NO: 292234 - protein, 371 aa, unidentified
MVWTAPYGIECARMRLLRSQTKEPSVSQIIRIGMDTSKHIFQLHGVDSAERPVLRRKLRRGEMLAFFAKFPPTIIGMEACAASHNWGRKLRELGHEVRLIAPQHVKAYIKRNKNDGRDAEGLCEAMSRPTMQFVPVKSEEQQAALMLMGVREHLVKRRTQLGNAIRGYAAEFGLIIAKGLDKIEPLLARIAQDQSLPELAREIFVMQGRDYARLQVELKTIEAKLRAWHRANADSRRLAEIPGVGPVCAAALVMKAPDPHAFPSGRHFAAWMGLTPKDHSTAGKTRIGKITRAGDEMLRSVLVAGATAVIQQAKKGRGHPAPWLVALLARKSPKLAAVALANKIARIAWKLLTTGESYNGARMPGASAVAA

SEQ ID NO: 292235 - protein, 355 aa, unidentified
MTSSKYIGMDVHKESISIAVRNAAGKMVMESVIETKANMILEFVDGLRGDVHVTFEEGTWSAWLYDLLKPHVSKLVVCDPRRNALLKEGNQNDRVDARKLAELLQNNQLRPVYHGNHGLRALKELVRSYLTITKDLSRVMTRVKAIYRSWGIPCSGTQVYSARHRAEWLEKIHEPGVRRRAEHYYQQLDALRSLRLEVRKDLLTESKKHQVWKRLRQIPPLGPIRAAVLLGIVQTAHRFRTKRQLWTYGGLGIEVHSSADHQVVKGQLQRKKKPIEIRGLNKNCNHHLKNLFKGAAAAALTHPGPFQEFYAALVAKGMRPEMARLTLARKIATIALIVWKKGVCFDANHLKPQTA

SEQ ID NO: 292236 - protein, 329 aa, unidentified
MNHIGIDVSGKALSIVISVNGKHRKAQSYENTPQDHKRLVALIQKLQGESIVCMEATGMHHFDLAVALSRSETITVTIINPKAAHNFAKALMQRCKTDSIDADTLASYAERMPLIEWRRPSEALALRALARRISATNKIKAQVKNQLGALMVTQETPEVILAQTKSLIGTLEEQIASFRINALNIVNRNRELREVFALITSMKGIAEASAIQLLGELLTMPDDLTVKQWVAYAGLDPKHFESGSSVVKKTRISKTGNRYIRQALYMPALVASRSEPHVAAYYKHLQEKRGLLKIQAICAVMRKILHAIYGMLRSKQPFDGCMFFRMETV

SEQ ID NO: 292237 - protein, 379 aa, unidentified
MEIITQNEKILYIGIDVHKDTYSLCSFDFHKNELSDEMTIKATTKAVIKYLEAIKKKHKEEILFACGYEAGPTGYGLCRGLQKAGYGCVVMAPTTMSNPDGKKRVKTDRIDARAIARILAYKSYSQVHLPSEEMEALKEYTRARDAKKRMFKKAKQELLSFLLRNGKTYPESGNYWTEKFFKWIKTVQFSEKWMQEAFNEYLAEVYSLKAKIELMDMKIREIAELEIIKDKVDKLVCFSGIDVTTAVETVVEIHDFTRFATAAQFVSYLGLCPGEDSSGKTKNMLSLTKTGNCRVRALFCESAKAIKRTNPYGQKSKRILERQKNASPEIVAYADKATKRIRTKMKHLEERGKNYNVSSAAGARELACFVWGMMNGKIA

SEQ ID NO: 292238 - protein, 367 aa, unidentified
MKKVSTTATKQSRNISQQPLTIGLDLGDRNSWYCVLDETGRIQLEQRVRTTAKVLQEVFGAMPRSRIALEIGTHSPWISRLLSELGHEVIVANARKVRLIGESRKKDDRLDAQTLARLARIDPQLLYPVKHRSEQAQADLMTIRARAGLVRARTALVNTARGLAKSYGERLRGCNVRNMDPEKAEGLSPELQAALEPLLNAIESLSERIVEYNDRIENLAQQSYPQAALLKQIKGVGTLIALTFLLTLEDPHRFRKSRDVGGYLGLQPGRRKSGESEPQLHISKEGDPYLRTLLVQGAQHILGPFGIDCDLRRWGLKLAERGGRNGKKRAIVATARKLAVLLHHLWVSGEVYEPLHNSSRVTVAAAA

SEQ ID NO: 292239 - protein, 335 aa, unidentified
MRYVGLDIHARNFSIAVLDENSSVVFEHSLATSAANLRTVMEAIADPKRVVLEETTVAGWAYRVLKPHAEQVVVADPLHNRWIAGDESSDDASAVYKLAELLRGGFIHPVHHTGQSRQVFKEMVLSYHDTSRELVRFKNKLKAKFRQHGLYCAGQGVYHRAEREAWLTKLAAVGARLQAQMLMESIDHFQEQKSQLRQELARRSRAFPEIATFRQAPGVGLVRATTFFALVDTPHRFAHKRKLWAYCGLAVVSRRSDGRAGPKHLNRRGNHLLKDIAKGAALSAIVRKDSQFCQQYQRLIAQGISAQNARLTVARALVATRYAMWRKAQPYKPHS

SEQ ID NO: 292240 - protein, 394 aa, unidentified
MTYYIGIDNSSLDHKVHILNNEGNFHSQFIINNDLNGFNKLNETIRNFDQLMIGFELPHGPLVDFLKLKNYTAYSLNPLKIKRFKETMIVSGNKNDNIDAAAIAEYMKKNNNQCRPLLYNSPAIEKLKMLSIIHSRITEEHARYKNKLHFAVKQYFYLHDSLFTNFGCTIQLKMLIKYPTYHDLKIASEDELITFLKSNKFRVLKYIKRVLEKIESYDQWISPEVEYAYSVEVKMLCEILFILKQNLNDVEKEMNAILDNHRMGSIFRSLPGAGVVLACKLLALFGDNMDRFSNANQAQCLFGTAPKNYQSGNYHKVTMRKACNKSGRAVLYSFAFSSMHFCQWARSYYYEQRKKGKTNSVATRALSNKWVSIIFRLWKDEIFYEENKKIIAAA

SEQ ID NO: 292241 - protein, 411 aa, unidentified
MHNRQNYLYVGVDLHKEHHTAVMINCWQEKLGEIQFDNKPSAFSKFLLKVETYVCDGITVVFGLEDVGGYGRALAKYLVDHEQVVKEVNPALSFLERKSQVMIQKNDSWDAECVARILINKFNQLPDAKPNDLLWSIQQLVSRRNALVKAQSALKNQLHIQLNHHYPSYKKFFSELDGKTALAFWEQYPSPSCLEGTNIKRLTTFLLDVSNNTCSVKKASDILKVVKEDGHTMKEYQDTRDFLVRSIVREIEFKKKEMKYIEKELKQLVNLLDYQLETMPGIELVTASALIAEIGDIRRFLNANKLARFAGIAPVYFGSGGKGKTHKSKQGNRALHALFYNLAVQQVQVAKGSKLPRNPVFHAYYQKKLKEGKTKGQALVCIMRRLVNIVYGMMKYKTAYELPVVEEKEVV

SEQ ID NO: 292242 - protein, 439 aa, unidentified
MSRRAYRATGVNEVNWEQIAHGKDGLDVTLGVDVGKFDMLVVCRWADERFERPWRVKNPQEIPTLAALAKQVQADRNLVVAMESSGTYGDTLRQALTDNGIEIQRVGGKAAHDYAEVFDGVPSQHDGKDAAVVAELAALGKGRPWPYEAADSWEEELTYWVEDMVIQRQLVTFWQGRLEGLVARHWPEAFQVLKLSSGTLLRMLKRYGSPQALAADPQAPRQLARWGGALLSAKKIDQLLAGARSSVGVRLGPWQQRQIQEYAEKALAARRQSNQAQRRLRQLAVGHQVLQAQGKVVGIPTACVLWVCTGDPRKFDSAAAYRKAMGLNLVERSSGTYQGQLRISKRGHARTRQWLYFAAMRLVQKRGVRPWYEAKKARDAGDARRLLVAVMRKLAVALYHVGVRNEEFQPRRLFGRIGKHRGRGAQRAIAVAEPSNLQG

SEQ ID NO: 292243 - protein, 324 aa, unidentified
MIDGILGIDVSKNTLDASISSCNKVRARSFANSSDGWRHLLDWLITQKIRRVHACLESTGRYSLGIARALYEAGHVVSIVNPAQIRDFARTKLGRNKTDGVDASYIREYCELFKPQPWTPPSDAHRRLGELQAIRAGIVAGLTEWKNRKNSGMVDAVAQSLADVTILHFTSQLGAVDEAIAQTIDNDSSLRRKRDLLLSISGVGETLAGVVLAELPGPDMLRSSAEVVAYAGLNPRQHQSGTSIDRVTRISKIGNAVLRAALYMPAMSAMRFNPAIVALATRLKSRGRLNPKQIVVAAMRKLLVLCFGVLKTGKPFDPAIAMGR

SEQ ID NO: 292244 - protein, 405 aa, unidentified
MITEVVVGQQLWAGVDAGKSDHHCVVIETEGRRLLSQRVPNDEAELLELIRAVTALAGGDEVTWAIDLNHGGAALLIALLIAADQRLLYIPGRTVYHACGGYRGEGKTDAKDAAVIADQARMRRDLQPLRPGDGIAVDLRILTARRADLVADRTRAINRLRAQLLEYFPALERAFDYSTSRAALILLTGYQTPDGLRRVGAARLETWLRKRKVRNAAAVATAALEAADAQHSTVPGQQIAAAMVARLAKEVIALDTEIAETETMIEDRFRRHRHAEIILSMPGFGVTLGAEFFAATGGNMAAFDSVDRLAGVSGLAPVPRDSGRVTGNLKRPRRYDRRLLRACYLAAQIAIRTDSASRTYYDRKRAEGKTHTQAVLALARRRLNVLWAMLRDHAVYQPATTTAAA

SEQ ID NO: 292245 - protein, 407 aa, unidentified
MDSLKTVFGIDVSSRKSNVCIMVNGQKVNDYAISNDMVGFNQLLDDLKQVTNPQIIFEATGVYSRRLQAFLDMHELRYVMMNPLEAKRKTKDDLHQNKTDKLDAMYLAKMQSEHPQRLAYVQSEGYQELMANNRIYEQASHDLITNKNRLHKAIQLTFPEIEHLMANPRGKNYWSIVLKFPHPNIVLETKEADIIDFLKSLSGIGEKRANDLAQRLIRLAKLACPAVKKSSAHIRGLEMAINNILSAEETCQTALKEMAKLAPKRDLEILKSIPGIAENTALRIISELGDIRRFNNPNQLNAFVGVDPQVYESGNLTAHLSISKRGTAIGRKVLYLAINQIQSAKKVGNPCHIADYYEKRKRSSETASHKKAAIVSIHKLLRTIFALITNDQLYSYDIAKHNQRLLS

SEQ ID NO: 292246 - protein, 439 aa, unidentified
MQLTPAWWRNCDHGQGSTDAVLTLVRNWLRALHWICRMASLNHHRGSLSDLIGAWQNVTSQFCPFVLRWLPNQPHLCMTSSTWPTPGIVVIGVDTHKDVHVAVALDWRGGRLGDLRITTTHSGYQELLEWSLLFTSGSQGQLTFGIEGTGSYGAGLSRYLQAAGAMVREVNRPDKTARHRLGKSDEIDADLAARALLSGSATNVPKSGEGVVEMLRMLKSTRDSATEARVKAINQIKAILVTAPESLREQLRELSNPLLVRACSRLQSMEMASPLAAAIRSLRLLGRRCLWLTEEIEQLSLDLDALTLQAAPQLRELHGVGVDAASTLLIAAGDNPERIRSESAFAALCGVNPLPASSGKTNRHRLNRGGNRKANCALWRIVLVRLRWHEATKVYMQRRTLEGKGKREIIRCLKRYVAREIYKVLLMELGMPEAKQAPC

SEQ ID NO: 292247 - protein, 460 aa, unidentified
MSQRKHRIHKRKKLTAAQTPLNPTHHPDAAGIDVGAEELVAAVPPGRGEGPHVRTFSAFTEGLHALRAWLLACQIKTVAMESTGNYWLCACAILEDAGIEVCLVNARHVKGVPGKKTDVCDAAWLQQLHAAGLLRGSFRPQKEILPLRYLLRHRGDLVAQSGQQVQLMQKVLTEMNLHIHHVFSDVDGLSAQAIITAILGGERDAVKLAALRDRRCRAPLNKIKSALAGDYRDEYLFVLQQCQTRWQQLNESIGQCDQEIARRTAAIQGVTDAPLPAAPAAQRRVQKNMITAMPVYEEAHRLLGVDLSAVPGISGGVLCMLVSELGTATHIRQKFRSAEAFASWLGLCPDNRISGGRILKAATRKVSNRIANILRMAANALSREQGRMGEFVRRFKGRLGKAEGIVVGAHKLARILWALIVSGQPYNEAKAFAITPASTARRLRNLQNQAKALNMTLVPA

SEQ ID NO: 292248 - protein, 460 aa, unidentified
MKRARKTRPVPKVSSPAAEVDELTVIHPNAAGIDIAADEVWVSVRADRDPQPVRCFGMCTPDLIAVADWLKACGVETAAMESTGVYWIPLYELLEDRGFKVYLVNARHAKNLPGRKTDEADCQWLRRLHAFGLLNNSFRPAGEMCAVRAYMRHRADLIEHRAAHIQHLQKALRQMNVLLSPTVTDITGATGLAIIRAIVAGERDPVKLARLRNPKCAKPETEFVKALTGNYRDEHVFALKQALALYDAYTQQILECDQELERKFSALKPIHDDELPPLDTRDKRNTHSKNAPAYDGRSLLYQLLGVDLVAVDGLNEVTAQIIISEIGTDMSRWKDDKHFCSWLGLAPHNDISGGKVLRSRTLKTHNRAGQAFRLAAQAVSKTQTALGAYFRRMRTIHGPQKAIVATAHKIARIVFFMLRDHVAFHHTSAEDYTQREREREIARLKKKAAKLGFTLAQASA

SEQ ID NO: 292249 - protein, 407 aa, unidentified
MEVLYERCCGIDVHKRMIVACLRIGRKSQTRTYGTYTDDLRELTGWLKSEGCLMAAMESTGPYWKPPYNILEMEGLPAMVVNAAHMKALPGRKTDVADAAWIADLLQYGLSRASFIPDRKHRELRELTRYRKSRTEERAREVNRLQKVLEGANIKLSSALSHITGQASNALLGLVTENIPITTASVGARMRSSMKSSAQELRRSLDGVVTDLQRELIREILNTIRQQSEQIARLDLLIERHMDRAYAQAADVLSTMPGIAQVSARVILAEIGVDMSRFPSANHLCSWAGICPGNNESAGRRKSGRTTAGNATLKSTIVRCAVVAAKNKNSFFNAQYQRLVVRRGKNRAIVALAHSMLISIYHVLSGDAFHDLGHEYYNAFNTQKKIDSYLNKLKNLGWSPGAQVTSA

SEQ ID NO: 292250 - protein, 351 aa, unidentified
MRTSQKVTGIVTTIGIDIGKNTFHLVGFDQRGAIILQQKVSRSQLERRVANIPRCLIGMEACSGSHHIGRQLAEIGHDVRLIPAQYVKPFLKGHKNDYRDAEAIAEAVQRPTMHFVTIKTPEQMDLLALHRVRSRLVGRRTGVINQIRGFLIERGITVRQGPMPLRKALSEILSSDTGALSPRMVGLIADLAQDWRRLDERIAAVSAEIEALAEQDDSCQRLMTVPGVGPIISSAVVAAIGNGTGFKQGRDFGAWLGLVPKQESTGDRTILGKISKRGNKYLRTLFVQAAHVVLERRPSAAMRGLWPWVEQASKRLHRNMLAIALANKLARIAWAVLARGGTYQPRITHAA

SEQ ID NO: 292251 - protein, 397 aa, unidentified
MYIVGIDIAKRKHEAAVIDGEGAVIIKPFSFTNNCSGYNRLLAMLTKAKLPLDEVSFAMEATGHYWLALFTRLQKEGFRVQVINPVQTNSIRSFYIRQAKTDPRDALLIAEVIRFGHFSESTLHPENIYELRELCRGRHAIVSMQADVKRKVVALLDQVFPEYETAFTNMFSDTSMAILQTCPTPKELSEMPLEELCHLIEVSSHKRFRMAKAQELQELARNSFGFAMAGDVFSTMIRLYAKHLDFLKRQVREMDRKIAEIMETLDTPITTITGIGPTLGAYILSEIGDINRFSSAAKLAAYAGIDPTMRQSGEYNGVRNRMSKRGSPYLRHAIWLAASSAVLHDPALKLYFQKKRDEGKPYMASVGHACRKMVSIIYAVMRDNKAYTPCIPNEISA

SEQ ID NO: 292252 - protein, 312 aa, unidentified
MDKIPVFVGIDVAKHRLEVHLRPSGESFTIDYREEEVAALVERLLPLEPTLIVLEATGGLEVRLAAALAAAALPVAVVNPRQVRSFARAMGRLAKTDRLDAKVIAHFAEAVRPPVRPLPDETTRHLGALVARRRQLLAMLVAERNRRQAADRALHERIDAHLRWLENALAEIEGDLDGAVRDSPVWRAKEELLRSVPGVGPVSARTLLAQLPELGSLTRRQVAALVGVAPFNRDSGKMRGRRTIWAGRAALRACLYMAAVAAARGSNPVIASFYRRLRLAGKPAKLALTACMRKLVVTLNAMLRTNTGWKQA

SEQ ID NO: 292253 - protein, 334 aa, unidentified
MALELLAIDLGKRAFHIYGIDTDGVILSRKVSRAKLAEVVGDLEPTAIAMEACASAHHWARCWLAASRQVRLINPRFVKPFVKGSKNDAVDAEAIFEAAMRPTMRFVPVKSTDQQDLQSLHRARDRLICQRTALINHTRGLLAEYGVVLPQGPRRFMAQAPTAIAGADLSDLARAIFGELMDQLDDLDRRIQKLDAMIVTLCRTNETCRRLTKLPGVGPIVATAIVAAVNDGRQFRSGREMAAWIGLVPRQYTTGGKPRLGGIGRRANHYLRRQLIHGARAIVSRSDKHDDRQSTWLKALVARRGFNRTIVALANKTARIAWVLLSRKQEYAAP

SEQ ID NO: 292254 - protein, 328 aa, unidentified
MNVFTGLDIHKEYHHATAMDEDGDILRQERIPNSLEEIESFFSGIEGSEVALEASYYWEPVYDELEEMGFEAKLAHPRKTRVIADEKIKTDVRASEALAQLLRMGWLPEAYVPPAHIRELRELLRRRVSLVESRTKYKNKIQAELTKRRIDLEGTPWCGPWLSQLENHEIDPVQDYMAIIRSLDDRISKIEREIKEEAENTEEAGLLMSIPGFSYFSAMTIYASIANKDRFPGPKELCSYFGVIPSTEQSGGKRNHGPITKAGDNYVRRVLIQCAWSHVINCDSYITGLFKRLKRRKESNIAIVATGRKLVEAIYWMLERGEKFRLGG

SEQ ID NO: 292255 - protein, 322 aa, unidentified
MRYIGIDVSKATFVVAYSSDKGGGIRTFNNTTAGIRQFIGTLPKDGSIHCVMEATGNYSALLLYMLNVAGITVSMENPLKVKNFAKALLSTVKTDKSDARLITLYGEKMNPRPFKVQGEAILRLRQKRTVIRQLTKQITAMSNLRGSLVCLPVPDKGATHTVDETIKFLEKRRDRLQSELTELVEVEFSRQLALLTTIKGIGITLATALIITTGGFTYFQNAKQVSRYLGICPTYEQSGTSVNIRGHINRNGDAYTRGLIYVAAWNASRFNAKCGETYTRLRQNGKPGKLAMIAVANKLVRQAFAVVAHDKEYVDGFVSNRH

SEQ ID NO: 292256 - protein, 409 aa, unidentified
MNTRTSLLWKQQCKKTDRGGNQLYFVGIDISKFKHDCAIVDELGDVITPSWSFQNDREGFSLLKELLDALDGEKKIGLEATGHYGQNLKLFLENNDFSFMEFNPLLINRFVHSKSLRKTKTDSIDALMIAQYLMTVEYKPYPPSFYTLEKLKSLTRFRDSLIRQRSKQLVELTNILDKVFPEFKSFFKGRFSATALYILFHYASPEKISNMNSKSYEPLRRLSRGRFSMVDFVELKTLARNTVGSTCDYLLQEMEITIDIYNQLQSKVEEIELQIHNCVRGLTPPMLTIPGIGVASAAVILSEFGDLSKFNSPSKLLSFAGMEPGYFQSGTSESTGKMVKHGSSHLRYAMMNCAQTVINNEPTFAAYYAKKRAEGKEHRVALTHVAKKLLRVIYTLQTKELSYNPDLVR

SEQ ID NO: 292257 - protein, 337 aa, unidentified
MDTVFLNNATYVGIDSHPTTHTALAINRFEDEKGHITFDNSMDGINGFLSWLPTIDQQIGNVILGIEGGDGTRHILLSSLLEKDYAVYEVNPLYTKQRRTFGTRRDKSDGKDAKLIAEVLTKKLGELPKIQQIQVATNILVLRKTVWFYEDITAQGARMKSQLKTIQREEDLVRTKEEKKLLSGIEKNMTRELAHIKKEQKQLEKQLVVFLKQYGGNLTSIPGINTILAAKLVAHSGDIKRFHSIDGYVRYAGVAPKEKSSGRNNRFVKDKQTGNRKLSTTLWIAALNQIQWNKQMKDYYHKKISEGKTKKRALVSVMKQTACIIYGMLKSGEIYRG

SEQ ID NO: 292258 - protein, 402 aa, unidentified
MRYAGIDWADQHHDAVVIDEQGRRVGATRVAHSVAGLEALVTFLRDASGAGGEIACIVETTNGLLVSALLEAELPVYPVNPGVIDRKRAPSGAKTDAIDAYLLARTGRSDLADLRRLQPDSPLIRELKVLTRDQETLIRDQTRLVNQLTACLKAYYPVALTFFCKLQQGVTLTFLTAFPTPEAAGAATPESILEAMSAAGRPIGAAQAQAIVETLCTPQLHADPLLTRAKARLMLALVAQLQVVLAALAAYDREIASLFAQHVDHALFASLPRAGKRLAPRLLAEWGDDRTRYADAAGIQALAGTSPVPFASGKLIRAHKRYACSKPLRNALYQFAWQSTLKEAWASAYYQRKRQEGKTHAVAVRALANQWVRIIFAAWRQGEVYDADVFLAAQRAHAPRAA

SEQ ID NO: 292259 - protein, 343 aa, unidentified
MKRRTLGIDLAKDCFQVSVSHGDGRVIERHRFNRAQFTEFMAQSPASRVLLEACGTAHHWARTCNALGHQVELLPAQHVRPYRRGNKNDRRDADALLEAGRCDDIVPVPIKNENQQAVIQLHRLREQWKTTRTARINSLRGALREFGLDLPAGAVNAIKHAPRHLDHLPGHLRTALQAVLQEIETLQLRLLAVERSLEEIAAEDAAVKRLRQVEGIGLLNATAMVATAGSASHFPSGRQFAAWLGITPRESSSGFRRNLSRITKRGDVYLRTLLIHGARSVLARAKQVNRIDPTRLSRLQQWGLQLQRRIGHNKAAVALANKLARICWAVWRTETRYEPGYGA

SEQ ID NO: 292260 - protein, 326 aa, unidentified
MDDLQTSFESFVGIDVAKENFEVFFMATNTGCTLPYDAAGIQTLVERLKALPPSLIVMEATGGLERRLATELITAGFVVAVVNPRLPYHFGLAHGQNAKTDRIDARMLARFAQDVKPRPLEKTPEKLAELEHLVGRRRQLITMRTMEINRRGACDSKLATKSIDKVLACLEKQLDALDREIQRLIRCDDDWRRKDELLQSVPGISSTTSAAILAELPELGQLNRAKIAALVGVAPFCADSGTITGKRRIFGGRAGVRSAIYLAAFNLVHNRHIKPSRIRHFADRLTTGGKATKVVLTACTRKLVIILNTMLKTDTSWNSDFSPISS

SEQ ID NO: 292261 - protein, 344 aa, unidentified
MKITTVGIDLAKNVFQIHAVDERGKTALKKQLKRGQVVEFFANLPVCLIGMEACGSAHHWARKLAGFGHTVRLMAPQFVKPYVKTNKNDAADAEAICEAVSRPNMRFVPIKNIEQQSVLALHRVRQSFVKARTAQSNQIRGLLAEFGLVVPVGIANIAKRVPELIEDATNELTGSFRLLIARLMDHLKELDRQVDELEAQIKSWHRASDASCKLEKVPGIGPITASALVATIGDAKNFDGGRQMAAWLGLVPRQHSTGGKSNLLGMSKRGDTYLRTLLIHGARSVIFRAQQKVDKVGWLNELVQRRNKNVAAVALANKNARIIWALLANDREFQSNYKTASMAA

SEQ ID NO: 292262 - protein, 342 aa, unidentified
MNLPVRIGMDTSKSVFQLHGVDENEVVVVRRQFRRAEMIRYFERLPPVLVAIESCGSSHHWARLLQSFGHEVKLIPPQYVKAYVKRGKNDAADAEALCEAVTRPSMRFVPVKSKERQAACMLMTVRERLVSVKSQLSNAFRSYAAEFGIVGPAGRQNVAQLIKRVLEDDSLPEMAKDLFRLQAEEYAAVEARLAKIEAKLMRWHRDDDVSRRIATIPGVGPIGSSMLSMKAPPPETFRSGRDFAAWLGLTPKDHSTGGRQRLGGITKAGDSILRSTLIVGATALLRHIRKGRHKPTPWLASLLERKPPKLVAVALANKFARIAWRLMISGGVYKQPVAVMPT

SEQ ID NO: 292263 - protein, 408 aa, unidentified
MEVVHPRCAGLDVHKKTVVACVLVPERKEVRTFGTVTDELLRLADWLASEQVTHVAMESTGVYWKPIYNVLESTGMELLVVNAQHIKAVPGRKTDVKDAEWIADLLKHGLVRASFIPSRPQRELRELVRYRKGLTEQRGHVVQRIQKLLEGANIKLSDVASDVVGVSGLTMLRALAAGEQDAERLAEMAKSQLRNKREELKLALRGSFGEHQRFMLKNQLGLLEFLDEQIAELNQEVERRLRPFETLLERLRAIPGIGPRNSEQILVEVGTDMNRFPTDSHFASWAKLCPGNDESAGKRMSGRTGQGSRWLRATMVEAAWSATRVSNSYFAAQYHRLVPRRGKRRAAVAVAHSMLIVVYHLIKDGTVYQDLGPRHFDELDRKRITRRAVQRLQSLGFDVSLKEVATVS

SEQ ID NO: 292264 - protein, 355 aa, unidentified
MDSTKYVGLDVHTEATTVAVMNSAGKLIMESIIETKAITIRQFIQGLRGDLHVTFEEGTWAAWLYDLLKPYVTKVVVCDPRKNTLLKVGNKSDRIDPKKLAELLRNGSLSAVYHGENGVRTLKELARSYLTISKDLGRVMNRVKALYRSWAIPCAGTQVYAPCHRSEWLSKITEAGVRRRAEHYYQQLDALQTLRHEVRKDLLLESRKHNATKLLRQVPCIGPIRAAQLVALMQTPHRFRTKRQLWTYSGLGLETRDSAQYRYVEGQLQRSKKPQQLRGLNSNHNHDLKNIFKGAATMASISAGPFHDFYEALLTKGMQPTMARLTLARKIAAITLIVWKKGVRFDAEHLKQQAA

SEQ ID NO: 292265 - protein, 274 aa, unidentified
MKDTMIGVDLAKNVFQLHGASMTGEVKFRKKLTRPQFMAFMADHPAAVVVLEACGSASYWARELSKAGHEVKLIAPQYVKPFVKRQKNDAADAEAIVVAAQRPEMRFVPPKTEEQQARAVLFRARERLVHQRTELSNALRAALYEYGHAVPQGSVHLKRIVEIIEAETCDLPDLAREEARDLLEQIAEKTVRIEAKTRKIAAQAALTPTARRLQTMPGVGPMTALAVEAYAPAMATFKCGRDFAAWLGLVLRFSLSADRGGRVSCARPRLRSAI

SEQ ID NO: 292266 - protein, 336 aa, unidentified
MSKSYLGIDVHKKVCVFTEIDSKGKILHRGKFGNTLEGVSDFASSLSPNVHLVLEPVLNYLWLLDQFEPYVGSVHVATPHKVRVIAESKCKTDKYDSRLLAELLRTNFLPESWAPPSEIRLLRGLIRQRYHLIKSVVMDKNRIRHLLFQHGIDLRVFNIASPKARLEIRKLCLPDITRQTIDQCLKIIAMLGDQVAEIDKRIQERVKGNPTVELLQTIPGIGRLRSAVIYAEVGDVRRFRSAKALASYIGLTPIVRSSGDSVWTGGITRLGSRPLRHALVEASINAIRKSPELNRMFCRILYRSNVQKARVAVARELAVIIYAMLRHNEPFRAEAA

SEQ ID NO: 292267 - protein, 347 aa, unidentified
MKKIFIGIDVSKEKCDATAISAENGLTGVEKLDYLVFENRPKGFRTLLSWAKKLRPDIPQEDILFVCETTGAYDRALCDYIYSKGLDIWRESALQILWSSGVRRGKDDKTDSLMIAEYALHHMDKVHLYESPDSRILEIRALFLYRRKLEQEKTSKLVRIKELEATAGKSRTLTFILRDAKKSIRQLEKSIKECEDKILELIEADKALNKSYQHLDSVKGLGIVNITALIVYTNNFKAFKTSRKMATYWGVAAFRSKSGTSVDKRADVRNLSSSMLKSYLTQAAMHTIAKGGIYHDYYHRKIAEGKTHSIALNNAKNKLLHLAMSLVTHDMDYEANHESLRTQRVAN

SEQ ID NO: 292268 - protein, 313 aa, unidentified
MEERALKVLGLDVAQAFIDFARSDGAGSGRVENEREGIAQLIDQARGGIDLVVCEATGGYEKLVVAQLLAAGIAVAVVNPRQVRDFAKATGCLAKTDALDARVIAAFGVAVRPRIEVPRDELTQQLEELLNRRQQLVEMRVMEQNRLARAHKAVKRSLHKHIEWLSAQIDAADRDLDGTLKGSPQWQAKLDLLAGLKGVGPVMRAALLAWLPELGMLNRKQIAALVGVAPFACDSGTLRGRRVIYGGRHALRSMLYMATLVATQHDVRLRGVYRALVAAGKPKKVALVACMRKLIVTLNAIFKTGQPYRPALT

SEQ ID NO: 292269 - protein, 391 aa, unidentified
MAPVMIGIDPHKGSHTAVAIGADEEPLRQVRVRASAAQAQKLVAWAADWPERTWAVEGARGLGYLLAQQLVAAGERVLDIQPKLGARVRLLATGASGKNDPNDARSVAIAALRSTTAAEVAAAGHAAVLKVWSKRHRDLGRARNQLACRLHAVLCDLAPGGFSKEITAGQASGLLQRIRPSGAAAQARYDLASEFVEDLRRLDAQLRDTRSKLTAAVKESGTSLTEIFGAGPVIAATVIGATGQVSRFASRDRFAAYNGTAPIEVSSGNRRACRLSRRGNRRVNHAIHMAAVTQIRNKHSEGRAYFDRKLAEGKTRKEALRCLKRRISDAIYARLQDDARRTRQARTLTAREGNRGTTLTPARPAHTPITGSSDKPLPGLTPLYDPGQSPA

SEQ ID NO: 292270 - protein, 408 aa, unidentified
MNTLYVGIDVSSKSNVVFLMLPNGDKHSNFSVANSQEGSTQLVKRIYSALTSHSLDTVIIGLEATSVYGDNLVYFLREDATLAPFNRKIHVLNPKQVKKFHDSYNDLPKNDYVDSFVIADCLRFGRINKEVYMEDYRYKALQNLTRARFFAVQNLVKEKQRFMNVLFKKYSTMTQEKVFSDTFSSTALAVYDEFESAEALANMDLHELTDFIIEKGKNRFPDPDAVAKAIQKAARSSYRLPKTVNDSVNQVLSISITSMKALEVQIKEFDKAIKAQMELLPNVLVSIPGIGPVYSAGIMAEIGDINRFDNQAALAKYAGLAWKQHQSGGFEAEVTKLIPSGNRFLKYYLCEAAFSLVRCDKEYSDFYRLKYKEVNRCQHKRALALTARKFVRLVFRLLKDNRLYSPAK

SEQ ID NO: 292271 - protein, 417 aa, unidentified
MNTENEIVCGADIHRDFLVATMISRKGLKLQERFSMNQDGLLEFKSWILNHKCQRVAVESTGSYWYPIFYTLEGYVEFILANAFQIRNIEGKKTDKLDSERIAVYCLNDLIKPSRIYPKDYRDLRSITRSREALVNARSKLKNQIHQLLATCCIKLSSVISDSFGKSGRYILDRLLEGKSIDQIISGIPSKRVRKKEDELRNAIRNGLDPVQLLLIKTNLDAIDDLSEKIKILDAEISIKVKPFEEDLNILLSVPGIGLTSAATILAEMGDYRDFASADKMAMYFGIVPSVYQSAGKLRTGKITKRGSKHMRRILVEVAKAISKTKKDSNLKRFFMRVYKRSGKKNVAAIALARKVLCIIYHLLMNHEDYQEPEIKKKKPKISICGSPINTMDIDEMISTLSRAGYLVEKGFKEGCG

SEQ ID NO: 292272 - protein, 334 aa, unidentified
MQIARIGLDLAKYVFEIHGVDAHGKVAVRKTLRREAVSTFFANIPPCLVGMEASNGAHYWARALAELGHQVRLISPQFVAPYVKSNKNDRNDAEAICEAVGRPSMRFVPVKSAEQLAVQAVHRLRSRLIADRTCLANQIRGLLGEHGIVIAKDIGNLRRALARIVDDNGKDALNELVRALMGELREELVELDNRVLDYDRRIRELYRNSEVCQRLGKVEGIGPVTATALVAAVGDRSCFKNGRQFAAWLGLVPKQRSSGGRARLFGISKRGDRYLRTLLIHGARAALGRVRGKQNHRNFWLGKMRKRRHPNVAWSLLANAICNGSSSIPTHSCA

SEQ ID NO: 292273 - protein, 355 aa, unidentified
MESVKYIGLDVHQSTISVAVLNAEGKVMMQSVIATKATAVLDLLQGLRGVLHLSFEEGTYSAWLYDVVVRQVARVVVCNPRKNALLKSGNKSDQIDARKLAELLRAGMLSPVYHGEQSTRTLQQLVASYSALTEDTGRAMRRIKALYRSQAIACAGKKPFGKRHREEWLARLTDSGQRRRAEWLYQELDAVQILRREARQAVMVECHKNPAARLLRSMPFFGPLRAAVLIARVQTPHRFRTKRQFWTYCGLGLETRSSADYVEKDGQILRRRKPVYIRGLNWNYSHELKNVFKSAATTASAMDGPFRAFYEMRVANGMLPAMARLTLARKMAAIALILWKKGETFAAEHLKLQAA

SEQ ID NO: 292274 - protein, 407 aa, unidentified
MPSTERPFTTTAVHEPDATLFAALELSLSRWVVVASAPCESKLSKHTLPACDGPALLALLEELRRRAERRSSRAVTVVTIQEAGRDGFWLHRLLEANGVRSHVVDPASVAVSRRSRRAKTDRIDAEAMLRTLMAWSRGERQVCSMVRPPSREAEDARRLNREREALLAERIRHANRIKGLLATQGVFGFEPMLQHRRTRLGALRTPEGACLPPRLLAEIGRQLDRLELAIQQLAALEAERDAAFAAERVAAPVTGDAGERPPEETVPSNEGPGARLLRLKGVGPETASVLAGEAFFRDFRNRREVASYAGLAPSPWQSGGVDHEQGISKAGNARVRKAMGQLAWLWLRNQPDSALSTWYRERVGDGRGRIKRVAIVALARKLLIALWRFVTQGLVPSGAELKPAKAA

SEQ ID NO: 292275 - protein, 391 aa, unidentified
MSMYFIGIDISKYKHDCCIISAANQKVVSKVIIKNNKAGFNELLTIIHSLANPADIRIGFESTAHYALNLELFLENSLLTFMEVNPVLISEYKKSKTLRRKKTDSVDCESIARWLMTVEYKPHSKGFYHAYSLKSLTRLRDKLIRQRSFYLVKITNVLDHTFPEFKPFFNERLSKTALYLLENYGSAEKMARMNSASYEKLRSVSRGKFSPQQFLRLKELAVNTVGVNNSIFDVELNSLLSLYKSLVKEIDTIEKEINQLIEEVHPHYMSVPGIGPLSAAVIYSEYGDISNFTNPGQMLAFAGIEPGINESGTESHGGKMVKRGSSQLRYTLINCCLPLIRFDMTFATYYAKKRGEGKPHRVAITHVAKKLIRVIYALESQDIDFNAQELR

SEQ ID NO: 292276 - protein, 386 aa, unidentified
MTQTVKRAGFNPRAYDLLVGLDVDKKSMSATFADVQNLLNSIRLPYSSTQLLNYVRKQYPEKSRVAFIYEAGPTGFGLHDELTSAHHTCLVVTPAKIPTVPGNRVKTNRLDSRKLVQTLRSGDLQTVHVPARAYRELRHLVQLRDTHVRQLSATKCRIKALLLYEGIAFPDEKGRWSKTVIAQLQTLPATRAVRFKLNQLLESLEFHFKSAASTQKEIRLVCKADAELRQSIALLKTIPGIGWIVAAHLVARLGDWREIDNVRSIAGFLGLVSSEHSTGDKQNRGRITRSGDSRLRNKLIQTAWIAIGKDAELRAFYRSVYQRQPQKLAARKAIVAVARKLTTRIYAVLKQQRPFELRADISTAPLTTEETAGLRERLDTAQNESF

SEQ ID NO: 292277 - protein, 384 aa, unidentified
MNKHSMIFIGLDTHKEFHEVAYCEEQRGAAPVHYGRIPSSKVSVKKLLRQFESKYPGATLHVVYEAGPCGYWIYRLITSLGHCCYVVAPSLIPKKPGERIKTDRRDALKLVRSLKSEDLTPIYVPEPEDEAVRDLSRAREAAMKDLKEAKYQLKALLLRNNIRYEGTANWSKKHLRWLTELILPHPAQQIVLQEQLQTIEERIRRLERLDNELTHHVHQWRYYPVVKAVQAMRGVRLLVAVGVVAELGDLNRFDHPRKLMAYLGLVPSEQSSGGKRHLGAITKAGNGRARRLLIEGAHSYRYPANVSTELQLRQEGLPKDIVDIAWKAQLRLCKRYQRMSKKGKHYNLIITAIAREMAAYIWAIAKEVVLTPVNPKLRLSRVPA

SEQ ID NO: 292278 - protein, 315 aa, unidentified
MRRPDGRLLELLDYLDAALHKRSEQLRVRNTPEGHRALSAWLRKHRVKRVGIEASGGYEMNIVAHLRRDRFTVVVFQPAQVRAYAQFHLQLAKNDKLDARLIAACTSAREEEDIHDPPDERLAPLAARLTFIDQIGDDIARHKTRLETCRDARGQAHGKEEIARYKKREKAELALLEKEIRQHDDLARRLDLIESVAGIGMKTALILLVRIPEIGRLSREEVAALVGVAPYDDDSGSRHGERHIRGGRKRVRKGVYAAALPASRLHNPLLKALYDRLRAAGKCHKVALVACARKLLIFANAVVARGTPWQPQGAF

SEQ ID NO: 292279 - protein, 465 aa, unidentified
MKPHRRLPRKKPVAGPSLLERLNPNAGGIDCGADTHYVAVPPDRDATPVRAFKTFTTDLHRLADWLTACGVTTVAMESTGVYWIPLYEILEGRGFDVVLVNARHVKNVPGRKTDVVDCQWIQELHSVGLLRGSFRPTAAIAALRAYLRHRETLVQSAATHVQRMQKALVQMNLQLPIVISDITGVTGLRILRDIIGGQTDPHALAQHRDHRCQASAAAITAALTGHYRPEHVFVLQQNLALFDAFQGQLVACDAAIEVHVLTLAAQAPAPSGPLPAPRTRKKPRDNEPRFEIRTPLHQLTGVDLTRIDAIGPYSALRLLAEIGTDMSRWPTEKHFTSWLTLAPHNKISGGRLLSSKTQPSANRAAAILRMAAMNLGRTDTALGAFYRRLAYRVGKAKAITATARKLAILVYRTLREGLVYQDPGAAAYDAQHRVRVLHRLRQRAAHLGFSLLNRETGELLEGAVS

SEQ ID NO: 292280 - protein, 387 aa, unidentified
MAQVNDLSRSLTAFDPISTLVVVVEMSKASWLVSGAVPGVERQPLKKLEPDATVLLRLIERWRNEALRGGRPISRIALAYEAGRDGFWLARWLIARGIEAHVIHSASVAVSRERKRVKTDRLDAAMLMRVFLGWLRGERGHCGMVTIPTMEEEDARRPSRERESLVNERSRITNRMKSALARLGVRGFKPHLRKAPERLAGLRTAEGTGLPANIIEEFRRDMARLALVREQISSIEKTRAERLDQAPDTGPHAMVRLLARVIGIGIETADMLVREILSRKLRDRRAVARYAGLTGSPDESGSKRREKGLAKAGNARVRRGVIQLAWRFLMFQKNSALARWYRTRTEGPSGARKTTMIVALARKLLIALWRLVTTGEVPDGVELRPAA

SEQ ID NO: 292281 - protein, 343 aa, unidentified
MEQITTIGLDIAKSVFQVHGIAADGAVVVRRQLRRAQVLPFFKKHPPCLVGIEACATAHHWAREITALGHEVKLMPAKYVKAYVKRNKHDAADAEAICEAVSRPTMRFVPIKTPEQQALLMLHRTRKLLVRERIRLVNAMRAHLAEFGIVAGVGRNGVDKLLTLIEAGDDDRVPGPARDCLLALRDQLILARQQIADADKRVLACHREDELSQRLEEIPGVGPLIATALVASVPDPHVFKSARDLPAWIGLVPKEGSTGGKERPGHISKAGDKYLRSLLMIGAFSLIKRAKLGKGKHRPWLIDLMARRPIKVAAIALANKIARIAWALMTRGTRYREPLPQAA

SEQ ID NO: 292282 - protein, 451 aa, unidentified
MSKQCNKIVSPPVIESNAAGIDIGATEIFVAVPADRDPEPIRCFPTFTVDLERLADWLQQCQIRTVAMESTGVYWIPLFQILEKRKIDVRLVNAHHVKNVPGRKTDVSDCQWIQHLHSVGLLRGSFRPDDEICAIRSLWRHRDNLIQLATLHLQHMQKALDQMNLQIHHVISDLDGTTGLAIMDAILAGERDPLKLAQLRHPRIRASEETIMKSLVGDYREEHLFTLRQSLKAYRYYQELIQEVDAQVKQMMQRIPSKVAEGDEPPQGSKRRARKTPWRNEPPQLREDLYRAFGVDLTEIPGVNSLTAQMLLTEIGPNLDRFPTAAAFCSWLRLCPDPKISGGQVLSSRTRPTKNRAALALRVATQALHRSDSFLGDYFRRMKARMGVPKAMTATAHKLARIIFHMITTQQPYDTTIFQKQEERRQHQKSARLHAQARELGFQLIPINVVP

SEQ ID NO: 292283 - protein, 348 aa, unidentified
MDVIIESACGLDVHKDNITACIMTSQGKEIQTFSTKTVFLLKLLDWIKENNCTHVAMESTSVYWKPIVNLLESEGIEFLVVNAQHMKALPGRKTDVKDAEWIAQLLRHGLLKASFIPNRTQRELRELVRYRRSIIEERARQHNRIQKVLEGANIKLGSVVSDIMGVSSKDMLRAIADGEDDPEKLASFARRTMKKKKEELELALQGYVNPHQRLMLKTILKHIDFLTEQIEMLDEEIAQRVQDYEEDIVRLDSIPGIARRMAEQILAEIGTDVKSQFPTAAHLCSWAALVPGHNESAGKRKSTRSKKGNKYLRSALTEAAQSVRGSKIILVHCIDEQLDEKATKEQRL

SEQ ID NO: 292284 - protein, 421 aa, unidentified
MPNIEIGVDSMVKENFIYVGIDLHKETHTAVMIDCYNQKLGEITFPNRPADFPKLVTKVKKCNTDGKEVVYGLENAYGYGRALAVWLIDKGYLVKDVNTAISHRQAKHRGAMYRKSDSDDAEAIALATLNMLDKLPDACPNDAYWSLGQLVHRRDNIMKQRTRLVNQLHEQLCIAYPSYKQFFNDISRPTALYFWEHYPSRKYLKGKSVEDLRAELVPVSHNKCSTKTCEKILDAVASDKVKNNAYQDARDMVTLSIVSDLQHYDSQLAEVDKMLEQMYKMLGCTLTTISGVNVITAVKILAEIGDIKRFSNANKLAQFAGIAPLHLSSSGKGKDVATKQGNRRLQATIYFLAIQMVQVSSKGTPRNPVVRAYYEKRKAEGKTSQQALICISRRLISIIYGMLKNGTEYRMPVVENAGENR

SEQ ID NO: 292285 - protein, 337 aa, unidentified
MKVLKQNVGIDVSKASFSVSLIVLTDDLKSNCLFYCEFPNDLQGINSFYTWSQKHKIPDVDLHYTMEATGVYYESLAYYLYARQEQVHVLLPTRVKKFIDSLEGKSKTDKIDSALIGQMGVERNLDCFKLGSPKVRQMRKLIRERLHLVEEKTVIKNQLHAEHHSADSLLTSIERMEARIAYIEQQIKLVAQEIASLIKEDEYLYNKVDLLTSIPGIGFITATTVIAETQGFSNITSIKQLSSYAGYDVKLKESGKYIGKAKISKQGNSYIRQSLYMPAITSISYSKSMRNFYDRVNKNKASTLIGMTAVQRKLLALMYTLWKKDMKYDENYTSKVA

SEQ ID NO: 292286 - protein, 429 aa, unidentified
MARVIIGMDPHKRSATIEIIDGRERVLAQGRFGTGSDGYRAMLAAGRRYPQRVWAVEGCNGIGRHVAQRLVADGETVVDVPAKLSARARVFASGQGRKTDPVDAHSVAVVALRTTGLRQVTVDDDTVALRLMVDRRDWLGRARTDTVNRLHALLLELVPGGAKKHLSALQARTILAGVRPRDVVGRTRRQLASELITELAVIDKKIKQANAVLTELIAATGSNLQQLHGIGPSVAARLLGDIGDISRFASRNHFASWNGTAPIDASSGDQHRHRLSRAGNRRINRALHIMAVVQLRHDTEGRAYFRRKLAAGKTPMEAMRCLKRRLSDVVYRQMVSDAKVSPGGHSRATLTSSAVDPTPTVDSSDKPQPGLSDETTPPTTPPEAHPAPARTQAAKRPRTRTAKPVRPTAPTSNSPITSTHPGRRSSSKA

SEQ ID NO: 292287 - protein, 391 aa, unidentified
MIYVGIDVAKDKHDCFITNSDGEVLFKSFTISNNRDGFETLFQRIESVSDDLNKVKVGLEATGHYSYNLLGFLLDKGLTTFVINPLHTNLYRKSLSLRKTKTDKVDSRTIATMMMSDMNLKSYSDTSYHNEDLKSLTRYRFDKVKERAKLKSSVSRLVCILFPELEKLVPTLHIASVYAMLSEFPGAKQVANAHLTRFTNLLSEASKGRYGKETAIAFRDAARTSIGSNMPAKSLELKHTIKLIQELTSEIDEIEHEIKLIMDELNSPILSIPGINYRMGAMIIAEIGDFTRFDSPDKILAYAGFSPSTYQSGQLDGAYSHIEKRGSRYLRYALYNAAKYVCIWDPTFAEYLAKKRSEGKHYTVAISHAVKKLVRVIYHLEKTNQQYIKAA

SEQ ID NO: 292288 - protein, 343 aa, unidentified
MQSISTIGLDIAKSVFQVHGVDAVGQVVLRRQLKRRYVLAFFQRLPPCLVGIEACASSHHWSRELQELGHTVQLMPPAYVKPYVKRQKNDTTDAEAICEAVTRPNMRFVPTKTVEQQSCLMLHRARHLFIRQQTAVINSIRAYLAEFGIVAPVGRRGVEQLLEVVADTADRRLPEVARACLAALGGQLRALKAQILEFDRRIMAWHRSNATSRRLDAIPGVGPALATALVASLADPRAFRSGRDFSAWVGLVPKQNSSGGKDKLGSISKQGDRYLRSLFTAGALAVIRYAKIHGTGHRPWLTGLLARRPTKVVAIALANKLARMAWAMMARNERYKEPAALAA

SEQ ID NO: 292289 - protein, 389 aa, unidentified
MEARTVNNLPPAGAHDDAVRCVLAIELSKKSWIVAINTPLSEKISRHTLKPCDGKELLDLCERIRRRVAREMKKRVEIVSCYEAGYDGFWLHRLLETHGIRNYVIDPASLQVDRRARRAKTDRVDVERLLRSLMAYLRGEPKVWSVVRVPSVAEEDDRRLHRERSRLINERIQHVNRIKGLLAIHGIYNYQPLHRDRMQQLERLRTADGRTLPPRLKAEILRELKRLELIIGMIKTIETERDAIASAKTETEHTSAKKVQDLAKIKCIGPEFATTLVGEVFYRSFDNRKQLASYVGLTPAHFQSGSMCHDQGISKAGNAKARTVMIELAWMWLRYQPDSPLSVWFRDRVGKLKGRIRRITIVAVARKLLIALWRYLETGLVPESAALKV

SEQ ID NO: 292290 - protein, 403 aa, unidentified
MNNVVGIDVSKGKSMVSVLRPFGEVVAKPFSVGHTGSELKELADYLKSLDGETRVVMEHTGRYYEPVARFLHDEGVFVSAVNPKLIKDYGNNTLRKVKTDKADSRKIARYGLDNWAELRQHTPMDTIRMQLKTLNRQQSLYSKTKTMMKNNLIALLDQTYPGVNALFDSPVREDGSQKWVDFATTFWHVDCVRNMSLTAFAERYRKWCKRHGYNFSQSKAVEVHAGAQDLIAMLPRDALTKTMVRQAIDALNAISTSLERLKAEMQALAAQLPEYPVVMAMHGVGDSLGPQLMAELGDVTRFTHRNAITAFAGVDPGADQSGTHEAKSTRVSKSGPPELRRALFLVMDCLLKTMPQDDPVYRFMDKKRAEGKPYLVYMTAGANKFLRIYYGRVKEYLAQLENS

SEQ ID NO: 292291 - protein, 451 aa, unidentified
MNGRKETVKKGLEPMQVVYPHAAGLDIGSSEIMVAIPPDREGETVRGFGTYTPDLKQLADWLAANEVTHVAMESTGVYWIPIYELLEERGFEVIVVNARHIKNPPGRKSDVKDCQWIQRLHSYGMLSGSFRPGANMCILRAYLRHRDNLIEDRAKHIQYMQKALVQMNLQLGQVLSDLTGKTGLDILHAIAAGENNPVVLAQLRRGTCQHTQDDLVKALTGHYRKEHLFVLKQALAMYDTFSQRLQECDQEIEVLLEEIQPELPDDFPPLPPDPKPNSHCKNAPSYDARASMYALAGVDLISIPGMNENLLQKILSEVGTDMSRFETEKHFCSWLGLAPHNAISGGRVLYSHTLKNHNRAGQAFRMAAQAVSRGKSVYSEFYRHVRARSGSKEAIVATAHKIARTFYFMLKRRQPFIQPDLQNFLKLQREKDILRLQSKAAKLGFSLQPAP

SEQ ID NO: 292292 - protein, 414 aa, unidentified
MLKIVYRVCCGMDVHKSFVVACIASTNEQGVTSYKSKRFSTFTGDLRRCAVWLSENNCKDVCMESTGKYWIPIYNILEHTCNIVLAHPKYVKAIRGKKTDKRDAKWIADIFKHDLVSGSFIPTADIRQLRDLVRYRWKLTNFTAGEKNRAQNCLTVSNFKLDDVFSDVFGKAASAITAKILENPAEKITDVSCFRTKGMKATNDQVLAAVDGEMCVEQAEKLRIIRSHMDSLNLCKANLESLILETAEKYLPQLNLVMTVPGIRSFAAIGIISEIGVDMSVFPTSKHLCSWAGLTPQNNESAGKKKTTRISRAGVYIKPLLVQCALCAIRAKQFPEVRNRYLALKKRRGHKKAIIAIARMLLTAIYNILKKNEPYNPELYRKADPLPAHREVSVEEAVYILQRQGYLVTTPTTT

SEQ ID NO: 292293 - protein, 353 aa, unidentified
MQCIAFDSHKHYTWALVETEKGKMLREQRIDHVRGAIQGFLEEFEPGSPVAVETIGNWYWITDEIEAAGMVPQLVNARKAKLMSGSINKTDGLDAKGINRLQRSGTLPTVWIPPRELRDARELPRTRMVLVRQRTKLKNRIHANLAKYGLKTGGVTDLFGVRGRRILSRCLEELPSETRYATQSLLEELDHLQAKVKDLEGRMTDLFGEIQALELIKTLPGAAFILGVVILTEVGDVERFPSASHLASYAGMTPRVHASGGHVRYGRTRPDVNRYLKWAYAEAANVTMMHRRRHPQRHVSRLYERVKHRGGHQKAIGAVGRHLAEATYWMLKRKEPYRDPATDRAEVESKREA

SEQ ID NO: 292294 - protein, 336 aa, unidentified
MEDYRWFMGIDVSKSKLDITLLEGSDKRHYSVIENNEKSIKLFIKELTTITGFSLEKCLVCMEHTGIYNAHLLSISKAQAWNLCLESAIQIKQSGGLQRGKNDTIDSYRIALYAYKNKSFLKLWEAPREVILKLKKLSGVRERLLHAKIQLERTLKEDKDFQSSHLNSFLGKCCAKSIKAIVKDIKRTEEQIQLVIDADDELSRLFSIVESVPGVGRISATEIVITTNEFKNIHDARKYACYAGVAPFEHSSGSSVRGKTRISKKANLRVKSRLHMAALVAAVHCEELRLYYQRKVAEGKNKMCVLNAVRNKLVHRIFACVKENRLYEKNFAPKLV

SEQ ID NO: 292295 - protein, 412 aa, unidentified
MEIYCGIDWAEDHHDVALAGRDGKLLARRRISDDAAGLAALLGLLAEYGDTPEDPVPVAIETPRGLLTACLRAAGRPVYPVNPMAVARYRDRHSVAGKKSDHGDSVVLAGVLRTDLGMHRPLPADSELAQAIAVLARAQQDAVWDRTQAHNKLRSHLREYYPGFLAAFADARGGIMRPEARAILAAAPTPAGAAQLTVPQLRALLRKAGRRNRIDAEAARLHEVFRAPQMRQPPLVEDAMGRQALALLRQLDAACAAAADLEQAVTESFNLHPDAGIITSFPGLGALTGARVLAEIGDDRSRFSDAKGLKAYAGAAPITRASGKTRSVTCRKIKNNRLAAAGYSWAFSALTASPGARAHYDRRKDAGDRHAAAQRNLFGRLLGCLHHCLTTGCEYNETTAFPAAPEKLPRAA

SEQ ID NO: 292296 - protein, 342 aa, unidentified
MRVVGIDTHKASLAACLIDDVGLVVAEATFPNAPAGFAVLLGWIRELGGVERIGLEGSAGYGAAAARCLLAAGETALEVPPQLSHRERLRTRRAGKSDPGDALAIARVTQREADLPPVRLPDAARETGLLGEARDDLVAEATRTRNRLHADLVVLVPGYGAAAANLVAAVHRKSAGRLLRRLPGVHAELARDRLTRLERLSAEVRALERRIEELVADHPLRSLPGAGALVTAKLIGEVGHVRRFRSADAFAMLAGVAPIPASSGQVSRMRLNRGGHRQLNRALYSIAFAQVRTYPPAQVFVAKKRAEGKSWREAIRALKRHLARNVFRLLSQPLSQPLSVEA

SEQ ID NO: 292297 - protein, 357 aa, unidentified
MQENVAWLGLDAHARFSLLAWLDDQGNRRQHWRFPTTESQLIQHLQRIPAPVKHLALEECGLGRWLAQVARPHVTDAIVCDPRENHRISRHHHKCDEEDGYTLAHLHRLGALKRVWQPTSDARAVFKCAVQAYLDAVARQTALKLQLKAHYRQWGVIPTGSLVYGRTGRDKYLALVQEPGVRAQLQLLYEMLDAALEVERKTRRLMIQLGQPFPEIARLQTVPGVGRLGAHLFVAYIQAPTRFATAQQLYRYCRLGIRDRSSDGKPLGYQQLDRTGHGALKALSYRAWLLAMKQRAGAVYEFYEHSLTRTGSALHARLNTQRKILNTLWVLWRAGREFEPQRFLGNEPQPTAKTMCG

SEQ ID NO: 292298 - protein, 322 aa, unidentified
MLGPVLGVDIAKKKFDAALLVNDKLKHKVFKNDQEGFGELSLWLKKQGIDHIHVCMEASSTYGDELATGLHDQGHVVSIVNPARIKGFAQSELLRTKNDRVDAALIARFCLAMHPEPWTPVPPGMRRLQALVRRIDALIVMKTQEMNRIDVTHEDIKSSVRDHIAYLDQEIESLKGQIASHIKDDPELKTKRDLLKSIPGIGEATIAAILAELHMFEKCDRVQKIVAFIGLAPRELVSGSSVRGKPRICKMGNSRIRKALFMPALVSIQYNPVIRAVYERLKKNGKNGKVIVCAVMRKLVHIIFGILKSGKPFDPNFRQNYA

SEQ ID NO: 292299 - protein, 425 aa, unidentified
MKKTDYLSTLFVGIDIGSRTNVVSAIDFNREYFIRMKPVPNAKEGAEILESLLVDVLSAHHEFKHVIIGMESTGFYGVHIANYLSASDMLSPFGTEVYCLNPKEVAKYKESFNSINKNDGIDSFVIADFARVGRITIKPWRGAQYLALQRLTRHRLHIAECIAREKTYVLNNIFLKFSEFAMLKSEDHPFSNKYGATAEAIIEQYVTNDDIIRASIDELVELIESKSHGRITDPEETAKLLQSAAQGSYRLDKVVAKPITLSISSSFNCIRAFEKELKAIEKAIEQTVQGINPLEYQVLKSIPGIGPTYAAGILAEIGTIKAFPNNDALAKYSGIIWKENQSGNFRAEDTKMSKAGNRYLRYYIIEATGSVINHCPEYKAFYGKKFAETTTHQHKRALALTSRKFLRMLFGLLDKTQLYSLEKSR

SEQ ID NO: 292300 - protein, 352 aa, unidentified
MTVYIGVDLHVRTQTVCWVDTADGELHEVTLDHERNDVRAFYAQFAAPAVVGVEASGYSLWFHRLLEELGHHLLVGDVLAIRQCARRRQKNDRRDARLLLDLLLHQEFPAIHIPAPASREVLALLHYRHRLVRIRTMLRNGLQAVALSHRLRLGPKLFTAGGLQQFAALPLTGAFAVQRQHSLALLASLAEQVLAVEAQLADRAQQDPRVLRLRTHPGVGLLTSLAVVHTLEPVSRFDRARRVAAYCGLDPKERSSGDTQRWGHISKQGNRLLRFLLIEAAHNALRGDDDLGRFFFHLQARKNASIAIVAVARKLVLRLYRMLRDEIDYTQFRRRGRDARRAREDTSQAASG

SEQ ID NO: 292301 - protein, 402 aa, unidentified
MSYYVGCDWASTAHQICVINAHGQIVWQNEVPHTAEGCAALRRRLQRFGAPADVPVAIERPSGLIVDLLLEWGHPVVPIQPNALKASRSRYRISGAKSDASDAFILADLLRTDGHRFRAMNPVADETRALRTLVRTRDDLVATRIGLANQLRAVLEGFWPGAAQVFADIDSPIALAFLERYPTPEGAEHLGEKRLAAFLGRNSYCGRRTARELLERLRRAPTVIVGEANTEASGEVVRALVTVLVDLVAQIQKLTSAIAQAMRVHPDGAIVMSFPRAGCTNAAQILAELGQERLRFPSVERLAAEAGVVPVTVESGKHRGVTFRWACNKRLRRAITIFADNSRRASPWAAQIYQRAQARGCDHPHAIRILARAWLRVLWRCWQSSAPYEVSNHGSAQRLSVA

SEQ ID NO: 292302 - protein, 403 aa, unidentified
MRPVPQGWAGVDVGKGHHWVCLIAEDGTSLWSSKVINDETAILEAIGEVSSRAEQVTWAVDVTGTMSGLLLALLAAHDETVKYVPGRVANKMADTYRGEAKTDARDAYVIAETVRQRGDLTEVEVAATLVTELRLLVTHRTDLVADRVRLINRLRDVLSGYFPALERAFDYAHSRGALVLLTGYQTPAAIRRIGQSRLQSWLVKRKVRSGDQVAAAAVAAAATQHTVVPGQDVAATIVADLATQLLAIDERIKDLDQRVTTTFRAHPQAAIIESLPGMGPILGAELIAAAGDLNGYANAGRLASAAGLVPVPKDSGRRTGNLHRPVRYSRKLRRVFYLSAQSAMMREGPNRDYYLKKRSEGDKHVQALIALSRRRVDVLWALLRDNRPFELTPPARKQLPRTA

SEQ ID NO: 292303 - protein, 320 aa, unidentified
MESVHLYRSALGIDVCAQRLDWHRLPESSSGAFANTPAGIRELVAEVKKAGVDIVVIEATGGLQRQAASALAAAGSAVAVVNPRQVRDFARASGQLAKTDQIDAKVLALFGLRLQPQPRTLPDAAALALADQLARRGQLVAMRVAEKNRQHRASPAMQKLISRHLVFLDKAIKALDVNLDDTLRGSPAWADKVQLIEAVTGVGPQTVRRLLIELPELGKLGRHGIAKLVGVAPLNRDSGMMKGKRMIWGGRVNVRNTLYMAALSASRFNAPLKAFFERLRAAGKPHKVALVAVARKLLTILNAMLRDGSAWNPKLVEKRA

SEQ ID NO: 292304 - protein, 408 aa, unidentified
MEVVVVVGAGLDVHKKKIVVCCLDGRSSPPAVVTCTFGTFQDELERMRKWLLARECTHVAMESTGVYWMPVHQALEGHFEIVLGNPRHMANVPGRKTDVSDAHWIAKLLRHGLIQPNFVPPREIRDLRQATRYRRKLMQTRTACLLRVEKLLQCANIKLSSVASNIFGVSGRLMLDKLSDNITDPRELSELAKGTLRGKRGALMRAFRGSFSKDDASLLRVELKVIADLEARLEGLEKLIDRKIGPLEDVIERLDTIPGVNRVLAIDLIAEIGTDMTAWPSDRQFAAWTGTCPGNRESAGVRQKAKTREGNPYVKTILIQAAVCARQTIGSHLSARFHRLAARRGPRRAAVAVAREIAVAAYHMISKQVPYTPPRTADPAVAREQRSRQLIRDLTKLGYEVNCNPVKT

SEQ ID NO: 292305 - protein, 413 aa, unidentified
MDLMVERCAGVDIGKDEVVACVRTPDPAGKGRRKETRTFSSFTSQLEAMADWFSAEGVTEVVMEATGSYWKSPWYVLEERGFDLKLVNARHVKILPGRKTDVADAEWLAELLEHGLLRGSFVPPVAIRELRDLTRYRKRMIQAHTSECQRIQKTLEDAGIKLDSVASDVLGVSSRLMLQALVAGQRDPDVLAELAKGVLRKKIPELREALRGRFRDHHALLIRLCLDHTAHLEAAIAALDERVDAVIAPFVEARDHLDTITGVGKRAAECIIAEIGVDMTVFPTAGHLASWAGRCPGNNITGGKRHSGKTNKGNVWLADILNQCAWSAARSRNTYLSAQYWRLARRIGKKKAAVAVGHSILVISWHLLTNNADYDDLGGDYFARRGNTARHQDRLVQQLQDLGYQVTLKKIAA

SEQ ID NO: 292306 - protein, 401 aa, unidentified
MKYVLVLDVAKSKSMFMLSSDVGEVLLEPTEYIHNKSDFERIDSYISKLNIKDNLTVIMEATSIYHKAPERFFKENNYHVIVFNPLIGKEITNTIRKTKTDKQDCIKLTNLFWKGSIPDRNYTEDEIYTKLNELSRQYYHLDEGLTRHKNRYKELLHLCFPEFELCFKDGKIYDLTALNFIKEFPHAYIIKDKRVDALAYNMANTNDRHLNYYKRKANIIKEYAINSYPGVSVNSKDVDNLKQLANIIIEIAKQKEIIKEQMIELAKQTKNFECINSLFGIGELSASLIIAELKDITRFNNIKQINASCGLDPTIVQSGKSINYYGPISKRGNRYARKILFNCSRNIVTLSAKCDKENPIYVYYQKKKQEGKHYYACLTACSTKLIRIIYALCMNNSTQQN

SEQ ID NO: 292307 - protein, 399 aa, unidentified
MSKSSSLELYVSVDVGCHRHQIAMGLSNGKFLEAFEIAHQPAGFREFFSRVETQEARYGCPVSVAMEAYNGYARPLDSLVLLHEYRLYNINNLKFARFKEIFPGAAKTDALDARKGLELFQLRDHLPLAKQVLQEVGMTPEENRVLKRLTRRRRRLVNEKTRVLNNLQADLQAVCPNLLAITNEAENLWFLRFLTSTDRLSKLARVHRKTLLKIPGIGVKYADTIQSWQKEAQWSSEVEWVGEMIQEDAARVLELHEKIKALEAKMAKVSERSTMARLLDSIPGFGLICASELAGEIGTLERFQSEASLSLYFGMAHLDNSSGKKTGSKPSKHLNIRAKAAMLIAVDRHRKQVPASQRYYEKKRAEGKGHNPAIRALGRHLCRIIYKMLKEERPYQIRE

SEQ ID NO: 292308 - protein, 431 aa, unidentified
MNRSVEFLSVGIDVGADFSLMAFALPSQELLGKPYKIIHSSQRSLNGAVEKIKTLSQKYQLPARVFMESTGIYHYPLYHKMKDAGFDVFVLNPLVTHAGRDLNVRNIHNDKYDSQKIALLGLRPGLKTSLIPSDQVISMKVILREYYAVKKEISMYICRLKNQLRQAFPQFLPLFSKVNGVTAMAILCEYPNPESLLNAGEHAVADFMKSVSHNGPLKVQKKAAALIQAAQDARSFGHWNHGISILIRHYIEMIRLLDVRAKTLLAQAKTLLAEQDSKTLAHQTELLQTIPGIGFLSALTLICELGDFSAFKRPKQLFSYFGLDPIVRQSGNYNGTNLKLSKRGSPFARRCIFVIALQSISLNIHKEPKNPVLRTFYEEKCMCKAKMTAIGAVMHKICNLIFAVLRNDAPFVLQTPEQHNAAYLSKTHSVA

SEQ ID NO: 292309 - protein, 398 aa, unidentified
MLYSRNNLTLLYLFEFEQNVRNLAWLGIQNIQPGDKTKGDFSLFHFKLISIKKIVKQVAGIDVAQKELVVCLGRMYDDWTPELHASKTFLNTAKGIASFVEWAEKLTDASMPIRFVMEATGVYHESLAYYLDDHGLEVSIITPNKISNYARTLDVKTVTDKTASEAITLFGLERNLEKWKRPNSLFKRLRQLTRERDQLVQLRTIAKNQLHAELVEAEPNSSSVARMKKQIAFFNKQELEISSEIVELSKQDEKVSGAIKIICSLPGVGMLTAVTVLAETNGFELIRNKRQLTSYAGLDVKEKQSGTSVKGKPRISKQGNKYLRKAMHLPALTAIRLDERHKAIFARLVSRHGIKMKAVVAVERKLLEMIYTLYKTNKQYDKEYLKKTEVNFKEEVTV

SEQ ID NO: 292310 - protein, 379 aa, unidentified
MSKGITWVGIDDHKLRLTVAVLKGSRRQEPETQSVENEDRSLRRWLRKLAQEANGGEIRMCYEAGPNGFALKRRLEAMGPVVVEVVAPTLTPRRVGRRVKTDPIDARKLAQLFRSGELVVVAIPSEGDEAARDLVRTYHRVVAEATRKRHHILKFLIRRGRIYREGAQWTQKHRVWLQHQVWEDWKDELSLLELLTGLRELEARQTRLQEAMERLAAEDGHALAVGVLRCFHGIDTAAALTLETEIFDVNRFRHPRDLMGYLGLTPSVYQSADKEHRGPITKAGNRYARWVLGQVAWHYRHQPLPGAQLKKRRRGQPAWAVAIADRAHHRLHRRYWTLVHRGKPVQKVVTAIARELVSFVWEALQEAEVRKRPRAEQAA

SEQ ID NO: 292311 - protein, 465 aa, unidentified
MRKPEEILDADHELVIERVCAIDVAKASGMVCTRLPHETKAGRRVSRVLGVAATTRAVIELADHLVAVGIEKVTVESTSDYWRIWFYLLETRGLDVQLVNARDVKNLPGRPKTDKLDAVWLAKLTEKGLLRPSFVPSAEIRQLRDYTRLRVDLTRERTRHWQRLEKLLEDALIKVSSVASKMDTLSVRDMLEALIGGERDPRRLARLARGRLKSKHDALVEALSGQFDEHHAELARMLLDQIDGLSAQIEQLTTRAEQLLQSIPAAQAADQQERGGAHPTGAGGRPEPNTPPEDTVARRTHTGLTASERLDEISGIGPLAAQVIIAEIGLEMSRFLTPGHLVSWTKLCPRTIQSGAKQRGGATGKGNPYLKGVLGEAAAAAAKTNTFLGERYRRLVKRRGKLKALVAVARSILVIVWHLLSDPTARFHDLGPDYHTHRFDTTRKIRNHISQLTALGFRVTLEPAA

SEQ ID NO: 292312 - protein, 375 aa, unidentified
MSSTTVHASQSVLRGVPDGAIVGVDLAKSVFQLCVADASWRVTETRRLSRIQFERFFVNRAVALVVMEACGTSHHWARWMQGLGIEVILIPAQYVRAYVRRNKTDAADAAALLEAARCSDIRPVRVKSVEQQALQSMHRTRSAWVATRTARINTLRGFCREFGLCFALGSGRAVDKIAQAVADPETGLPGMLRGSMRLLIDEIRQLEARIAQMERELTDLARNSPACVTLLSIPGIGLITATAMVAATGGDVTHFTSARHFGSWIGLTPRESSSANTRHLSGISKRGDRYLRVLLTHCARSVLRTASMAVTAGRPLDRIRSWAMSLQARSNHNKAACALANKLARICYATLRDHASYAAAGLPAAHSTESMTAAA

SEQ ID NO: 292313 - protein, 360 aa, unidentified
MAKAKTLVGLDVHATKIVAAVLDAETGQLQTFAMSGENAAAAGFCAGLPGPVRVAYEAGPTGYGLARELAKRGVECVVAAPSKIPRASGDRVKTDRRDAEHLVRLLLAGKLHPVRVPGDEEEALRDLVRARDAVRMDLMRCRHRLSKLLLRHGIRFDDGQAWTQRHRDWLATVTLDWPAAQATLLDARGAIDALAHRRDGLEREIVALLSSSPWVVQVGRLRCLRGVDTLTAVGLCAEIGDFERFARAEQLMSYVGLVPCESTTGQQRRLGSITKTGSGHARRLLVEAAWHYRPRPRIGKALTDRQSGQPAEAIAVAWSAQQRLHRTWARLEQRAKRRTIIAVAAARELAGFAWAVTQIE

SEQ ID NO: 292314 - protein, 389 aa, unidentified
MSLDHPCEGPTAIRTNLGAIFVSLELSRSTWLITSLSPGGGEKMSKHSVSAGDIAALLARFSELMKKAFARTGRTFPIIVIQEAGLDGFWVHRLLHNEGIESYVVDPASIATSRRRRRAKTDKIDGEALVRALLAYKRGEPRVCAMARAPTPEQEDSRRLCRERKTLTVERVQHVSRIKGLLFSQGVSDYEPLRCNRRQRLDELKTGDGRCLPQHLKAQISRELDRLELLLEQIKAVETERDALISPKAKTEQSRAPQAMLISLKGIGPEFAAVLWSEGLYRSFSNRKQVAAYAGLAPTPWQSGSVDREQGVSKAGNPRLRTTLIQLAWLWLRHQPQSALALWFKERVRRNGGRLKKTTIVALARKLLVALWKYVTAGVVIDGAVMKGA

SEQ ID NO: 292315 - protein, 371 aa, unidentified
MDVHTTNYTLCAMEDKFGEDGQIIAQVTVAPDHKLILNFIRRIKEKMDPQGKDEIDVECGYEAGCLGYSLYHLLTACKVKCKILAPTTMLAEKGPRIKTDKRDAKLIADCLAHGGYHAVHIPTKEDNAIKEYIRMRDDHLLMLKQTKQRMNALCIRHGYIYEGTKWTVPHMKWLQQLQLDPIVREGMDEYITTYGELMAKIERYDKRIQELANQAEYRERVKKLECFLGIRTHTALSLIVETGDFSRFRKGNVYAAYLGLVPGEHSSAESGGHLGITKAGNSHLRKLLIEASGGICKGSIGYKSKDLKARQAGNPADVIAYADKANTRLRSKYYRLTRHGKKRNVAIAAIARELACFVWGMMTDNIHGNAA

SEQ ID NO: 292316 - protein, 380 aa, unidentified
MAEITRGLIARVGVDLAKLVIQVHAVDTAGHRLVARAFKRDQFLAWCAQLPAGCVVAMEACSSAHHWGRKLTALGLQPKLIAASFVSPYRMEGRSGKNDMTDAAAICEAASRPTMRFVPIKSCEQQGVMSLHRFREGYKEERTACINRIRGVLAEHGLVFGKSPKVLRAALADVIEDASNELSGRARLVVQRAFEHWRELDEHMGWSDGQVGQHVRGSPQAKRAAKVMGIGELGASALVGGVGEFKQFKSGHQFGAWLGLVPSQNSSGGKASLGRITKRGDDYLRTLLIQGAKSAVMSAGKRDDPISKWLQQLVLRVGWQKACVAMANKNARILWAVMTREAAFDAEHVSVKPAGKCKAPSAPTKPIPTVKSAQVAVCMA

SEQ ID NO: 292317 - protein, 343 aa, unidentified
MYYIGLDVHKKTISYCVKDAAGCVLREGKIGSTRRELDGWIKTLPQPRTIAMEATIFTGWIYDHLLPHADKVKVAHPLMLRAIAAAKKKNDRIDAAKIADCLRCDFLPECHMASTAIRDRRRTLRYRNLLVKQKVQIMNRVSGLLMETGVSYKKRRLHKVGYFADLMATNEEISDCVRPLLRLSREHIDRAQRLDYALVSSLERDPLLAERLRRLRTVPGVGPITALTWALEIGDFTRFRSVKEAISYCGLCGDESSSADKVMRMPLSKQRNKHIQRVLVEAAKLAPRQCHELAVVRERELQRGNPNRATLAVARKMVCYLLAVERRQRDFVPAEEFTRTAAA

SEQ ID NO: 292318 - protein, 375 aa, unidentified
MSTNLRYLGLDVHADTIAVAMAEPSGAVRNLGVIPNRPEAVAKLIRKLRGREQLRACYEAGPCGYVLYWQLTTLGVACDVVAPTLVPTKPGDRVKTDRRDAETLARCHRAGDLTRVWVPDAAHEALRDLVRAREAAQQDQLRARHRLGKLLLRHGIRPPPGAQPWSQRHRRWLDTLPLDPPALQATMDDYLHEVDHAAARLERLEGTLDAAVAAAPAPLRAVIAALQTLRGVRQVTAATIVREVGLLSRFTHPRQLMGYSGTVPAEHSSGARVQRGAITKTGNAHLRRVLVEAAWAYRFPPKCGKALRTRQRGQPDAITAIAWKAQHRLSTRYRRLLGRGKPTPQVVTAVARELVGFIWAIGIAAERAGTAAAAA

SEQ ID NO: 292319 - protein, 379 aa, unidentified
MNPATVGLDLAKNVFHVHVVDASGRTIDSKRLTRRDLLPYFKALPLCLIGIEACATAHNWARQLQGLGHDVRLIPPSYVKPFVRRGAKNDATDAAAICEAVTRPNIRFVPIKSRDDQAFLMLHRARGLLVRQRTMAACALRAHLAEYGIIVAQGIHRVDALIAKLDEIRADLPYDASFALDALVGQLDTLNRQIDRIDVRLAEIHKTNAICRLLATIPGIGPITATAFAATVPDPSTFRSGREFAAWLGLTPRQNSSGGKHRLGGITKQGDRYLRHLLVLGARTVVRYPKARSRVDGPWIEALLERRRPMKALSSGAITPLAVPLGGRSGSVSEPVKFTRFDAGGSTTVEIVLGDVVMRVNGAIDPDQLAGLISAVRKA

SEQ ID NO: 292320 - protein, 411 aa, unidentified
MTKEDFIYVGIDLHKETHTAVMIDCYNNKLGEITFPNRPADFPKLVTKVKKCNTDAKEVVYGLENAYGYGRALAVWLIDKGYLVKDVNTAISHRQAKHRGAMYRKSDSDDAEAIALATLNMLDKLPDACPNDAYWSLGQLVHRRDNIMKQRTRLVNQLHEQLCIAYPSYKSFFNDISRPTALYFWEHYPSKKYLKGKSVEDLREELVPVSHNKCSTKTCQAILDAVAGDKVKNIDYQDARDMVTLSIVSDLQHYGSQLTEVDKMLEQMYKMLGCTLTTIPGVNVITAVKILAETGDIKRFSNANKLAQFAGIAPLHLSSSGKGKDVATKQGNRRLQATIYFLAIQMVQLSSKGTPRNPVVRAYYEKRKAEGKTSQQALICISRRLISIIYGMLKNGTEYRMPVVENAGENR

SEQ ID NO: 292321 - protein, 405 aa, unidentified
MDVLYSHCCGLDIHKKKIVACAITPEGKHMRTFGTMTEQLHELAEWIINLKCTHVAMESTGSYWKPIINVLELTDLTVLVVNASHIKALAGRKTDMKDAEWIATLLRHGLLKGSFIPNRQQREDRELARFRESLVGERTRAVNRLQKVLEGGNIKLSSVASNVVGKSCRAVLNALIHGAKDPEKLALLTEGRLQAPIDEIKQALNGAVGPHQLLMLDTLLRQIDFLNCEIQKLNEEMAKRLAPFEEDLVRLDTIPGVGRHTAELIITEGGADMSIFPSDAHYVSWAGFAPGQHESAGKSKKVRTRKGSKRLRSGLVRAARSAARKKNCYLSSCYNRLCGRMDKNKAAMAIARKIMIAAYHILKDKVPYRELGPDYYDEQMKERYLKQSIKRLESLGYKVSIEKSA

SEQ ID NO: 292322 - protein, 365 aa, unidentified
MNNAHNAAIGLDVSDRKTQVCVMAKDGKSPKIVMETTIPTTREGLAKFLSTQDRSTPVAFETGTHCRWMDEVAQELGFKTYVANPCRLRMITESKTKNDVNDARMLARLALLDPELLHPVKLRGPEHQKMINLHEARNLAVKQRTEAIVQLRAMAKSMGFRIAKCQAAGFHNLDRRAWPEAFRDIAWPMLKNLEQLAITIKTYEKQIRELAETPTFKAQVERLREIHYVGLYVATGFVAATGGDMDRFEKPRDVGPWLGITPKQDQSGDVDRQCHITKAGSPFMRRLLVESAQMILRDGAVDTDLKVKGLRICARGAKIAKRKAVTAVARALAVLMVAMLKKPDAPYVPLSERSEKELVAMRTST

SEQ ID NO: 292323 - protein, 405 aa, unidentified
MSVDWGNSSHAACVVDGNGKELCCFQVDHTDKGLEEIVAAFKKDGPVLGVAVETNHGLLVHKLLEAGMTVYAINPKLSDQWRKGVSVSEAKSDRSDALVLAQGLRLMHDDLRPLELDDPLTRELAMLCRAESSFIHARTSLVLHLQATLKEYYPQALEWFNDWTRPAAWDFVRQFPTPAELQQATRKKLIGFLQTHHLGLRPKWKQKVDGHDRPTAWPSDEPTTLVRSMEAVGLANQLKAVNETLKKHRTRIEQLFSQHPDAHIFDSLPGAGPKLAPRLLAYFGSRRDRYESAQALQQLSGCAPVTRQSGRYRQVRIRRACQAHFRDAMHMFAMTSMRDSPWARAFYDRAKQAGDHHALALRKLAAKWIKIIFRMWQHNSTYDERKYVDSMSRHGSPLVEYMKCA

SEQ ID NO: 292324 - protein, 417 aa, unidentified
MPTGDYDFFVGVDWGSARHQVCVLDPARQVHGERAVEHSGPGLAALADWLVAVAPGAPARIAVALEMPRGAIVDLLRARGLHVFAINPKQLDRFRDRHSVAGAKDDRRDAFVAADALRTDRWAFRRLEPDHPLILQLREGTRLDQEMRQELTRLANRLRDQVLRFYPPRLRLVPAADEPWLWAVLALAPTPAAGAHVPRARLTRLRQTHRIRRLSTEDVRGALRAPALPVTPGTVEAAASHVALLLPRLQLVHAQRAQGTRRIDALLAAYLAEAPTAGPPRAHHDVAILQSLPGVGRLVVATLLAEAAPLLAARAYPALRAQAGIAPVTRQSGKHRSVLMRYGCNHRLQQAVYHWARVSTQCDAHRRAHYTALRQRGHSHPRAVRGVADRLLALLIAMLKSDTLYDPARPRRREMAA

SEQ ID NO: 292325 - protein, 325 aa, unidentified
MFYLGIDVSKAKLDCALRNADSGKVKTKVMPNTAEGFQKLLDWLKKNDAPSPHIIMEPTGVYHELAAFFFVDAGLTISLVNPVQLRKYAGGINVKTKTDKMDSQVLARFGAEQKPAPWEPPSAAARTLKALLARRDAVADDLLREKNRQEKLEATETPQLVTESVEGSIKFIEAELKRLQKCIDDLIDNDPDMRGKRELLNSIPGVGERVSNHMTYLLAGRDFKSGEQLAAYLGLIPVSWESGTSVRVPPHMSKAGPAHLRKLLYMPAIVAVKRNPHIKALYERLLERGKSKMSAIGAAMRKLAHLCFGVVKTGRAYDKNFAIQA

SEQ ID NO: 292326 - protein, 428 aa, unidentified
MDVIHERVAGIDISKSDIKVCVRIPAPAGKKNTRAFSHEVRTFPTTHSGLTAAAEWVGSAGVSVVAMESTGQYWKPVFYTFEALLGTAGVKVWLVNPFHIKKVPGRKSDVTDAVWIAQVTACGLINPSFVPDPITRQARMLSRAREGLVVDRTRVKQRIHDLLTEAGFRLSSVATDIFGISGRAMLAAVINGEADPVALAGLARGKLAAKTDGLIEAMTTFAGAFDETTRFLLKTQLERLDAITADIAKIDAQLEVVQAPFRCTIARVITLPGAGVISVRAVLAETGADMAAFESAEALCSWAGVCPGNTQSGDRRGNGATRPGNPHLKRALHQIAEAAVRVKDSYYQGLYQRLKARMDREKALMVIMHKILTAIWHMVRREQEFNPTQVQARPMDAKAKARAAQRLTKKLEGLGFHVALTDAEAQAA

SEQ ID NO: 292327 - protein, 370 aa, unidentified
MNDLIRIGIDTSKSVFVLHGVDAAEQAVLRRKLRRRQMHEFFAKLPPVQIGIEACGAAHYWARELMALGHEVRLLPPQYVKPYVQRGKNDAADASAICEAMSRPRMRFVPVKTAEQQAALMLVGVRDQLIARRTQLSNMIRGYAAEFGVAAAKGLDKIEPLLARIAGEPGVPEQAKPLFAVLGEEFAALKSKLRKIEADLLAWHRGNELSRRLAEVPSIGPIGSVLLVMKVTSPRDFRCGRDLAAWIGLTPKDHSTAGKQRLGVITRAGDETLRRVLIVGATSVIQQARRGRGNPSPWLINLMRRKPPKLVAVALANKTARIAWKLMVSGERYNRQHARSGFVPPTGSLAADARRQGRVAPPAAVACGQP

SEQ ID NO: 292328 - protein, 346 aa, unidentified
MTIVEAERSVTGGVDTHLDVHVAAALDGLGGLLGVESFATSPAGYRRLLEWMSSFGTVGRVGVEGTGAYGAGLVRYLHRWGIEVIEVDRANRQARRQAGKSDPADAVEAARAAQSGRARGLAKTRDGNVEAMRALLVTRRSARSMRVKALCQIRHLTFTGPDELRERLQGLSAIMLPREAAAMRPRAGTDVVAYTTKLAIRTLARRVVALDEEAVYIEELLAVLVAETAPSLLALHGVGVDGAATLLVAAGDNPERLRSEAAWAHLCGASPIEASSGKVVRYRLNRGGDRQANAALWRIVMVRMVSHAPTPAYVERRTKEGRSKREIMRMLKRYVAREVYRHLPRA

SEQ ID NO: 292329 - protein, 348 aa, unidentified
MTSMPDSVIDVVGGVDTHADAHVAAAVDRLGRVLGTGAFATTRSGYLELIAWLESFGRVTTVGIEGTGAWGKGLTRVVQDTGIDVVEVIRPNRQTRRRYGKSDMVDAIAAARAVLNGEATATPRDTDGTIEALRLLRIARRSAITTRTRTANQLHAVITTAPDPIKAQLNGLTMTRITRIATNYRPGTNLTNTTHATKYTLKTLAQRWRTLTNEINHLNTQLDTLVAHAAPPGLLDICGVNTHTATDLLIAAGTNPQRITSDQSFAALCGVSPVDASSGHHIRHRLNRGGDRQANAALYRIVIVQLRYHQPARDYMTRRLQQGRTKPEIIRCLKRYVARTIWTHLNPN

SEQ ID NO: 292330 - protein, 342 aa, unidentified
MDRTLYALDLAKQVFQVFWVEGRSRTREQRLKRAQVLEFFARVAPARVAMEACGSAHYWGRELMALGHEVMLIHPRYVRAFVKTNKTDAADARAILAAASQPGMRSVPVKSLAQQTVLALHRVREGRRDMRTALMNQLRGLLAEFGVVLKRGRQAGLAELRGRWPELEAKLPGVMMRLLREQCEAIGRLEREVHELEGRIRAEHAGDERFAALTSIPGIGPLGASALLAQLGTGQQFHSGRGASAFVGIVPRQHGTGGRVRLGAISKRGDPYLRTLLIHGARSVIAKSRHHSPWLKALIARRPKNVAAVALANKNVRIAWALLTRGGRYQPDHPPRARAAAQ

SEQ ID NO: 292331 - protein, 502 aa, unidentified
MDEPHEVSDEEHEQIVARVAAIDVAKASGMVCTRVPHETKPGRRLTKVWNVAATTNSITELADHLVCQGIERIVLESTSDYWRPFYYLLEARGLDVWLVNANQVKQVPGRPKTDKLDAIWLAKLAERGMLRPSFVPPPEIRNLRDYTRLSVDVTADRTRVRQRMEKLLEDALIKLSTVATDIFGVSGRAMIEALISGERNPRRLAALAKGRMRVKQAALVEALTGRFDAHHAYLARMLLDQHDALSTQIDQLTGKIDQAIAAIPAAGPPATPDPDSSADPTTGELLPAGVSALERLDEIPGIAVRGAQIVIAEVGLDMSRFPTAGHLVSWAKLSPRTVQSGAKDGKGKTGKGNPYLKGILGEIATAAAKTDTFLGDRRRRPLHPRNHLASAVRPARPLPRPRRRPPHHPHRQRPQDPQPRPPAPSPRPHRHPHPRRLASELGHPANRQPPAGKDPRRRQPAHVPVGFPVRRSGRLRPGPACAGPAGPASPGRRRPAAACVPT

SEQ ID NO: 292332 - protein, 313 aa, unidentified
MGDAQGVVGIDVSKAWLDVAILPTNETFQVGNDEAGWEALIECLRDRSVRVVGLEPSGGYERGLAKALRKAGLPVRLVNPYRVRQFARAFGRLAKNDRIDAALIARFAAELPSRPPRDNPLVEQMAELVAARRQLTQDKVRLGNQLEQMRDPALRRMTGQRLRRIETEILLIGRRLAQIVASDEQLAAKDRLIQSLPGAGPVLSHTLLALLPELDETDRREIAALVGVAPFDDDSGKRAGKRAIWGGRTEVRNVLYMAALTAARCNPVLKAFRERLIANGKTPKMALVAVARRMLGILVALLRTGQEWSPEHT

SEQ ID NO: 292333 - protein, 333 aa, unidentified
MKKNYFIGIDVSKKKLDVAIYDEKGKSKKNHLVIKNEQTGFKNLINWLKLKDITYDDVFICMEHTGLYSFEFQIFLEKMNICYCMESGLRIKKSIGIARGKDDKIDAFRIAEYCYEKQEKLVPTVMPSKEIFALRRLISERKRYTQMLAKHKVIAKEIAKYESEIAQKRTIETIGFIKKKITYIEEELLQIINSELSIKQNYYLLSSIKGIGFVNAINTIVFTNNFTAFFSPREYTCYIGVAPFPNRSGSSIHGKTSVSKLGNSNLKAELTQAAVSAVRWDAGLKNYFNRKMKEKGGGRHNYGIVLNAVKFKLICRMFAVIKRQTPYIELSFN

SEQ ID NO: 292334 - protein, 459 aa, unidentified
MTRKKKMELDIINQDAAGIDVGSRSHYAAVGQSLEDVKEFGVYAEDLTALCLWLLSYGITSVAMESTGDYWQNLYAELMKNGIEVILCNGKFTKHAKGKKTDVKDCRHIQKLHALGLLTSSFLPDEITEKLRTYCRQRSNLISLSSGASRKMQKYQKFLNFRLYVVVKDVCGLTGLAIIEDICKGNLDPYSLSNHRHYNCKKSKDEIAKALHSNNREDFLFGLKQEYLCYQFYQKQIQSCDKEIEKFIKGELKKSPDKTKLKTTEKPYKRQNKNAPAIKNFNQVAYQYFGGVDLMAIEGVSHATVLSIMSEIGYDGFEKFSTSKQFVSWLRLAPNNKISGGKVLSSKIPKGSNRLKIALRQAANAIGNLKETHLSDFFKRVAYRKGRQAAVSATARKLGVIIWTMITKKVPYKPPTEYLFLDQRRKMKMVTRIKKNIAKFDIKPEDVGFGNSLNLSCDF

SEQ ID NO: 292335 - protein, 445 aa, unidentified
MPYNIAGIDVHKRMLHVVVSDVQVDGEYDFTRRVFGSLPEALRSLAAWLVEQQVQEVVMESTAQYWKPVWGALERYWKPSCQTRKGALATSGTLHLAQALSNRGRRGRKKDFRDAERLVKRLVAHELVLSFVPDVEQRLWRTVVRTKYQLTRNRVQLQNRLEALLEEAHIKLSSLVSDLLGASARRMLGAIADGETNRETLAALADRGLRATQEQLQDALGVCQELNPVYRRLIRMVLDEVASIDKRIEQLNQEVANLLRPHEDQVKRLAEVPGLGVDTAQQIISEAGATAATFPSEKHLSSWVGACPGDEESAEVNRSRRSPQGNRHMRRILNQAANAAVKLKGSVFEILYRRYVPRLGHNQTIGIIAHKLCRLVWKILHRGIRLRGARPRGQQSVQTKAHPKNDPSTPQAWLPNRTEPFSISHPSMTAISDSATVFDPASRNR

SEQ ID NO: 292336 - protein, 411 aa, unidentified
MDVVYQRCAGLDVHQETVVACVLVSEGRRVHKQTRTFRTMTRDLADLSAWLGEQQVERVALESTGVYWWPVFNLLEEGGHAVMLVNPQHVKQVPGRKTDVRDSEWLAELLRHGLLKASFIPPVAIRELRELTRYRAAQMEQRSTEINRLHKVLESANLKLAVVATDVLGLSGQQMLRALAAGEEDPALLADMAKGKLRAKLEDLERALEGRVKAHHRLLIGTILDHIRYLTGAIARLDEQLAVALRPFATEIALLDSIAGIGPTAAAAILAEVGADMGAFGSDKQLASWAGLCPGNRQSGGRRLSGRITKGNVWLRRILGQVAWAAVRERGSSFGARYRRLCRRQGEQKAIVAVMHNLLRVIYHVLRDRAPYQELGADYYQPSDPARATQRLVKGLERLGYAVTLAPTAVA

SEQ ID NO: 292337 - protein, 344 aa, unidentified
MQNDTLVAVDLAKTVFQVAVSHHPGQVSKNKRLSRTQFAEFLAQLPKATIVMEACGSAHFWARRMQALHHTPVLLSPHTVTPYVGRNKTDRNDTKGMLEAHRNEEIRPVPVKTLAQQALCSLHRIRAGWIAERTARINTLRGLLREFGIAIPVGAQHAVPNAWLHIEDAESELPDSIRPALAEICTEIRELERRIKMIETQLAALAAQTPAVARLMTIPGIGLIIATALVAFVGDIHRFPSARHFASYLGLTPKEHSTGSRRRLGAISKQGDVFLRTLLIHGARSVLNAATRHKTPDRLHAWALSRHAARGHNKAATAVANKIARIVWAVWKRDQPFHSVPVAA

SEQ ID NO: 292338 - protein, 405 aa, unidentified
MRIMHECCCGLDVHKKMILACLLRQGSEKQIRQFGTTTGELQTMKEWLVQSGCTHVAMESTGVYWKPVYNILEGSLELLVVNAQHMRTVPGRKTDVRDAEWIADLLQHGLLKASFVPPVFERQMRELTRYRTALTNERSRTTQRLQKVLESANIKLSSVVSDIRGVSARAMLDQIAGGVTDPKLLASLAKGQLRQKRAELEAALVGRIEPHHRFLRVELLAQMDYLDESIERLNVEIGDRFRPFEQDLQLADTIPGVNLKTAQALLAEAGTDMSRFPTSRHLSSWAGICPGQNESAGKHHSGKTRKGNRWLRHALTEAAHAAAHSKDTYLAAQYHRLAARRGKKRAVIAVAHSILVILYHMLRQRQSYRELGSNFFDQRDKTGLQRRLVQRLEKLGYTVELHSAA

SEQ ID NO: 292339 - protein, 403 aa, unidentified
MNAVGIDVSKGKSTVAIFQPGDQVILKPQDFHHTQSDISSLIGIIKGLDGETKVCMEHTGRYYEPVASWLSDAGIFVSAVNPVLIRSFGDDSLRSPKTDKADAKKIARYTLDRWTKLKQYSHMDETRNQLKTMNRQFGFYMDQKTAMKNNLIALLDQTYPGANAFFDSPARSDGSQKWVDFVYTYWHVDCVRGKSLKAFTEHYKNWCKRKGYNFSAAKAEEVYHDSADLIAVFPKDANTRMLIHQAVDMLNLTSKTVESLRTEMDQTAAMLPEYPVVMAMNGVGPTLGPQLIAEIGDVTRFVKRGSLTAFAGVDPGKNDSGKHSQKSVPTSKKGSPHLRKTLFQIMDGLIKRSPIDDPVYAFMDKKRAQGKPYYVYMTAGANKFLRIYYGRVNEYLSTLSEGE

SEQ ID NO: 292340 - protein, 412 aa, unidentified
MQYFVGLDWAAQEHAVCVVDAGGKVVTRFTVEHTAVGMTELVTRLSKLAPPSELRLAIERPTGLIVDTLVESKFAVVPIHPNVVKSSRPRYSAAQGKTDLGDAYLLADLLRTDGHRFRIMTPLSDETKALRGQVRVRDDLVRQRVALANQLRCLLEQFWPGAAEIFPDIEAPIALSFLEDYPTPQSAAGLGEKRMAGFLVRHSYRGRRPARELLERMHRAVPSICGRLEAEAKGECVSALVALLRLLVEQIATLTAAIERAVEAHPDGKVVTSLFRHGRICAAQILAELGDDRGRFASAEQLTAEGGMAPITRASGKHHAVSFRWACNMRLRSALALLADTTRRTMLWAGAIYQRARDRGHEHAHAIRILGRAWCRVLWTCWQNHEAYDPTKHRAAQTFTATPANFVEQEAA

SEQ ID NO: 292341 - protein, 347 aa, unidentified
MNASAKVIGLDIAKDVFFAVGLDERGKRVFKRKLARDQVLPMFTQMAPAMIGIEACAGSHYWARKFVEMGHDVKLVAAQHVKAYVTGNKNDMNDAAAIAEARSRGATKYVPINTAAQQDLQMLHRARSALMTERVAMINRIRAFAGEYGQVFPKSVEKFRDGLKAWLNDLDNGLSGMALETFWELKAQLDDKEERIQAYDRRLNQAAKSELAKQLMEVPGVGPLTATAVQATIADPRHYKSARDFAANLGLVPREHSSGGKQRLYGITRKGDSYLRTLLIHGARSALRTANGKPDKLLQWATRLAERRSFNVAATALANKMARVIWALMAHGRPYVPAWSKDTTKPA

SEQ ID NO: 292342 - protein, 344 aa, unidentified
MDHFAGLDVSVKETSVCIVDEIGKIVREVKVASEPDALLRVLRNPAHHFKRIGLEAGPLSQWLYGSLAEAGLPVICVETRHMRAMLKAQINKTDRNDARGIAQMIRVGLYRPVHVKTLLSQKLRMLLTHRKLLQAKTIAIENDLRSTLRNFGLKVGMVGKVKFEGRIKELVENLPDLATLAEPLLIVRRVLHEQLSILHRRLLDIVRNDDVCRRLMTVPGVGPVVALTYRATVDVPARFRNSKAVGASFGLTPSRYQSGESDRPGAISRCGDEMMRVMLYEAAQVMLTRTSKWSWLKAWAVRIARRRGMKKAIVALARRLAVILHRIWVDGTEFKWTREAVPAA

SEQ ID NO: 292343 - protein, 465 aa, unidentified
MTKRGQRQARAQRSSKVSRNLTMLNPNAAGIDVGASEHYVAVPAERDEQPVRCFGAFTEDLHRLAQWLRQCGVRTVAMESTGVYWIPLYQILEDYGFVVKLVNARHVKHVPGRKSDVQDCQWLQQLESFGLLSGSFRPEAKICILRSYMRQRQMLISNASRHIQQMQKALTQMNLKLHQVISDLSGQTGMRIVRAILQGERDRLKLAALKDPHIKSSLSTIAKSLEGDYRAEHLFALRQAVELYDYHQQKIAECDQEILKEMQSLESRAAPGSVPPPPLKRKGRSRHNLIPYDSRAELYRIMGVDLTRIDGLNEGTVQLILSELGLDVCKKWPTEGQFSSWLGLCPNNEISGGKVLRRGTRKVVNRVANALRMCAESLLNSKSALGAYARRMRAKRGSQIAIGATANKLARLIYRTLTYGQEYTDIGQEKYETKYRENLIKSLQKRARHLGFQLVDLHPVSVRVP

SEQ ID NO: 292344 - protein, 427 aa, unidentified
MAYRIAAIDVHKKMLAVVVADVEGEGEYQFERRKFGASPEQLQVLAQWLVEQEVEEVVMESTAQYWKPVWGTLELSWKPARQQRDGATKMSGKLHLCQAKSNRGPRGRKNDFADGERMIKRLVAQELVLSFVPDPEQRLWRTVTRRKQQLTRAKVRFKNQLESLLEQAHIKLSSFVSDLLGLSARRMLHAIAEGETSPATLAALGDCRLRATPAQLRDALGACTQLNGVYRRLLKMALEELKLLEEQMEQLDREASHLMQDHQDAVQRVAEVPGFGVESATQMIAEVGAEAAAFESQKDLASWVGVCPGDEETAGKSKSTRSPKGNSTMRRLLNQSAQSAVKVKGSIFEITFHKLLPRLGYKQAIWAIAHRLCRLLWMILHKGIRYQERGPAVSAKSLRTRTARMIKALQKLGYRIEAGPLPAGSPA

SEQ ID NO: 292345 - protein, 354 aa, unidentified
MIYVGIDVHSKRCTATLKQDSGSIIQQSTFDNTPSGINSLITRLNGMGESKAVVESTGNYWIRIHDMLEDNGIDTILANPVKTKIIAKAKLKNDKADSNILCDLLRADLVYESYVPDSEHRMLRQLVRGRLELVQTRTTVKNRIHSILAKYNHTPPCQKLFSKQGLEWLRTIELTSVDRLLLDANLQTIATLNSQIEQVTKQIAKHSIQDPRVTLLMTIPGINYYTALTIISEIVDINRFATKWKLVAYAGLCPIQRDSGSKHWRGTITREGSHWLRNALVEAANTTRLHDERLGAYYERIAKRRGPQKAQVATAKEMLCIIWHMLRNNEPYRTMNPQLVEKKYKRLEWRASMA

SEQ ID NO: 292346 - protein, 291 aa, unidentified
MKTVRSFVGMDVHKATVSISIAEDGRSGPIRFIGVIPNTPEAVHKIAKQLARHGELDFCYETSGCGYGIHRQLTALGHRCMVVAPSMIPRKPGERIKTDRRDSEKLAILHRSGDLTPVWVPDTTHEALRDLVRARVDASMHLMRARQQLLAFLLRHGRSYPTGKHWTQRHRCWLAGQTFKEQALGIVFQDYLETVWTAQERRDALIERISAMVTSWSLGPLVEALRGLRGIDLISAATFIASTGDLSRFESPRLLMGYLGLVPSEHSSGGTIRRGGITKTRIGCRGWRPCA

SEQ ID NO: 292347 - protein, 350 aa, unidentified
MHINTPVLASIGIDIGKEVFHIVGFGADGKIAFRRKIKRLALLDTFKELPSCVVGMEACLSAHFVSRALRQLGHQPKIIPAIYVKPFVKGQKNDYNDAEAIAEAALRPNLRTVREKTQDELDLQALHRVRSRLVSRRTATINQIRAFLIEQGIAIRTGSRALRNSLMAILENRRDEISPRMRSLIVGLYEDWICLDERIEAIAGEIETIGEKEAHCRRLMSIPGIGPLISTAVVAAIGTGEAFERGRDFGAWLGLVPRQYSTGGRTILARISKRGSKYLRTLFIQAAKVILMRPHNWERFSFGAWLLNAAPRLHRNKLATALANKLARISWSILRNENVFDLSHHEAVAI

SEQ ID NO: 292348 - protein, 354 aa, unidentified
MPETAQKAIAVVGIDIGKNSFHVVGQDERGAIVLRQKWSRGQVEARLANLPPCLIGMEACVGAHHLSRKLKALGHDARLMPAKYVRPYSKGQKNDFKDAEAIAEAVQRPTMKFVATKTAEQLDLQALHRVRERLVSQRTGIVNQIRAFLLERGIAVRQGLRFLRIELPRILAAPPEVLSPRMVHTIEDLAGDWRRLDERIERLSEEIEALGRKDAGCERLMSVPGIGPIISTATVAAIGTGDGFSKGRDFAAWLGLVPKQISTGDRTILGKISKRGNRYLRVLFVQAARVVLVWPQSWERHGLKPWIETARKRLHHNVLAIALANKLARIAWAVLARDRNFEARRLSDATAQST

SEQ ID NO: 292349 - protein, 319 aa, unidentified
MFIGIDVAKAEPVVAVHPSEARWTVANDERGVRTLVERLRETSPTLIVLEATGGYELLCVAALAAAALPVVVVNPRQVRDFARATGQLAKTDRLDADILARFAEKVRPALRPIPNAEAQELDAMLTRRRQLIEMLGAERNRLGQVFGKGKRAVKKSLKTHIAFLERELRIADSDLTDAVRRSPVWREQDDLMQSVPGVGRVLSHTLLADLPELGRLSRREIAKLAGVAPLSRDSGTFRGRRFVQGGRGPLRGVLYMGALVAARYNPVIRAFYLRLVAAGKPKKLALVACMRKLLTILNVMVRTGTRWLAPTVEQVLVEA

SEQ ID NO: 292350 - protein, 368 aa, unidentified
MSKTENGRLCVGVDLHKTQFTVCAMNEEGEYLLERKYPTTEEGYEAFSQEMHRQEEQGYSIELAVETTGNARYFKNRMEKEYFSVKVVNTNRFKVITMSTKKTDANDAATLAYYLMKEMLPEANLCSQTSEEIRRMLKTRTILVQSMVKIKNQIHGMMLGCGIETKAAQFQSKKKRQELMNDLADHEYSAFTASSLKVMLQIIDDLAEEIKSVEAQLGEMVKKNEDVELLVTIPGIGINTATTIAAYTENLERFEGNYKRFTSYIGIVPSVHNSNETKHLGRITKHGPQELRTAFVQAALGMVRLTKVTSEWRIIKDYHKKKDDKGSGRAIIALARKISRIVFVMLSKREAFNPDLMQNIDQNFQQTA

SEQ ID NO: 292351 - protein, 389 aa, unidentified
MKIFVGIDIAKLNHFAAAISSDGEILLEPFKFTNDADGFQLLVSKLESFDKNSIIIGLESTAHYGDNLVRYLVAEFYQVCVLNPIKTCQMRKNNVRKTKTDKVDTFVIAKTLMMQDDLRFVSFYDLDMMDLKALGRFRQKTIKQRTRLKIQLTTYVDQVFPEIQYFFKSGLHQNAVYALLKEAPSPKEIASMHMTHLANLLKVNSHGHFTKEQAKELRVLAQKSVGANDSSISIQITQTIQQIELLDSQLEKIEAEMTDIMKFNDSVIMTIPGIGYINGGMILGEIGDIHRFSNPNKLLAFAGLDPSVYQSGNFQAKTTRMSKRGSRVLRYALVNAAWNVVRNNATFKAYYDAKRAEGRSHYNALGHCAGKLVRVIWKMLTDEVEFNLE

SEQ ID NO: 292352 - protein, 337 aa, unidentified
MMSYNYFLGIDISKDWFDVAIRQPGKPRFVRHQQFDNDAKGFKKLLKWLKKEGIKDWSELFVCMEHTGVYAVPLCEFLATHKITYTLVAGAEIANSQGIVRGKSDQNDAKRIAAYALKNREEIRIHTLPSEQIRTLKTLLSYRERLLKARHSFSVSSKEITAFESEQVSSSILDGSQLMIEQCNAQLKAVEQQIDECLATQEQLAHTYKLLCSVPGIGRQNALYFIVTTQNFVSFNCHKKFAAYAGVAPFKKSSGKSFYAKAKVSQKANKKMKALLSSAVTCSLGSCKEYQIYYERQVKKGKNPNSVKNALKNKIVARAFAVIRRDAEYVNTHAYAT

SEQ ID NO: 292353 - protein, 348 aa, unidentified
MRGAVHMQITTIGLDIAKNVFQVHGIDAAEKVVVRKRLGRSQMLAFFKALPPCLVGMEACATAHYWARELTKLGHRVRLMPAKDVKAYVKRNKNDAADAEAICEAVRRPTMRFVAAKSAEQQGQLMQHRTRDLLMRQRTQVINALRAHLAELGIVAAQGDKGVKELLTIVTDKKDERLPIDARASVIVLAAQLEAVQTLIGSIERRIKTQHRANEASKRLETILGIGVIGATAIAATVADPTIFRSGRDFAAWIGLVPRQDSTGGKQKLGPISKQGDRYLRRILVVGAHSVLRRAMQNPEKYLWLTRLLARRPFKVVAVALANKMARMAWALLAHGGTYRAPEPAAAA

SEQ ID NO: 292354 - protein, 395 aa, unidentified
MFIVGIDVAKRSHEVCMITSDGQTVQRPFSIRNNCTGYNLMLEKIRKHTNIKSQIVFAMESTAHYWLALFTRLRKDGYHVILLNPIQTSAMRDMFIRKIKTDAKDSFIIAELIRFGRYAESNVAQDRLLALKELCRNRFYLVDMAGDLKRKLIALIDRVFPEYEAQFDTIFCKSSVAVLKKYPTPQKLSNAHLDKLTELLWNSSNGHFGEWKARELKDLARNSFGVEDCDGAYSTLILLMLDQIQSLSGKADALEKEISRLFQSFDTTVTTIPGVGPIIGAVILSEVGDISRFSSADKLAAYIGVDPSVNQSGEFQAAHAHMSKRGSPYLRRCIWMASQVAVQRDPMFRAYYEKKAAEGLKYMTIIGHVTRKMTAVIFAILRDHKVYEPVLPTAA

SEQ ID NO: 292355 - protein, 313 aa, unidentified
MSFIGIDVAKAQLEFVVRPSGETGTVPNDDAGISALLTRCQALAPALLVLEATGGYEAAAVAALATAGLPVVVANPRQVRDFAKATGQLAKTDALDAQVLALFAERVRPTPRPLPDEAVQALDALLTRRRQLLGMLTAERNRLLVAAPAVRRDLQQHIRFLERRVHEADGELHTAVKASPAWRVKDDLLQSVPGVGPVVSLTLLAELPELGRLSHKEIAALVGVAPLNRDSGTLRGKRLVYGGRAPVRAALYMAALVASRCNPVIRAFYERLRAAGKPAKVALTACMRKLLTILNAMARSGASWQPARTLVRT

SEQ ID NO: 292356 - protein, 350 aa, unidentified
MRIESKQLLPAWNGLDVAKETFDSALYMPVEPGQAPRDIMSLPKKTFARTLEGVKEFHDWSFQVRDKAGLEGGNMRIVMEATGRYSKELAGWLNAEMPFTRPVIEDPRAVKDFIKSLKLRNKTDRIDAGALARYGAERMPEPSEDMPEEYQYLRELTRQREALKDQLTAARARLTEMGEFKKMIKIQQAVIKSMEQAVAKMELEIKRCINDSEELRKSLKYAVTVPGVALIVSATVLGECGPLYRHTSRQLGSYSGIAPQIRQSGTSVCGSKISKRGSGNLRRVLYMASIAAIDHNPEMKMFYNRLIAKVKKPLQARCAVMRKLLILIRAVVVNETEYDKNFAKKSILKT

SEQ ID NO: 292357 - protein, 340 aa, unidentified
MFYVGLDIHTQRIAFCVLSDKGQLVQRGQVRGLDEVLRILEALPDRFEVCYEASCGYGHYHDLLQPLAARVVVAHPGRLRLIFRSRDKNDRKDAERLAKLLYLGETPAVHVPSQEVRTWRELINCRGQVIAKRTRAKNALRALLRGAGVVPPRHPALWTKAGLSWLRQLELPTPSQQLRRDLLLEEIETLLRQVRRIEQQLNQQAQHTPAVAQLRSIPGVGIRTAEAVAAFVDDPDRFRNAKAVGRYFGLVPCQDQSGDRNRLGHITRESAPVVRQLVAEAAWQARRRSPTVRAYFERVQRGDPQRKKIALVATAHYLVRVMWALLERGSTWEENAAQAK

SEQ ID NO: 292358 - protein, 336 aa, unidentified
MFQKLPSDAVIDSSQQKLAQRSEQASAEKPATDRACPGANDTVTEQDRRRSRGLSPNSRQNRSSHRGGASSHPQDRDMFMDSTSHTLVGIDVAKHSLDVYLASEDRCFAVKNSTAGFRELLDKLPAAGSCLVVIEATGGYQSRVVGALVAAGQRVAVVNPRQVRDFARSLGVLAKTDRLDARMIARFGETVRPRTVEVGSEKQAELRELVTRRRQLVELRTAEQNRLETTLTKVVRKNVRHLLEQLDKQIRQLEEAIGQLVENEPELASKAALLRAVPGVGPVTVTSLLVDLPELGRLDRQEVAALVGVAPFNRDSGKFHGRRRISGGRSAVRSVL

SEQ ID NO: 292359 - protein, 345 aa, unidentified
MKEYSAIGLDVSDKTVEVAALDAKGDVVWQTTVICTPVAIRRAFRDVARSLVVLETGMHTGWLARLLSELGQEVVVANARKVRAIWGDERKSDERDAEMLARLARSDRRLLRPVTIRSAETQRTMDVVTGRDALVRSRTQMVNVVRSLVKNRGARLRRCSPRSLPHHCRTDFPDTELVEVDPLLATIEALNAQIVVYDRLIEAVAKERYQEATERMSQITGVGTLTALVFTLVIEDPQRLVCRRTVGAYLGLTPRRDQSGETDKQLPITHAGHSMLRRLLVTAAQYVMGPFGPDCELRRFGERLARRGGKNAKKRAVVAVARKLAVVMLTLWHSGESYRPLRQVA

SEQ ID NO: 292360 - protein, 324 aa, unidentified
MPQSHAVNVGVDVGQEQLVVAVDGEAATWTVANDAAGHDALIARLRPRAPTRIVLEATGGYERAVVAALGSAALPVIVVNARHVRDFARATGQLAKTDAIDAQLIARFAAKIEPPVRPLADAALAELDALMLRRRQLIEMLVMERIRLHQAIGRPQAAARLSLRKHVRYLEQELGRTDRELGTLIEASPVWRVQDALLQSVPGVGPTTARTLLAELPELGRLSRQAIAKLAGIAPLNADSGKWRGQRRIRGGRAVVRSALYMAALVAARHNPMIRAFYQRLVARGKAKKVALIACARKLLTLLNHLLATGAHWHATPVAPPPLA

SEQ ID NO: 292361 - protein, 345 aa, unidentified
MTQYKRIGIDTSKAVFTLHGIDQQDRPVLRINLRRAQMICFFKKLPPTEIAMEACGGAHHWARELAALGHEVRLIPPQYVKPYVKRGKNDRNDAEAICEAAGRPGMHSVPVKSVTQQAQGMVLKVRETLVGQRTLLVNTLRGHAAEFGVIAGKGLGEIGPLLTAIEQQASIPPEAKDMAVLLGRQIEDLDARIKEIDAKLTAAHKANAVSLRLATIPGVGPVTALTLAVEIDPAAFESGRHLAAWAGLTPKDRSTGGKQRLGGISRAGNERLRVLLVSGATSVINAAMRPGSRQMMDWLRALLQRKPRKLAAVALANKMARMAWAMMTSGEAYRRPPAAAGAVPA

SEQ ID NO: 292362 - protein, 379 aa, unidentified
MTSTDAAADTRETVYAAIELSKKTWVLGIAPPDRDRPSIHRVGGGKIAELVSRLRVACRNNRRIVVCYEAGYDGFWLARALVKIGIECRVLDPASIQVNRRARRVKTDRIDVLALLRALIATDRGERHVCAVVRVPSIEEEDARRSHRERQRLVRERTGHINRIKGLLFAQGIRDIKPKLRRTRIDFATLETAEGHPLPGRLRRELEREYARLALIETQLREVENERDTADSQDPVVEQKRQMLVALHGVGGTSAAILAREVFARSFASRRQLGSYLGLTPSAYDSGSTTRCQGISKAGNSWARRILIEVAWLWRKYQPASPLSNWYIQKTNGQSSRIRRIMLIALARKLAISLWRYVETGLVPEGVLLARAEPQCVPA

SEQ ID NO: 292363 - protein, 412 aa, unidentified
MQDILTCAMGLDVHRDIIVACLVKGAVDAEPEAETRTFSTLIPEMQKLRDWVIESECRNIAMESTGIYWQPIYEMLESCFDGEISILVVNARHMKNVPGRKTDMKDAQWIATLLRAGLLKGSFIPDKAFRELRHLTRYRKSVVHDITAQKNRIDKFLQSSGFRFTAFLSDTFGASGRNIIRHLIEHGSIDREALDKCLKTKTRNRIDEILVALNGSLSEHQCRFLNMVFRHLEDLDAHKHTVEDEITEEVLKHTDTLNLLCSIPGIDVTAAAAIIAEIGTDMSSFPDSQHICSWAGLSPGNNESAGKRKSVHINKGNPYLKSMLCEVAWIMASHRKLYLSGWYWKVKQRKGAKRATIALARKILSIIYTMLKTGTPYNEECFEQRRLRCERKRANRLVNELQKLGYVVVAPD

SEQ ID NO: 292364 - protein, 461 aa, unidentified
MAKKAKKVKTAKGAELRIVNPDAAGIDIADGIMQVCVPADRSKDNNRTFGAYTSDLHAISAWLRECGIKTVAMESTGVYWIPLFCRLQEDGLDVVLTNARDVKNITERKTDESDAEWLMLLHQYGLLKASFQPHNDAKRMRTLTRHRDTLSREASSIVLRMQKAMQQMNIKLTLVLSDITGKSGIRIIEAILAGERDPKRLADLADIQCKTPKEEIAKALEGNWEEDLMFVLRQNYDTFKHYCIQLGECDAELEKLMENYRAEVAKVEDTSYSPAKKRRDYKKTRHTVGFDVERKAYEMWGVNVFEIPGISHLTALELMSELGHDFTRKFPSSKQFCCWCNISPNTKISGGKRISSHVPHRRNNVGLIFRSIASSLANAKNQLGNFYRRIRSRAGGKAAVIATAHKVAEIFFAMVANQTTYNPERVGIDEKVLLEKRITRYKRELERITGTHIEIGNACVP

SEQ ID NO: 292365 - protein, 410 aa, unidentified
MTESSDYESVQVFIGVDVGKDTHHAVAINRSGKRLFDKALPNDENKLRSLISDLKQHGQILLVVDQPATIGALPVAVARSEGVLVGYLPGLAMRRIADLHAGEAKTDARDAAIIAEAARTLPHALRTLKLADEQIAELSMLCGFDDDLAAQTTQASNRIRGLLPQIHPALERVLGPRLEHPAVLALLQRYPSPEKLASLGEKKLAAQLCKLAPRLGKRLAADIAQALAEQTVVVPGTNAAAVVLPRLALQLITLRKQRDEVALEVEQRVLAHPLYPVLTSMPGVGVRTAARLLTEVACRAFASAAHLAAYAGLAPVTRRSGSSIRGEHPSRRGNKALKRALFLSAFAALRDPLSRAYYTRKMSQGKRHNQALIALARRRCDVLFAMMRDGTFYTPQGHNMLDNLIGALPR

SEQ ID NO: 292366 - protein, 351 aa, unidentified
MSHKSAATVALTIGIDTGKNTLHLIGLDDKGAIVLREKIARGRITARLANVPRCLIGIEAGMATHYVARELSALGHDVKQVPPAYAKPFRQGHKNDFRDAHAIAEAVQRPSTRCVPVKTDDQLDLQALHRVRSRLIGQRTAVINQIRGFLLEHGIAVRQGLRFLRQQLPDILAKRTDVLSPRMIRIMEDLSGDWRHLDERIQHVTEEIEVLAHGSEGCRQLMTVPGIGPIIASAMVAAIGNGAAFAKGRDFAAWLGLVPKQMSTGDRTILGRITKRGNRYLRTLFMQGARVILLRPANWAKHSFGPWLTAAANRLHHNVLATALANKLARIAWTVLMQARSYEARVEPRTA

SEQ ID NO: 292367 - protein, 334 aa, unidentified
MKQVNRIGVDVDSQDLVCALLGAGQRLPLARFANTASGHKKFIRWATKGGHPARVCLEATGIYSLEFALALHHAKNVEVMVVNPRAIKDFVRACMQRAKTDAVDAGGILDYLERMPFVAWQPPAPEVLELQAINRRIVQLNTELTREKNRRHASEFAGACAVAIAHDIEVNIHHLERRIERMHDSGLKLVRGVPALATKLAHLVSTKGIAEASAMRLLAELLVLPDDLVAPQWVAHAGLDPRPYDSGTSVHRPRRISKVGNRHLRAALYMPALVAIQHDPNVKAFYDKLVAAGKKPMQAVVAVMRKLLHAIWGMLKHDQDFDGEKFFKIAKENA

SEQ ID NO: 292368 - protein, 494 aa, unidentified
MVMVLTNRSRVDETGVASPADVDSSWYGVQSDPQIDAGSGPGGYFGLLPSSASLRILIFLLDPRVTCPGRSETDWKGTVVEIVYARAAAIDVGKREVAVTVRVPGDVAGARCQQTRKFRTFYPVLRQMVSWLVEQGVTHVAMEATGVYWKPVFHALCEADSLEVVLVNARHVKNVPGRKTDVKDSEWLAQLLECGLLRGSFIPPKDIAAIRELTRYRKKTIQARTRELQRLSKVLEDAGIKIDSVASSITTLSARDMIEALIAGERDPRVLADLARGRMRTKIPDLTMACAGRFADHHALLARMHLDHIDHLTFMIDGLDDRIEQVLGPFAQQLRLLRTIPGIGDRAAQVLISELGIDMSRFPTAAHLASWAGLCPGNNESAGRHMSGRTRKGNAEVRDILTECAWSAGKTGSYVGAQFHRMHRRFGKKGGGKAAIAVAHTLIVIVWHVLHEASEYRELGHDYFTRRDNPEAAKRRLIHNLEALGYQVQLTATA

SEQ ID NO: 292369 - protein, 420 aa, unidentified
MDVVHERCAGLDVHKRTVVACVLVPGEAGAAQPETETFSTMLGELERLAGWLAERGVTHVALEATGVYWKAVYNVLEGEDRWTVLVVNPEHVKAITGRKTDRADARRLAFLLRHDLLSGSFIPDRAQRELRELTRARTSLVRERARVVQRLEKTLEGTNIKLGAVVTELLGVSGQAMLDAALQGVTDPEELAGLAHRKLRPKRELLIEALAGRLTRPLRFLAQQHLDHWRELDARVAAFDAEIADLLRPFDAVIDRLDAIPGVGRRTAEVILAELGSDVAAFPSERHLAAWAGLSPGNRQSAGRRKPARTRHGNPWLKAALTEAAWAASRCKDGYLQAQYRRLAGRRGRKRAIVAVAHSLSTAIYFMLLHDVPFEDLGGDYFDQRDRDRRQQRALATLRTLGYDVTLVQRPTPDPATEAA

SEQ ID NO: 292370 - protein, 342 aa, unidentified
MYYIGLDVHKKTISYCVKDVSGRVHQEGKLGATRCELDIWMRTLPQPWTVAMEATIFTGWIYDHLHPHATQVKVAHPLMLRAIAAAKKKNDRVDASKIADCLRCDFLPECHMASTEIRDRRRTLRYRCLLVRQMVQTKNRISGLLMETGVTYNKQRLHKVGYFRELLASNEEVNESIRPLLRLSRDTIARLQKTERALVSSLQRDPLLTERIKRLRTVPGVGPITALTWALEMGEISRFRSIRQAISYCGLCGDERSSAEKSMRTPISKQRNKNIQFVLIEAAKLAPRQDHDLAMLYEREKQKGNANRATLAVARKMVAYLLAVDRGQRDFVPAEDGGCDAA

SEQ ID NO: 292371 - protein, 347 aa, unidentified
MPRATSNANVIATIGIDIGKNTFHLIGLDDKGAIILRHKLSRGQVYARLANIPPCLIGMEACVGSHHLGRQLSALGHHTRLMPARYVRPYSKGQKNDFRDAEAIAEAVQRPTMKFVALKTVEQLDLQGLHRIRERLVCQRTSVINQIRAFLLERGIAVRQGLRALRTEMPIVLAKTDKLSQRMIHMLEDLCTDWRHLNGRIEAVSKEIETLSEQDDGAKRLMTVPGIGPIISTATVAAIGTGEVFSKGRDFGAWLGLVPKQMSTGGRTILGPISKRGNRYLRMLFVQAARAVLLRPQSWEKHGLKLWIEAAARRLNRFKLAIALANKIARIAWGVLHGGRNFEVRPM

SEQ ID NO: 292372 - protein, 382 aa, unidentified
MQASRKSTPTAGDCGTIFVAIELSQKTWLITVHSPDRDQFSRHRLEGGDHAGLLALIEKVRARATQQLGSTPRVVSCYEAGYDGFWLHRLLEAAGISSLVFDAASIAVEQRSRRAKTDRIDGELLLRTLMAHLRGEPRVVRIVRVPSVEEEDARRASRERDRLITEQTAHTNRIKSLLRLLGMAVGNPRRRDWLAWLKRQRDWQGRPLPPHLLAEAQREHARLMLVREQLAALEQVQAAQASAVPAPMAERRDLLQRLKALGPAFTATLVNELFYKDFRNRREVASYCGLAPSPWQSGGIDREQGISKAGNRRARHKAIELAWLWLRHQPNSALSHWFRARTANAGRRAKRIAIVALARKLIVALWRYLTAGLVPEGATMKA

SEQ ID NO: 292373 - protein, 317 aa, unidentified
MTTEVFIGIDVARDSLEIAVRSTGEQWQVGNDAAGTSTLLPRLRALRPTLIVLEATGGFELPVLAALGSAGLPVVAVNPRQVRDFAKAIGKLAKTDAIDARVLAHFAEAVRPPVRPLPDAATQALGALVTRRRQLVEMITAEENRRAGALPPVRADIQQTIAFLRTRLKGIDQDLSQAVRNSPLWRDQEHVLRSVPGIGPVVSVTLLADLPELGVLGRKQIAALVGLAPLNRDSGTLRGKRTVWGGRATVRAVLYMAALVGTRFNPVLRALYTRLLAAGKSKKVALTACMHKLLTIVNAMLKHHQRWQLTTSLSQAS

SEQ ID NO: 292374 - protein, 405 aa, unidentified
MRYYLGVDWADQTHAVWVVDESGTKIAARAVSHTAEGLGEWGRELDEWRAQGIDLWAAIERPDGRVVDFLLDHGVVVYPVNPKALDRARDRFRQSGAKSDPFDARVLADFLRTDQAHLRALQPSSEAAQELKLLTEDCQRHIRQQTRLVNQLTATLKAYYPRALEVAEVTSALAREFLPAYPTPEALTALTERQWQRWARAHRLPEARAGELWAVLRQPHLPVPAHVVRAKARLMQALMEQLRPVVAAVAQYRKAIDDFFASMPAAQWARTLPIGKHGITAPTLWARLGDAPGRWESFRHLQAHAGTVPVTKRSGKQQRVVQFRFACDKALRYVVDQVAYLSLLSSAWARPYYDQQRARGHSHRQALRALGAKWLKIIFIMWQRQVPYDEQYHLATMTRQQLGRR

SEQ ID NO: 292375 - protein, 367 aa, unidentified
MKKISTVATKQSKNFSEQKLTIGLDLGDRSSWYCVLDEAGDVLLEQKLGTSPKAIKEVFGGMPRSRIALETGMHSPWVSRLLSELGHEVIVAHARNVRLIGESRRKDDRFDARTLARLARIDPQLLSPVQHRSAQAQAHLMVIRARAGLVRARTALINTARGLTKSYGERLRGCSPRNLNAEKARQLSPELQAALEPLLGAIESLSQRIYEYNQQIAKIARESYPQVARLEQVKGVGTLIALTYMLTLEDAQRFRKSRDVGCYVGLQPGRRNSGQSEPQLHISKEGDPYLRTLLVQGAHHILGPFGADSDLRRWGLKLAERGGKNGKKRAVIATARKLAVLLHRLWVSGEAYEPLRNSRQVRLPAAA

SEQ ID NO: 292376 - protein, 421 aa, unidentified
MFTPSRDDEQIIQRVAALDVGKAEVVCCVRLPAPSGRSRLQDVTTHATMTRSLAVLADRLTGLRVQRVVMEATSDYWRAPFYLLEASGLDVWLVNAKDVRHLPGRPKTDVLDAVWLCKVAERQMLRASFVPPGPIRQLRDLTRYRVDLVTSRNAEKNRVEKLLEDACIKLSVVASDIFGVSGREMMDALAGGQRDPQQLAQMARTALRRKIPDLKEALTGRFDEHHQFLLSRMLSRIDQIDTDIAAVDEQIEAHLAPFADAADRLIEIPGIKAVQAAAIIAEIGVDMTRFPTAGHLASWARFTPGVNASAGKQKGNGSTGHGNRYLARALGDAAASAGRTHSFLGARYQRLARRRGKKKALVAIGRSILVIIWHVLRDPDAHYRDLGVDHHDRYVNAAAVTRGHVRQLEALGYKVTLQPAA

SEQ ID NO: 292377 - protein, 487 aa, unidentified
MHPRTTNKFLETFDVYRFSFESAGALALDNEYSGFAVLPAHYIAFAERKRARPWTSIYHCGRYDVKPLATQQFTAYVGIDWADTKHDVCLQVPGNELREFDCIRHQLADIDQWAQSLHQRFGGPIAVALELAKGPIVYALQKYDFFVLFPINPLTLAKYREAFMPSRAKDDPTDAELALDLLMRHPERFTPLRPQSVQMRTLLSLTEHRRELVGDKTRFTNRLTNTLKQYYPHALDWFEQHDTLLFCDFLTRWPTFSQVKRARRASLQAFFYAHNGRRPNVISARLDAIKAAIPLTEDMGVIAPCRLQVLVLIEQLRTTLQAIDRFDREIAQLAPRLPDYCLFQDLPGAGPHLAPRLLAAFGEDRQRYQHADELQKYAGIAPVTERSGKKSWVHWRLRCSTFLRQTFVEWAGQTINKSFWAGAYYRQQRAKGSSYQATVRSLAFKWIRILHRCWQTRTPYDESKYLNALRKRGSPLLKHLELDAQSA

SEQ ID NO: 292378 - protein, 364 aa, unidentified
MGNGGTIGQQFRMGNNTDSWNEFMERYLYLEPEIALEVSTTGKYCTRMLRDMGFSVHMADPVKLSLIFNTSKKNDKEDSYKLAKLLRLGELPEVHLPSKEADDLRSIVRYRKSLGDAVTEIKNRVHAVLGRYGISIDATDIFGKRGLSEIERSSEKMSASDRIIVSDMIERIRELKDRESTMEDEIARMCHERNDVKLLMTIPGINVYSAAAIVSEIDDVSRFESKEKLASYAGLVPKQDQSGGTDYRGHITKHGPSMIRFILVNAAHHIIKYSGRMKKKYLSIVRRVGMKRAIVAVARKLLEIIWTMLSRGVEFVDHVDALTEKKMKAMSARASKPRQTKELKDTVKLIREDRLQGVSKELFS

SEQ ID NO: 292379 - protein, 339 aa, unidentified
MEGHYSKVLNYLEAMRFHYGNDALFVCGYEAGCLEFTLYRDLTAHNVKCVILAPTTMAVPAGKKRIKTDKWDAELIARCLAHHDYSEVHVPTEKDEQIKEFIRMRDDHRLALKKVKQQTLSFCLRHGFQYDGTKNYWTQAHINWLRTLKLDGVDQETLDEYLLTYDDLTSKLDRIEKRIEELAEAEEYKENVHKLECFLGVKTITALSVIVETGDFKRFASAPQYAAFLGLVPGEDSSGGDQTRLPITKAGNRHLRTLLVEAAQCYGRGQIGFKSKTLAARQTGNPPAVIAYADKANERLRRKYYRMTLKNGKKSNVAKTAVARELACFLWGMMTENYA

SEQ ID NO: 292380 - protein, 391 aa, unidentified
MDRSGKVVARFTIAHSAEGLARLARKLAGLGDPAGMPVAIERPSGALVDALLEAGHPVVPVSPNAIKTWRESEVLSGAKSDPGDAEVIAEYLRLRQHRLRTATPYSGQTRALRTVTRTRDDVVDLRVAAVNQLGALLDAHWPGGKAIFADLESRIALEFLTRYPTADSAAHLTADGIAAFCREMGYSGKRPASVLLQRLRSAPIRNCGGALSAAVRDAVLALVAVVRTLTGATRDLDRSVTTRLGEHPDGKIFTSLPRSGQINAAQMLAEWGDCRQAYDGPDPVAALAGVTPVTNQSGKHRAVHFRWACNKRFRKAMTTFADNSRHASPWAASIYNQARAAGKDHPHAVRILARAWIRIIWRCWQNTTPYDPARHSAAAARKRHREAKLAA

SEQ ID NO: 292381 - protein, 403 aa, unidentified
MLIKERNDILIYVGIDVASKKHDYAIMNDLGEIASTGKIDNSLKGFKKLQDAMRNAQEFFQDQNIRIGLESTGHYSINILHHLAKNDYKVMLINPLLTNMDRKSSSLRKTKTDKIDALSICMFLDRNKFDFKSYTLKSYHTEELKSLSRERLAIKKQLRKELNKLHALISITFPEYYKVFKNIKLKVSYRVLKTYGIPSVIATTRIDGLTNTLLKASRGHYGYQQAITLKTLAQETIGQDSKVYAFQIKAIVERIEFLNKQVKCFESEIKNIIDEHFAYLLTMPGVGYTTAGIILGEIGNILRFCNPNKLLAYAGLDPSVYQSGDYDAPKRKISKRGSASLRWAIHIVSSRIIHCDKTFIDYYQKKMSKEGKSYLTTLGHVTKKVTRVLYSIIKHQKEFIPQT

SEQ ID NO: 292382 - protein, 388 aa, unidentified
MPQSNDLSRSLAAFDRDRTLIAVIEMSQSNWLVAGLVPGLERRPLKKLSPDQDALLKLVQRWRNEAAQAGREITRTVVAYEAGRDGFWLARWLRRRGIEAYVIHPSSVAVSREHRRAKTDRLDTELLMRAFLGWLRGEKRHCSMAAIPTIEDEDAKRPSREHEKLVGDRTRLVNRMKAMLARFGIRTFKPTLRKAEERLDRLRTAEGTPLPENTRAELRRDMMRLRMVREQIKEIEQERLRKLTAAPAEKGPPTMVRFIARIIGIGIETADMLVSEILSRGLRDSKAVARYAGLTGAPDESGRRRREKGLAKAGNARVRRGMIQLAWRLLIFQKDSALAQWYRARTANARGATRKRMIVALARKLLIALWRMATTGEIPEGISLRAAT

SEQ ID NO: 292383 - protein, 387 aa, unidentified
MLAKKRLPEGVAGIAQLHELIGRYLPEDAEDAEVAVGIETDRGPWAAALIAAGYTVYPVNPLQASRYRDRHGVSGAKSDGGDSHMLADMVRTDSHQLRPAAGDSPEAEAIKVVARTHKTLIWERTRAVQRLRHQLREYFPAALEAFEDLDAPDPLELLGKAPDPARAAKLTRAQIAAALKRARRRNIAGKTDAILAALRGKQLGLPAPLTAAYAVAARSLIAVITTLNEQVKILEEQVREHFGRHPDAEIYQSQPGLAAILGARVLGEFGDDPNRYADGKARKDYGGTSPITRASGKKKVVIARFIHNDRLIDALMAWAFSALNASPGARAYYDQLRAKDIEHNDALRRVANRLVGILHGCLKTRTLYDEATAWGHRENPSQSHVAA

SEQ ID NO: 292384 - protein, 500 aa, unidentified
MVKKHAPRSTMDFPVINANASGCDVGSEWVYIAVPPDRSDTEVRRFRTFTQDLREAVQWMLACGITTVAMESTSVYWIPFTQLLEESRIQVFLVNPRHVKNVPAAFKTDNRDSRWLRNLHAVGLLSASFRPEQAVCKVRSLARHRDNLTKQASRCVLHMQKALSQMNILLHEVIADVTGVSGLAVLDAILAGNRSPEHLARLFSPRVKATDEEIKKALVGDWRDEHLFTLRQSLASWRHFQSQIAECDTEISRLLSEFGDPPDPPDPPDPPDPTDTFVQAAAPEAPVQTEAPLEGDTSATCMASAESDASSKPKRKKPGRPANPTGTRAQERKKRDLLIRLFGIDITQIPGIGVGCAELFFTELGRDLSRFHSAQHLASWLGLAPNNNESGGKILSRKVRRMKNRLATQLRLCANTLGSTNTYLGAYLRKMKSRLGAPKGITATAHKLAVILYTVITRRTPYDETVFARQEERHREKRLNYLKQQAAAMGFDFVPRECVS

SEQ ID NO: 292385 - protein, 318 aa, unidentified
MASFLGIDLSKETFHAFLLSDLADAKKVFPNTPKGFEQLTTWLKNRRAAEAHICMEATGAYWEALALYLHGLEHRVSVVNPARIKAFAQSELLRTKTDAVDAALIARFCKSQSPELWVPPPPEIRVLQALMRHYDHLKKTRAQQSVYVQSSDAAIVTASIREVIATLDEQITQVERKIRQHFDDHPDLKRRRDLLTSIPGIGETTAGSILSEIPHLDRFQSAKAVAAFAGLSPRERRSGTSIHGRTRLCKTGNARIRKALYMPAMVALRFNPILRTFAERLLAAGKHKRLIIGAVMRKLLVLAFGILRSGMPFDANYA

SEQ ID NO: 292386 - protein, 400 aa, unidentified
MMTPDDIDVWVGLDVGKSAHHAHALDHDGNTLYDKPLKQDEKAIRTMLGKLSKHGRVLLVVDQPNTIGSLPLTVARNMGIAVAYLPGTAMRRTAQLLPGDAKTDRRDAHVIAWAALKLPETLRDAGPDDETLAALKLLAGHDEDLAHESTRHVNRLRSLLLQTHPAFERALKGERITRDATLALLERYGGPMGVKWAGIEDVKDWAKSNGLRAGRIIDDMFKAIGEQTVTVPGTLMAETIIPSIAHDIKTIRDRRREVDRQVEKLLEDHPLLTVLTSMPGIGVRTASNILLGIGGDIANFKSSAHLAAYAGISPVTGQSGTSIKGERPSRRGNKRLKNALWQTAFVASTKHPPSVAYYKRKREQGKHHNAAIICLARRRCDVIYSMLKNGTLYQEPALVA

SEQ ID NO: 292387 - protein, 314 aa, unidentified
MNQISCSATSSHTLHCALELSKKSWLLAIQFPDREQPSVYSIKGGDTEKLMAKLTAARDYWAKVSGSLPVITVCYEVGYDAFCLARFLKARGIECLVIDPGSLQVNRRGRRVKTDRVDVKMLLRTLIAWCRGERHVWSLVRIPSVDEEDLRRSHRERSRLVRERTAHINRIKGLLFAQGIRDVKVKSQYKTLAVDKLLTADGHRLPPRLASEIARELQRLAMVQEQIAEIERERDTAPTPCEATERKRQLLLQLKSIGPAISALLSREVYYRQFANRRQVGSFLGLTPSPYSSGEEERCQGISRAGSGSACHYD

SEQ ID NO: 292388 - protein, 373 aa, unidentified
MREPTTFVGMDVHKRDIAVAMLIEGQPGPVEWRVANEPTAVKRLARKLQHEGGGTVRCVYEAGPCGYALQRQLEGQRLACDVVAPSMIPIRPGEKIKTDRRDARKLAELARAGLLTVVRPPSEDEEAVRDLCRGRDDARLDLVRSRHRLGKFLLRRGRVFGTGNRAWSQAHRWWLGTQTFERTAERVMFEDYLLAVEQTQARKRSLEQHLEDLAREPLYAERVGWLRCFRGIDTITAITLIAELHDFRRFRSPSQLMAYLGLVPSEYSSGPHQQRGGITHTGNRHVRRLLIEAAWHYRHKPRVGEKLAARRHGQPPAIIALADRAQLRLCRRHRRMARQGKHPNKIVVAIARELVGYLWATLTPAAQSASGTR

SEQ ID NO: 292389 - protein, 361 aa, unidentified
MAGTVTWAGLDVHARSTHAAAINVMSGELVRARFGAGLEQPLAWLGTLPGPVKACYEAGPTGYGLYRAAQAAGVEMTVIAPGKTPRGPSDRVKTDRKDAELLARLLLAGSLTAVVVPPPQFEAARDLMRAHDACRRDLMDARHRVSKLLLRHGRVYPESSTWTVSHRGWLGAQQFDQVATELAFLDALACVDAISARKAALAQRLSELALDECWWPTVARLRCFHGIDTLTAFALHLELGGDWQRFARAPQLAAWLGLTPSLSQSGESSRQGQITKTGSTLARRLLVEAAWHYARQPRQGVALSARQAGQPAHVLQISHRARQRLHRTHRKLRSRGKPGNVCVVACARELSCFLWAVATAD

SEQ ID NO: 292390 - protein, 349 aa, unidentified
MTTQRLSYVGQSVYVGVDVHKDTYAVTCVCNKQIVKTATAKADPAGLTASLSQWFPGARLYTAYEAGFSAFVLHRALTKAGIMNIVVNPASIAVAANDKVKTDRRDSKKLALDLSDGRLQGIYVPTEDEELARLLPRTRAQIVEHRATIARQIKAKLHQFGLIAPASRRLISNRYVREIDAWPLPPDLRVSLTFLAEQWRFATRQLIEMRRLLREQAKAHPAIEQVYRSVPGIGEVVARTLATELGDMTRFANERALCSYTGLTPSAYASGPSVRRGHISRQGSSRVRHLLIETAWRALPRDAVLKEIFDRIAATRGKKRAIVAIARRLTGRIRACFRQGTTYAVGTYA

SEQ ID NO: 292391 - protein, 300 aa, unidentified
MKDMMIGVDLAKNVFQIHGALRTGEVQFRKKLTRQQFPAFMARQAPCLIIFEACGGAHYWAREMEALGHEVKLIAPQYVRPFVKRQKNDAADAEAIVIAARQAEMRFVGPKTVEQQSRAAVFRGRERLVHQRTADVNALRALLYEHGYVFPVGMRYLDRMTALVDDDTSDLPALIREECQDLLAQIAEKTAHITERTAKLKALASQLDRARRLQTMPGVGPLTAIAVPAFGSDMAHFKTGRNFAAWLGLVPRQHSSGGKERLGRMTKAGQADIRRLLSIGAMSRLGWLGRHTIAQGNCPA

SEQ ID NO: 292392 - protein, 335 aa, unidentified
MSMVGGLDLHRGQITFDVVSTETGEVWRGRVGQPTRLRFRQWLESELAPRADGRLVALAVEGCTGWRYVVEEITAAGFEAHLAEPADTQAARGRKRRAKTDRSDARLLRTLLADGDLPESWIPPECVLEWRERVRLYKSLVDQRTQWTQRIHAELFQHGLPVPDGEIATPATRAQLCDPALAMSEAARQRIRTGYAMIDATNAEALPLKAELARFGARQPACRALVRDHFGIGKLTAVAIWSELGDCRRFSRSMQVVRHAGIDVTVDSSDTHRASGHLSHQGPGILRWALYEAANRSVKQRHDGKLAALAVARKLARRCYHTLRRIEPEEVYATV

SEQ ID NO: 292393 - protein, 385 aa, unidentified
MATSAPLDRIGVGIDTARYGHRVSFRRPDHQPAAKPLTVMETRAGYQALREQLERLHQQHPQAHFHVRIDAAGQYAANLEHFLRGLALPMTLSIGEPKRNKDYQKAHFPKRTTDDTESQAMARFAVVELPKASLPLPPPMVLLREVTGRLQAQVKQTTQAINRLHNLMARVFPELATLTNDIAARWVLRLLDKYPTPERIAQARLTSLEKLPHLPEDKAEPLHQAAQQSVGALAGAVAETLVRDLVSQVRHCQHAEHNMRQLLTIAFADLPASGHVQLLTIKGIGEATAAVLTAKIVDIDRFETPDEIVGYFGVFPEENSSGVAKLGKPLPEHPVHVAQGQRPGPPLSVECRSRRHPLQSRSASSLSAPQGQGQTRRRRHRPLHA

SEQ ID NO: 292394 - protein, 325 aa, unidentified
METKMLCCGIDVSHLTLDVTYQNNLGDLFHLQVGNNIAGFKKILEHTGTDYHFVMEATGVYYIRLAFYLHSHGCRLSVANAMSIKRYIQMHLERNKSDKKDSGWICKYAIEQRPGFWEMPDSAYFESKQMFNTIREYAEQVKRFNNQLHSLKLLPVPSKETIRSIEKMKACLEKEMALLEKKLEACLKQWQPDQYKSINSIKGLGKRATALLIIFTQGFKHTKNHRQLISFAGLSPTEYSSGSSIKGNNRIYKKGGKTIRDVLYMCAMNAKQTNVACKQLFDRLKANGKTGKQALIAVMNKLLKQVFAVVKNNSLYQPNYCSAKP

SEQ ID NO: 292395 - protein, 351 aa, unidentified
MMIIGVDYHPSFQTIAFLMEETGECGEQELKHSNGQAEKFYRDLKQQGISVRVGMEATGYSRWFERLLAELGFELWIGDPAEIKAKRIKKQKIDRNDARLLRRLMLENNFPQIWVPGPENRDLRQLLWHRHRLVQIRTRIMNQLQALAMNEGYRLKKKLFREQGRAQLEKLTLAPWASRRRRELLELLDRMNPTIEELTAAVEREARKRPEVLRLMTHPGVGPLTALAFVLIIGTWERFPRGKQIGTYVGMIPSEDSSAGKQRLGHISKQGNSLLRFLLVEAAQAAARVHPDWRRHYIHLAMRRHKSIAKVAMGRRLAIRLYWMWRNGCEYSQSLEFGSYAGQLGTGHGVK

SEQ ID NO: 292396 - protein, 310 aa, unidentified
MEHTTWVGIDVSKDRLDVHVLPSAEAWATSRDAAGLAELCRRLQGMTGVVAVEATGGYESIVAASLSSAGLPVVVVNPAQVRAYAKALGQRAKTDPIDARVIALFAEAIKPAVRPLPDQATRMLADMLARRRQIVEMIVSETMRLQRSELARVRKSIERILVALKRELGDVDHDIDSTMRGSPVWREKEDLLASVPGVGRIVARTMVGELPELGTLGRKKMGALAGLAPFTRKSGKWIGQTRIGGGRPAVRTALFLAAQVAKRCNPVLKAFFQRLLARGKSKMAATIAVAHKLLTILNAILRDKKPWQIA

SEQ ID NO: 292397 - protein, 454 aa, unidentified
MAQGSGLTRGDRNRNRKIGAVREVVRRDRAVLAVDLGEDKQAAVLVDHEGRVLARKTVKAKAHGLGGLLAWAADKAVAAGFAGLTVACEPTGHRWKALMGLADAAGAGFVCVQSLAVARSREGDDYTRDKTDHRDAYLIGKLVIRLDCYLPERADETWARLRHLGARRFALVGDVISCTQQVSDLLACAWPAALGTAARPLESTTWLAAMGVITDRCCGDPARLRKTGYEKFLAAVRRELPRWAASRVYHKIARALWDALADRGGVAAQRRGVLERVHLLMADWRSLLARLAEVEGRMCAVLEELGLTALVRSIDGLSAVGAAVILAETGDLSRFASARAVVKHAGLNPAENTSATLAGATRISRRGRPGLRTAAWRAVWAGMRHNRVLRARYAHLTGRAGGNRLSDGQARAACAAALLRWLWAVITRRQAWDARIAAGTIPARAGAVTAPAAA

SEQ ID NO: 292398 - protein, 430 aa, unidentified
MPQFYPNHLWLDKFLNFYIPQVYEDKTRWGKAVVQFFRKGCGFMIYVGIDIAKKTHFAAAMTADGEVVVPPFGFSNNAEGFQTLLSKLNHFSQSDLLIGLESTAHYADNLICYLFDLGFNLSVLNPIQTSTLRKTNIRKTKTDKLDCLLIIKSLIVNKPRLYSSTDIILLRLKSLCRFREKIKKTKSKLKIQLVSYLDIVFPELQYFFKSGLHTNTVYQLLKKHQSPDDIAALHLTYLGNLLQKSSKGHFGKKEAIALKGLAKSSVGSGNSAMSIQITHSISQIELLEQQLDDIEAVIQNLMTELDSPILTIPGIGVLNGAMILGEIGNISRFSNPSKLLAFAGLDPSVNQSGKFSAKRTKMSKRGSKVLRYALINAAWNVSLKNKTFNDYFNLKRSQGNGHYAALGHVAHKLVRVIFKILKDNVAFNLE

SEQ ID NO: 292399 - protein, 367 aa, unidentified
MKNHSSINQSLSSSGLSACITLAVDLAKQVFQVAGEDVLGQVLYEQRIKSREAFYDFLRQLSPHVMVLMETGPGAQAWARQLQDQGNPVRILPAGLVATHRSGPKNDRNDALAILRANRDEKICAVPVKSVAALAMQALHRARQGYVRRRTALSNQMRGLLLEHGVALAQGDVAISQKIPRVLEDATQPVPGLLRELIDELLAEWRHLGERISVLTGRLEVAANADMTAKRLMTVRGIGPVTATALVAKETKPERFPNARKFAAYFGMVPDQHSTGETVRLGDMTKRGDAYLRSLMIQGAHAVLQQLRPDSQQPDDRRLLHWMSRLGRKEAAIRLANRNLRIVWVLLQNDQTYRRHAGDGQPATMGH

SEQ ID NO: 292400 - protein, 346 aa, unidentified
MIIIGCDFHPSWEQVAWLDTETGETAERRLVHAAGEAEPFYRQWSAPALIGMESTGNCQWLIDLLNELGHEVWIGDAAQIRATMVRQQKTDRRDAAHLLELLVEGRFPRIWVPSSGERDQRQLLIHRYKLVTLRARVKNELQHLALNQGVQKKRKLWSETGQKLLRELPLKPWASRRREDLLKVLSMLDEQIKPLDEAAKEVAEKNEMARLLMTQPGVGPITSLAFTLTIGDVKRFARSRQIASYLGLIPREYSSGGRQRLGSISKQGNSFMRMLLVEAAQVAVRYDPGFRKEYLHRCHQKAKGVAKVAAARKLAIRLYWMLRTQTPYPAVVRIESSPRVALVGKS

SEQ ID NO: 292401 - protein, 373 aa, unidentified
MPKYSTAFGMDVHLRSTTVCALDADTGEAVTRRFPGNPWGEIAGWMDGFPGPSLAAYESGYLGFAPQRELAGLGVECVVAAVSKIPRSAADSASKNDRNDAARMAKAILAHDISPVWVPSPEVEGIRDLAGAYDGATARLATAKQRLLAFLARRGFVYGGTTPAGNPRKYWTYDFLRWLDKVRPEDDGGIRTLAALRNEVEAAAEARADLLSEYRAAVDASPIAAEVAALQSIKGCAFALAAAFSAEVGDFTRFRSGRQVTAYFGLAPSQRSSGDSVRLGGISGAGNALVRKLAVEGSWCYAAARHQPKLMPRDTGAPLEIRMHGRKGSERLLRRREEMLARGMPAAKANAATAAELVRWLWALGMMCREGAE

SEQ ID NO: 292402 - protein, 363 aa, unidentified
MFTERTSVGLDVHARSVAAAAIDGVTGEVYQTRLTPSYEHIRSWISELPGPVAVAYEAGPTGFGLYRFLSEAGIRCEVVAPSKLQKPSGDRVKTDARDAVHLSRLLRLDEVTSVSIPSVSQESVRDLVRAREDCRGDLMRARHRLSKLMLRHGIVYYDGRAWTGAHDRWLRTVAAPRLTLPATKMAFDADYDHVLTMEARRGRLDAAIEDIAADGEFTAIVRRVSCLRGVSTLTGLALAVEIGDWNRFTGNTIGSFVGLTPSEYSSGSSRAQGPITKAGNTHVRRLLIEAAWHHRPRYTVGAVMRQRWDQAPAAARARGDEGNRRLHGRWVGFLERRKRPVVANVAIARELAGWCWSLAVMED

SEQ ID NO: 292403 - protein, 364 aa, unidentified
MSETITYVGIDAHKVDLQVAMLAPDAIEPVAWTVANEARAVDRLRRKLERIAPGPIACCYEAGPCGYALRRQLDRGRVRCEVIAPALVPRKPGERIKTDRRDARKLAELHRAGLLTVVRAPTPAEEAVRDLCRARDDARVDRQRCRHRLGKLLLRRGLHYPGRAWTQGHRRWVDGLSWPHPAERVVVEDYRLAIDQLEARLVELDAQLVAVASTEPYREPVGWLRCFRGIDTLTAVLLLAELHDVQRFPTARALMAYLGLVPGEHSSGDRHRRGPITKTGNTLARRLVVEAAWHYRHRPGIGRTLAQRRSGQPPRVIALADKAQQRLCRRFRRLAKFKPGPVVTVAVARELVGFLWAALRPETA

SEQ ID NO: 292404 - protein, 483 aa, unidentified
MAAQQKAGTGTRPRKSNRKQRREQQRKVWTDNPGLDVVHPHAAGIDVGNSEHYVAIAPAKSAEAVRRFGCFTADLRDLAEFLKAHGIVSVVMQSTGVYWIPLYDVLEEAGFQVYLVNARDTKNLPGRKSDVQESQWLLKLHTYGLLRNSFHPSSEIRVLRTYWRQRSEHVHTAAECVQRMQKALTQMNLQLANVITDIMGMTGQKILRAILAGERDADKLAEMRNWRIRASHEEIVASLTGNWRPELLFALKQEVDRYDFCQRQIAECDQEIEKQLNALPSRPRETVSPLEPAVPPRNSKKSKKAQGNSPEFDLEQELVRIAGVDFTRIDGINVLTAQTILSEVGLDMERWKTEAHFASWLGLCPYNAVSGGKVLRRGTRKVVNRAATAFRIAAFTLRRSDSYLGAQYRRFRSKLGAPKAITAMAHKLAVLFYRMLRFGQEYVDRGQQFYDAKYRQQQISLLNRKAAQLGFSIIPAANPLPPA

SEQ ID NO: 292405 - protein, 417 aa, unidentified
MKSARNTLPEEPAGGVTGGIDWASEDHAVSVVDARGRETGRHTVQHNAAGLRELIDVLARAGVRETAIERPDGPVVDALLEAGIIVVVISPNQVKNLRGRYGSAGSKDDRFDAYVLADTLRTDRARLRPLIPDSPATVALRRACRARKDLVSHRVGLANQLRAHLRNTLPGAVGLFQEIDSPVSLAFLARFGTQDRADWLTPARLGKWLSGIGYSGRTDPTVLHARLTAAPRGATGPDGQASACITRALLAVLTSLTSQIKILSSQIGDQLTAHTDQHIFTSLPRSGTVRAARLLAEIGDCRARFPTPEALACLAGAAPSTRQSGKMRAVTFRWSCDKQLRDAVTDFAGDSRRASPWAADLYNKARARGHDHPHAVRILARAWLFVIWHCWQDHTAYNPARHNALQRLLDQDQLVAA

SEQ ID NO: 292406 - protein, 414 aa, unidentified
MDVVVERCAGLDVHRDSVVATVRVPGKGKSRRRRAQQTQSFGTTIAQLEQLADWLQGFGVTLVGMEATGVYWKPVFWVLERRFECWLLNAQHLHNVPGRKSDLIDSAWCCQLLEHGLVRPSFVPPPEIRRLRDLTRLRSTQMEERSRAIQRLEKVLQDAGIKFSSVASKTYSVSARAMLEALLGGVSDPIVLAQLAKGKLRAKIPQLQEALANRFELAHHGVLVAQLLAHIDALDETVANLDRRIAEATHPYAELITLVSTIPGVGRYIAEVLIAECGVDMTVFPNAEHLVSWAGICPGTNQSGGKRRSGKTRHGDHWLRTALSEAARAAARTKQTHLASHDWQIRGRRGEQKAIGATRHHILIAYYHIVRDQVPFRELGPDWLARRHSVEHRTRRLVKQLEALGNTVTLEAAA

SEQ ID NO: 292407 - protein, 337 aa, unidentified
MKRYLGVDLHRTQFVVCTRWENGEQEIRQWRIGELPKFVEQLRSEDQIAVEAMGTTARFYDAVVGRVGRVVVVNPHQFKVISESVKKTDRHDAQALALYLEKDLLPEVRMKPKQNRELMHLAETRDLLVKQRSALKGKINNLLAMQGIELKREALSSKIALERVLALPVSGMAQLELRILVEQIRALSESIVELDERLEEEGQQLPGYENLTSIKGIGALSATVLLTVIGKISDFADENKLASYLGLVPKIANSNESERSGRITKQGNKLARTALVQCGLVAKRYSPYLNQFYDRIKQRRGGGKAKIALARKLVKIVYDTLKNQWVFEDFPSFTLAA

SEQ ID NO: 292408 - protein, 409 aa, unidentified
MFFVGIDIAKKTHQAAITSDDGKLIGKTFKFSNTIDGFNLLLEKLSAVTTDLSQFEIGMEATGHYWLNLYTWLSDRKFKLHVINPLQSDALRNLYIRKTKTDSVDSKIIADVIRIGQYSETQLADDKIISLRDLSRQRFYLVDMASDLKRKIITMMDRIFPEYQDFFSDMFGKTSVQVMKECTSPEQILEIPTEKLTQLLRKASRGRFTENKAKELKELASNSFAAMLSSDMTTLLIRQMLEQIDLLEKQISEIEKIIAMQFEQFNTKLATIPGIGTTLGATILSEIGDINRFEKPKQLIAFAGMDPSIKQSGNFVGTESHMSKRGSPFLRRAVWLASVVAVSHDPLFKYHFQQKIKAGKSYSQAMGFICHKLLNTIFAILKSGDVYNPVFPPDIDISKLADEAVNSQS

SEQ ID NO: 292409 - protein, 331 aa, unidentified
MNYSHFVGLDVGKKTFDASLMSAAEKELSHKSFDNTPEGIQSLLDWIAGYHLSLSKLLFCAENMGSYVTELSVSSVSMGFSLALVCPLTIKKSIGLQRGKNDRIDAKRIANYAVLHYRKLELYKLPNKDLVRLRGWIIIRDNLVKQKVSSIKLLETFSQMAKLADVTESISFLEEQLKSIKEKILEVEKDMEQLIAASTSLYTNYLLLRSIKGIGIINAIVLLCVTDNFQRFDNPRKFACYCGVAPFEHTSGISIRGKTQTSSLANKEVKVYLTRAAITAISWDPQMKAYYKRKIAEGKHKASVINAVRAKIIARSFAVIRRQTPFVTLAV

SEQ ID NO: 292410 - protein, 441 aa, unidentified
MEAVYRRCAGLDVHKDVIEVCVLPPAGQSGSPQRRRFATFTSDLIRLRMWLVSLKATEVAMESTGLYWVPVWRQLEGHIGKRLLCNPQQVKALAGRKSDRRDGQRIAEFLQDGRLDPSFVPPKEIQQWRELLRMRVSLVQEHNRLSNRVEKLLQSYGVKLSSVASDILGKTGQRILTALAAGQTDPDRLSWKAVGSLREKEAQLRRALRADFDEHSCWMLGVLLGQLKENEQWREQLEQRITEGMKPYEPIVIRLMTIPGVDRLTAWSMVAELGTNMSVFPDQRHCASWAGVCPGTNESAGKQHSTRTRRGNRYLRRILTQSAWATSRCKRGYLRAAFHRIAQRRGHKKAVVAIAHKILVAAYFIIRDKTTYLELGEDYFDLLHPERTARRLARRLERIGYQVTLTKAAATAPRSSEGQQPKKRGRPCKCAERGIDCKHKR

SEQ ID NO: 292411 - protein, 333 aa, unidentified
MRRPKEQVAEGEDLFVGIDLHKIRWHVTIRTFDVELFSASIPGTWETLQRVLSRYSGHPLQAVYEAGYFGFRLHDRLVAHNIPCIVTPPSLVPQEYGNRVKTDRRDSSKLAHLLAKGMLKRVWVPSEEELYHRQVIRRRRQLVRDRVRTQSRIKAELSFFGIRLEEPRGRWTLIYFETLQSIRFGNRWMQESFNRLLEQYEFLSAQIDKQTQLLRELSETELYQERVKILQSTPGVGLISAMELLLELQDVSRFRRAEQLAAYVGLTPSQYSSADKVRMGRITGIGKNTSDQINFIFACLFFVCHSFTSFLFIKTRPLLIWCLNMIFYFKLIH

SEQ ID NO: 292412 - protein, 320 aa, unidentified
MISYTTFIGIDVSKEHLDVHILPSNKRFRLENSKSGCAKLCRQLAKLQEPAAGVEASGGYERLALRTLTAAGIDSFCFDPVQVRAYSRSRGQRAKTDAIDAEMIARCLTQNHETVRPYIHDPVTGELAELVAFRTRLVKEATKLKCQIEQAETALVIRILKAQKRQVKARIALLSKAIADTIKSSPELSHKVEIMRSMPGVGPVLSSTLLARLPELGRLEGREISALAGLAPFACESGKSKRPGRCQAGRGDIRSVLYMAALSAIRMKAHPLTSFAERLQKSGKPFKVVIVAVMRKMITILNAMVRDAKNWQQNAPQKAS

SEQ ID NO: 292413 - protein, 398 aa, unidentified
MEAAKPTTWVGVDVGKGFHWAVAVGTEGETLLSRRVDNDEADLSALVEEARALADGEPLWAVDQPGGGAALLLTLLWERGQRVLYIPGLAVDRARDGCRGEAKTDRRDALVIAEQARMRRDLKRLEPTDELLAEMRLLLSRRRDLVADQSRALQRIRDALLALFPGLERALPDMRYRGALELLCRYQTPAAIRRSGRKRIEAYLKGRGARNAAGLALAAVSAAKAQKATMPAEGIAASIVADLAREVLDLKEKIAAFDGEIEVRFCDHPMAGVLTSLPGMGVLLGTEFLVTVGDPHDGFAGPDQLAAFAGLAPAARDSGKKTGNNRRMRGGNRALKRVFYQAAFASLRGCPASRAFYDRKRAEGKRHNQALVALARRRVNVLWAMLRDGTEFDPVLAT

SEQ ID NO: 292414 - protein, 310 aa, unidentified
MADKICYIGIDISKDSLEVSPFDKGLRSVVNKSKNIKSLIARLKKIDNAIICCEATGGYEKILVAECLAEEQPVALVNPRQVRDFAKSKGILAKTDKIDASVLQEYGVQNTPKPLTAKPIWLNRLNGFLKRRDDLVEMNKQEKCRLKPAPSKEIESMINKHIESLEKMINKIEKEIDKIMAAENAFNDTFKDLVKVNGIGRQTAVYLIGFVPELGKVTGNQAAALVGLAPYCNDSGKFNGKRCIRGGRSEVRRVLYMAAICAKTHNPTLKKFYDRLIAAGKPTKVALVAVMRKLVVLANKICANPDFKPI

SEQ ID NO: 292415 - protein, 353 aa, unidentified
MNKQSLKYEVILGVDTHLDTHVGALIDGRGKMLGTLPTATNTSGYNQLLKWAQSFGPIQRAGIEGTGTYGAGLARFLRDQGIDVFEINRPDRSMRRFLGKSDPTDAESAARSVLSGRARAIPKLQSGLAEAMRITLVARRSSVKSRTQTINQLRALLINAPESVRAKLWQSKPERCVESCVRLRTLGETKSLKTLAMTLRLLAKRWLYLTEELKELDGTLEHLTLLSAKRLRHQFGVGPQTAATLLAVAGDNPERLRSEAALAALCGVNPLPASSGKTVRHRLNRGGNRSANNALWTIAMVRMRSDPRTRAYVARRTVEGKSTKEIHRCLKRYIVRELYPLILADLKDAAAAA

SEQ ID NO: 292416 - protein, 350 aa, unidentified
MNITTYGLDLAKQVFQVHWVEPGTGEIKRKALLRAEVSAFFAQRPPGVVAMEACGSAHHWGRMLHRLGHEVRLLAAQFVRPFVKTNKTDAADAEAIWEASQRPGMRRVALKSEEQQAVLSLHRIRQQCIKVRTMQAHQVRGLLYEFGVVVPKGWRALLAQAVPLLADETRYAVPELVRGQLLRQLEGLRALTTRITELERQIASWQRRESECRRIAAVPGVGKLTATAVIATVGDARAYRSGREFAAWLGIVPRQSGTGGRVKLLGISKRGDPYLRTLLIHGARTVLAQQSRADRQLDPWLKGLLSRRPKNVVIVALANKMARTIWALLAHGREFDRCWSRSSMPASALS

SEQ ID NO: 292417 - protein, 321 aa, unidentified
MGKELKFADVYVGVDVSKARLDVAVWPSQQVFSDTNDAEGIGRLATRISGLNPKIVVLESTGRLEVPMALELGERGVPYRIVNPRQIREFARSMGKLAKTDRIDALILARWAESAQPEAKPLPDPDRRELRALVTRRAQLIENLTREKNRLQGETVPHVRRSIKDSIAWHERQIARLDKELNQFMKNSANFSGQSDRLQSVPGVGPVLTRMIIACLPELGTLNRYQIAALVGVAPLNRDSGKSSGKRFCWGGRIEVRCALYMAALVGTRHNPIIQALYERLRAKGKPAKVALVACMRKLLTILNAMMRDQTCWRQTSPAEA

SEQ ID NO: 292418 - protein, 351 aa, unidentified
MRKQAELQQVAVYGIDIGKSLFHVAGLDTAGRPTLRKKFKRDALLHFFSNVPASVTAMEACPGSQWLARKLKGYGHDARILPAQFVKPYVKSNKNDSVDAEAIAEAATRPTMRYVQIKRVDQTDVQATHRARDMLVYQRTSLISQMRALLLEQGLPMRVGAGAFKLDFERILGDVQSDLTPSLRKLLATLREHLGQMEAHIASLTRDIEDLADRDDVARRLQTIPGIGPLAATALIAAVGDGRQFRRARDLSAWLGLVPAQYSTGGNAHLLGISKRGNSYVRRLLIHGARSCVMHMDRTRNQLGAWLDQLSQRVHVNKLTVALANKIARMAWAILTRPGALYQRNDPRFAA

SEQ ID NO: 292419 - protein, 367 aa, unidentified
MDGHDAAIRALTPGPRTREGCAVTRFVGLDVSQKLTAICVVDETGRRLWRGQCATDPDQIERAVRGHAGEDAHVGLETGPMTPWLVHELRGRGLTIICLDARHASAALKMQMNKTDQNDAEGLAQIMRTGWFRSVHVKSLDAHRARALLGARAQLVGMTTRLSNHMRGVLKTFGLLPGAMRGLPFDRRVEALLADRADLAPIVRPMLAAWRQLREQTAAFDKAVRALAKASPACRLLMSVPGIGVLSVLAYVSTVENPERFTRSRSVGAHMGLTPRQYQSGEVDRSGRITRCGDTLARTLLYEAAVVILTRVKRASRLKDWAQAIVKRSGPGKARVALARKLSVILHSMWRSGEPFRWSEHEQVQAV

SEQ ID NO: 292420 - protein, 440 aa, unidentified
MSDLNEEKVGPEFAAQIGLDWADQKHFWAMRTADGKLQRGELLNTPEAIQVWAAELGQRFGGRPIAVALEQSRGAVIAMLCKYAHLVLFPVHPNTVSNYRKAFYPSGAKSDPGDGHLILELLLTHPDKFRRLQPDTVETRKLQFLAEERRKLVNRHTSEVQRLIGWLKQVFPQIVHWFDDPASAMVGSLLLRWPTLQALQKASPKVLLKFFSQHNCRGPELIRQRIEQIRQAVIATTDEALMQTGLLCIQNSIALLEIMRAGIATFDQQIAEIYRNHPDRAIMESFPGAGAALEPRLIAAVGSVRDRFDTANSMACFAGIAPVKESSGKAAWIHWRWACPKFIRQTFHEWARCSIPTCDWAREFYDRQRAKGKGHHAAVRALAFKWIRIFFRCWRDRVPYSEEHYLKALRHHAPPKPEPTIVEIGWKTTVGFSKLSVVSS

SEQ ID NO: 292421 - protein, 438 aa, unidentified
MSNKVIFNLDELFISVGIDVGADFSWMSIALPNQQFVGKPYKILHNSIDSLTTAVSKIKEAEELYSLESRIFLESTGIYHYPLFCYLRDKGFNCSVINPIITKNSTNINIRKVHNDRFDSKKAALIGLKPDLKVSLMPSDLALNCRNLCREYYDLMDNRSAYVNKLQGELRMAFPQYLGIFSKVTINTSLTLLETYTSPSAFLEADKQEIIDIIRSTARFGLTYAQNKYNAIIQAATDANQFGYIIDSNIKRIRLYISFIRKYDEEINSILESLHELVDANEDADFVKQIHLIETFKGAGFLSAVSIMGEIGDFSAFSKPKQLFAYFGLDPAVKQSGKFEGTKVQMSKRGSAIARRVIHMLTLQSISISRNGEAKNPVLREYYLKKCDSKPKLVAMGAVSHKVCNMIFAILRDNKPFKIIAPQEHIKQYNAAKCDMAA

SEQ ID NO: 292422 - protein, 345 aa, unidentified
MENMYYIGLDVHKKTISYCVKDGSGRIHAEGKIPATRFDLDRWMKTLPQPWTVAMEATIFTGWIYDHLRPHAAAVKVAHPLMLRAIAAAKKKNDRIDAKKIADGLRCNFLPECYMAPTAIRERRRTLRYRNLLVRQTVQLKNRISGLLMEAGVNYNKEKLHKVGYFRELLKSNPDIDESLRPLLQLCRETLVRLQKTESALIRSLARDRFLVERVEHLMTIPAVGPITARTWALEVGEVSRFSSIKKAISYCGLCGAEQSSGEHVKRTPISKQRNKHLQCVLVEAAHRAPRRSPELALLYDREKQKGNANRATLAVARKLVAYLVAIDRSQRDFLLVEKENQAAA

SEQ ID NO: 292423 - protein, 349 aa, unidentified
MRSIGMDVHRDFSEIAIAEDGVVRAAGRIATTPQALELFAQSLAPDDQVAIEATANALAIARIIEPHVRRVVLANPKAVRETSRRAKTDKIDAKVLAQLLAVGFLDRVWAPDEAARTRRRLISRRGAMVRQRTREKNQIHAVLQRQLVKRPPMSDVFGVKGRVWLAEQVDGLPLDERLTVGAGLRQIDFTEAELAELDKILAADALSDPDAMRLMTLPGVSAVTAIALLAAIGDIGRFKTPRHLVGYLGLDPRVRQSGNEPARHGRISKQGPGDVRGLLVEAAWHAARTVGPLRAFHSRLAARRGANIATVAVARKLVIITWHVLSRGENYAFMRPALSGLLWGTSSSR

SEQ ID NO: 292424 - protein, 380 aa, unidentified
MEYCTTIGADVSDRTTKICVMTKAEGGERRIVVETTCATTEAGFEEAFSKFDRSWPVVFETGTHCRWMDRLFRKMGFRTIIGNPGKIPSITKSNTKNDRNDARELARLALADPAMLHPVFLRGETFQQMLRFHHARNMLISQRTQTINQIRGFAKSMGHRIERTSTERFHELGKAEWPEELEECAWPLMGSLKTINLKIKAYDKLIARLAERPEFKPMVERVRAVYGVGIIGSTVFVAAIGGRPDRFGHTRDVGAYLGMIPKQDQSGDGDKQLHITHAGSDIVRTALVECAGVAMMSNAKDTDLKLKGLRIAMRGGKIARKKAKVAVARGLAVTMLAMLQHPEREYVPLSEEGKKGFERYRAELEYLTMQKASRKEKKVA

SEQ ID NO: 292425 - protein, 366 aa, unidentified
MKKPSTTASRRSGKLPDGQLTIGLDLGDRSSFYCVLNRAGEVIQEDRVATSPDAMKKRFEKMPASRIALETGTHSPWVSRLLTELGHEAIVAHSRNVRLIGESRRKDDRLDAQALARLARIDPKLLSPIQHRSAQAQADLTVIRARYALVRARTALVCAARGLTKSFGERIRGRNPKGFGSSTTKELGPQLQVVLAPMLSALEAITARIREYNVQIETLAEQSYPEVALLKQVKGVGTLIALTYVLTLEDPRRFRKSRDAACYVGLQPGRRNSGQSEPQLHITREGDSYLRMVLVQGAQHILGPFGEDSDLRRWGLKLAERGGKRGKRRAIIAVARKLAVLLHHLWISCEEYEPLHNARKRRTVAA

SEQ ID NO: 292426 - protein, 342 aa, unidentified
MTIVAGFDVHRRQITFDALDTDTGELMRGRIDATPGAVERWAGSFEDREVQVALEACTGWLFVSRALQRAGAVAHLAEPVETSALRGRKRRAKTDREDARWLRTLLSEGRLPESWIPPEHVREWRSRARLRKTLIDERTQWLQRVQATLFHHGIAGAPDKLHSAAGREFLEELELPADARERIAIALAMIDSLDGQLRPLESQLRALARRQTGCRALMGLYGMGELTSLMTLTELGDVQRLSASRKAVRMAGIDIGVHRSDRRSRVGKLNRQGSPHLRWALYEAALSACRPTSPDHQDYLALKARGLSHTRASLTIARKLARRSFHILRELGPAALAPITTT

SEQ ID NO: 292427 - protein, 321 aa, unidentified
MSQNNFLYVGLDIAKATLMLSLLGQSTELKNTAEGHAQLLQLLRSVPRPLHIILEATGGYERTVTHALHRAGFALSVVLPSRVRSFAFAKGTLAKTDPLDAAMLAEFGEALKPTPTQPPTETQRQLAELVTRRLQLVETRVAEQNRSDHYTDRTTQRQALQLLDFLKQQIRECDRALVTLLAADPALQAQADRLQTVPGVGAVTTATLLAQMPELGTLSAEEAAALAGVAPYNQDSGPYAGTRRIAGGRKAVRNVLYMAALTAVRHDDILRFFYQRLRKAGKPAKVALTAVMRKLIILLNRLLANPNFQLSGNAPKATVQL

SEQ ID NO: 292428 - protein, 312 aa, unidentified
MDQDSVVVGIDVSKDRLDACVLPAGEAFVVPRDGEGLEVLTARLSALRPKMVAVEATGGFEATVAAAIGGAGLPLVIVNPAQVRAFAQAMGRRAKTDPIDAAVIARFVEAVKPEVRPLPSAAEQLLADLVTRRRQIVQMIGAEKQREKRQLQPRLKRSIARLVGALTKELGELDRQIDDEIRGTPAWQAKEDLLRSMPGVGPVVSRTLLAELPELGRLDRRQIAALAGLAPWTRQSGKWKGKSFIGGGRASVRTALFMAALVAARHNPVLRAFHQRLIDAGKPKLVALTATARKLLTILNTMVKTQTPWSHA

SEQ ID NO: 292429 - protein, 409 aa, unidentified
MLFAGIDWASEEHAVAVHDDAGKSVAAFMVEHSAEGLDKLVARLRGMAEPAELTVAIERPDGRLVDRLLEAGHPVVAVSPNAIKVWREGEVASGAKSDPGDAAVIAEYLRLRFRKLQALRPFSDETRALRAAVRARGELVDQRTVVHNQLAAILDAFWPGAKEVFADIASPIALAFLRRYPTPASAGTLGEKQMAAFCKKQGYPGRRSPAELIERLRKPPAGIVAGAEMGARKAAVLAYVEVIASLNAAIRDLDKEVFTRLGEHPDGEIFTSLPRSGLINAAQMLAEWGDCRQAYDGPDAVGALAGMSPVTKKSGKHKSVHFRWACNKRFRNALHTFADQSRHGSDWAAGIYDRARKRGADHPHAIRILARAWIRVIFACWRDGVAYDPAKHNAAAALAASSDSAPQAA

SEQ ID NO: 292430 - protein, 436 aa, unidentified
MRGCRCSMIMGFTKPIEHFNLQRKKVITMNTLYVGIDVSSKSNVVYLMLPNGDKHSNFSVANSHEGSTLLVKKIYSALTSHSLDTVLIGLEATSVYGVNLVYFLREDATLAPFNRKIHVLNPRQVKKFHDTYNDLPKNDYVDSFVIADCLRFGRINKEVYMEDYRYKALQNLTRARFFTVQNLVKEKQRFINVLFKKYSTMTQEKVFSDTFSTTALAVYDEFESAEALADMDLHELTAFIMEKGKNRFPNPNAVAKAIQKAARSSYRLPKTVNDSVNQVLSISITSIKALEAQIKEFDKAIATQMELLPNVLISIPGIGPVFSAGIMAEIGDINRFHNQAQLAKYAGLAWKQHQSGDFEAQTTRLINSGNRFLKYYLCEAAFSLVRCDKEYSDFYHLKYKEVNRYQHKRALALTARKFVRLVFRLLKDNRLYTSAE

SEQ ID NO: 292431 - protein, 377 aa, unidentified
MTRPAAIPTDEHTLYAALELSKNSWLLAIQFPGHPSLHPVKGGDAEGLVAKLDAACERLAKIAGQVPRVTLCYEAGYDGFWLARLLEQRGIDCFVMEPASLQVNRRARRVKTDRIDVEALLHTLIAWCRGERHVCSMVIIPSAEEEDLRRSHRGRDRLVRERTAHINRIKGLLFGQGIRGINVKRHYKTLTPADLVTGDGRPLPERLSREIAREIERLALVQEQIIETERERDQALNSCEATERKRHDLLRLKGIGPAFAAIFARELYYRRFANRRQVASYIGLAPSPYDSGEGRRSQGISKAGNGLVRYTMIQAAWLWLKHQPQSALSQWFHRRTQGHTGRMRRVMIVALARKLAIALWRYLELGLIPQGAILSAR

SEQ ID NO: 292432 - protein, 350 aa, unidentified
MDKELYIGVDVSKQTLDLAFYDGESIDWKKAHIKVSNNNAGFKKIGSWVAKVSKGVDIVLFCMEYTGLYTQNFRLWLEEKHYIYRMVEPRKMHRFEPDLDDGLRSLDRIKTDELDSFRIAIYCEQNHRKILRNPSKLPPPVYFKLKRLLAERKQTVKQSVLYKQQLHDICAYDTDLSVERKNGQLKTLNDALKGIDNEIDMYIKEDADISKNFSLLTSIPGIGRVVALETIVLTENFMAIDNPRKYACYIGVAPFKKESGTSVRKGSSVSKKGFKQAKADLSIACLVCMQHIPNIRDYWERKRKEKCSGIVFNAIKFKIILRMFAVIKRGTPYVETDNYRNGKNKQPGVN

SEQ ID NO: 292433 - protein, 346 aa, unidentified
MQFYTKQHKFYCGIDLHTKKMYVCILDEKGEIREHKNMKTNPESFLAAIAPFREDIVVAAECMFTWYWLADLCQKEGIPFVLGHALYMKAIHGGKAKNDKIDSKKIAVLLRGGMIPMSYVYPEKMRATRDLMRRRNHLMRKRAELLAHIQNTNSQYNLDEPFGCIAVPKRRGDIVGAFDHPAVKKSMEVNLKVIATYDVLLDDLERTILKLARYHDPVSYALLQSVYGIGRIGALTILYEIENIKRFPRVQDFVSYARLVKCEKTSAGKSYGTGGNKIGNAHLKWAFSEAAALFLKGNEPAKNYMERLARKHGKGKALSILAHKLGRAVYFMLKNKEAFDQEKFLR

SEQ ID NO: 292434 - protein, 452 aa, unidentified
MAQGSGLTRGDRNRNDRIAALRAVVRRDRAVLAIDLGEDKQAAVLVDHEGRVLARRIIKAKTYQLGGLLEWAAGQAARAGFAGLTVACEPTGHRWKALMELADAAGHGFVCVQSLAVARAREGDDYTRDKTDHRDAYLIGKLVIRLECYLPERADATWARLRHLGARRFALVTDVISCMQQVGDLLACAWPAALGVAARPLEATTWLAAMGMVTDRCAGNPARLRKMGYDKFVAAIRRELPRWGAKKICRKIARGLWEALTDTGGVAAQRRGALERVHLLMGDWRSLLARLADTEGRMTAVLDELGLTELVTSIDGLSAVGAAVILAQTGELSRFSSGRAVVKHAGLNPSEHTSATLAGKTRISHRGRPGLRAAAWRAVWGGMRHNRVLHARHAHLTGREDNRLSDGQARSACAATLLRWLYAVITRRQMWDPRIAAGTIPARPGAVTSAAA

SEQ ID NO: 292435 - protein, 418 aa, unidentified
MKSMEITAVGIDVSKSKSTVAIRRLGGVIVARPFDISHSNHDLEKLVSILKTTGGDIRVVMEHTSNYWKPIALTLKEAGFYVSVVNAMLIHNFSDNSIRKLKTDRADSLKIANYALTFWNELPPFNDEDETRLVLREQSRMYERLASTATSLRNGLIALADQTFPSIDQAFGHAIKNADGHEKWVDFFSIYWHRDCVLRLSIEKFTESYRKWCLRRNYKFRTNTAHKLYALAQDAVPTLPKNNGTKALVLQACKSLNAVCEAKQSTQEEMNRLASLLPEYEVVMQMEGTGPITGPALMAEIGDVRRFKNKKALVAFAGIDAPPFQSGNFESKSRHVSKRGSPHLRRVVFLVANIILTLSHKDNSVFCFMDKKRAEGKHYYVYTIAGSAKFLRIYYARVTEYLRTQEIPVAASCLNGNS

SEQ ID NO: 292436 - protein, 411 aa, unidentified
MKSQLETLHKCVAGIDVHRMKHVVTVLIEDPAGNIARHTREYGGFKRDLKALAAWLHELGVELVIVESTGIYWKSVYARLEEVGLRIWVVNAHHVKNVPGRKTDVADSEWLAQLGRYGLVRPSFIPPKDWRELRMVSRYRRKLKANLAAETNRLHKLLDDAGIKLGGLVSDINGKAARAMVDGLIDGLAPSELIKLSGRLKAPKDSLLASLDGDLSARHRLVLEEIREHLRELERHLEKLDAYLCEAMQPYAFAWSLLQTIPGIDEIAAAMILIEIGDDLSHFGSADRFASWAALCPGNHESAGKRKSGKTRKGNSILRYLLCEAANGAIRTLSVFREKYRGLVIRRGHKKAIVAIAHKLIRTIYFMFTRRQTYHDSGFDYAAANVKKNAPRWIKALEHHGYVVKHSTAAA

SEQ ID NO: 292437 - protein, 386 aa, unidentified
MTVRVINPPAAMRVEMAHCLFAIELSKKTWVIGFIRPFSSKISRRTLNGGDWKGLLELIDEAQTRASRETGRAVEVVSCYEAGYDGFWLHRLLEAHGIRNYVIDPASLQVDRRARSVKTDRIDTERLLRSLMAYLRGEPKVWSVVRAPSIAEEDARRLHRERDRLISERVRHVNRIKGLCALHGIYDYQPLRPQAMARLEQLRTAQGIPLPPRLKSEIKRELQRLELVVEMIATLEAERDAIVEDAASTHINAKKIRDLHRLKAIGPEFAAVLVGEIFHRHFDNRRQLASYVGYAPSPFQSGSVARDQGISKAGNSKGRTTGIELAWLWLRYQPGSDLSIWFQARVGATKGRIRRIAIVALARKLLVALWRYLETGLVPRGAVLKG

SEQ ID NO: 292438 - protein, 361 aa, unidentified
MIRTSGRAPSRCCRRPAQYFGASRSTSARPAWLVAALTETAAVIDRIGVEGSSGLGRPVVLALSAAGYDVREVQASRTNDRRRRRHRAKTDITDAQAIAAETLADAHLPPAGKHASDPPAAWDALHTIRTWRESLVLQRVRQLNEAEPVLTSLPIAIRDQLPPTSKVMAALTVLKALRLDQCGSLTAADQLKLSRLAATREAIAAINKQLKEIDQQVPQLLDTLGCTLTDIVGVGIVTAMTLLAEVGDPTRFHTEAQFARWCGAAPVAASSGEGHGSPQRYRLDLAGNRQVNSALHIVHVTQARMHDPARSYLTRRKTEGKTIREARRSHKRQLANVIIRHMWNDADRLAKVQAPASTVAA

SEQ ID NO: 292439 - protein, 386 aa, unidentified
MQRPNDLSRSLTVLKQDSTLIAVIEMSLSSWLVAAVVPGVQRQPLKKLAVDESALLKLLHRWREEAEKAGHKIERIAVAFEAGRDGFWLARWLRTRGIEAHVIHASSVAISREHRRAKTDRLDTELLKRAFLGWLRGERDHCKMVAIPTMEDEDAKRPNRERESLVGEQTRIVNRMKAALSRLGIRGFNPKMKKAAERLEHLRTPEDEPIPPNTLAELRRDMERRRVVSEQIRQIENARLERIEHAPGHGPHAMVRLLARVIGVGIETADMLVQEVLSRNMRDRRAVARYAGLTGSPDESGTRRREKGLARSGNARVRRGMIQLAWRFLMFQKDCALAQWFRARTENARGTRKTMIVALARKLLIALWRLVHEGIVPDGVVLRPAQ

SEQ ID NO: 292440 - protein, 464 aa, unidentified
MSPASRMPQQLHLDGLPAIHPNAAGIDIGADELVVAVPTDRDPQPVRAFRTFTQDLHELVAWLVACRIDTVAMESTGVYWIPIYELLEQQGITPYLVNARHVKTVPGRKSDWNDAQWLQKLHALGLLRASFRPDGELVALRTVVRYRAELIQHRAPHVLHMQKALQQMNIQLERVLSDIMGVTGQVIIRAIVAGERDPVVLAQHRNPACKSSTDTIAKALTGTWKAELLFVLQQSLVLYDVYTAQLDVCDTQIVQMLAATESRGTPDAPLPDLPPRKDGSRTKRAKNAPLPETRAQFARVVGVDLVAVMGLAASSVQTILTEIGTDMTRFPTVKHFCSWLGLAPRNDISGGKVLRSRTQKVVNRATQAFRQAAQSVTRSDTAIGAYYRTMRARKGPQQAIVATAHKIARTVYHLLKYGEAYEAEQAADYERKREEREVRALTRRAHKLGYTLAQMGESTITPST

SEQ ID NO: 292441 - protein, 350 aa, unidentified
MIIIGCDYHPGFQQIAFVDTETGDYGEQRLAHSEGAEKFYRDLAAQGKKVRVGMEASGHARWFERLMAELNFELWIGDATEIARKRERKQKTDRQDAQHILQLLMENRFPKIWVPSGENRDLRQLLWHRHRMVQARTRIMNQLQAVALNEGLRCKKKLWREKGRQQLEAFRLAPWASRRRKDLLQLLDRLNPTISDLTQAIEQEVEKCPEARRLRTHPGVGALTALAFVLIIGRTERFQCGKQIAAYLGLVPLEDSSGNRRRLGHITKQGSSILRFLLVEAAQVTARSIPEWRNKYVHLTMRRGRKIAKVAMARRLAIALYWMWRKGWDYEQLRKFGSHAGQPGHRDGVK

SEQ ID NO: 292442 - protein, 316 aa, unidentified
MASPGVVVGIDVAHAELVVAVRPTQDAWTSVNDEAGIAALVRRLRPLEPTLIVLEATGGYERAVVAALATAGLPLVVVNPCHVHHFARSTGELAKTDQVDAALLALFAERVHPEPRPLPDAATQALDALLARRRQLLDMLTAERNRLAHAVPAVARDLRQHIRWLERRLRDLDRDLDAQIHASPVWRATDDLLQSAPGVGPVLSRTLLAALPELGRLTHKQMAALVGVAPRARDSGTRRGRRHVCGGRAPVRAVLYMGALVAARHNPVIRAFYQRLVAAGKPKKVALTACMHKLLTILNAMVRSNTVWRASVVQTT

SEQ ID NO: 292443 - protein, 474 aa, unidentified
MIYSVGIDFHKDQHRARCLDERAQPCDSFSFQTTPEGLAKLEERVFQDGANPIIVFEPAGLAWLVVAVYLRSRHPDCRLVKAKMQKIAALRRYLRGSAKSDRIDALTLAKMPFIDPEQLYEIYLPPAKVHALQRLTRQRKRLEGNITSRKIRIGATTDGYLPGVRRAFDDPWSPQSRAFLRSRLNPFAVVRDGEEAFHMFLSKSTSRGKWSRAESHLVFLACQSVSDLYELSQSVETINEEFFTELQEEVARELRLMEVEEAESESLSRRIAELYRKLHPSDNLRTIPGVGEHTAPVFLSAVGDPTRFRGQSAFANWEGVVPGARQSSNAEAKGLRMTKAGPAIMRMSLYQAGDIGRRWDPQLAATYYREMVYHGKNHKQAMGAVMSHLGARVLAVLKEDRPYELKDTDGKLVSKGEARRIILSRYHVPEEIRQERRRRKPVKVRRKDREMTTYRTNEAAKAPQPVEAMTISRK

SEQ ID NO: 292444 - protein, 444 aa, unidentified
MARKSKKQRLKVIYPRCAGIDIGSREHWVAVDPTVCEEPVRCFSAFTDSLYALADWLESLAVEVVAMEATGVYWIALFEVLDKRGFEVQLVNSRATRQVSGRKSDVLDCQWIWQLMSHGLLKGAFRPADLTCVLRSVVRQRDTKVKEQSRCIAHMQKALTQMNLQLANVVSDLMGKTGTAILRAIVSGERDPCQLARLRDRRLRADEQTVARSLQGNWREEHLFALTQALAHYDFIDQQIRDCNRQIEQQLGALPVLAEHCPEPVKPLRNPQRGAAQQAALHQALYQVMGVDLTAIPTIGIDTALVLASEIGPDLSRFPSSEHFCSWLALAPPTRISGRKPLPGRPPRVVNRAGQALRQAATTARNSHSFIGASHRARLARLDSANAVKATAHQLARLVYVMLTQGQPYVEKGIEAFEARSQDRQLKALQRKARKFGLQLVAAA

SEQ ID NO: 292445 - protein, 353 aa, unidentified
MLSPSTLRASRELPIAKVDDLSRSLTALDQEKTRICAVELSRSSWLLGGMVPGVERHPLKKLEAEAPALMRVIDRWRDEAIRAGRTISRIVLAYEAGRDGFWLARWLRVRGVEVHVIHSTSVAVCREHRRAKTDRFDTAMLMRVFVGWLRGERGHCSMITVPTIEEEDAKRPGRERESLVGERTRIINRMKASLARLGIRGFKPERRRAPGRLETLRTPENTMLPPNTLAEIGRDMARLAVIQEQIKAIEQARLDGIARTPDEPAHARVRLLARVIGLGIESADMLVREVLLRDFRDRRAVARYAGLTGAPDESGSKRREKGLAKSGNSRVRRGLTTPADLLTSGRPEVAVPE

SEQ ID NO: 292446 - protein, 357 aa, unidentified
MTCGCSFSELTYDNSEKLGEITFENKPSEFHKLTRKVSRFLTEEKTAAYGLENGYGYGHALAVWLIEKGCMVKDVNTALSYAQRKSVPKYQKNDSYDAEAVALVLINMLDKLPDAVPADAYWTLSQLVNRRDNICSHQQRLKNQLYEQLCVAYPSYKQFFGDISRRTALYFWLRYPSQEHLKGKTAEELVAELRPISHNNCSIKRAGKILELVRMDGQTTREHQESRDAITRNITGDLEHYREQLEIVETAIETMLPSFNCTLMTMPGVDVTTAANMLSEIGDINRFPNANKLAKFAGICPINFSSAGKGKDMYPKQGNRRLQAIFYFLAIQMIQISTNGTPRNKVFREYYLKRVAE

SEQ ID NO: 292447 - protein, 320 aa, unidentified
MQCIGVDVGKQALVTYDGEKERVFPNRKGLPEFAEFVDHGRDVLIVFEATSTYSRKLETFCEEKSIPVMKLNPRLIPSLREVNNKRSKTDQTDAELLYRYGVERGNDEAGESRFADQLTQAVSAQLAIYRVTQKARVSYQGLFEALSQDPSTPRELLDELTEMIASLKEKERECIARAKDLIEGEEEASQSLRLLMTIPGVGLVTAITLVALFRRYPGTNRKQIVALVGIDPIEYRSGSSVHKKPKISKRGNSEVRKLLYEATLSAARFNPGVKEIYRRLKGRGKPEKVARIAAARKLLLIAHAIYKSGEQYRSPINQEG

SEQ ID NO: 292448 - protein, 342 aa, unidentified
MNITVSGLDLAKNVFHFVGCNKAGKIIRKKMLRRNEVLSFFAKLPPCLVGMEACSSAHYWAREIEKLGHTVKQIAPQHVKAFLRGNKNDYNDALAISEAVVRPQMRFVVTKTQTQQDIQSIHIFRKKCERDRTANSNEVRGLLSEYGIAIPQGIHNVFKTLPKLFDKTEDNGLSDLFKTLLAQHYEKLVELNKHLDFYTKKIKVLSKSDECQRLQSIPGFGPIVASAFYQHVGNGSGFKNGRCVSASLGVVPKQYSSGGKDKLLGISKRGDKYLRTLLVHGARAVINTLKDKKTPLANWLNRLIVTRGKNKATLALANKLARIGWAILKSGGCYSAEHAAAN

SEQ ID NO: 292449 - protein, 462 aa, unidentified
MKFYLGGDVSKGYADWIILSEKKRTVLENFQLDDTYAGHCKLYSMLETQIEKYPGSEIYAAMESTGGYENNWFNTLQSYQKVFNLKVARINPAGVTFNRKAGMKRNVTDAISALSIAEFMIDHPENITYNQDDKWKSLCRHWNFVEMQKQQRVQTINQLETILYSANPTLMRFKKGDFPNWLLELIIQCPTADKLARAKPEKLAKIPYLSLARAKELVVEANQNIASATDRNAEILVTQIAVQIKSFDQNIKSQMELIERDLICPEIELLKSFKGISTISAIGLLLEIETIERFPTVKGFSCYFGLHPKFKQSGDKIIGVRMSKQGSKNMRKILFNIAKGAITYNPLITEVYEKKISHGMAKMAAIGVCMHKILRIIYGILKNKQAYNPLIDKQNCERSKEKQQDKLMQENANIEKTRRYQEFDVTAPISRKQTKKRREHDLSQCEITSQSTGSTCSSETKL

SEQ ID NO: 292450 - protein, 454 aa, unidentified
MKKQDSYDYYVGIDCAQNKHDFAMKNNQDKFLIKRGHFSNTLQGYEKFLNTVLSKCLNKDKILFGMEVTGIYGTNLYERLKSDGYHVVMISPDSVKNYRDYKRLNKTDKIDSGCIAELLLNGDAQIVHVAKNGYTDLKAYIRRRNALKVTCTQETNRFLAKVCLYFPDLLKVFPSGRATLKAIFSIYPTPYSIIEADFDELVSVLQKASKNKFGVDKANELIHAARNSIVVRKSISDGELYNIHSLIDSIDSLESEIRNLEKIIDSKAEEFPAYHVLLTLTGCGKITAATIVAEIGDISKFHKASQIVSLAGLYGDNSKSGSSVNKRGKISKKGSRYLRHAIYMVAEFARRNNPIFKAYFTRKKNGDRTKHTLAVNAVANKLCKVIYSLMKNQSTYIIQYRDLVKLSESTQNEFFQNAETDFSAKTRRKKYLYEDEYGELHEFVFKSIKTALIE

SEQ ID NO: 292451 - protein, 426 aa, unidentified
MSERDYSKQVARRQRIGETTLVVGVDIGSAFNAVGFMSKEGRVLGSYPKMPNSREGFEEFVKITEGLKAKHGLSDVIIGLEPTGHYWRKFAYFAKAKGCEVRFVRTTALKHHRELDESSSAKSDQRDALTITNITREGKYIDTVIEDGRMRHLRILVKVREKIQKRNGSAKNSLHAALDDYFPELKEIFWSMHSRGLWALLQRCPFPEDVLALKISALKQMIGRASRRRVEASRKAVAVYQAAKESIGLKQIGSADRYRLKMCLEEVMRTGLMIKDIEQEIKRMLKEIPDAQYLLSIPGIGPISAAVFLGELGNPSYFQSSRQIVKYAGYDPQESDSGYRVSRRFISKKGRWLLRKHLFLMSMRVVVLSRYFQEYYQRKLQTKNRFGQLPRKKEILCAVAIKLIKVIFALLREKRNFEDTVACSVE

SEQ ID NO: 292452 - protein, 448 aa, unidentified
MAAEASSSELRLAPSTGFQGSNGILRRAAASPRIDKREHGNRLRGSRPPPSGKGCQVRFVGIDIAAEKHVVAVVSEAGDVLVKPTTFGEDAGGYEKLFGILGEPEGALVAMEATGHYWKNVFAALAGRGFQLALLNPLRTHRFAGENLERTKTDAIDALGIARFAAQKRPAVTRLPDAVTEELRELVRHRDRLVQDFGDRTRQLHRLVDLGFPELTRYIHTLDSQLATAVLHEYPTAQAFVGLPWKKLAKYRYDGVHIVGDELAKSIIEAAKVSVGRHHGHAYRIQVQHACEDMDLLRRRIKQLDGDIETKLGEHEVGSLLTTIDGVGIQTAAKLVAELGDPAQFHGPEALAAYVGVIPALRQSGKRSPSRAGLTPIGNARLRAALWMPTLTAVRRNPWLKAHYERLRARGKLPKVALVACMRKLLHAVYSVAKHRRPSVPELAGGPA

SEQ ID NO: 292453 - protein, 361 aa, unidentified
MTQTMTWAGLDVHARSTHAVAVDARSGELARARFGGGIESVVEWLASLTGPVHAVYEAGPTGYGLARAGGELGLRIDVIAPGKTPRAAADRIKTDRRDAELLVRQLMAGTLHPIHVPSPALEAARDLVRAREDVRCDLSRARHRVSKLLLRHGEVYPKDRSTWTREHRRWLSSRRFDEPNTQLAYIDALAAVDGLTHRRDALAERLSHVAADAELWPVVSRLRAFRGIDTLTALALVCEVGDWHRFQRPDQLAAWIGLVPSLSQSGESRTSGGITKTGSRHARRLLVEAAWHYQRPPRIGATLRNRQHGQPDHILQIAWRAQHRLYRVHQRLRQRGKHPNLATAAAARELACFCWAAVTAP

SEQ ID NO: 292454 - protein, 420 aa, unidentified
MTPDQKAAFARTFPVHVGVDTGKRFHVLVARGPDGLRRKPMKVLVSREGFERADAELQGLFPDIERSRMLIGLEFAGHHGFTFAHFLANRGYPIVNVLPAHTKRTKELEDNSPLKTDAKDAGVICKLVGDGTFVRFPFLESPYAELRVLVSFRHRLAVEATRFKNRLQGLLDLAWPEFVAQFSTLAKHTPIGLLERWPLPQDLLAAHKATVRAYARKISKGKFVAERFARLYTSARETIALPQATTERRMEILGTLARWRLVRKQMIEAEARLTELMARLPSAQALLTVPEVSAVCAATILAELGTPGDYQHPRQVLKLAGMNLIEKSSGSSQGRRRQSKRGRPMLRRQLFLLAGRWCQRRGLYRSYYEALLARNGGLKTKAVCAIARKLVPLLLAVLQRGQPFDQARWEAARHQPALTH

SEQ ID NO: 292455 - protein, 329 aa, unidentified
MILTEPVRTCLGLDIAKAKFDACLLLGPRAHHAQFDNSAPGLAALRAWCKKHGAPAPHTVLEATGRYGELAAAGLHAAGWRVHVANPRRIKDHARSLGQRNKTDRLDAALIAGFGTTRALPAWQPASAAQQLLRALMRRSADLATMLQAERNRTESASDPLVAKSLARVVRALEKETASLQAQIQAHIKATPELREDIAHLRQIEGIGERTAAWLAAEVPRHLPNGRAAAAWLAVTPRVRQSGSCLRATAPAGAEGNRHLRRVLFMAALTARRRNPRLKVFADRLAAAGKSKMSVLLAVVHKLIKIAFTLLKNHSAYDPNHHPLPITQK

SEQ ID NO: 292456 - protein, 310 aa, unidentified
MDKVYIGIDISKDSLDVAVHGVKNLMHVSNDQAGIQKVINLAMKRNAMLVCFEATGGYEIPLYAALSEAGVPVSPLNPRQIRDFARSMGKLAKTDAIDAQVIAHFASAAQDLKPKPISDTQRLKVIVTRRNQLIEMITMETNRLRGADKDLRAGIEAHVTWLKKQLEDTDAKLRKLIEHDPTCRNKDNLLQSTPGVGPIVSATLVAQLHELGSLNRRQIAALVGVAPLNRDSGMSRGKRSVWGGRGRVRAALYMATLAATRFNPVIRRFYEHLLMAGKVKKVALTACMRKLLTILNAMLKHHTPWSYSSC

SEQ ID NO: 292457 - protein, 398 aa, unidentified
MKTCGLDVHKDSVFCAVYNGKAYSEVKEYDTTTPKIRQMGEYLRSEGVEQVAMESTSTYWVPVWDILLDMGFELMLVNPFLIKQMPGRKSDVKDSQWIACLLHKGMLRGSMIPSPAIQELRTYSRKYTRLQAQKTRSLQKMDRIMVMCGFRIGSCMSNLATKSVMNIITALIKGETHPQALCELVYGNTFNKKSGKLLEALTGNLKEHFRQQLEWEKEEYDLFEKQTEQCLVQMRRICKEHYHAETELISTIPGVSEISAMMIIAETGGDMTVFENSGKITGWAGLRPRNDESAGKYKSTATTKGNKYLRSVLVQVSWAASRIKNGWFKEKFNRLSMRKSRKKALIAIARKLLTVTWNVLYYKTPYHPQRVYVYDPVKVEAKINYHQREMDRMNKLLK

SEQ ID NO: 292458 - protein, 357 aa, unidentified
MTGATSITPALDLTQLVVGVDTHQRTHHAAVVDSAGRLLASEAFPASASGYAQLTGWANRFGNVSVFGVESTGSYGAGLTRHLLAAGYPVNEVNRPDKTTRAHHGKSDPIDAEAAARAVLSGRATASPKITTGIVETVRMLKVSRDGAVKARTAAYSQLRDLITTAPDELRDALLPLTASARVSKAITLRPDTTRLHETPHAARYALRTIGRRIRDLDTEITTTDRTLDTLIADTVPTLVSHTQIGTQTAATLLVCAGENLDRFGNEAAFAKLTGTAPLPASSGKTRRMRLNRGGDRQANRALHLIAVGRLRSAPRTRDYATRRAAKGLTTRDILRCLKRAIARETYNALKTDLLTT

SEQ ID NO: 292459 - protein, 326 aa, unidentified
MKMTHSQAVVGIDVSSGKLDAYVHGHDQSRQVTNDAAGHRELVAWARAKRATTAVMEASGGYERDLARALRRAEFAVYVVDPKRVRHYAKALGQLAKTDRIDARIIAEYGATALAAGRLALPRPDDPQRDRLSALLGARAALIEHRDALQQQSAAMPAGPARQALKDAHASMKLRIKQLERQIGALIAEHAAFAALARRLDTVPGLGPVAIAALIAWLPELGYAGRARISALVGVAPVADDSGDREGKRHIAGGRKKLRNVLYMPVVAAIRCNPVLAAYYKRLLACGKEPKVALVACMRKLLVIVTAMITNQQDWAPHSGAPKAAA

SEQ ID NO: 292460 - protein, 402 aa, unidentified
MNNQTLFVGIDVSKLKHDIAFMRPDKQLLGQPFVINDDRDGYQTLLERLQSVAGRHHIQHYKIGLEATSDYWKNIYYFLKQQPDNFQLTVINPLQTHNWAKTELRRATTDPLDAKNIALFMVEKNPLPSLTRAPLLDIIKDIDRQLCALKKQLTMSKNRLRLELTKVAPELEKATSSLNTKRILSVLNCFPTAKEIASASVEDLRQITYGKRNYSLPASFIEKLKILTEHSIAYKTGIGAGYVVQSLVRQIIDSHQEMARLNEQIVRLYQQVNDQQSLLTTIPGIGRETAIALEAYIGNVNRFPNAKKIVAYFGLNPVIHQSGKSKRKSRLQKKGSPMVRQKLFMAVLGIVSNKGGPIYRFYQRLVDSGKPKMVAIGAAMRKLLVTIYAMLKNQQTFDENKM

SEQ ID NO: 292461 - protein, 314 aa, unidentified
MYYYIGIDVSKKVLNIFDGQKDLIFDNKVNLSSFKKYLRKRHSDFSSLVILFEATGIYSYHLKAFCADYHIKACIINPQVSHNFAKSLGARSKTDIRDARIIWAYHKLLKDKDIRIPKVDPVLITLASYLTSYRLTLKQRLALTNHLEGIKDKALYRLLKKEQERLCKLEQELLVRMDAYIKEYPELYEDYQRLLSISGIGQKTAINLLVLFHTYPATNRKQITALIGLDPVQRQSGTSVHGRSRISKHGNQMMRKCLYMPTLVSIRYNQKIKVFYDRLVSKHKPKKVAVIACMRKLLLIAHAIYKNKTVYVPG

SEQ ID NO: 292462 - protein, 328 aa, unidentified
MDESILGIDISKQKFDVVLLHQGRRVHEVFANSRQGFGKLRHWLKKQAVRELHACMEATGTYGDELAEYLHGQGYAVSVVNPSRIKKYAESQMQRNKTDKSDAMVIADFCRTQPVDLWSPPDPALRELRELVRRLEDLHQMRTQEQNRLKAEPDTRAVTRILRKHITFLDQQIQEVEQLIRQHIDQHPDLRHQKDLLTSIPGIGDTTASALLAEMGDLRSFEAARQLAAFAGVTPRQRQSGSSVHGRSHLVKIGNPHLRRILFFPALSARRCNPLIKPFCDNLALHHKPKMVVIGAAMRKLLHIAFGVLKSDTPFDPHFIPQKACLTS

SEQ ID NO: 292463 - protein, 385 aa, unidentified
MTTTAQVSTFIPRDYDVFAGLDVDKRSIAITFTDHGTMRKSLKLPYSGRQLLNYTGKHFPGQRVAFVYEAGPTGFGLHDELLAASQYCLVVSPSSVPSAPRNKVKTNRLDSKKLSEGLRGGQLRGIHVPPPSYRELRHLVQLRDTQVAQLTATKLRIKSLLLYEGIPFPAADGKWSGRVLRQLESLPCNPSVRFKLDQLIDTLQFHFVSAAKVQKQIRHFCESDPELNGCIKFLTSLPGVGTITATHALARLGDWRQIKDVRQIAGFLGLVSSEHSTGDKENRGEITRSGDKRLRSKLIQCAWTAIRKDPELRAFYRRIYERHPKKVAARKAIVAVARKLTTRMYAVLKEQRPFVVREDNSIAPLTVEETTGRGERLDAAQNDQP

SEQ ID NO: 292464 - protein, 330 aa, unidentified
MERQYIGIDLHKASFHACAMSDDGARRWEAQFPRTAEGIAAFAARGIAGAQLAVEATGPTWAFVDAVTAVGVHACVVDPRKTKLKAGFAAKTDRLDARRLADALRRDSVVSVYVPPPAIRELRELCRGRQQLVRTRTRVIQAIRALLLRQDAPEPPVTSLIGKGGLQWLATRHLSGASEQVLRRLERVLRAVHGEAQAADVAVKAEAAHDPIAVGLRRLPGVGPVLSLVLRAEIGTIDRFATGPALACYAGIVSRLDASAGHVRYGRITRTGSPWLRWALVEVAMRAMKRPDTRGRWARRLAIHKGIKKARVALARRLCDEIVQTWKQLG

SEQ ID NO: 292465 - protein, 412 aa, unidentified
MQTLVERGCGLDVHQATVVACLLIVRKDGRVQKQLRTFGTTTRELLSLREWLLSEGCTQVALESTGVYWKPVYAILEGAFQIVVANAQHVKKVPGRKTDVKDAEWIADLLCHGLLRSSFVPPQPIRELRDLTRYRRKLVESRSAERNRLLKVLETANIKLASVATDVFGTSGRLMLRALIEGKATPQEMADLAKKKLRSKIPQLELALEGKLEEHHRFLLKLQLDRLESVESDLAALEQRIQEKLQPYAAQLALLQQIPGVERTLAAVIIAELGVDMTVFQSVSQLASWAGVCPGNNESAGKRKSSRIPKGNVYLKTALVEAANSAARAKGTYLRDKFYRLKARRGYKRAAVAIAHKILVSIYHMLSQNVSYNDLGDLYLDTLNKHHLTRNLVHRLERLGYSVTLTLQQEPA

SEQ ID NO: 292466 - protein, 368 aa, unidentified
MTLYIGVDFHPHQQTLSWCDTETGETKTLDMLHDVKRVREFYSSLPEPAIIGIEASSRAVWFENMLFETGHKLLVGNPVLIRKRATSRHKNDRRDAELILELLLRGEFPSLWRRPPESDRILEMLRLRSSLVRQRTQGYNRLQALAHSAGLPRGRMRTAAFQAVIKALDLDETDDLRRMHLFKLVENFNEQITQLDIWLKAKAEADPKVRLLETQKGVGFLTALTTVHTLGDVTRFARLSKQVVSFAGLDPLEDSSAGRIRFGHVSKAGSRLLRFQLGQAAQIAARSDMKLKSFYKRLAKKKPKAVAKTATARRLLVKLAIMLRDNINAQEFDRRGKHSWQCPSGTRSEMTAALIGPSQPFGDRGREF

SEQ ID NO: 292467 - protein, 414 aa, unidentified
MTDETKWYTGVDWASESHLVFLADDDGHKVGKKIFKHGGEGLAEMATWLMATSGASEPSQINVAIEVPHGPVVETLMERGFKVHAINPKQMDRFRDRFTLAGAKDDSRDGEVMSSALRTDAHCFRLLAVADPVVVELREWSRIAEDLGAERNRLTNRFREQLWRYFPAILELEADLASEWLLDLWETVPTPHKAVRIRGTTIAMLLKRHRVRRFDADQLLGILRAPPVRVAAGTAEAASAHIATLISRIRLVNRQLKQAHQKLDALTARLVPTEEAEPGQTKQHDVEILASLPGVGRIILATLLAEASDALQRRDYAALRSLTGVAPVTKRSGKSCIVVRRYACHGRLANAMYHWARTAIQHDPTSRSKYAALRSRGHSHARALRSVADRLLNVACAMLKSGTTFDGSIIKQTA

SEQ ID NO: 292468 - protein, 391 aa, unidentified
MSMYFVGIDISKYKHDCCIISAADQQIVSKFTVKNDKDGFEHLLTTLNSLSNPEDIKIGFESTAHYALNLELFLENAHHSFMEVNPVLIKEYKKSTTLRRTKTDSDDCESIARWLMTVEYKPHSKGFYHSYSLKSLTRLRDRLIRQRSFYLVKITNVLDHTFPEFKPFFNERLSKTAIYLLENYGSAEKMAHMNSASYDKLRCASRGKFSIQQFLRLKELAANTVGVNNSIFDIELNSLLTLYNSLCKEIKTLEAEITKLIEEVHPHYMSIPGIGPISAAVIYAEYGDISNFSNPGQMLAFAGIEPGINDSGTESHGGRMVKHGSSQLRYVLLNACLPLIRFDITFATYYAKKRAEGKKHRVAITHVAKKLIRVIYALERQDVDFNVQKLR

SEQ ID NO: 292469 - protein, 411 aa, unidentified
MEVIYKRCCGLDIHKEIVVACLLIREGGKVLKEIRTFLTMTVDLVVLHDWLKAHQVTHVAMESTGIYWRPVFNLLEGDFTVLLVNAAHIKTVPGRKTDVKDCEWIADLLSHGLLRGSFIPPEPIRDLRDLTRYRKTLTDERVREVNRLQKFLEGANIKLSSVATDVMGISGRAMLEALLSGSTDPQVLSELAKGRLRKKLPELKKALEGRFRSHHRFMVAEVLTHLDFLDEAIERVSQEVSSRIAPFSKIVESMDLIPGINARVAEGVLSEMGVEMSCFPTEGHAASWAGLCPGNNESAGKRKSGKTRKGDQWLRRYLTEAAWAAIRKKGSYLSALYHRLVVRRGKKKAIVAVAHRLLVIIYHMIKDQASYRELGADYFNKLNTAYVQRHHVKRLESLGFKVILEPVSKAA

SEQ ID NO: 292470 - protein, 430 aa, unidentified
MKSNTQNAKIETITEKTLVLGIDVGSETHYARAFDYRGIEYSKKPFKFSNTEAGFVTFKEWILDLKERHEKDKVVPGMEPTGHYWFNLGKFLQDNEMKPMLVNPHHVKKSKELDDNNPTKNDRKDPKVIAGLVREGRYMIPYLPDGVYADLRTASNIRFQLQAELTRIQNRISRWFNIYFPEYKTVYGKPDAKSGMLILKAAPLPEDILTLGIDGVNQIWRDAKLRAVGKARAKTLIEAAEHSIGSKEGTMSARMEIRMLLEDYESRNTRLQEVMVLIEELVRKIPMAEKLLEIKGVGIRTVSGFLAEVGDISRFNNPKELQKLAGLAVVENSSGKHKGKTTISRRGRKRLRYLLFEVAMSLVAKNPEFRELHNYYTTRRLNPLKKMQSLMAIAAKLIRVFYAMLTKGVDYDPKKMISDIKRPTVYLQAA

SEQ ID NO: 292471 - protein, 430 aa, unidentified
MEIVYPRSCGVDVHKSFIVAVICISESVKPKYIKKRFSTFNNQLIQFRDWLIENNCQNVCMESTGKYYIPVYNALEGHISNVVVANPKWVKAIKGEKDDNKDAKWIADLFKFGIVRSSYIPEKDIRILREFTRYQYKLVNMRSSEKNRFQNALTTGNCKLDIVFSDIFGKSASAIVDTILSNDPYTSEDILSKVHARCKASHEDILSAVDGIQLTQFQKARIRIVQKHMEYLDSLLDEIQHHIDLMVANYEEYIQILCTIPGINRKSAITIISEIGTDMSQWSSHRKLAAWAGLAPGCNESAGKKKSVKISKAGVYLKPCLVQVAHAAVKDKECDYYADKFNKISKRRGKKRAIIAIARKILIAVYHLLKTGEVFNPTDMADVETTKKQRIEYVKNNLRNAYNQLSRTGLSEAEILQLIRKESTNSPQIE

SEQ ID NO: 292472 - protein, 389 aa, unidentified
MAEVLRKLTGRAALDAGVVSGNGKKDGRGNTFGPNRDRLTVGVDLGDRWSQYCILGLEGETLAEGQLRTTQEDVGEFFRGLTTARVVVEVGTHSAWVQDVITECGHEVLVANPRLMEGSKRRKRKSDRIDANKLARLGRVDPQSLYPIRHRSREVRQDLVVLRARDALVSVRTELINTTRGLVKSMGTRLPRCSSPSFAEKVKDAIPVEVGEALQPLVQLVETVNECIERYDEKIEELGRKKYGHTTLLRQVKGVGPITSLAYVLTLEDPQRFASSREVGPYLGLVPKQEDSGDSQPQLGISKAGDRMLRRLLVGSSQYMLGAFGPDSDLRRYGLRLCEHGGKNAKKRAVVAVARKLAVLLHHLWVTGDVYEPLHQARAGTGTAPAAAA

SEQ ID NO: 292473 - protein, 387 aa, unidentified
MDRATPSTAFANTLHCALELSKKSWLLAIQFPDREQPSLYPIEGGNAEKLMAKLTAARECWAKVSGAVPVITLCYEVGHDAFWLARFLKARRVECLVIDPGSLQVNRRGRRVKTDRIDVKVLLRTLIAWCRGERHVWSLVRIPSIDEEDLRRSHRERGRLVRERTAHINRIKGLLFGQGIRRINVKSKYKTLAVDKLVTGDGHRLPPRLACEITREIQRLAVVQEQIAEIERERDAAPTSCEATERKRHLLLRLKSIGPAISALLSREVYYRQFTNRRQVGSLLGLTPSPYNSGEQEHCQGISRVGSGHVRAVMIETAWLWIRHQPKSALTQWFVERTAGQSKRMRKIMIVAVARKLAIALWRYVELGLVPQGAILNPPMKGRKIKG

SEQ ID NO: 292474 - protein, 410 aa, unidentified
MAAVACGIDWAEGHHDLAIVEEAGAVLVAERISNDAEGLSRLLAVLADYDPIGEQLPVAIETSTGLLVAGLRAAGREVFAINPLAVSRYRDRYRSSGGKSDAFDAMVLANVLRTDRPSHRQLPDDSPAVQALRVLTRAQQDAVWERAELCNRIRALLKAFFPAALDAFERGGKHQLHSSACRTILQIASTPSDAARLSQSRLAAALRRAGRTRGVEAEAGLLRDLLRREQMRQLPAVEQAMGMQLRGIVRQLDAVSATLDELEPAIEAAFTAHPDAAIVASFPGLGVQLGARMLAEIGDDKTRFADGRALKAFAGAAPVTRASGRSRFVHARRAKNDRIAAAGYVWALAAVRHDPLWEQRYRARRAAGDRHVAALRKMFNSMLGKLHHCLTTGQPYQPDLAFGPVKIAAA

SEQ ID NO: 292475 - protein, 354 aa, unidentified
MEKITTVGLDLAKQVMAVHAVAADGRAVLRKTLRRDQLLPWLAALPPCVVAMEACGGAHHWARELTRQGHTVRIIAAEFVQAFRKGGKNDANDAEAICTAARQPNMRFVAMKSVEQQAALCVHRLRQGLVEERTALINRLRGLLTEFGVVAPLSPEKLRRELARCQDPDDLRLPATVRQLVGEQVSALDQVEERLAAYAEHIAAQARGSEVAKRLQTIAGVGPTTAAALVATVGAPQEFSNGRQFSAWLGLTPKQHSTGGKTRLGRITKRGDGYLRTLLILGAKSALQAALRKAPELRHPLQRWIVATVDRIGYHKTLVAIANKHARIIWAMLVKGEDFDVQRMTPKVAAVATA

SEQ ID NO: 292476 - protein, 315 aa, unidentified
MNEQRVVAGIDVSKGQLDVALLPGAERLQFANDATGIVELVHQLQAAQVELAVMEATGGYETVAASAIAGAGLRLAVVNPRQVRDFARATGRLAKTDRIDAELIGAFAQAVEPQITVLPDEDTRALEALLVRRAQLIAMRTQESNRLALSLGVMRKQIKTHIAWLDRAINTLDTDLSAGLRNSPAWRAKDDLLQSMKGVGPITSGTLMSALPELGRLDRRAIAALVGVAPFNRDSGTLRGRRTIWGGRARVRHVLYMAATSAVRSNPVIRACYQRLIQRGKPHKVAMVACMRKMLTILNAMARTNTPWTPDFQET

SEQ ID NO: 292477 - protein, 316 aa, unidentified
MKTNTNQNINVGVDTGKFQLDIYIRPLDIFFTVANDDKGIKEAVSRIQKHKPERIVIEATGRLEMPFIMACANANLPFVIANPVHIKRFAGAIGQRAKTDKLDAQLIAHYSEAIKPRLSTLKPDIMRTMSDLVARRNQLLVMQTMEKNRLQILPRELVMTIKPILTVFKNQIEKIETKIVKLIESCPDYQAKNVILQSMKGIGKIAAASIISNLPELGYINNKEASSLVGVAPMNKESGRFKGHRKIQGGRHQVRTVLYMAMMSAIQSNPIFKETYQRLVAAGKPKKVAIIACIRKMVVILNSMLRDGVMWEAPKS

SEQ ID NO: 292478 - protein, 365 aa, unidentified
MNNAYYTIIGMDVGDRKTQVCVMARAAGAPKVVMETAIPTTREGLAKFLATQDRASAVAFEAGTHCRWMDEVAGRMGFKVYVANPCRLRMITESKTKNDVNDARALARIALADPVLLHPVKLRGPEHQRMLNLHEMRNLLVKQRTGTVVQLRAIAKSMGFRIAKCSAASFHRLDRGAWPEGLRDIAWPMMKNLEQLAVTIRTYEKQIRELAGTPTFRAQVERLMEIRYVGLYVATGFVAVTGGDMDRFGKPRDVGAWLGMVPKQDQSGDTDRQCHITKAGSGLMRRLLVESAQMILRDCSADTDLKAKGLRICARGAKIARRKAVTAVARSLAVLMAAMLKKPDAPYVPLSERCEKELLATRATA

SEQ ID NO: 292479 - protein, 475 aa, unidentified
MNIKGTKKKNQVVTVNIFEQQELLKKVEVIRENLTASTWRELETNGKFGKNEKLSFVSDDMLILGCDVGSDTHYVRAIDTRGRELSKSAFPFSNTLEGFQSLMDWATKIAASNDKKQIILGLEPTGHYWFCLATWLIGNGISVVQVNPYAVKQTKEVEDNSQLKDDRKDPKLIANLVKDGNFGMPYLPEKLYADIRRLSMLRDQINEDRIRDLNRLHREMKIYFPEYKDAFGKIDGTFCLEVLKVAPFPEELVTLGVEGIRQIWHEAKLRGRGYVNATSIFENAKKSIGIQDGAESGKLAVKWFVHRMMESNEQLAEIESRLHQMCMEIPYAENILEISGIGENTLSGILAEMGDISRFDDVKEIQKLSGLGLVACSSGKHKGETKISHRGRKRLRYWLFQAAKSAVAHANEFKELHAYYTTRKDNPLKKKQSLVVIACKILRVIFAILTKGTPYDPKKMLGDIVRPNEQSVQVA

SEQ ID NO: 292480 - protein, 414 aa, unidentified
MELLYPRCAGLDVHKDVVVACVRLAQADGKALQEVRSFATTTTELCKLEDWLNGHQVTHVVMEASGVYWKPVWHVLEESLELILANAQHVRNVPGRKSDVNDAMWLADLLAHGLVRGSFVPPTHIQEVRDLSRTRKQLTREIIQHTNRIQKTLEDANIKLASAISNVLGKSGRAILEAIIAGETKPEKLVELCSGRLKASRKELIEALRGRVTAHHRFLLKLHLAQVDQLTSGMRELEARMGEILAPFQEHVDNLTTIPGVNDTTARVLAGEIGLDMERFPTAGHLISWAGLCPRLDESAGRHRSTRIRKGAPWLKTALISAAWAGIRTKNSYLRAQFARLKSRRGAKKAIVAVAASMLTAAFYIIRDRVIYRDLGGDHFTKRNPEHAAKRLIKRLEGLGYAVEARPTPAVVSI

SEQ ID NO: 292481 - protein, 345 aa, unidentified
MSTIDYIGFDIHKKTISFCAKAQDGTIVDEGTIAARRDDLKAWAKRRARPWLGAMEATMFTGWIYDHLKPLAQELKVAHPAMLKAIAASKKKNDKVDARKIADLLRCDLLPECYMAPSPVRAMRRVLRYRNLVVRQATRMKNRIAGLLMETGTPYNKQRLHGKAYFQELLGTLRQMPDSVRELLKLSRGQVELFESIQNRLLRELRARRELGERVERLQSIPSVGEVVALTWALEIGEVSRFASIGQACSYCGLTSAQRNSAGVEQRGPISKQRNKHLQTMLIEAAKLAPRYNPQLAAVHERELKRGDRNQATLAVARKLVAYLMAVDKSGQPFRLRAQEVEGAA

SEQ ID NO: 292482 - protein, 354 aa, unidentified
MSHLNSGIAAVGIDIGKNSFHIVGQDERGAIVLRQKWSRSQIDARLANLPACLIGMEACVGAHYLSRKLRMLGHDARLMPAKYVRPYSKGQKNDFRDAEAIAEAVQRPTMKFVATKTAEQLDLQALHRVRERLVGQRTGIINQIRAFLLERGIAVRQGLRFLQAELPTILGAPSDALSPRMLRLIEDLAGDWRRLNERIEAISGEIEALARQDQACERLMTVPGIGPIISSAMVAAIGTGDAFSKGRDFGAWLGLVPKQISTGDRTILGPISKRGNRYLRALFVQAAWVVLVKLGKKWERYGLSAWIEAAKKRLHHNVLAIALANKLARIAWAVLHKGRAFECAKIDALSVRPI

SEQ ID NO: 292483 - protein, 267 aa, unidentified
MIYVGIDIAKDKHDCYIVTSDGVLISDNLRITNTLEGFNTLYSIISSNCQVASEVRIGLESTGHYGINLENFLRTKGYQLTVFNPLAVASFRKSQTLRKTKTDKVDAKFITTLLFNSDQTPTALVSDEISILDKKIKELLIQMKTPLISIPGISYTLASIILSEIGDITRFQTPAKLLAFAGLEPSVYQSGKFQATGTSMVKRGSTYLRWAIIQAARLVAMRDPTFKLYQEKKKSEGKHHYVAISHTSKKLLRVIFHLLKNNIDFIA

SEQ ID NO: 292484 - protein, 332 aa, unidentified
MDNFYFIGVDVSKKKLDFCVLFEGKVLREEQVSNHQQAVARLIGELKNDLEMDNEQFLICAEHTGQYTFPLVCACKSVECKLWLENPSQIKYSSGMQRGKNDKVDAKRIAIYASRFGDKVKYYDRPSEEIERLKQLERERALYVTDLAKYKGQMYDQKDFMPAALYRKKTKRMKGLIQELQAAIDAITAEMEKIIGSTEVLARQMELLMSIDGVGKVVALNVIIETEAFSRFDNPRKFCCHAGVAPFSYTSGSSQHSKNKVSHRANKNIKKLLHMAAVSVTHRKEGELKAYYMRKVEEGKNKMSVINALRAKIVTRMFAVIKRNEFYTPIYY

SEQ ID NO: 292485 - protein, 369 aa, unidentified
MDGHPWQAAGDRIEPTQSSLWLPRSVIASAPSSDPDGCRNNLVRFHKAGSRKMTQTSMTTAGIDTSKAKLDIAVHNRTERWQVVNALPGWRALLANLTKAGVTRVGIEATGGYERGVVEYLRAAGLTVLVLQPIQVKAFGRVHLRRAKNDTLDAVLIAACAAAIDQPRIAPDPRLAELAENLTFLEQIEEDIRRFKTRLEHIDQPRLRRMVLGDIARLKARRVAQIRDIAKQLRCHHDLAARLDLVLSIPGIGERTALALIIRMPELGRINREEAAALAGLAPFDNDSGQQKGQRRIAGGRARLRRSLFAAALPAAFRWNKALILLYARLTAAGKHHNAALIACARKLLVYANTVVQRGTPWSERPLRV

SEQ ID NO: 292486 - protein, 345 aa, unidentified
MDVHAESCTLAVIGPSGKRLKSMVVETNGHALVEAVRSIPGRIHLCMEEGTQSAWLHELLSPHVEELVVAVPEKTRGSKNDERDAWARAEELRTGAIRTRVYKAPLHLAALRNAARAHGMAVQDVVRVKNRLKAVLRSRGILSDSGVYDPEVRGRWLGQLPAAHQQLADWLGRELDRLEPLREEAEAWLLKEAKTHPIIRTLATAPGMGPIRTAQVVAITANPHRFRTRRQFWSYCGLGIVTHSSADWVNRKGRWVRAQVQQTRGLTRKRHPLLKSIFKGAATTVIVKLPDDPLHAAYERTIQAGTKPNLAKLSLARRIAATVLSMWKHQEVYDPKRHQTIGQKS

SEQ ID NO: 292487 - protein, 410 aa, unidentified
MDLLHTEVPASTLIVAIDPGKAFNRVWLTSGERGLIGEPVSLPVLRDGFDHLARLIEASGVEGAPVVGIEATGALHRPWATEIERRWPDSLRLFAPSETAAARAQLGSRRFKTDDRDCAAMVWLLRQGGGRAFEPDTLEAMLGAVRHRRALIDARRRLQQRLHDQLNVLCPGLSAPAGHGRALAIESPTGQAVLACAAAFAGRAPRARSLMARAPGRLPSAAADYWLDRWHRLLPPPADAEQRARRLGRELERFRHLQVDIAAVESELEVLLAATSGQILTSLPGVAVNRAAAFCAHTLPIERWPSAGHLYSATGLAPAAYESSTLSRRGRISRQGLAEHRDALMGIAWGLSQRSPSFAQRDAELRARGFRPIQARVALARNACRLCWRILKTQQPFDERRYAEARQRGR

SEQ ID NO: 292488 - protein, 369 aa, unidentified
MPFRIRRESPNSCLGHFVPRRGEPVSARTGLQQQGRRKLLDPTTTTTTAPRLFAGVDVSKDRLDVCLRWSEPESREREEAFSVPYDDSGLDALLSRLLQEPTVLVILEATGGFERTVVGALAAAGLPVVVINPRQVRDFARATGRLAKTDRIDAAILARFAEAVRPAPKPLPDREIRALQAIVARRRQLLGMLAAENNRLSSAPKPVAKRIKAHTRWLEKELCRTERDLEAAIENSPALGEDEALLRSVPGVGPVLARTLLAGVPELGTLTHKRVAALVGVAPLNRDSGTLRGHRSVWGGRADVRAVLYMGALVAARRNPVVKEFYERLLAAGKPKKVALVACMRKLLSILNAILKHRTPWRPPHYLSP

SEQ ID NO: 292489 - protein, 326 aa, unidentified
MEHELHYIGIDTAKEKLDVDVLRPDGRHRTKKFANTTKGHDELVSWLKGHKIDHAHICIEATGTYMKPVAECLYDAGYIVSVINPALGKAFAQSEGLRNKTDTVDARMLAEFCRQKRPAAWEAPHPLERALRALVVRHQALTDMHTQELNRTETAREVQRPSIDAHLLWLEAELKRLEKQIKDLTDDDPDMKHRRKLLESIPGIGEKTSAVLLAYIGLKDRFAHARQFAAFAGLTPRRYESGSSVRGTSRLSKAGHVSLRRALYMPAMVATSKTEWGRVFRDRLAANGKKGKVILGAMMRKLAQVAYGVLKSGVPFDAARHNPVAA

SEQ ID NO: 292490 - protein, 343 aa, unidentified
MYYLGIDCHKYFSYVTALDETGQVKFKGKMGNRKDDFERLLNGLGERCKATVETGYDWGIIYDMLTEMGVEVILAHAKKIKLITMNPQKTDKRDSLILAQLLRTNMIPRVYAPTREVRRNKAVLRERQFYTKIRTMTKNKVHKLLYRNGIKMNGYSDAFGKSGRRYMEEAELPKTEKVLLDNELDMLDVINAKIKTVEKSAGEITKENRYVELIKTIPGLGVVLSRTIALEIADIARFSKAKKLASYSGLVPKEHSSSDHIYRGSLIKDCNKHLKEALIEGAWVAIRCSAYFESIYANVKSRRGGNKAIVAVARQMAEIIYYMLKENRSYVERYTADNKMAAL

SEQ ID NO: 292491 - protein, 316 aa, unidentified
MTTTPVFVGIDVSKDRLDVALRPTSDRWALAHDAPGVATLVARLQGLAPTLIVLEATGGLAVPLTGALAAAGLPVVVVNPRQVRDFAKATGKLAKTDTLDAAVLAQFAEAVRPALRPLPDAATQALSALLARRRQLIEMLTAEKNRLGSALPPVHKGIRAHIRWLDRRLADLDADLAQAIRESPVWREKDDLLQSVPGVGPVLATTLLASLPELGTLTRQQIAALVGVAPLNRDSGAWRGKRRVWGGRAHVRAALYMSALVASRFNPALRAFYQRLCAAGKAKKVAPTACMRKLLTILNAMLKSRTRWHDHFALSA

SEQ ID NO: 292492 - protein, 335 aa, unidentified
MKFEKFVGIDISKDTLDLAILTKHGELFNLQISNERQEIEQRVPQWLSEHDAQSSATLMCAEHTGHFGMKLIEISLKLGWNLWMESPYKIVHSQGLIREKNDKIDARRIARYANRYQDLATLVAVSNKSVQILSHLNSEREILVKDRARYEGQIKQEEGFLDAIYFKSKKKRVEKAIQWLTKAIKEVEAEMDKIINSDPEIKKNFQAITSINGIGPQTAIATILATDNFNKFDDARKFACHAGCAPFKYSSGTSKNSKHKVSHKANKNLKRLFHMAAVSSLRMKGEMKEYYDRKVGEGKNKMSVLNAIRAKLIARIFALVKSGRKYEKNYNAMLV

SEQ ID NO: 292493 - protein, 412 aa, unidentified
MGRVIGIDIHRTFGEAVIWEDGRLRSFGRVDMTRTALEGLGARLLPTDEVVIEATGNCMAVSRVLSPFVRRVVIANPMQVKAIAYARVKTDKVDAGTLASLFAAGFLPEIWTPDAATERKRRLTARRYQVVRHRTRIKNEVHGILHAHLIPKCPHADLFNRRGREWLARQPLPEDERAAIERHMRELDRLAEDLAVLDREIAESALDDGAIKRLMTITGVNLTVAAGVMAAIGDISRFHSPGKLVSYFGLNPRVRQSGLGPAHHGRISKVGRSHARAMLVEAAWAAAKAPGPLHAFFVRVRARRGHQIAAVALARKLTVLCWHLLIKDRDYLWARPALVANKTRAMELQAGKPQSKGNRRGPAYAYNVKTLRDQELRLAEQAERNYAHFVDRWKTRPSNAEVRERLNSARTE

SEQ ID NO: 292494 - protein, 327 aa, unidentified
MNTLNFDVGSEIFVGIDVGKLRLDIACGQDGEQYGVDNTDTGINALIARLQALCEGTGPTLVVMEASGGYERIPLALLAKAGIKVALVPPKRTRDFARSAGLLAKTDRIDARMLAHFGERMRPPVRALAPAAHSELCEFLARRVQLVGMRTMEKQRLVQALSKKLQKLISGMIKFIDKQIAALEKDLDGWIDKQDAWRVNVELLSGTPGIGPATARSLVVRLPELGTLSEKAIAALVGVAPVAHDSGSHKGRRRIKAGRADVRTALFQATISAVRCNPPVMAMYKRLRAAGKPTKVALIACEHKLLNVLNAIIRTQTPWRNTTLQTA

SEQ ID NO: 292495 - protein, 315 aa, unidentified
MTTSNEKFVGIDVAKDKLDIAVLGEKKASQEGNDEAGITSLIKKMQKLAPALIVVEATGGYQRAVVLGLYEAGLPVALVNPTRVRQYARASGLLAKTDKLDAFNLAEFGTQMKPRRFEAKSEVGRDVSALLVRRRQLEEMLKAEKSRLRTVAPKMRGSVEGMIETQKEEIKRLEKDLDQFVKENEEWQAQEQILTSAKGVGRITATTLLAELPELGKLDRKKIAALVGLAPMNADSGKKRGYRKTKGGRVEVRNVLYMSTLVATRYNPLIQAQYQQLLKRGKVKKVALTACMRKFLTILNAMMRDKVPFRQTTKV

SEQ ID NO: 292496 - protein, 400 aa, unidentified
MNAVGIDVSKGKSMVAIMRPFGEVVATPFEIKHTEIELKKLVCILEKLPGETRIVMEHTGIYWQPIAKALHDAGLWVSVVNALLIHKYGNNSIRKGKTDKLDAVKIANYCLDHWLDLDRFTLIDPIRQELKTCHRQYDQYIKLKVNLKNNLITLLDGTFPDLNTLFKSAPRDVDGHEKWIDFAIKFWHRECVCGCTEKSFTNQYRKWCTKAGYRFNEAKAASIYAHAAAQVNTLPMSDAIKRLVILAASQLNTIIETLSVIQNEMLTLASKLPEFPVVMKMFGVGPVLGPQLIAEIGDVRRFHHKQSLVAFAGVDAPPCQSGTFESKNRHISKRGSPRLRKTLFQIMSTIIQHAPADNPVFQFLDRKRQEGKHYYVYMTAAANKFLRIYYGTVRAYLEDT

SEQ ID NO: 292497 - protein, 350 aa, unidentified
MNFVGLDYHTKSSYVSILNEENEKIWEGQLSSGFELADFLENLDCAKVLFEAGYGWPRLAKLLEESEVELLMCHPEHNRRIARDRRKSDKRDAKNLAVYLKTDGYKPAYMPSAEVRDERQLIRGHISLTRRITMIKNQIHSLLAYAGIPKEGFNIFTRKSRQYVETVELPEYTREILNANIESLDFHNALLKRIDELVKKANRRDPRARLLKTIPGVGDITARVILAEIGDITRFPTDKSLACYVGLTQRQYQSSETRRTMGITKEGSSHMRWVLIQAAWIAIRIDPSLREFFEKIKAKKNACVAICAVARKMTMAVWHILTEQTPYKARRPEAKGKPAVTRGKAGVVCS

SEQ ID NO: 292498 - protein, 347 aa, unidentified
MNLYNNMHPYYCGIDLHARILYVCIIDQDGNVCVHKEISADPNKLAALLEPYLGNIVVGVECMHCWYWVADFCDEIGVDFILGHALYMKAIHGGKAKNDRIDSFKIANLIRGGNFPLAYVYPKEMRATRDLLRRRMKIVHHGADLKAHVVNTTSQYNLPPNKVNLKNIEAREHLKTAFPELSVQKNIDLDMVILDCYAEQLSKIEWFIETQARQHNPIHLHLLKSISGIGRILSLTIIYEIGHINRFDSVQNFASYARLVKCKAESAGKSYGTQGNKIGNAHLKWAFSEAAVLYLRGNDKAKNYLSKLQKRMSKAKALSALAHKLGRCVYFMLKNETVFDEERFLKG

SEQ ID NO: 292499 - protein, 412 aa, unidentified
MKVQYICCAGLDVHKRIVVACVLKGVFGEEVISKVKSFGTTTPELMEMIEWLKSCGATHVAMEATGNYWMPIYNLLEGHFELVVANAAHMKAVPGRKSDVQDAEWIAELLRHGLLRSSFIPSREQRDLRELTRHRSSLAGKRAQAANELQKSLESANIKLQSVVTDITGASSMEMLQELISGKNNPKELAQLAKRRLRAKIPELEKALRGNLRRHHQMIIEQLLADIGLFAAQIAELDAYIENLLRQEQEIIDRLDDTPGINRRIAEIVIAEAGTDMNRFPNQYHFASWIGLCPGQNESAGKRKSGKTRKGNRALRCALVEAAHGAVRKKDSYYGAQYRRIAVRRGKKRALVAVAHSMAIAIYHMLKSKTPYRELGANFFDTINPVKALNRLTKRIESLGYHVSVTVADMAT

SEQ ID NO: 292500 - protein, 317 aa, unidentified
MRTPTASFVGIDVSKQQLDVAVRPSGETWVVAHDEAGLSALVARLRDLAPTLIVLEATGGLEVTLAGALAAALLPVVVVNPRQVRDFARSTGILAKTDRLDAQLLAQFAEAVRPALRPLPDAQAQELTALLQRRRQLVEMLTAEKNRLTVASRRIRPQLQAHIEWLHKQIAQFDEDLRQVIRASPLWREKDDLLRSTPGVGPVLATTLVAALPELGLLTRRQIAALVGVAPFNRDSGTLRGRRAVWGGRAQVCAVLYMSTVVAVRHNPVLIAFYQRLRAAGKAPKLALTACMRKLLTILNAMLKHHTRWAPVLAQHA

SEQ ID NO: 292501 - protein, 438 aa, unidentified
MSNKVIFNLDELFISVGIDVGADFSWMSIALPNQQFVGKPYKIIHNSIDSLTTAVSKIKEAEELYSLESRIFLESTGIYHYPLFCYLRDKGFNCSVINPIITKNSTNINIRKVHNDRFDSKKAALVGLKPDLKVSLMPSDLALNCRNLCREYYDLMDNRSAYVNKLQGELCMAFPQYLDIFSKVTINTSLTLLETYTSPSAFLEADRQEIIDIIRSTARFGLTYAQNKYNAIVQAATDANQFGYIINSNIKRIRLYISFIRKYDEEINRILESLHELVDANEDADFVKQIHLIETFKGAGFLSAVSIMGEIDDFSAFSKPKQLFAYFGLDPAVKQSGKFEGTIVQMSKRGSAIARRVIHTLTLQSISISRNGEAKNPVLREYYLKKCDSKPKLVAMGAVSHKVCNMIFAILRDNKPFKIIAPQEHIKQYNAAKCDIAA

SEQ ID NO: 292502 - protein, 395 aa, unidentified
MQFAADRLEAPTAIRTDLGAIFISLELSRSSWVVTSLSPGGGEKMSKHTVRGGDVAGLLKRFAQLREKAKGRTGKVFPLIVIQEAGLDGFWIDRVVQNEGIESHVVDPASIATSRRRRRAKTDGIDGEALVRALLAYKRGEPRVCSMVRLPTPEDEDRRRLCRERKVLIAERVKHVNRIKGLLFSQGVSGYEPLRRDRRERLDALQTGDGRPLPPHLKAQVRRELDRLELLIAQIKTVEAERDALLAVEQTTAPVPPAMLLGVKGIGPEFAAVLWSEGLSRPFENRRQIAAYAGLAPTPWQSGSVDREQGISQSGNPRLRTTMIQLAWLWLRHQPDSALALWFHDRVKRNGGRLRKTTIVALARKLLVALWKYVTAGVVIEGAVMKTALGPEPIP

SEQ ID NO: 292503 - protein, 462 aa, unidentified
MTIDKKRNRKERKELARQLRSEDPGLEVVHPHAAGIDVGNGAHYVAVRPGRDSQPVRRFECFTADLHRLADWLQSCGVKTVALQSTGVYWIPLYDILEERGFEVYLVNARHTKNLPGRKSDVQESQWLLKLHTYGLLNNSFQPTSEIRVLRTYWRQRAEHARGIGTCILRMQKALTQMNLQLANVISDLSGVTGQKIVRAIVAGERDPRKLAELSDPRIHASKEEIAKSLEGNWRQDLLFVLHQEVKMYDIYQQRIAECDQQLEKHLAHFADTGPPQATEEAKKKKGKPSKNNPQFHLADELQRITGVDLTRIDGIDVMVAQTLVSEVGLDMSRWKTEAYFASWLGLCPDNRISGDKVLSRGTRHVVNRAATSLRMAATTLLRSQTYLGAQYRRLRSKLGAPKAITAMAHRLARLVYRMLKYGQQYVDKGAEYYERRNRQQQIEFLRKKAAKLGLQVTLAQA

SEQ ID NO: 292504 - protein, 411 aa, unidentified
MNNTLFVGIDISKRSNVATFMNCEGKVVGRLAFSNNGSGADRLVAKILSYYEKEDFEAIRIGMENTSVYSKNLVWFLYEHEALNEHKLSIIPLNAIMVANYKKSFLDMDKDDITDSFAIADFIRIRPGLLPFKLDDRQEALKIMTRSRYNYVQALSRMKSQFLTRLFLSFSEMEAGKPFYSIFSKTSLSLLEEEFTLDELAEKPIPELVEFLQEKGGGKFQNPEEIAKVLKKAASSSYRVPAMVRESLNRTMASDMEIMRILENEIHNCDKNIEKLMKSVPAILVSIPGIGPVLAAGIMSEIGDISRFRKQESLGKMAGFKWKRNQSGKKESEDKAAVLSGNKKLRYYLVEAANRVRIHDPVFEAYYRKKYAESKTHAHKRALILTARKLVRVIFYLLKENKLYKPDVGIS

SEQ ID NO: 292505 - protein, 355 aa, unidentified
MRYFKNIPAFVTGKMVFCGIDMHQQHWDLCFLCDGEAVEELRIKGDLTILLYALQNYSSARQVRVVYEAGFSGFWVYRKLCDRGYDCMVTAPSLIPQNHSHVKTNKRDARALASYFASGLLKAVYVPPVEVEADRRVVRRRRQLSKQLTRAKNHITSFLHLHGLKTPSEIRSKWSKRYVAWLNGLTWEQLSDAFTFKNLLTCYQHHRDDLAAVTQQLRQMSGWSRYADHFKHLRTAHGVGLITAMTFLLEIFDFGRFRRAEEFASYLGLTPAQYSSGENVRLGHITRQGNAALRGVLVESAWTVIRHDPQLRAKYDRLRQRGTNGKKAIVAVAHSLAIRLRRCLLDETDYVVGVC

SEQ ID NO: 292506 - protein, 366 aa, unidentified
MGWTPPRRPWCARVMVLVTTEQEASVSEVSTIGLDLAKRVFQAHGADASGKVVFRKRLRREQVLAFFAGRPACVVAMEACSSAHYWAREIGELGHTVRLIPPAYVKPFVKRQKNDTTDAEAICEAAQRPTMRFVSVKSEAAQANAVVFRVRDLLVRQRTQAINALRGHLGEYGVVVAKGPSHVAKLIAHVEDPAADLPEAARTVLRVLTASLQFLSERIDLLDREVARRAREDKEVRRLTTIPGVGPVIATALAALAPPAEAFKRGRDFAAWVGLTPSQRSSGGKQKLGATSKMGERTLRRLLIIGASFVVRKAIKYGTPSGSWLARMLARKPRMLVIVALANKMARTVWALRATGEIYRAPVVAS

SEQ ID NO: 292507 - protein, 401 aa, unidentified
MEPHLCVGIDVGYRAHRVGIAHPDGTILDEFDISHDQAGFGEFFRRVEGYRRELSLPVAVAMEGFNGYARPLDRLVQEKGYRLFNVNNLKLARFKEVFPGAAKTDPIDTRKILELFCLKDQLPLAKDAIQEVVMAPAVNGKLKRLSRRRRHLVDEKMRILARMQTDLQAVCPELLALTHSADNLWFLRFLTFRDDLRQLARLRHSTVLQIPGVGEKYSRVILEWRKKACFSNEVEYVGPMIIEDAARVLELRKQIQALDEVMAELAAQSEIARRLATIPGFGKTSIAELAGEIGTLERFSGEASLALYVGMCPLTHQSGQMSRARVPRQVNTRCKAAMMTAVARHIACVPESRVYYDRKRAEGKTHNQAIRALGRHLVRVIWAILRDGRDYEIREDLHPMT

SEQ ID NO: 292508 - protein, 448 aa, unidentified
MVQATETVSTDYNEALLKVIDIAGRLLGKNNRKETAMKEKVYVGIDLAKASSRVAAFDTSGEAVVKPFSITNSKEGIKKLLAKLSGYKPGQIVCGMEISSNYWENMCSYLKGMDVETILLNPYQVKKYRQATGAKIKTDSIDAEAIAGLIVGRKYDSLYVSDDATVELRELVRIKYGFQRRVKDLKKSVLALLYLVFCQYTRIISRPFSKVSMEILSKYPTSCHMAKASASKLLKIFRRYQGCKFNLDKAKELISAAKDSFYCGRASNARGISIAMQLDEIRSLSEKIADIEEEIKSILCPDDPSGGSSAFSTLNSIKGVGIGTIATFIGCVGDISRFSSADKLVSFIGFYPQIFESGMYKKSNPTIQKAGPKELRYMLYLASVACIKHNSELKKYYYDKVSSGMPAKKAIIKVAVKLTRMMYSMLKYGNKYDPYRVFFQPESFKNAA

SEQ ID NO: 292509 - protein, 415 aa, unidentified
MKLFVGIDVSSETLDTCFLNDELDVLHEESYPNDTLGAFDLKTQAIKLHKRFDFQSIVIGMESTSMYSFHPAMYFQMDDELKEIGVHTTIEDPHRIKQYTKMYDMDKTDPIDAFMIADYLRIQRYMNSPVREEKYMALQRLTRARYQMVKQLVETKQHFIENLSYKCNTLKKELRDSDGSTTIFSATIMSLLTDDMSLDDMLQMPLENFAQLLQEKGRNFKDPEALAKTITKAIRSSYRLGAVMDESIDIVLGILVREIRSLESAIKDYEKAIIDLVESIPEYQCLTSIPGVGLVYAAGMLAEIGQIERFDDQAKLAKYAGLNWKRSQSGRRESEHTPLTKKGNRYFRYYLVEAANSVRRHLPEYRAFYQKKYAETPKHQHKRAIVLTARKFVRLVDTLLRNHQLYTPPRGYEDK

SEQ ID NO: 292510 - protein, 415 aa, unidentified
MNRLIERCSMLDIHKSQITACVRVPDGAGGRRQEIREFATTTSGLLTLADWLRSWAVTVVGMESTGVYWRPLFYLLEDEFDCRLYNARHLRHVPGRKSDMQDAEWGCQLIEHGLVRASFVPPREFRELRDLVRYRKAKIQERAREVQRVEKTLQDAGIKLSSVASEVLGVSARRMLDALCSGTHDPELLAELAKGALRKKIPALREALRGRFTGHHALLIGQMLAQIDFLDETIATLSAQIEELTRPFSREIELLDTIPGIDRRAAEMLLAEIGPDMSQFPTDAHLASWGGMCPGQHESAGKQRSSKTRKGSKWLRGTLTEAAKAVVRTKGTYLSARYHRIKSRRGHAKATIATAHKILTAAYHVLQQGVPYHELGEEFFYRRDTEATERYRRRLVHQLERLGHKVTLEALPEAA

SEQ ID NO: 292511 - protein, 317 aa, unidentified
MEGVNFTQVVRRGCGIDIHRDTAVATIGGEGITTETRSYKTFSSSLTELREWLIANGVTHVAMESTGVYWKPVYRVLEGADLKVWIVNARHIKYVPGHKTDRMDSAWICKLLLAGLLKPSYIPPKEQRELRDLTRYRNKLIQHNASEKNRIIRVLEDCNVKLDSVVSSTSGVTASKLIDKLVQKGAVTMEDIDEVYHRRLQASKEEIYLACEGFIDDHQKYLLQLIRKDIDQTQKLIDELSERIKALLAPYDNAVERLKEIPGLSTKVVEDLIAEIGLDMEVFPTEKNLASWAGMSPGNNESAGKKKAPAPTTETGR

SEQ ID NO: 292512 - protein, 324 aa, unidentified
MMYVGIDVHKRVCHGTVMDEDGHIVKRERFSNDPDSLKTFMKDIGEAKVVMESGYCWQPIYDQLEEAGYDVRLAHPLKVKAIAEAKIKTDEIDSETLAHLLRADLLPESYVPPREIRDLRELVKRRAFLVGMRTRLKNRIHAELAKRDIDPGTPLFTKRGRALLASLGVDSVSQLLPVMEALERQIGEISGTLKRAAAEDGRARILTTIPGVGYYTALLLVAEIGDVNRFPDAERLCSYAGLVPSVRRSGGSTVYGHITKEGSRWMRWGLTEAVHSHLRYDTELTRFHRRLSSKKPGQVATTATARKMLKAIYCMLKAGEPFQP

SEQ ID NO: 292513 - protein, 330 aa, unidentified
MLYAGLDLSRQRLDVHVLDEEGRTLEVTAVHPDVDALRTLAGHVLLQGQEVSAAIESMTGARFVHDQLERWGWDVAIADAVKVKGLAPLAAKTDKIDARVLAELARRDLVPEIWLPDPTVRAERERARFRLHLVHHRTALKNRIHATLMTFGYSVPVSDLFGTQGREILGRLAVPEPWAGTLATSMRMIDDLDVEISAAEADLRSLGPDHPYIPLLLTVSGVGHLLAYTIASEIGDIGRFASPKKLTGYTGLCPIVRQSGSTDRRGPLAKNGPKYLRWALIEAATHAARDVRYRDRYERTKHRLGRQRGAKVDRVDIARQLAEAIWRVLT

SEQ ID NO: 292514 - protein, 337 aa, unidentified
MKYCGIDLHSNNSVVIVSDEEDRIVYQKRLPNDLGQIRAALEAHQEELAGVVIESTYNWYWLVDGLMDAGYRVHLAHPAAIKKYEGLKHSGDFADAAYLAQLLRLGLLAEGYIYPREERGARDLARKRMQLVRYRTAQILSIEGILMRQTGTRMTGEAVKRLTAEQVDEFAFAPDVALAVEANRAVSQALGQQIEALERRLKERVSLRPEYRLLKTVPGIGETLATTIMLETGSIGRFAQVGNFSSYCRCVDSLRESNGKKKGEGNTRNGNQYLAWAFVEAANFAMRYCPQAKSFYDRKKIKTNRVLAIKALAHKLARACYHMLRDQKPFDVHLCFG

SEQ ID NO: 292515 - protein, 335 aa, unidentified
MQIYGIDLAKEKFDVSFFDLTSKKVSNQPSHKVVTNNLKGIGKFFKGLPSDAVLVAEHTGVYGDTLLKCCMDSNVKIAFVGGYVIHRYRATPDRAKTDVLDCALLRDFGERYPDKLKYKTFPEEALYELRQLARHREMLVEQRKQLITADKSEDCRPIRSLAVKRSMDHIKEMLDMEIAETEKEMLKVINGHESIHHNYELVKSVDGVGLITAVELLVKTDNFTKITTARQYAAYAGTAPYEKSSGKMDKGAHISKIGNRRSKTLLYICAESARLHNKEIKLYYERRTLIDKKPRHYVLNAIANKLLRIIFTLVEKGEYYDANFIRQDPRVVKYN

SEQ ID NO: 292516 - protein, 398 aa, unidentified
MKEHYVLAIDVAKGKSMVSLISSCGEVLISPYEINHNLNDFKNLDERIKKLNVFNDTAVIMESTGIYQMPVKRFFKENNYNFNPIYSKMYKQNLRKTKTDKEYCLKLAELFFMKDFKEYIDQDQFYLNLNALSRKYNTLIKAQTRLKNEFRNGVYEIFPEYEKLFKKNLIFSNTSLEFIKKYPHADIISNTRIDALANTMAKLNGRHEKYYLKKAKLIKEYASNSYPSVSRNDEKVNNLIITIELLLSYIKQIENLKSKLINKAKRSYMFNLINSIDGIGEFTTSLIIAELGDISRFDNIKQLTAYCGLDPSIKQSGSSINIGGPISKSGNRYIRRILFVTVQNIIPIASRNFPDNDILLYYRKKRNEGKHHYVAVVDSTTKLLRKIFALVKQFQNNI

SEQ ID NO: 292517 - protein, 409 aa, unidentified
MEVLHPRCAGLDVHKEAVVACARVVAGGAVQATVRTFATTTTGLLELADWLTAHGCTHVAMESTGVYWKPVWHVLASDFELVLANAAHIRNVPGRKSDVNDAMWIADLLAHGLLRGSFVPPPAVQELRDLTRTRKQLVRDLGQHAQRIEKVLEDANLKLTTVLTDVVGASGRRMLEALIAGETNPAALAALASPRVKAAPAALAEALRGRVTPHHRFLLREHLLMIDHLRQRIAAFEAQIGAALEPFRVAAARLVTIPGVSQVAAHVIVAEIGIDMARFPTIGHLISWAGLCPRMEESAGKRRSTRIRKGAPWLKTVLVQCAWAATRAKDTYLQAQFRRLKSRRGPMKAVVAVAASILTAAYHILRDGVPYRDLGSHHFARVDKARLAQRLARRLRDLGYEVQLNATAA

SEQ ID NO: 292518 - protein, 391 aa, unidentified
MIVIGVDTHKRSHTLVALDAVTGATRGQLTIAASDDGTLDAIRFAGKLDSERVWAVEDCRHVSGRLERGLLAGGDRVLRVAPGLTETSRRAVREPGKSDPIDATAIARAAIREGLDTLPAAFLDERALEIRVLNDYRDQIITERVRLINRLRWHLVQIAPDAEAEIRPAGLIGPQIRARLGRKLGRLPQSPQLRIAKVLLKRINEIYREELELLAELKTLIEAHCPQLLAEHGCGTVTAAIIIGHTAGAQRFSSEAKFARHAGTAPIPASSGNTQRHRLHRGGDRQLNRAIHIIALSRARTDPATRAYLDRRHSEGKTKREAIRCLKRHLARRIWHVLYTTTPTKNPAAETHSHSRPGPQNGSHDVNLIPKPAKSRPTVATSAPALMPCAR

SEQ ID NO: 292519 - protein, 414 aa, unidentified
MNHPKMQYTYVGIDSHKNSHTAVLIDCFFEKLGEITFENLPSKFDAFLAKAEKLKVGGTTLLFGLEDVSMYGRLLAMFFRDNNQKMKHVNSLLVAQERKSQNATQKTDSIDAECAARVLLSKLSSLPDAQPDDKYWILQSLVTRRDFIVKSNISLKNHLHNLILQHYPNYRHWFPNIDSDASLAFLMRYPSPSTLVGATNEDLAEFIRKASSYRVGGGVNPNVRARKILDTLQDTTVPFQELRDRSVQSTLRQMGVYTQETKQLEQDIANFMQHFECTLTSMSGIDTVSAAQLLTHIGDIRRFSTPAKLARYAGVAPVTYASGQSDAQYADRRGNRVLNSILYLLAIRLIGTASNKILNPFIYDYYHKKLSEGKTKRQGLKCVQRRLVNIIWRMLMYNEVYENPPKVDKVVADI

SEQ ID NO: 292520 - protein, 341 aa, unidentified
MKKTEYVVGVDIGAESISVAALKGPDGAGLAEFSVTNDPEGFEGLRGWLTKHSLTIESAAFCLEATGVYGEALCYYLCSRGFRVAVEPPLKVKRAFQQSAHKNDAVDARQIAEYGHRFFDELSWWTPPAAVLEQVRVLLTAREQFTGQRIANVNALKALERKTITTRIAIQAYEQAIARLTQNIKEIDQEIKRLVKQDDSFNRMITAIISTPGIGMLLAANLVVMTSGFARTRNHKKIASYTGISPIEHTSGTSVYRRPRSRRYGPSRMRKLLYLAAMSVSTHDPAFRRYYLRKVAEGKPKRLVLNNIANKLLKIVCALVRSESPYIPNYRSIQPLLLKMA

SEQ ID NO: 292521 - protein, 414 aa, unidentified
MSNKRKRIHIVNEKVMIAAIDIGKNKNTGYFRCHNGVEIKPFEFNNDKKGFNKFWEKIFKARVIHKVNKIIIGFESTSSYGEPLIHYLLDKPVQLVQVNPMHTKRVKELHDNSPLKTDTKDPKVIADIIQFGHYLSLVIPKGASAQLRRLNNCRERIIKNRTALINRLHSLVCAIFPEFLVIMKGIRSKTSLRFLKNYPTPDDIIKLGFESVGIELKNISRGKFGFDHAKRLFEAAKNSVGIKEGIESILMEIEYIIKEIHSQNQFIAQIEKKMKQYLKEIPYSRYLLSIKGIKEVTVSGMIGEIGNFEDFHNQKAIIKLAGLNLYEVSSGEHKGKIRISKRGRPFLRKILFFASMNVIRNGGIMHDYYHSLISNGMMKKKALIAVSRKLLRLVFSLVRNKQYYIHNYPLKSAA

SEQ ID NO: 292522 - protein, 342 aa, unidentified
MKQYVGLDVWQRETSVCVVDDAGKTIFQGKAKSDPGALTELLRKRAPHAERIGFETGAMSSWLWHELKRVGLPVVCIDARHAKAALSVRMNKSDENDARGLAELVRVGWYREVKVKSAESQATRSMLVTRSRLVGIRRDLENQVRSMLKEYGLLFGRSIGSQFRRKALELVADGHELLPVIQPLLTIHEQVCREQEKLDRQVRRLAHGDETTRRLMTVRGVGVVTALTFRHTIDDPSRFRSAANVGAYLGLTPRRKQSGETDINGRVSRWGDRLLRTYLYEAASVLMHRTKKWSTLKAWGVRLSKRVGMKKAKVAVARKIAVLLHCLWVDGTNFEWGNEKMA

SEQ ID NO: 292523 - protein, 350 aa, unidentified
MEITTVGLDLAKRVFQVHAIGGSGEVVVRKTLRRAQMIPYFAGLERCLVGIEACGTSHYWAREIGKLGHEVRLMPPAYVKPYVKRGKTDASDAEAICEAVRRPTMRYVAIKSPEQQAALGMHRTRDLFVKQRTQLVNMIRSLLAEFGIEIRQGIGQALMVAKRAVADDMPDIPPLAAKVIAGLAGQVLDLQARLREIEREMLVWHRSNDVARRLATIPGVGVVCATALAASVADPHQFRSGRQFAAWLGLTPLQHSSGGKERLGRISKMGDKYLRRLLIVGMTSLVRRAKYKPTTVDPRLADLLLRKPVRVVTVALANKTARVVWAIMTRGGTYRTPQPAGASVSQAAVA

SEQ ID NO: 292524 - protein, 420 aa, unidentified
MPNIEIGVDSMVKENFIYVGIDLHKETHTAVMIDCYNQKLGEITFPNRPADFPKLVTKVKKCNTDAKEVVYGLENAYGYGRPLAVWLIDKGYFVKDVNTAISHRQAKHRGAMYRKSDSDDAEAIALATLNMLDKLPDACPNDAYWSLGQLVHRRDNIMKQRTRLVNQLHEQLCIAYPSYKSFFNDISRPTALYFWEHYPSKKYLKGKSVEDLRAELVPVSHNKCSTKTCEKILDAVASDKVKNNAYQDARDMVTLSIVSDLQHYDSQLAEVDKMLEQMYKMLGCTLTTIPGVNVITAVKILAEIGDIKRFSNANKLAQFAGIAPLHLSSSGKGKDLATKQGNRRLQATIYFLAIQMVQISSKGTPRNPVVRAYYEKRKAEGKTSQQALICISRRLISIIYGMLKHGTEYRMPVVESAGEK

SEQ ID NO: 292525 - protein, 351 aa, unidentified
MSSISMIGLDTAKATFQVHGVDETGRAVLKRKLHRDGVVAFFAAQPPCTVVPEACGAAHHWGRVLGALGHEVELVPPEAARPFVKRGRKNDAADAAAICEAARRPEVKFVPVKTVERQGVLALHTARALLVKQQTMLANAVRGLAAEFGLTAPRGLLKPGQLMEVAEAQEAAALPEAARQALHGRFRALEEEAAALERAITSHARRDETARRLATIPGVGPITASLIAATVTDIGLFESARAFAAWLGLVPRQFSTGGKTRLGRITKAGNGAIRTSLVVGATSMIVRAGRWDSPTGTWIRGVLARRPTRLATVALANKMARVAWALMTRKESYRPRGRVAAAAIPETAATA

SEQ ID NO: 292526 - protein, 354 aa, unidentified
MDLFVGLDVALEETSLCIIDKDGKAVRETKVETEPEAIRSALESYADRLGRIGIEASSIGIWLHRELTALGFPVIVVEAHHAHVSLSAMRNKTDRNDARGIAQLMRLGWYRAVHVKSVETQKLRTLLSNRKLLKRKLVDLENHIRGALRTYGLRVGPVSRGEFEARIRELIEDADCVFETMITTMLEVRRAVRQGFEKLHKVLLQVVGHDVLCRRFMTVPGVGPVAALSFRVGVDDPHRFARSRTVGAHFGLTPRRHQSGTSIDIEGHISKRGDFGVREALCEAAASLLLRVRKWSALKAWGMKIARRSTMVCAIVAVARKLAGILHRMWIDGTDFQWTAGAKITPAMRLKLAR

SEQ ID NO: 292527 - protein, 317 aa, unidentified
MTAPELFVGIDISKKQLDVAIDPGGQAFTCPNTEDGIQKLVRRLRKLNPQIILLEATGGYEFLAVAALREANLPACFINPKLVRNFARSAGIAAKTDRLDAQVLALFASRIRPQPRPLPEAKQQELKHLMTRRRQLLDMRRMEKNRLDPTPLPRIDRGIRHNIQSLEAQLQDLDREIDDFFNQHPLWVEMEKTLTSVLGVGRLSALFLIAYLPELGRLNRKEIAALVGVAPFNRDSGQWRGQRHIEGGRSRLRQALYMSTLAATRFNPVIQACYQRLLANGKAKKVALVACMRKLLTILNAMLKKQQPWCPPVLNTP

SEQ ID NO: 292528 - protein, 347 aa, unidentified
MPTATPSPLRFVGLDIHKHYLVAVGVDAAQQQVFGPQRVPYAQLAAWMKRELTEHDAVVLEVTTNALQLHDDLQPFVHSVTVVHPQHVALVTQVPVKTDTKAALALAQLHAAGLLRGIWVPPPAVRDLRALVAQRSKMRRLATQARNRLHAALHRARIVPPGGDLFAPEQLSWWHQLPVSLLEQARIQSDLETLQFAEAQIIALERALTAAVADDDRIPLLIQLPGIQLVSAVTILAAIGDIARFPTARQLVGYAGLGTRVHDSGQTRRTGRITKAGRRDLRHIMGCCWRTSPVLMDRAACTMRPVCTWKECQHEPPTAINSPCPRSNCKRRQSSISEREWIPPTAG

SEQ ID NO: 292529 - protein, 360 aa, unidentified
MRTEVTKDSFKDQSFYVGIDYHKKSWQVTILGEQYEHKTMSQNPDPDLLASYLKRNFPGGNYHAVYEAGFSGFESCRKLNQLGVNCLVIHPADVPTSEKEKLQKTDKSDSRKLARSLRSNEFEAIHIPDPELEADRALVRQRFRLVKDIGRTKNRVKSLLFQFGITIPDRFTASQTRHWSKAYINWLKELPLDRPSLRQVLDNYIAIGESQRKDLLLLNKQVRELSLTEAYKNNYILLLSVPGIGLMTAMTILVQIGDVGRFERLDDLCNYIGLVPKMYGSGEKMQVGKMIKRGRKELKIMLIEASWEAIRKDPALMLKFNELSKRMHKNKAIVRIARKMLSRIRFVLQNRQPYELSVVR

SEQ ID NO: 292530 - protein, 451 aa, unidentified
MAKVKPQVIDDEEHERIYERVAAVDVAKDSGMVCTRMPHPSRPGSRQSTVWAVTARLAAISALGRKLKRDGIEMVTLESTSDYWRIWFFVLEAAGLAVQLVNASQARSLPGRPKTDKLDAMWLARLTEMGLLRASFVPPKAIRDLRDYTRMRTRLTQERTRCWQRLEKLLEGALVKVSSVASKLTTLSTQDMIKAMIAGQRDPRQLAALARGKMKARHDELVEALDGMFDDHHGDLAGLLLDQITALDGKITQLTAWIQRAVAVIPAAWGVNADGTTGPDAGTGPDAAALPAVQRLAEIPGVSPDLACSIIAETGLDMARFPDAAHLVSWAGLCPRASQSGPRTRAGKKNQGDTWLRGHLGQAATNAARTATFLGERYSRIARRRGKAKAQVAVARSILVIIWHLLSDPAARYADLGAGYYQTRTDTDRKIHNHIRQLQALGFDVTITKAA

SEQ ID NO: 292531 - protein, 382 aa, unidentified
MLDQACSEQTPVATQNEMYAAIELSGVSWLVAIHVPHADKISRHQIESGNGTALIDLLDAIRERSERVLGREIAIYSCYEAGFDGFWLHRQLVTAGINNAVIDPASIQVNRRARRAKTDSLDVEALLRALMAWRRGEKRVCAMVRVPTVKEEDDRRISREREALIKERIRHVNRIKGLLATQGVRRYEPLRSRRQERLDALRTGDGRPLPPRLYAEISRSLRRLELVLEILREIEIVRDEEAAVSARTNGVVGRLMMLRSIGPEVATILHGEALHRTFDNRRQVAAYAGLTPSPWSSGTLQKEQGISKAGNPRLRRTMVELAWLWLRYQPGSRLSAWFRERVGDGKGRIKRIAIVALARKLLVALWRYIETGLVPEGCLMKV

SEQ ID NO: 292532 - protein, 396 aa, unidentified
MPTMTYSTATQLTPSEQTHQAHHEVTGGVDTHKDTHTVAALDASGRLLGHREFAATPAGYAGLLGWLRGFGQLVRVGIEGTGVYGAGLAGYLQGVGVELVEVDRPDRKTRRWQGKSDPVDAEAAARAAQSGRATGIPKTRGGQVDALRALRTTRRSAVAARAEAQTRMKALVVTAPDPVRTALRGLGDRQLVEHCATRRPDRAAAGDPATATVLALRALARRHQQLTAEIDEFDTLIGPLVAATNPALVALSGVGADVAGQLLVTAGDNPHRLRSAAAFAMLCGVAPLPASSGRTHRHRLNRGGDRQANAALYRIVLSRLRWDPRTRAYATRRTTQGMSKPEIIRCLKRYIAREVYTALLAPGPSSVPALPSTVPEESTWSARSAARTNDVDTDKR

SEQ ID NO: 292533 - protein, 303 aa, unidentified
MTVVIGLDPHKATHTAVAVDRAEEELDRIRVRATRRRLGQLRRWAEPFGDRVWAIESAAGLGDLLAQQLFGVGERVVDVPVTLAARARLLGTRRSDKNDANDARSVAVAALRAPRLSEVTPADHVAVLRLVAKRNLDLGRERNRAANRLHVMLTELVPGGIPKELTVSKALALLERAQPQTAVDHARYAMALELLDDVRRLDAQKNAMKRRIAAAVVASGTTVTDVFCVGPIVAYLVLGYTGDATRFADCHHFSAYNGTAPVEMSSAGRRVHRLSRRGNRTLNYAIHMAAVGQIRQLHSEGRA

SEQ ID NO: 292534 - protein, 394 aa, unidentified
MHKDAHCAVVIDCWMNKLGEVNFENRPSRYPAFVEDVRKICGTKEIVFGLEDTRGFGRNLAAYLVGRKFEVKHVNPAYTSAVRLANPIIYKDDSYDAYCVARVLRDMVDTLQDAKHEDIFWTIRQIVKRRDLIVKSNVMNKNQLHSQLAYSYPSYRKFFAMIDSKSALCFWENYPSPEYIWNTTPEEIYQTIKPVHQALKIQRIHEIISMIERDGDTRKDYQPERDFIVRNIVKDIRHNKELIAEIDDELRKLIPLTGYKLHTMPGIDLVTEAQIISEIGDINRFPDSDKLDRFMGLAPVQFSSAGKGKNQRCRNGNRALNAIFHFLAIQMVAISASGKPRHPVFREYFEQKVKEGKNKPQALMCVARRLVRIIYGMMKTKTEYRPYEKVDGKN

SEQ ID NO: 292535 - protein, 318 aa, unidentified
MTHTSDPVEASPTVLGIDVAKATCTIHDLASRATFTCANTKTALRKALRPFRNHTLAVCETTGGYERCVLDVLYALGVPACRADASRIKAFIKSHGGRAKTDPIDARWIARYGAERSESLPRWTPQPKAVEALAAAAQLRADFVDQRAAAKNRLKAPTAKPVRAFIALQIRQLDRLIAALDRRIDALFAAAPDLNQRRQRLQAITAFGPVVATTLIALVPELGSLSRRGSASLTGLAPHPRDSGQTRKPGRISGGRARIKPLMFMAAMVAARRHSRLSAFYQRLIQAGKPKRLALAAVARKLVVIANAALKPPIQELN

SEQ ID NO: 292536 - protein, 330 aa, unidentified
MKKWNYTIGIDVSKNTLDIHCAEINQHIQIKNGTEGFRVFLKWCNTHKIILNQSFMIMEYTGGYEYKLIQFCESKQIQYSRIPGLEIKRSMGITRGKTDQVDAGRIAQYGEEKHKQLTPDRPLNKGIIKLKELLGFRKRIVRELGGYKASLKERKAMYPDLKKDLICKTLESKIKENEKVVAKFDKELMDEIHKDEAMKTNYELIRSIKGIGMVNALMTIAYTENFVGFTNPRSYAVYVGVVPFDYSSGTSIKGRKRVSSIANKELKQELTQAARSAIQWDPELKSYATRKMANKSYGVVLNNVKFKLILRIFAVVKRQEMYVDNYKNAA

SEQ ID NO: 292537 - protein, 424 aa, unidentified
MKNTQNEKILQIKNETLVVGIDIGKETHYARAFDHRGLEQAKLLRFSNTAQGYETLETWMQSIMQQKEKTEAIVGFEPTGHYWLTLGDYLKRKGYKLGIVNPFHVKCTRELDDNSQTKSDRKDPKTIAMLLKDGRYRDVYIPADLYQELREAVSERERLQEQIIGISNQVIRWLDIRFPEFTSIFKDWSAKTAMATLKHVPTPAKVAAAGAEGVLKIWQENLKRSSLKKAERLVRVAVESIGRTAGSEAAEVALMNLLLQYELITTQRQQLEELMAELMLRVPHAGKLLEIKGVGMMTAAVIISEIGDISRFQDPRQILKMAGLSLKENSSGKHKGKTTISKRGRRRLREGLFRVMIPILATNEEFRAIHHRNLTREKNPLNKMQSIIALCGKLVRVLYALLTKGCTYDAAKMTQDRNRSMKAA

SEQ ID NO: 292538 - protein, 482 aa, unidentified
MKPKSPLGTNKTNDHAMQGRWQEMNRRQRRETMRKIQSEDLSLEVIHRNAAGIDIGNESHYVAVPPSRDSQPVRCYGCTTGELKAMADWLKQCGIQTVAMQSTGVYWVAVYDILEQVGLEVYLVNARDTKNLPGRKSDVQESQWLMKLHTYGLLRNSFRPVQEIRTMRTYWRQRNDLVQSAGRHIQRIQKTLTQMNIQLANVLSDVSGVTGQAIIKAILEGERDPHKLAAFRDSRVKASEGQIARSLEGNWQPDLLFVLKQEQDGYEFCQKQMAECDQQLKQYLQNREDRSQGAALPEEQRKARRQKKKGNKPQFDLRAELFRLTGTDLTRIDSIDVMTATTIISEAGYDMSKWETENHFVSWLRLCPDNRISGGKIIGKGRLPTNNRATVALRMAASTLRLSDTYLGAQFRRLRTKLGAPCAIKAMAAKLARLLYRMLRYGMKYLDRGAAFYDAEHRRLQIKHLKWKAANLGLRIVEAPAT

SEQ ID NO: 292539 - protein, 330 aa, unidentified
MKARTIVGVDISKLTLDSRLLPAAQNRQVANTQKGFNQWKEWMERYKETDSEMLVVMEHTGLYSHLFELFLQSQGISYLKRPAVEIKQSIGLTRGKNDRIDAARIAQYGWMHRDNLCAEQYPVAVIMQMKDLLSYRSKLVRDRSGYQVRLKEEVETGRVKKADFLYKEQQKDIAYLSRKIKIVEKELFHLIKGNEAVYCNFLLLQSIKGVGRITAAYVIAVTNNFVCFTDPRKFNCYAGLAPFEHSSGKSIRAKNRVSHLANKTIKCLLRLSAFVAVRYNEELKSYYLKRVAEGKSKMSVLNIIGAKLVKIMFAVVKRKTPYIEHLPVAA

SEQ ID NO: 292540 - protein, 372 aa, unidentified
MKEETAGHPGVVGGVDTHKDLHMAAVVDEHDRVLGSECFATTRHGYRQMLIWMRSFGELLRVGVECTGTYGAGLLRYLQHAEVTVLEVTAPDRSDRRKRGKDDTLDAENAAHAAFAGVRTVTPRTRDGMIESLRVLKVCRKTAVAARRGALQLIHNTVVCAPDELRESLRTMTRMQLIRTLAAWRPDLSDYRNLTSAYRITLKSLGRRYLELHDEIADLDVMIAALVNELAPDLVSRNSIGYESAAQLLLTAGDNSERLQSEAGFAALCGVSPVPASSGKVTRHRLNRGGDRAANSALHIIAIGRLRTDPHTKAYVDRRVSEGHSKLEAIRCLKRYIAREVYYVIRKRNRQIGQVQVAWKRPVPDNRQAFVI

SEQ ID NO: 292541 - protein, 316 aa, unidentified
MSELVYVGIDVAKSSFEVAVTGQSQTLNLANDEAGHAQLCQVLAPLAPRLILMEATGGYEQDLALALAGAGLRVSVVNPRQARDFARCVGKLAKTDRIDAQALRGFASMLDAQGHQPRALADDERRELTALVVRRRQLVAMLVSERQRLGVAHRKAKPSILAIMDAIAAQLHDVDGNLKAHVLAHHADLARLLTSVKGVGPTTACTLLAQLPELGQLNRKQITALVGLAPMNRDSGTLRGQRHIFGGRADVRRVLYVAALVGTRFNPVLKAFYAKLLAAGKAKKVALVACMHKLLVILNAIARTRSPWRNDFADGL

SEQ ID NO: 292542 - protein, 432 aa, unidentified
MSFAALDLHKRIVEAVILDHEGNILRRDRFPATREALTEFARKHLSAETLLAVEATTNTWAVVELLEPYVAEVIVSNPMRTRAIAFAKIKTDKVDALVLAQLLRADYLPRVWYPDPETQTMRRHSTSRAVLVADRTRIKNRIHSILHHRLIPNPSGDLFSKTNLGWLAKLKLDDDGRESLERYLRLLTQIEEELEACTDKIAAHAYQHPGAKLLMTIPGVDFCVAETVLAVLGDFTRFPDGDHAASYLGLVPSTRQSGEHCYHGRITKQGSGHARWMLVQAAQHAANNPGPLGVFFRRLAKKKNRNVAVVATARKMVTIAWLMLKNNEPYRYSISRATDAKLSRLRIRATGKKQKGGFPKGSQRPEAYATGKATRAVRSIDAVYEKEGIPPLGPQSPGEKKMLAAKDLTAFATEVRTSKRVPRKSRAKRHQD

SEQ ID NO: 292543 - protein, 375 aa, unidentified
MNTIYIGVDFHARQQTICYLKTETGELVIADLKHLDKERVRAFYQQFQGRVIIGLEASGYSPWFEAMLEQLGCEVWLGDATEIRRRARWRQKSDRKDAELIWDLMVHNEFPLLHRPALPSREILRMLRYRQKLIKMRTMSKNSLQAIAMQAGLAKGSRLFGTVGQQELQTAEMSPALQWQRDHWLALMEPLNQQLLETMVWFKAQAKGDAVISRLRTHPGIGLLTSLCLLHTLQPVSRFRNQRKVVAYAGFDPMVRRSAERAVYLGISKAGSRLLRYLLVEAVHTAVRHDEDLKRFYHHVAERRGRPKAKVAAARKLLIRAYIMLRDGIDYAEFRRRAVAARLARGSQGPKVPEVLIGQPASTERQEPLTNPPSK

SEQ ID NO: 292544 - protein, 319 aa, unidentified
MKIYVGVDVGKFNLDVYYLNKHFQITNDSTGIASLLEDFKNNIPTSDNIVVICEATGGYEQLLIKTLLKHAISFHIAHPNKVRAFAKTQGILAKTDRIDAIILRDYGELIHPQPSKNLLSESANTIRSLIKRRDQLLDDQRREQARLDKLTLPDVKNSVQSHITWITQEINNINAKIEKASMEDTIKQQVELLTSVPSVGNFTALMLISYLPELGNANGAQISALVGVAPFNKDSGRYKGKRFIQGGRSMIRKSLYMSAVSSIRWNPDMKSFYTRLRKSGKPAKVALVAVMRKLLILLNNIIKRQTPWEINNPKKLFMA

SEQ ID NO: 292545 - protein, 421 aa, unidentified
MQVLYERCAGIDVHKDQVTVAVRLPGPGPGGRDTRVRKFAAFYGVLREMTLWLVAQGVTHVAMEATGVYTLPVYHALLEPGAFEQVLVCNAAHVKNVPGRKTDAVDAAWLGELLECGLLKGSFIPPAEIKAVRDVIRYRRKLVQERTAETQRLGGVLQDAGIKLDSVASSIDTVSGLAMIRALIDGERRGQVLADLARGVMRSRISDLSLALEGRFDDHHALMCQLHLDHIAHLNEMIAKLDAQVEAMMVPFRPQRDLLATIPGIGPAAAAAIISEIGTSPAEFFATGAHLASWAGLCPGNHESAGKRKHGKPRKGSQHLQPLLVECAWAAVRADGRLKARYRRLVLRFGGYRNPAAKKRAIVAIAHTLALIAWHILATGTPYTDLGADFYTHRTDPAKEAQRLIAKLEALGHKVTLEPAA

SEQ ID NO: 292546 - protein, 333 aa, unidentified
MSRFWVGIDVSKRKLDVALLNDAGKVKSKSLANDPAGFAALTIWLNERGADLASTHICMESTGSYSEGCATALSDAGWLVSVVNPAQPKSFGQSELNRNKTDEMDAALLARYCSKMEPAAWQPPPLEYRKLRSLVERVQALKDMRQQESNRLEATAEAAARQSITEHLTWLDARIAELDRDINDHIDGNKETLGKDAQLLTSIPGIGKTTAAKVLGLLGDLRRFSSGKALAAFIGVTPRRHESGTSVRGRSSIGRAGHPRIRHALFMPTLVAAKHNPLIKAFRNRLVAAGKPKKSAALASMHKLVHLMHAIVCNGVAFDSRFSRLALDVQDGI

SEQ ID NO: 292547 - protein, 422 aa, unidentified
MLESSQDNEEIIERIAALDIGKAELVCCVRIPGQGPGGRRRQEVSTYSTMTRSLLTMADRLRELGVTRVVMESTSDYWKPVFYLLEAAGVDTWLVNAKDVKHLPGRPKTDRLDAVWLCKVAERQMIRPSFIPPAPIRELRGLTRYRVDLIAARTAERSRVEKLLEDAQIKLSVVASDIFGTSGRDMMAALIAGQRDPKVLAQMARSRLRKKITQLEDAFVGRFSEHHGFLLARMLARVDAITADIAEVNQRIEQQMSPFGESARRLDEIPGVGPATAHVIIAEVGVDMSRFPTPAHLASWARFAPGVKESAGKSKGSGSTGHGNSYLARVLGEAAVAAGKTDTFLGERYRRIARRCGNRRAIVAVGRSILTIVWHLLRDPVTRFNDIGSDFYDTRVNPERRKRNHIRQLEALGYTVTLAPAA

SEQ ID NO: 292548 - protein, 422 aa, unidentified
MQTLLSQRFTAYVGIDWADTKHDVCLQVAGESRRHFSVIDHTPQSIDRWAKSLFERYGAPIAIALELNKGPLVAALQKYEFFCLFPINPSTLAKHRKAFVGSGAKDDPTDAQWALELLLTYPQRFAQLMPQSPAMRILASLTEHRRALVDERVKVSNRLICTLKQYYPAALELFSNHDSVVFCDFLMRWPTLEHLKRSRQSTFLKFFNEHNARHAQLNQTRWEIITQAMPLTQDPGVIRPSQLYATALASQLKGLICTLKDFDREIQETANSLADYPIFKALPGAGQHLAPRLMVAFGEQRDRFSDANAMQRYAGIAPVTQRSGKKTVVYWRYQCSTFLRQTFVEWAAHSITQSTWAEAYYRQQRAKGCSYQATLRALAFKWIRIVYRCWKTSTYYDEKAYLQALTGRGSTLVEAPMEVVSG

SEQ ID NO: 292549 - protein, 411 aa, unidentified
MEQKVCGIDIHRDTLVATILDQTNHKQTQTFQNSQTDIEQLKNWLKTNNCTNVVMESTGSYWITLYITLEDAKFKPILANAHQVKAIPGRKTDQKDSEWLAYLLRSDLIRPSYVPAKPIRELRELARTRVKYVESRTQYKNRCQKILSKNNMRLSSVLSDIFGKAGKEILDGLMSGKTVEDILKTTKNKHLKKREVEIIDAARGSLSEVDMFLLKEMEQTIDTLTVQIHNIERRMAELVDEAALEIICSVPGVGRLSGATILAELGDVSRFGNGRQVAAWCGLAPFVSQSAGTTKIGGITKRGSRWLRRVLVEVAHVAVRMDCRFKRMFLRIAAKRCVKVAYVAVARKLLAVIWHLLVMGELYVEEGFSKKAVFVWSKSVEGDSNGCGGGLSLDVMAGILGRIVRKVSDGG

SEQ ID NO: 292550 - protein, 411 aa, unidentified
MQVMIRGCAGLDVHQATVVVCMLICEGRKRPRTEVRTFSTMTGALEELRGWLAAERVTHVGMESTGVYWLPVYAVLEGHFQLIVGNARHIKNVPGRKTDVKDAEWIAELVCHGLIRPSYVPTKPLRDLRELLRYRRKLVESQSAERNRLQRLPETVNIKLASVVTDVLGVSGRDMLRALIEGIASPEEMADLARRRLRSKRPELTLALNGRMGEEQRFLLAPQLRRLQAIEQDIELLERRIAEKLAPYDAEISLLMTIPGVDWVVAATLLAEIGTDMSVFLSAHHLAAWAGVCPGNHETGGKRRSVKARKGNKHLRASLVEAAIAASRAKASYLRDKFYRLKARRGAMRAALAIAHKILVCAYHLLARGINYRELGEAYLDQTRTAANLKRRLERLGYVVSIQPKGAATAA

SEQ ID NO: 292551 - protein, 405 aa, unidentified
MTVFVGDDWAEDHHDVHLMNSDGARLEAKRLPEGVEGLARLHALIAEHASDPSEVVVGIETERGMWVQSLIDAGYQVYAINPLSASRYRERTNVSGAKSDPGDAKMLADLVRTDAHNHRQIAGDTEAVNGLKILTRTHQRLVWDRTRHLNRLRSDLREFFPAALNAFDDLAHGDALCVLTKAPNPDQAAKLSITQIRAALKRGGRQRNLNSRSAAIQVALRAPQMTAPAAIASAFATSTQSLAQIVDGLNTQIEVLEIELTREFEQHPDSDIYQSMPGLGPILGSRVLAEFGDDPQRYDSAKARRNYAGTSPITIASGRKRAVTARYVRNKRLYNAVDRWAFSSLRNSQGCRDFYDHRKALGDLHHQALRALGNRLVGYLHGCLRTRTHYDETTAWAHRQDQAAA

SEQ ID NO: 292552 - protein, 394 aa, unidentified
MFLVGIDIGKNKHSFCIIEKETGELIVKPNFFDNNNIGFEELISSIQNLSNQDILIGMEDTGHYHFALLKFLLDKKYQVALINPVTTNLTRKLQGGITKTDKLDTLTICDVLSSSQRVKSYRITKVDRFDMYEQKQLTREHHNLKEQLNVLKNRLQKSIDIVFPEFNSLFDSKYGTVYVNILKEFGSADAVARADIRTIRKCFDTKGKGRRIALTAEKLKEAAKNSVGFPSIAEVVQIKHLINQVKLIEEQISEIDKKIEEFSISNNSPILSIPGISHFSGTSILAELGDIHNYSKPSQIIKFAGVAPITYESSQFTAQHTAITKKGSKYLRKTLYQIITPVINNNEVFKTYYQLKLSQGKGHRCAQGHCVRKLMRVIFQLLSTNTQFDPALLV

SEQ ID NO: 292553 - protein, 344 aa, unidentified
MDHFAGLDVSVKETSVCILDDAGKIVKEVKVASEPQALLKVLGNPTYRFKRIGLEAGPLSQWLFSALAEAELPVICVETRHMQAVLKAQINKTDRNDARGIAQMMRVGLYRVVHVKTLHSQKLRMLLTHRKLLQSKAIAIENDLRGTLRNFGLKVGMVGTVRFEARIQELVETIPDLAVMVEPLLVVRRALREQIVILHRRLLAIVRDDEVCRRLMTTPGVGPVVALTYRATVDVPARFRKSKSVGAVFGLTCSKYQSGEIDRNGRISRCGDEMMRVMLYEAAQSMLRSKKWSWLKAWAMQIARRRGMKKAIVALARRLAVIMHRIWIDGTEFRWTREATAAAA

SEQ ID NO: 292554 - protein, 376 aa, unidentified
MNRVVYVGMDVHKDTYSLCAFDAQNQCFLSETTIKSEVVHVLKYVKSIENRFKDDDLAVVCGYEAGPTGFSLCRDLQKANVSCVVMAPSSLPKSPDNKRRKTDKIDARDLALHLAHHTYKAVNILSPELESIKELTRVRASATRAKKRAKQILLSFLLRKGMVYPFGGRAKYWTQKFDAWLRTLEFANPLDRYSFEEYLTEVNHQVGRVARLDEKITEIAETQLIDEDVRKLCCFSGISTYTAVSLISEVGDFHRFEKASHFANYLGLCPGVHSSGLSSQNLGITKAGNGNLRRLLIEATQSLGHSLICGKKSQRILARQKGMDPSIVAYTDRATDRVKRKRRAMIFRGVNVNKATTAAAREMACFIWGMMTNNVA

SEQ ID NO: 292555 - protein, 385 aa, unidentified
MSSKAFVPRDYDVFAGLDVDKKSISVTFTNHQGFIRSLRVPYSAEHLVNHVRKHFPDQKVAFAYEAGPTGYGLYDGIVAHDYRCLIASPSMIPKAPGQRVKTNRLDSRGISENLRGGQLKSIHVPSVLYRELRHLTQLRDTFVSELVAMKQRIKSLLLMEGLEFPPAPAGSQWSFMVKAKLRKLPCSSTVRFKLDELLDGLEFNEKRVVKTTQQIRRFCQNDPELSQCIEYMMSVSGIGWIVASQLLARIGDWRELGNVRQLGAFLGLVPTEHSTGERTDRGSITHSGEPRLRSKLIQAAWSAIRKDGELREFFRSVCQTHARSVASRVAIVAVARKLTVLISVVLMKQRPYVVRKKVHSAPLTQEETVPQGTPRRRAEPGEKNS

SEQ ID NO: 292556 - protein, 362 aa, unidentified
MQRHGNELDFKGQNIYVGIDVHLKSWTVTILTETQPHKTFSQPPKPEVLFGYLEKHFPNGSYHSAYEAGFSGFWAHYRLTSLGVNNIVINPADVPTTQKEQYHKNDPVDSRKIAKALRSGLLTPIYIMDNHTIEDRSLVRTRNMLVKDMVRFKVRIKSFLYFFGICYPENFENTKTHWSRNFMQWLKEIKLDTWSGRTALDMLIREAENQRQLLLEIDKKIRALCRSDKYKKNVELLQTVPGIGITNAVVFITQIENVERFRTIDELASYVGLVPTSHSSGEKENNGEMTFRGQKILKSMLVESAWVAVRIDTALSLSYNTYIKRMQPNKAIIRIARKLLNRMYYTLKNKRPYQTGIVGQNL

SEQ ID NO: 292557 - protein, 413 aa, unidentified
MEWVAVVGVDWGDKEHAYTIRGADGTRICGKISSGSEEVHGWVRGLRELYPEGTVVIAVEQGRGSLIYALAQYEFVSLVPINPRASKAYRDSLRLSGASDDASDAERICEFALKHLPDLRVWQPDDVATRKVRMLSEHRRALVDQRTAATHTIAATLKMFFPQAIEWFGGETSLLLRVFLMRWPTLADLRQATIEQLMEVFRSRRCRKISARAKALYDQLRLAVPITLDAPIISAGSMYVGAQIALADALDQQIAQYDRAIAQAWSEHPDRQIFEALPGAGPVLAPRLGAALGTDRDRYQDASQIQCYSGIAPVIEQSGKTRWVHARWGYPTFLHQTFFEFAQASIPHSPWAKAVYLEQRHLGADHHEAIRALAFRWIRIIFAIWKKRTLYNEQKHIDRLRKTASPIAARLAA

SEQ ID NO: 292558 - protein, 333 aa, unidentified
MGFEPEPSKKGSWMMAQNDLVVAGIDVAKDKIDVCIRSLSLRRTFASTAEGHRELVSWLRRRKVGKAVMEASGGYEREWAKALRAARIEVRIVDPKRVRSFAQSAGRLAKNDTIDAEMIAWFAETFDEAKGQVYDAAREKLHQMVNARQALKEMQAKLQNQGEHAMPAAVEQAHARVLKTIGIELAKLDAAISAMIRTTPHFAELAEIMESVPGIGRTTSAALIATMPELGQASDKIVAALLGLAPYDDDSGRRRGERHVKGGRRRTRNAFYMACLGAATQHNPVLKAFYERLLAKGKLKKVALTACMRKLICILNVMITRRQQWDATRYALT

SEQ ID NO: 292559 - protein, 323 aa, unidentified
MNERTDMNTIPAIPSPVHIGVDVAKAELVADLAGTIKRFANHPKGITALLRAATRCAPHVRLVCEATAGYEQALATASFKAGVPICIVPPQRPRHFAKALGLHAKSDPVDAALLSRFGNQTGPVPARPKDSSRRELESLMRARGELIDALGRENSRREHHEHPLALKLAKDRIVRLEKDIALIDKAAAAVIAADPLLGNADVLLRQVTGVSHQSSRALLAFMPELGTLNRREIAALAGLAPFDRDSGNKQGKRYIQGGRARVRSTLHMAGLSAAQFNKVLAPVYRNLIKAGKPFKVAITAITRKLLVHLNSIMADFLKNQVAA

SEQ ID NO: 292560 - protein, 347 aa, unidentified
MKHLNTIGVDLAKNIIQVSVVSSSGKELCNRSLTRKKFSEFLGKQNPSLVAFEACATSHYWARVAQRHGHRVKIIPARAVLPFRQGHKTDPNDALAVAEAAVRPKVQEAPLKNLEQQGLQAVQRSRELLVQERTALSNHVRGLLLEFGVVIPQGFAALHRRVPEVLEDGENELPDIYRPTLHRLYVRLCDLREDLGFLDKQIDELVKQHPSCERLMAMEGVGPISSILLFATLGTGEAFKNGRQFSAYLGLTPKQYSSGGKANIVGISKKVANKRLRSVLIQGARSYVHKLKQPKTPKDQWLWQLIQRAGHGKATVALANKNVRTAWALLTEGTEYDRQRGMLQQAA

SEQ ID NO: 292561 - protein, 348 aa, unidentified
MSITMIGLDTAKSVFQIHAVDAAGKPQLKRKLRREEVIPFFEQQERCTVVLEACGAGHHWARILTELGHEAKLLAPEAARPFVKKGKKNDAADAAALCPAASRPEATFVPVKSPEQQGVLALHSVRTLLVKQQTMLANAMRGLATEFGLVVAKGIHKLDELEAQVQAEASMPATAKQAFAELHGQSQAAATRIAGLEVQIVAHARQDATARRLATIPGIGPITASLITATVGDSIGSFKNARHFAAWLGLVPRQHSTGGKTRLGRITKAGNGEIRRMLVLGATSMVHRAAQWNSAVGAWLRGVLERRPVRLATVALANKMARIAWAVMTRGETYQAKGRARAAAAAEA

SEQ ID NO: 292562 - protein, 355 aa, unidentified
MNDTKYIGMDVHRESISIAALNSAGKIVLECVVETKASIILQFIDGLRGELHVTFEEGTWAAWLYDLLKPHVRELVVCDPRKNASMKQGNKSDKIDARQLAELLRLDHLNPVYHGEHGLRSLKELVRSYLTITKDVGRVMSRVKAIYRSWGIACTGKQVYAPQHRVEWLAKITEPGVRRRAEFYYQQLDALRSLRREVRRELLEESKKHQAWKRLCQIPSIGPIRAAVLLGILQTPHRFRTKRQLWSFGGLGIETYSSADHRYVEGQLKRSKKPALIRGLNENCNHDVKNLLKGAAIIASTKPGPLQEFYTALLAKGMRPEMARLTLARKIATIVLIVWKRGVSFDAQHLKPQTA

SEQ ID NO: 292563 - protein, 414 aa, unidentified
MALKIIYPCCCGMDIHKTFIVACIATTNNQGVTTYQSKRFSTFTNDLRRLANWLAGNNCRDICMESTGKYWIPVFNMLETSCNVILAHPKYVKSIRGKKTDKKDAKWIADIFKHDLIAPSFIPPFEIRQLRDLSRYYTKLTGFTTGEKNRAQNCLTVSNIQIDQVFSDVFGKSASAITEQLLKHPNGDFNVEPFVHPGVKTPIHRIQAAVDGSMCFQQAEKLRIIRKHLDSIHNCNSSLDALIDKCASQFQPQIELVMSVPGIQRFSAISIISEIGVDMSVFPTAKHLCSWAGLVPQNDQSAGKKKTTRISRAGSYIKPLLVRCALSAIATKKNPEIKDRYIALKKRRGHKKAIIAICRMLLTAIYAIIKKAEPYDPSHYRVFDLPPGSRFITPTQAMYIARRLGYTVVTPQAS

SEQ ID NO: 292564 - protein, 343 aa, unidentified
MSEAYSGRQIVGMDLHRRRSVLVRMTETGERLETVRISNDPEYLRQVMTRAGEHPEVVLEATFGWFWAADTLAELGATVHLAHPLGVKMFSYRRLKNDEHDAADLADLFRMGRLPEAWIAPPATRELRGWVRHRAKLVALRSSLKCQIHAVLAGAGVPVPMSDLFGAGGLELLSGARLAPESRARVDSVMRLIEALDFEIELFTKLVAGRLREHAGYRAIQAIPGVGPVLAAVFVAEIGDITRFARPAQLACWAGLTPTHHESDTHIHRGRITKQGSRLVRWAAVEAVQRVSAHTPVGAVRVRVGERRGANIGTVAAARELTELVFYGLRDGHIRRLSAPPAA

SEQ ID NO: 292565 - protein, 345 aa, unidentified
MPIVGGLDIHRKQITFDYLDTVTGEVNRGQIAPADREHVQAWLARFAGRGDAAFAVEGCAGWRYVSEELAAAGIAAHLGEPADTAALRGRKRHAKTDKTDARHLRTLLAEGRLPECWIPPAHILEYRALLETYHDLRTAHTAWVQRIHAVFFHQGAPPLSDGALRTEAGLAKLRAAAAAHLPAAGQQQVATAVDMIAATEARMGPLRRQLRDAAAHLTGAKVLAARLYGVGPFTALALTCWLGGADRFSSSRKAVRFTGLDITVHSSDRKGPPGRLSRQGPPVLRWAVYEAGKTHARTAAPDHACYAQVKDRKNSKRACLSEARKIVRQACHILTELGDGALTTI

SEQ ID NO: 292566 - protein, 310 aa, unidentified
MTRNHIGVDLSKHTLDICDPRRGEARVPNAPAAIARWLAGLGPDDVVVYEATSACDRPLRAALREAGHPGVRLNPLHAWHFARSLNLAKTDRVDAGMLARLGAERQPEPDADAGPAREELRELVQRRDQLERMQTQEKNRLSAATLAVVARDIRAELANLARRLTRIEAAIAACLARHTELAAAERLLRSIPCFGPVTAVMLLAHVPELGLTDRRAIASLGGVAPRAHDSGKHRGKRFLGEGRRHVRRALYMAALSALRHAGFLADFVARLKAAGKPAKVILMALARRLLVTANAILRTGEPFRPTKAAA

SEQ ID NO: 292567 - protein, 363 aa, unidentified
MKKLTRPVQKVNAPVLGLDIHKNLIAYCLFDREGNEVEAGVVGGLVSDLEALVDRLTGRRKLHVAFEATGGILWIFDLLVARFGRQRVHVAQPRRIRAIANSREKNDANDAWWLAYLTYEGRLPESFIPTGALRELRIATRERIATVQARTKVKVRLRAHLLQMGVRLPTVKIDTLKGWAFLQQLVIDTPGTRGMALKSLLLRFEHLEEAVADWDAEIERLAESFEAVRTLEREAPGVGTVLAATIAAEAWPIQRFRTPKAFARYTGLTPSDRSTSGRQIHGAITREGSSYLRWALTQAVMACLRAKRGPSVAAGNWVRAKQRRMGCKAKARTAGARKLAEQVWRLFNLGECFDPQRPFGSAA

SEQ ID NO: 292568 - protein, 342 aa, unidentified
MKKISVIGLDLAKAVFQVHGVDEEGEIVLRKSLKRSEVLRFFARQHPCLIGMEACGGAHYWAGALARLGHTVRLMAPAFVKPYLKSNKNDRNDAEAICEAVQRPSMRFVAAKTPEQQAVLHLHHGRQLLVRQRVALNNHMRGILLEYGINLPVGTRVVSQQLPALLEDAEKALPPLTRHLLAELKAEHDQLVSRIEDLETQLKHWHQQCPVSQQLASIPGIGMLTATALAATVGEANNFKNGRQLAAYLGLVPRQASSGGKERLLGISKRGDKYVRTLLIHGARAVIHHIRRRLKAGRPGGHPWLEQVLQRCHVNEAAVALANKMARMAWALLAHDETYRAA

SEQ ID NO: 292569 - protein, 342 aa, unidentified
MGEVSTIGLDIAKSIFQIHGVDADGVVMIRKRIRRAKLLEFFAALPACLVGIEACPTAHYWSRRLQILGHTVKLMPPSYVKAYLKRNKNDANDAAAICEAVTRPSMRFVATKSEEQQCGLMLHRSRQLLVCQRTMLSNAIRGHMAELGIICAKGRNGTAELLRIIADEYDDRIPAVARLSLDVLARQYTVVRAEIVAIEKRIHAWHRSCEESRRLEEIPGVGPIVATALVAEVGDWKEFTSGRSLAAWIGLVPRQHSSGGKERLGRISKQGNRHLRWLLVAGAMAVIRYARQHGTKRLWLARLMERRPIKVAAVALANKIARMAWAMMVRGERFKEPKLLPA

SEQ ID NO: 292570 - protein, 441 aa, unidentified
MFCNGNGKIIRKPFPIKNSLDGKKYLVDQVTKSCRHHAINVHHVLFGGEDCGSYADNFIDALRLEDWLVAGVNAHDAKTHRENMQASTDQLDLLGICKMLLNCRGNCSPAQSGIYWNLRMLVRQRRKLVNMTTGVKNRIHTIVDRIFPGFLDERKSGVAPFSKCSLLLMKDRFSPHQIHRRRHSTVTKSLSCQGVQHPEIRAQKLQKYAEQVLRTPEKYVATLQISLKQQVKLFSCMQESIQQLDKEIAEILAQTQGAFLTSIQGIGIVLAAGVSAEIGDPNKQKSINDLVSYAGIIPKVKQTGGPQGKTQTKKVGKRCNRILKDYVVQSASHIGKHGPEELMSDYKRRDAQGQHADFGMARRYLRMALCLMRSHQTYLPLKYRNASVKMEERAEYYLMAWPKLHGKWQRANAVDTAFDKEMPLGQWRNMIQELYGIELKL

SEQ ID NO: 292571 - protein, 412 aa, unidentified
MTAIDQFAAHVGLDWADKKHDVCVQFKNGERTFHVINHTPEALDTWLNELHQKVKGRIAIALELKKGPVVYALQKYPFITVFPVHALSLARYRQTFWPSGAKDDPQDAELALDLMLRYPQKIKAIEPDNADIRLLLQLVEQRRLLVEDKRRFVNRLINTLKQYYPQPLEWFSHRDSSLFCELIIRWPSLQQLKRARSDTVRHFMNARGGPAVAYTEQRVTSIANAIPLTTDKSVIEANALMAIALASQIKLVGELIRTYDERIESLFDTLPDAELFKSLPGMGPCMGPRMLAALGDNRDRFNSAEEIQNYAGIAPVTERSGQKSWIHWRWQCAKFVRQTFVEWAAKTVNSSYWAKLYYQGMREKGKSHQSAIRALAFKWIRIIYRCWKTRTRYDEAKYLLALEARKSPLLMP

SEQ ID NO: 292572 - protein, 350 aa, unidentified
MRHFIGCDAHKKYSLFVAVDEAGETKPAVRVNHDRESYRTFLRGLKARSSIAVETVGNWYWIVDEMQQAGHQPRLAHARKAKLMMGQLDKTDKLDARGLATLLRNGTLPEVWIPSREIRDQRELLRLRMTLVGMETRLKNRVHAILAKYALRLEVTDVFSQKGRRLVLEHLDDLPEETRQVVRQHLELLESTERQKKVTEQRLQAIVQQRDDIDLLKTLPGVGWILATVIALEIGDIQRFNHAPKLASYAGTVPRVHSSGGKTRYGRVHPDVNRYLKWALVEAGNLIVMQQQRLGDIHAVRLYRRLRPRKGHAKAVTAVARHLAEAAFWVLKRQQPYKEPQGCRVSSTHR

SEQ ID NO: 292573 - protein, 344 aa, unidentified
MIIIGCDFHPSWQQICWLNTETGETGERKLMHTTGEAERYYSGLTGPVRVGLESTGNSHWFVDMLTEMGHEVWVGDAAKIRAKQVRKQKTDRRDAAHILDLLLKDDFPRIWTPSQQERDQRQLLIHRYKLVTLRVRVKNELQHLALNQGMQKGRSLWSKEGQKQLLEMPLDLWAGVRRQNLLALLKSMDQQIVVLDQAVKKAAEENEKSRLLMTQPGVGPITSLAYVLTMGDVARFQRGKQVASYLGLIPREYSSAGKQRLGAITKQGNRFMRMLLVEAAQVAVRYDPKFRSEYLHRCHHKPKAVAKVAVARKLAVRLFWMLRTNTAYPEVVRIESSSRVPLGG

SEQ ID NO: 292574 - protein, 280 aa, unidentified
MKKSSTVGMTKMGAVVGLDLSDRKATYVILNWRGRVVAEGSIALTRRGLEDRFAHATYRVALEAGTHSPWVSRVLQQLGHEVLVANPRQLPLIFRSLRKDDRMDALSLARLARFDPLLLRPITHRSEEAQHHLALLRARDALVASRTSLISHVRGVVKSAGGRLPSCSAPSFARQAADLIPEPLAAALQPLLQTVAQLSDTISQYDREVERLAAQHYPVTTALRQVNGVGPLTALAFVLTIEDPARFRTSRDVGAYVGLTPHSWCSAPITSWGRLARTAS

SEQ ID NO: 292575 - protein, 419 aa, unidentified
MVEDMRWFVGIDWATQSHRVCLLDAEGRRVGEREFTHGGAGLMELREWLLEKTKAAPRQIAVAIEMPHGPVVEMLLEHGFAAFAINPKQLDRFRDRFTVAGAKDDSRDAQVLGDSLRTDRKAFRLLATDNPVVIELREWSRITDELQQERTRLANRVRQQLWRYYPQASELTDDVGDDWFLALWQKVPTPAAATKASEKTIGRILKDHRIRRLDAAAVLQTLRKTALFVAPGTTEAACAHIHSLAGRLRLINQQIKQACKTLDSLCARLATQGEESPSGQSHEQCDVTILRSWPGIGRIVLATLLTEAAQPLRARDYHALRVLAGVAPVTRQSGKQRFVSRRLACNKRLQTAVHHWSRVAIQHDDAARRRYDALRQRGHGHARALRGVGDRLLSALCSTLKRQALYDADQRSTKTAAKQ

SEQ ID NO: 292576 - protein, 341 aa, unidentified
MSGGQNKIWIGFDVGKESFSAAVDQLKNTGKDKVTSLLCRNFKRTPVGVEQFFDWVKNLLYDQEPHIVMETTGCYSQHLADWITQSHPEISITIENARKIHAYIESLNLPHKTDKTDAQAIARFGTERQPEPTNRPSQTIMILRELSRERTALIKARVDLQNRRDSIISPVVRKINAQTLAALTMQIEKIEKEIKACVVADEELLTEVHIMTTMPGVSFISAYSILAEIGSLKQYSAKELSAISGLAPRIKQSGSSVDYSFMSRRSSGRLRQILYLDSVPGLPKIPSLQDFYQRLIAKGKTKMTVRCACMRKMLLMLRSMVVHNTPFDENFLKNHQKVFDF

SEQ ID NO: 292577 - protein, 372 aa, unidentified
MGHHTEAFVGIDTSKLRNAVAIADSGRGGEVRYLGEFPATEAAIQKLVAKLAAKYRHLTFCYEAGPTGYGLYRLLKSLSHECLVVAPSLVPKKAGDRVKTNRRDAVSLAKLLRAGELTAVWVPDERHEAMRDLSRARQAVKKDLQGKRQQISSLMLRLGRIYPGKTTWGPAHMRWLISQKLEHREQRIAFEELLEGIRQESERMERLEDAIREVVPEWSLAEVVAALQAMRGIDLIAAVGVLAEIGDLSRFQNPRELMGYLGLVPTENSTGNKVKRGGITKAGNGRARRILVEAAWSYRYPPRVSRDKQPKVEAAPRRAREIAWKAQTRLCGRFRSLERKGKRRTVIVTAIARELSAFIWAINRELMPLRQA

SEQ ID NO: 292578 - protein, 340 aa, unidentified
MRQLYVASDLHGNNNLVGIIDGEGKRIFKKKLPNDPLLINNILKPFKEEIVGIVVESTYNWYWLVDALMEEGYKVHLANPAAIQQYSGLKHTDDKHDAFWLAEMLRLGILPEGYIYPKEERPVRDLLRKRGHLVKLRTSLILSLENIISRNFGRKLSVNDVKGLRKDYVTPLFEGKEDLALAGRVSKETIDFLTHQILQIEGVVEKRVTLKEPYRYLLTIHGVGKILGLTIMLETGPIGRFETVGDYTSYCRKVPSQWISNGKRKGSGNRKNGNKYLSWAYAEASDFARRFHPESRAYYNRKMQKSNPAVAHSALSHKLARAAYYIMRDQVAFRPEKLFG

SEQ ID NO: 292579 - protein, 322 aa, unidentified
MTILGIDVSKTNFHGYVISEHGDAKKSFPNTQAGFKQLDTWLKNRRIDKVHACMEATGSYWEALALHLYEAQHVVSVINPSRTKAYASSELLRTKTDAVDAAMIARFCQAQTPAAWVPPPPEALLLRALVRHVEHLKATRAQQLTRRQTPGLPALVLSSIDDVLKTLDHEIRELEAAIDKHIGQHPDLKHKRDLLTSIPGFGDTTAASILAEAPQLDEFRNTSAVSAFVGLSPSCKESGSSVRSRGRQCKTGSSRLRKALYFPAIVAMQHNPIARSLAARLRAKGKANMLVIGAVMRKLLVIAYGVLKSGVPFSANSSIAEA

SEQ ID NO: 292580 - protein, 458 aa, unidentified
MRRKREAGRDRQSLPLVHPHAAAIDVGATMHMAAVGPDCTDEPVRSFGTFTADLHRLADWLEVCGVTSVVMESTGVYWIPVFEILQDRGLEVFLVNARDAKQVPGRKTDVKDAQWLQRLHAYGLLRASFQPKAEIAELRAYLRQRERLLEYAASHIQHMQKALTEMNLQLHHVVSDITGATGLRIIRAILAGERDPAVLASLRDIRCHSSPETIGKALTGHYRAEHLFALEQALALYDTYQHKVAACDQRIEAVLKALSPRKPDPASLPAPRRRMSRQPNEPGFDLRRALYAVLGQDLTRIHGLGPSLALKLIAECGTDLMAWPSSKHFTSWLCLAPGNKISGGKVLSSRTRRSGSRAAALLRLAAVTVGKTETALGAFYRRLSTRIGKAKAVTATARKIAVLFYNALRHGMDYADPGASYYEERYRKRVIDNLHRRAKAFGFVLQEVAVDTPVGAVS

SEQ ID NO: 292581 - protein, 432 aa, unidentified
MDRRTNQRLEEITPTTLIIGIDIAKSVQWARAVDYRGIEIGKAISFKNNRQGFDSIVAWINTIRNLKVLRRPVCFDSILIGMEPTGHYWKALANYLIKAGYRVVGVNPYHTKKAKELDDNSPTKNDKKDAITIARLVKDGRFFDPYLPTDIFAELRVLTNTRVSAMKRCVAVKNTITAILDEYFPEITTVFKNPLDGKASRQILRSCPFPSLILAMSESDILAEIKKAVKKSVGIKKVRQLIETAQTSVGVDYGLESAWLRLRQLLDELEVYERHLAEIESGMERMLVATGYAGQMLSIKGIGVVTAASFLGEVGDPLRFNNWRQIANYAGYNLVEDSSGKSKSGTVISKRGRGQLRSLLYQMAFRMVGQNTELKALYRYLISRSKNPLKKKQALIVVSKKIVTVIFNLLKKQATYNPALALGAVRREMMAA

SEQ ID NO: 292582 - protein, 373 aa, unidentified
MPKYSTAFGMDVHLRSTTVCALDADTGEAVTRRFPGNPWGEIAGWMDGFPGPSLAAYESGYLGFAPQRELSGLGVDCVVAAVSKVPRSAADLSSKNDRNDAARMAKAILSHDISPVWVPSPEIEGLRDLAGAHDAATARLAAAKQRLLAFLARRGYAYGGTTPAGNPRKYWTYGFLRWLDGIHPADDGGIRALAALRNEVEAADETREALLAEYRAAVAAGPLSAEVEALQSIKGCGFALAAAFASEVGDFSRFRSGRQVTAYFGLAPKQRSSADSVRLGGISGAGNALVRRLAVEGSWCYAQAGHQPKLMPKGSGVPLEVRMHGRKGSERLLRRREEMLERGMPQAKANAATAAELVRWLWALGAMCREATE

SEQ ID NO: 292583 - protein, 344 aa, unidentified
MYHYAGIDVSLECSSVCLVDGTGKILREARVASEPEALITWLRSLGLVLERIGLEAGPLSQWLYAAMRDAGLAVELLETRHVRDAFKAMPVKSDRNDARGIAQLMRLGWFRPVHCKSIEAQETRAVLTARKLLQSKLRDVENSLRGVLRGFGLKVGKTTECTFAERIRELVAGHPGLELVAKALLEAHAVLRREFNGLDKCTQKLARAHPSAKLLMTTPAVGPIVALTYASAIDDPKRFSSSKATGAHFGLTPKKYQSGQTDYTGRISKIGDASVREALYQAAHVMLTKPVKNCSALKSWAMRIAKRAGMRKAKVALARKLAVILHRMLADAKPFNPVAKAAAT

SEQ ID NO: 292584 - protein, 414 aa, unidentified
MEPVYRRKAGIDVHKKMLAVVVRCQSGEQIEYRKRKFGTTRQEIEHLRAWLESEGVDEVVMESTAQYWRPVWYGLESHFQLHLTHPLKTRAPRGRKWDFRDAQRLTDRWCSGDLEESFIPGAEQRSWRWLTRTRVGLKDKIIVVRNQVEGLLEQGSIKLTAVVSDVFGVSGWAMLEKIAQGVMDEKVLVAEARGVLRRKEEELKEALGGRLEPVYRMLLKQYMDQVRLLRKQVEEINQALALALKEHLPALHRLTQMPGVDLYAAQELLAEIGPRAAAFPSAEQFASWVGVCPGNHQSAGVCYSHRSAKGNRYLRRLLCQIAWAAVHTKGTFFAGLFARLKPRIEGKGAVWAVAHRMAKVIWLVLHNQVDYQEKGSAPPNERTLMRKFKRLLKEFGHLGLDVRALLEQQLATPA

SEQ ID NO: 292585 - protein, 343 aa, unidentified
MQSITTIGLDIAKSVFQVHGVDAAGQVVVRRQLRRRHVLAFFEKLPPCLVGIEACASSHHWSRELQALGHTVRLMPPAYVKPYVKRQKNDVTDAEAICEAVTRPSMRFVPTKTSEQQACLMLHRARHLFIRQQTAVINSIRAYLAEFGIIAPVGRRGVERLLEVVADKADHRLPEIARACVAALGDQLRALKAQILKFDRCIIAWHRSNATSRQLDEIPGVGPALATALVASVADPKAFRSGRDFSAWIGLVPRQNSSGGKDKLGSISKQGDRYLRSLFTAGALAVIRYAKIHGTRHRPWLTALLARRPTKVAAIALANKLARMAWAMMARNEHYKEPAALTA

SEQ ID NO: 292586 - protein, 350 aa, unidentified
MEITTIGLDLAKNIFQVHGINISGGAVVRRTLRRAQVLRFFEQLSPCLVGIEACGTSHYWAREIAKIGHEVRLMPPAYVKPYVKRGKTDAIDAEAICEAVSRPTMRYVAIKSPEQQAALAIHRTRNLFVKQRTQLVNMIRGLLAEFGIEIRRGLEQALMHAKRIAAGEMPDIPPLAAKVITDLAGQVLDLQARLREIERELLAWYRSSDVAKRLATIPGVGIVSATALAASVTDPHQFRSGRQFAAWLGLTPLQHSSGGKERLGRISKMGDKYLRRLLVVGMTSLVRRAKYKPDAVDPRLAALLLRKPVRVVTVALANKTARVVWAIMARGGTYRMPAAANTALVGLAAV

SEQ ID NO: 292587 - protein, 413 aa, unidentified
MRVMIERCCGLDVHQETVVACLLIGAPGVRPTKEVRTFRTMTRELEALRNWLKAAGVTHVGMESTGVYWRPVYAVLEGLFELIVGNARHIRNVPGRKTDVKDAEWIADLVRHGLIAKSFVPARPLRELRELLRYRRKLVESQSAERNRLLKLLETANIKLASVASDVFGVSGRAMLKTLSEGNATAEEIAGLAKGQLRRKHDDLVLALEGRVEEHHRFLLAIQLHRLEAAEHDIEALDSRIAERLEPYRTQHALLMQIPGVDWVVAAVLIAEIGIDMSVFLSAYHLASWAGVCPGNHESAGRQTSGRARKGNVHLRTILVGAATSASRTKGSYLKDKYHRLKARRGALRAALAIAHKILVAAYHMLAKGLAYRDLGEAYLDQLHQTRTAANLKRRLERLGYTVALQLKEATTA

SEQ ID NO: 292588 - protein, 347 aa, unidentified
MPRKRILVKSIDTSISYQVIGIDLAKHLVSACLITGAGEIFGIDRLTYDDLLKSAERMSPTLFCMEPCPEVHYLAEKLQGYGHHTKVIDGAAVKEYIKTHFGGQKTDLNDAQAIAFLSLDTNLPEITPKNTSNSVLSSIQAVREQFRKEYIQSFVSLKGICQRWGLPISKGVMNKNKVEELVSESKKIPQEVKDWLLELLQSCRELQKRLNKISKYLKEYADNDEICQKIMSVPGIGPITATRLKATIGDIQRFEKPKSIVAYYGLVPKSKATGHNEKKGGITRRGDRVARSLLIEGAGVVLNLAAKGFLRSKPLNKWIEKKRKLKMPWGKLCCASGPTRNINKKIE

SEQ ID NO: 292589 - protein, 422 aa, unidentified
MLSNRPSVGIDVAKNFCFYAAVSPTCTTFLKPFKALNTKQGLLFALEQIKKVEEAFSSQPVIVLESTGHYSQRIVHFFLKQGFEVYHINPLISHSIKNSAVRKVKTDQVDALELAKLPFLQTFRPTTLPKEQIANLKVLARTRCNLIEQRITATNQLQTAIEQVAPLFPNVLNPGSLTALTLVNKFPSPAEWSKKSNRKLIMTMLESLPRRGKLYAQQKYEALLSCAQDAEVTGIWITAYFSTIQRYASIVQFLNSEIKVLDSQIGELSSQLPEVALLTSIPGIGDTLAPLLLGEIGDIERFINAKQLVAFSGIDPAVRQSGNYVGTKNKVTKRGSPFIRHALYIAATTSVRKESKGSQVNSVIYDYYTRKIETKTKKQALGAVMNKLIRIIFSVLKNKQPFTLITPDQQVELYQKARQKAA

SEQ ID NO: 292590 - protein, 344 aa, unidentified
MSVATTIGIDLAKNSFHVYGINEHGAKVFSRTLTRGKVAEFFANHPQCLVGMEACTSSGYWQRVIEEHGHKVKRMHPRYVAPFRVGDKNDANDARAIGEAALRPSVRGIPIRSREQADIQAIHRVRSGLMRARVAAVNQTRGLLGEYGIVTRQGVCHVRDMLPGLISDTDNKLSGVMRQLLNTMFELINSLELQIAEQDALLKTVVRENEACQRLMKIPGVGYLTATMLCAVAGTASSFKNGREFAAYLGLVPREHSTGGKHRLLGISKRGDPYLRTLLVQGAFAVFFAVSKGHSTLGNGKLAAWFSSLMTRAEPKKVAVALANKIARIAWSLLRNGSDYSFTQ

SEQ ID NO: 292591 - protein, 324 aa, unidentified
MIDGVLGIDVSKNTIDVSMSGCNKLHARSFANSADGWRHLLAWLITQKIQRVHACLESTGRYSLGIASALYEAGHAVSIVNPAQIRDFARTKLGRNKTDRVDASHIREYCELFKPQPWAPPSESHRRLEELQTIRAGIIAGLTEWKNRKNSGMIDAVAQSLADATISHFTSQLGAVDEAITQTIDNDPVLRRKRDLLLSINGVGETLAGVVLAELPGPDVLRSGAEVVAYAGLNPRLHRSGTSIDRTTRISKIGNGVLRAALYMPAMSAMRYNPAIVALVARLKSQGRLKPKQIVVAAMRKLLVLCFGVLKTGKPFDPAMAMGC

SEQ ID NO: 292592 - protein, 323 aa, unidentified
MPSTYVGIDVAKATLQVHLNGHQIEFNNNSTGHAKLTKKLAQLTRPHVICEATGGYERPVVAVFHQDKILVSVLNPAHTLAAAKAQGMRAKSDCCDAEALTDYGQRYQPEPTVPVPQELREMTELALWLQQLIDQRAVAKTQAEHHDNAFVRHQHQELLAHYDEQIKTVEKEIKKRIQSQPEFQQRLDCLVEIQGVGFRTALMMLVLMPELGQMNRGGAAALAGLAPWTRDSGTMKGKRCIGGGRAQVRPVLYMSALCASRCNPILAPFYAALKQRNKPSKLALTALMRKLVIYMNHKLKALATMPPAQETKNATKPKKVLAN

SEQ ID NO: 292593 - protein, 410 aa, unidentified
MKIAGIDVHKKDLMVVVMDSSAPEEKPARRRFVTLPSELQRFRMWLQEQGVEEAVMESTAQYWRSVWLELEPHMGLHLAQAFSNRAPRGRKHDFKDAERLVRRLIAEELILSFVPNGEQRIWRSLTRMKVQLTRDRVRLQNQMECLLEEMRIKLSIVVSNLLGASGLRILHALAEGETDAKKLAELGDERLHCTEEQLVDALTGRVQPMHRGMLALQLKRLQLIDQQMAELNRMIAQAMKSHQDAVIRLAEVPGLGVDSAQQIIAEVGAQASTFSSAGELTSWVGTCPGKDESAEQNQSSRSAKGNKYLRRVLNQAAHAAVAKKGCHFQAVFRRLMPRLGYKSAIWAIAHRLCRVVWKILHEGVRFIEQGREVGPQEKKKRAQMLARALRKLGYQVTITPINQLAAKPAI

SEQ ID NO: 292594 - protein, 400 aa, unidentified
MLSIGIDVSKGKSTVCGMKPGGEIVYTPFEVQHTREGMSELVSLLRGSGEEVRVVLESTGSYHCPVVAALLENGIFVSVVNSLRMKRFCSQSIRRVKTDQIDAMQIALYGLAYWQELQPTRLPENTYRELQLLARQYYQMTSLLIKAKVDFNALCDQVLPGMQELMSDHAGRHKLSDFVLRYHHTAHILKMGETRFRKDYCKWAEKKGYRNHERMAALIFATAQNGIPVLPDAPSTQIVITEAIRVLHTVEASRDAILTQMQALAKTLPEYSLVREMPCIGDTLAPRLIAEIGDVRRFHSKRALIAYAGIDAPPYQSGKFSANNRHISKRGNRYLRKTGYEVMQSYVMHKPANDPIFTFIEKKRSEGKSGKLAMVAGLNKFLRVYYGKVTELYRSLPAIE

SEQ ID NO: 292595 - protein, 352 aa, unidentified
MNLFKYIGMDVHKATTVIAVLNSDGRVVAESIIETTAPSILDFIKSQRGTLHVAFEEGTQAAWLYDLIRPHVAKVVVCNPRKIAKQGNKADKLDARRLAKLLREGALTPVYHGEQSTRALKELVQNYTAVLEDGTRIKNRLKALFRGRGIDCTGTGVYDPDERQEWLAKIDSAAVRTRATTLWDELDCVELVCQVAKDEMLEEAAKHASIKILRSIPGVGRVRSAVILGVAATPHRFRTKRQFWAYCGLAVLTETSAEYEVVNGRLSRSKRRPLIRGLNHNYNRALKSVFKSAAISVAGGEWKSYFEAIIAKGAPESLALLTLARKIASITLALWKRGERYSEKKLKMRHAA

SEQ ID NO: 292596 - protein, 452 aa, unidentified
MGKRPGRQREFSPVHPNTAAINIGATMHMAAVGPGCDAEPVRSFGTFTGDLHRLADWFAACGVRTVVMESTGVYWIPAFEILDQRGFEVLLVNARDAKHVPGRKTDVSDAQWLQRLHTYGLLRGSFQPKGEIAVLRAYLRQRERLLDYAAAHIQHMQKALTQMNLQLHHVVTDVTGATGMRIIRALVAGERDPGILASYRDPRCHATLETLSAALTGNDREEHMFALTQALELYDIYQAKVADCDVRLKAVLDRLKAASGKPVGKLPPARHTTKQPNAPAFDVRVALHALLGVDLIHGMGPALALKLVSECGTDLSAWPTAKHFTSWLSLAPNNKISGGKVLSSRTRRSSNRAAAALRLAAVTIGRTDTALGAFYRRLSARIGKAKAVTATARKIAVLFYNTLRHGMNYTDPGASYYEERYRQRVLTNLQRRAKALGYVLQEVATPEAGGVS

SEQ ID NO: 292597 - protein, 426 aa, unidentified
MADTNHPIAALHWVAIDVARYWNAVLVETASGQRHRFRMTNSAADMQRLTDFLLGLGGRCRVALEPTGDYHRPIAHRLLRAGFEVVSISSVAQSRFREAMFNSWDKNDPKDAAVILEMLKQGRTQRYVDPMLAGHHDIQELSKTYYQISRARTKVQHAIINHHVPLYFPEMHKYWTSTRNEWWVKFMIEFPTPAHVRQHSCQEFIELASPVVGRRVHRVGKLTEIWECCADSGALPHDPQSVAVQTFLFTLRHYQHLNDMRRQLEEQAQNLLASDSDYVNLMSLPGVGPINALTILAEAGNLRRFGHHRQFLKYCGFDLAKSQSGVQRGREQLSKRGNARLRLAFWLAAVVAIRARENSFREKYDRYVSSNPKDPDLKRKALTAVAAKMARVAYGIIKKDQPYRRFFEQSLPSGSIPLNRAVGAPT

SEQ ID NO: 292598 - protein, 396 aa, unidentified
MISVGIDVSKGKSTVCIMKPCGEILESPFDIGHTADELDSLISLIKSFDEETRVVMEDTGHYHLPVATYLSSHNIFVCCVNALRMKKFCSQSLRRAKTDKIDSIKIASFGITYWNELVKAYPSNVIYDELKFLARQYYQVTGMLVKSKVNFSNLLDQVMPKINDVLSSQGENHKLTEFVSRYIHFQNILDMGEMKFTSDYCKWAKKKGYRLNERKAAEILALAQNGIPTLPNSQSVKIAVSEAVKLIHSIEESRNTILAQMQDLCNTLPEYSVVKEMDCIGDTLAPRIIAEIGDVRRFKNKHSLIAYAGIDAPPYQSGAFHASERHISKRGNSYLRKTGYEIMQSLIKHKPADNAVYNFIQKKRSEGKCGKEAMIAGLNKFLRVYYGKVMEFYSEH

SEQ ID NO: 292599 - protein, 317 aa, unidentified
MSNPESFVGIDVAKSWLDVAWLTGQTLHIDYTEDAVAGLVERLRSQPPTLVVMEATGGLETAVASALAAAGLAVAVVNPRQVRDYAKACGRLAKTDRIDALILAAFAAAIRPQVRELPDEDTRALGDLLARRRQLIDMRVQEKLRLQRASAVQRVSLREHIDWLDERIDRLDIELTHALRTSAAWRDKDDLLKAIPGVGALTRATMLALLPELGTLSRRQIAALVGVAPFNRDSGKHQGGRVIWGGRAQVRRILYMAAVSAMRCNPLIRSFYQHLRAQGKPSKVALTACMRKLLVIMNAMLKHQSAWSPALDTQHSC

SEQ ID NO: 292600 - protein, 343 aa, unidentified
MMNETMIGVDLAKAVFQVHGASMTGEPRFRKKLSRQSFSEFMAKQPPALVVMEACGSAHHWAREMIRLGHEVKLIAPRYVKPFVKRQKNDAADAEAIVIAARQPEMRFVEPKGAEQQSRAILFRGRERLVHQRTELINALRAALYEYGHVVPQGIRQIGRIEEILEAPHSNLPDLMRDECRDLLEQIAEQTVRINARTEKIKALAAEADTARRLQTIPGVGPMTALAVEAFAPSMESFNCGRAFEAWLGLVPRQFSSGGKERLGRTSKAGQADIRRLLIIGAMSRLNWMGRKSIPEDSWLARITSRKPRMLVAIALANKMARTMWAMLTKNEDYRVPAQAGAA

SEQ ID NO: 292601 - protein, 339 aa, unidentified
MTVNTVGLDLANDVFQVHGISENGRVIFNKAIKRAKLLAFFQTLPPCTIGMEACGSSHHWGRQLRKLGHDVKLMPAGYVKPYVKRGKNDAVDAEAICEAVRRPTMRFVDIKTEDQQAILSIHRTRDLAVRQRTQLANMIRSLLREFGHILPIGIEAVTAFSKRHLGGDHLDMPEIANGMLGIQCYQFIGLNERIEGYSKMIEQHALLNTDARRLMRMPGIGPITASAIVATIGDAKQFRTGRDLAAWLGLTPLNKSSGGKERLGKITKQGDRYIRKLLVVGMTSRAVMAKRSPEKVDLWTAKIIADKPFRLATVAMANKAARAICAMLTKKQEYRQPSI

SEQ ID NO: 292602 - protein, 479 aa, unidentified
MVLKQKKKQSVPLPPKKKVVIEVEAVLQKEAEQSPLESINLNAAGIDIGSRSHFVAVPPDRDPQPVQEFPTFTADLERLADWLQRCGITTVAMESTGVYWIPLFELLESRGFDIKLVNAHHIKNVPGRKSDVVDCQWIQQLHTFGLLSGSFRPDDEICVLRAHLRQRDNLIRYAGAHIQHMQKALNQMNIQLHHVVSDLTGVTGMKIIRAILAGERDAQVLASHRDRRCKLPVETLAKALQGNWRQEHLFALRQAVELFDVYQQKIEDCDQAIARVLDALESQTDQAAPQPVRRQKLSRNTPDINLHERLFQLTGVDLTRIDALNPHSVLKILAETGIDMTRWPSAKHFASWLGLSPANRVSGGKRIGKSKTTPSANRAAAAFRLAAQSLYASQSALGGFFRRQKARLGSPKAVTAAAHKLARIFYSMLKNKTAYDAPDANYYEAQYRKRVMANLRKRAAQMGFDLVERSADDAQPCAA

SEQ ID NO: 292603 - protein, 346 aa, unidentified
MEHYVGVDVSLELSSLCVLDMTGKIIREAKVASEPEVLVAFIRGLDLAITRVGLEAGPLSQWLYDGLHEAGLAPVLLETRHVKAALSAMAVKTDRRDARGIAQLLRMGWYRPVHRKSVPSQEIRALLGARKQLQIKVIDLEQTVRGLLRGFGLKVGDVSRGKLPARIRELAAGHVMLEKIVEPLLTAREAMWREFAKLHREVLLIVKEDQVCRRLMTVPGVGALVSLTYRAGVDDPARFTKSKSVGAFFGLMPTRYQSGETDVTGGITRVGDASVRTALHDAANALLTRAHRFSTLKRWALDVAKRRGMRRAKVALARKLATVLHRMWADGTEFTWGKDPAAATAA

SEQ ID NO: 292604 - protein, 377 aa, unidentified
MHSENIAAYVGLDVHKETLAVAIAAPERLGEVRYYGTINNEAQAVRRLFQKLQGLYGNILSCYEAGPCGFGLYHQLTAMNIKCQVIAPSRIPKSPTDRIKNDHRDAISLARLLRAGELTPVWIPDLTHEAMRDLIRARAAAKRDSRVARQRILSMLLRTDKHYAGKHWTGKHRTWLANQSFSQPSQQIAFQHYCQSLEQIEDRILQLDQEISRLLPEWSLCNLVCQLQALKGVGQLTAITLVAELGDFSRFSSPKQLMAFLGLVPGEYSSGNSIRPRGITKVGNSELRRLLYEAAWSYRTPAKVGAWLIYYRPDSVTQYSKDIAWKAQQRLCSRYRTLTAKGKKSQVAITAVARELTGFMWDIALAAQSSFSQQKQN

SEQ ID NO: 292605 - protein, 349 aa, unidentified
MKEQKKRDKVTIGLDLGDRRHRFCVLGCNGEVVEEGSLLNERVQLSALVGRYPAALVVMEAGCHSPWISRYLEALGCEAVVSNPRKVQAIYQHERKGDRRDALMLARIARMEPALLYPVEHGSQEAQQDLLRIKLRDSLVRARVGVINSIRATIKSLGYSVPHSSSERFHKVIKAALPAALREIIAPSVQALEELSLRIKVLEREISALARTKYPATAWLEQIPGVGPITALYFVLKIEDPTRFPQVRDVGAFIGLCPRRNQSGENDPQLRISKRGDAYLRRLLVSAAQYILGPFAPASALRQYGLSLAAEGTSRAKKRAVVATARKLAVLLLSLWKNERPYVPFPQLS

SEQ ID NO: 292606 - protein, 423 aa, unidentified
MSYRIAGIDVHKKMLAVVVSDVEVDGEYQFERVRYSSSPEHLRFLAEWLIAQQVEEVVMESTAQYWKPVWGALERYWKPICQEREGAGAMSGTLHLAQAQSNRGRRGRKKDFPDAERLVKRLVADELVLSFVPDTEQRLWRAVTRRKYQLTRNHVRLQNQLEALLEECHIKLSSLVSDLLGASARRMLKALAEGETNPATLAAMADKNLRATQAQLCDALGACTELKPIYRRLLKMFLEELQFIDQQISELDQELASLLSRHHDAVVHLAEIPGLGVDSAQQIIAEVGAGAATFPSAKQLSSWVGACPGEEESAEVSKSHRSPKGNRHMRRILNQAANAAAKSKGTIFEIVYRRLVSRLGHNQTIGAIAHRLCRLIWIILHRGVRYEERGPSVNAKTRRHRTNKMIRELRNLGYRVEPLVNTV

SEQ ID NO: 292607 - protein, 373 aa, unidentified
MPKYSTAFGMDVHLRSTTVCALDADTGEAVTRRFPGNPWGEIAGWMDGFPGPSLAAYESGYLGFAPQRELAGLGVECVVAAVSKIPRSAADSASKNDRNDAARMAKAILAHDISPVWAPSPEVEGIRDLAGAYDGAAARLATAKQRLLAFLARRGFVYGGTTPAGNPRKYWTYDFLRWLDKVRPEDDGGVRALAALRNEVEAAAEARADLLSEYRAAVDASPIAAEVAALQSIKGCAFALAAAFSAEVGDFTRFRSGRQVTAYFGLAPSQRSSGDSVRLGGISGAGNALVRKLAVEGSWCYAAARHQPKLMPRDTGVPLEIRMHGRKGSERLLRRREEMLARGMPAAKANAATAAELVRWLWALGMMCREGAE

SEQ ID NO: 292608 - protein, 377 aa, unidentified
MKTKTKTKAKAKATIVRPSAPVSSARSAAGGPVTVGLDLGDRKHSVCVLDAAGSVLCRERISNERMALKALAAAWPGALFVMEVGAHSPWISRYLQGLGCRVIVANARKVRAIYQSERKNDDRDAEQLARIARVDESLLYPVEHGTEQEQEDLLSIKLRDSLVRARVDLINAVRFTLKSLGYAVSSPASERFHKSVRREVPAEVLRVITPVLEVMEQMTEKIKAAEREIARLIQTQYPAAQRLQQIDGVGPVTALCFVLKVGDAQRFGRVRDVGAYLGLTPRQDQSGATDRELGITKCGDSYLRRLLVNCAQYIMGPFGPPCALRACGERLAGTTAKDRKRAVIAVARKLAVLMLSLWKSGQNYEVRAPQPPEALAA

SEQ ID NO: 292609 - protein, 324 aa, unidentified
MDAWIGIDISKDTLDACFLRPNGKMISKQFVNNLHGCQKLLNWVDTLSAPKRHFCMEATGAYYQTLASFLVEKGERVSVENPARIKYFGMGEGFLNKTDKADARTIALYAKQKQPEPWRMSLPEVQHLLALMHRLQGLQTHLGQEQNRLQEPNLNPEVARSIQTILVVLEQEIDRLEAQIKEHIDQHPKLRADKELLVSIPGIGPKLAHWILAEMPDPTQFQNAKSVSAYAGLSPMEYSSGSSIRRRTRISKAGNANLRRALYMPAMAAIRSNPIVSDLYARLIKRGKCKMVALGAAMRKLLMLAYGVLKTRIPFDPTYNFSKA

SEQ ID NO: 292610 - protein, 362 aa, unidentified
MVACDVHDETLVLKIAEGRSKARMRTVENTALGREELVRQLREQARLCGGAKVIFAYEASCQGFGLYDQMRGAGFECYVLAPTKIARSSQHRRRKTDARDADRLLELLRGYVLAGNELPSVWVPDVETRDDREIVRGRMDASEKAASVKAQVRALLKRHGQRRPEGMSKAWTQAFEAWLRGLIGPRGALPHGARVALGSLLRQKAAIEEEIARLDTEVEALAQTARYAEPTRALMSVKGVGLLTAMLFLTEMGDLSRFAGRKQIGAYLGLVPSSDESGPDADQKGHITHQGPWRVRRALCQATWARVRTDFDEKIVYERIVAKNPKHKKIAVVAAMRRLAVLLWHIGGEAQRRHGCFAQAAA

SEQ ID NO: 292611 - protein, 342 aa, unidentified
MSEVSIIGIDLAKRVFQLHGACTNGAVIYRKKLTRVQLLAFMSQQPKCTVAMEACATAHCWGREIEKLGHTVRLIAPNYVKPFVKRQKNDVADAEAIVEAASRPTMRFVALKSEAQQARAMLFRTRQMFIGQRTQTINALRGHLAEHGVVAPKGAIHVKRLADAVADETMGLPEEVRELAQVYLAQIEGLNVQITALDQRMKGAAKEAEAARRAQTMPGVGPITALAIETFAPDLNCFRRGRDFAAWLGLVPKQNSTGGKPRLGKTSKMGQRDIRRLLISGAMAVLQAVERFGTPHNSWLIAMLERKPRMLVAVALANKMARGLWAMVTKQEDYRTPAATMA

SEQ ID NO: 292612 - protein, 341 aa, unidentified
MSNCIGFDISKSTINIYIPKGSLNLEIENSNEAIKSFYSKLKKIYKKEIEKLIFIYEPTGSYSSLLTKFCAKMNIEVFMINPKQSHNFAKAIGQRGKSDKVDAKMLSSCISIAKEDDIKVPVINKTEQEIKDLIGYYKFITKQRVQTNNHLESLTSKEGSSYAIKELQKEIKKLLIKEKEIIDKIKEMIKKDTNLYRKFMGIKSIKGIGDVAAITLIHLFIKYPDANQKEIISLCELDPIEKTSGSSIRSKSRISKAGSRLYRSSLFMSAMVAIRYNEQIKEFYDRLKENGKHTTVAQVAVMKKLVVIAHSLYKNDCSYDEEFYKNKKLKSKKSEKLAIAA

SEQ ID NO: 292613 - protein, 426 aa, unidentified
MKQYTQNDKIEQVTEKTLVVGVDIGSTKQYARAFDYRGREIDRVFWFMDGRSGYELFLNWMQGLQSANDMDKIIVGAEPTGHYWFGLRRFLDEAGIQLVLVNPLHVSRAKELDDNNQTKSDRKDPKVIARLVMEGRYSVPYIPRGVYAELRNMWFLRQRVVDAEVKLRNRIARWFKIYFPEYTQAYGSFAAKSSITLLKTACLPEDVLQLGADGIVELWRAMKLRAVGRKKAESLVAAAARSTGQTEGAGAARMEMQMLLDEWELLSKQHQQIDDKLRDLCEQIPESKNLLAIKGIGFVTVAGFLAEAGDIKRFDSPKQIVKLAGLALWENSSGKHKGKTTISKRGRARLRRLLFAGVIPLLATNDAFHSLHVYYTTRKQNPLKKKQSVIAICCKLVRIFYALLTKGTAFDSSKMLGDIHRPPMAA

SEQ ID NO: 292614 - protein, 371 aa, unidentified
MGESSKMLFVGLDVHKDTIAVAYAPEDRGADVESLGAIGTRQCDIDKLIRRLESKGATLVFVYEAGPCGYWLYRYLTRRGFSCAVVAPSLIPRKAGDRVKTDRRDAVTLARLLRSGDLTSIYVPTVADEAIRDLSRGREDAVGDLKRSKVRLKAFLLRQDIRYEGRANWNAAHLRWLARVVCPTPAQQIVFQEYVHTVTEQSERLRRLESELHTAVKTWRLYPVVEAVQALRGLDLTGAGTLIAEVGDLTRFDTPRKLMSYLGLTPSEYSSGAHRRQGGITKAGNGHARRALVEGAWAYRYPAKVSRHLQLRLEHVPPEARAIAWKAQVRLCKRYRLLSARGKHVNQVVVAIAREMAAFAWAIARTVPVAS

SEQ ID NO: 292615 - protein, 402 aa, unidentified
MNCVGIDVSKGKSMIAVMRPFGEVVISPFEVLHTDSELSKLAGLLKSLDGETRVVMESTGNYHAPVAWLLHDAGLYVSVVNAMLVHDYGNNSLRRAKTDKKDAVKLANYGLDHWLILPRYVPEEDTRLMLKTCYRQYQQYSKVQTMLKNNLISLLDTAFPDANRLFTSPPRADGSEKWVDFVAAFWHCECVCGLSEKAFTAKYQKWCKKHGYNFSKDKALDIYASSCGHFGVMPKTDTAKLLVEQAVSQLRATSAALAALKQEMQSLAASLPEYPVVMEMFGVGPTLGPQLMAEIGDVRRFHSKKALVAFAGIDAPPYQSGQMDVRSRSISKRGSASLRRTLFLVMGVILQHAPMNEPVYQFMNKKRSEGKPYRVYMIASANKFLRIYYASVKAYLDSLEHD

SEQ ID NO: 292616 - protein, 385 aa, unidentified
MANQNDLSRSVVAFEQHNTIIAVIEMSLNSWLVAGIVPGIERHPLKKLSINEEVLLKLLHRWRDEAVKAGHTISRIVVAFEAGRDGFWLARWLRARDIEAYVIHPTSVAVSREHRRAKTDRLDTELLKRAFLGWLRGEPDHCNMVAIPSLQEEDAKRPTRERENLVGERTRIINRMKACLVRFGIRNFNPTLRTAPERLNALCTPEGASLPPNTLAELRRDLARLRFVMDQINEIEVARLQRLERAPTAEPHAMVRLLARVIGVGIETADMLVHEILSRKLRDRRAVARYAGLTGAPDESGSKRREKGLAKAGNARVRRGMIQLAWRFLLFQKDSALSQWYRTRTESAGKKRKTMIVALARKLLIALWRLVTTGEVPAGVVLRAA

SEQ ID NO: 292617 - protein, 338 aa, unidentified
MAIITIGIDLAKNVFAVHGVDESGKPVLVRPEVARAKLLELIANLPPCMIGMEACSGAHHWAREFTKFGHTVRMMAPKFVIPYRMSGKRGKNDATDAAAICEAVTRPNMRFVPIKSIEQQSRLFVHRARQGYVEQRTALINRIRGLLSELGIVLPLKAATVRREAHKHLEDLPSWCNTVVGDALSELTRLDERIAQYDNHLAHIAKEDELSRQLMQLSGIGPTTASAIVATVGKGRDFTCGRQFCAWLGLVPGQYSSGGKQRLGRITKAGDPYLRTLLIMGGKAVLSAAKTKTDPVSRWAIGVQERRGYWKAVVAIAAKNARMCWAMLQRGEGFKIPA

SEQ ID NO: 292618 - protein, 325 aa, unidentified
MGLNTEQIQPQLIQFALGFDVSKATITFFDTHSGEICTLENSKVALKAILKPYAGRLDTLAICEATGGYEDNLLDVLGDLAIPAHRADAARVKAFIRACGANAKTDAIDARHIAEYGLSRAQSLPRWRPSQPREAKIKLLVLRRTDLVSMRVQEENRLKAPRNKPIARDIAGHITEIKRRIEAIDKQIETIMSLDKRLKDRKAILQTVPGIGKVIAPVLLALMPELGHIDRKQAASLAGCAPHARDSGARKGRRFTKGGRRQLRPLLFTAAMAASHSKSHLATTYKRLLAAGKSKLTALGAIMRHIIVIANARLKEYHIAQIRLT

SEQ ID NO: 292619 - protein, 345 aa, unidentified
MEKYVGIDVSLKESAVCIVDHAGKVLRELKVESDPDALARSLRDEGCSAARIGLEAGALSGWLHDGLKSAGFDVVLLETRHVQAAISAMAVKTDRNDARGIAQMLRLGWFKSVHAKSVDAQEIRALLTARKLLTRKRVDLDIGMRGILRSFGLKVGQVGRARFDARLRELIAGNAMLERVIGALLDARAVLARELVELHRTVLRLTRESDVCKRLMSVPGVGPVASLTFVAAVDDPHRFQSSKAIGAHFGLTPRKYQSGEVDVTGHITKAGDASVRTVLYEAANAIITLRVKPSALKTWALRLVKRRGAKRAKVALARKLAVLMHRMWVDGTHFEFGAGDAQPAT

SEQ ID NO: 292620 - protein, 385 aa, unidentified
MGQSTAPKARRAGTFATATTERAATARETGARAVTTGDRGPVTVGIDVADRYSQLCVLDADGEVIRQERVRTRTPELASALSSVPTALVVLEVGPRSPWMSRLFAQLGHEVIVANPRRVALIARSQRKSDRSDAEHLARLARIDPKLLSPIRHRSAGAQADLQVLRSRAALVRARTMLINHVRGAVKAWGAALPGCTAPAFHRQAAEHVPEELRPALLPMLDQVGQLSDEIRRADKAVATVCQRYPETGVLQQIVGVGPITSLTFVLTIEDPGRFAKNREVGPYLGLVPGSRDSGDRKPQLRITKEGDIALRRVLVQAAHYILGPFGADSDLRRWGLRYAESGARNAKKRAVVAVARRLAVLMLALWKSGELYEPLRHALRSEAA

SEQ ID NO: 292621 - protein, 320 aa, unidentified
MTILTSPTVIGIDVAKAEIVAYREDLQITQAIDNKREALGNWLKTLPAQSSIALEATSIYHLDTAELAHGMGFHVYVVDSYRVAHYRESIGQRAKTDPCDARLLARYLTSEQTRLRIWSPPPQAYQALKTLLRKRATLIKARVSIVLSLSNEPLLEDILAQHLKVFKESDQAIQKLMREASQAAGITENINRCKAIEGIGELTAMGLATAFMRGHFVSGDAFIAFLGMDLRPKDSGKKHSPRHLSKKGDGELRRLAHNAAMAACRSPVWKPYYEAYLARGLARTQVLVILARKLCRIAFALMKNQSEYQPNSQVQGSPAT

SEQ ID NO: 292622 - protein, 344 aa, unidentified
MTYYAALDVSLRSVNLCVIDDQGEIKAETKLASEVEDIACYLHGLDYIVSSVGLEAGTLTQYLTYGLQSAGFEVICMESRQVKAALSAMRNKTDKHDARGIAQILRSGWYSRVQVKSLESHHIRLLLSSRKAVLSKCVDLENEIRGLFKVFGIKLPPKLGHGAFDAAVRDTIEADAALAHALLPLLEARLYLYQTFRELDNRTRKMANRDVVCQRLMSAPGVGFITSLTYKGGVDDPSRFKQSRTVAAHFGLTPRRSQSGEMDNPGHISRAGDPDVRCALYTAANAMLTRSAKWSSLKAWGMQIAKTRGHRRAVVAVARKLAVILHRMWIDDTQFQWGTQEVRS

SEQ ID NO: 292623 - protein, 437 aa, unidentified
MAKIVNPNAAGIDISTKEHYVAVPEGRSKEDVRCFQSFTRDLHELAHWLKECDVDTVAMESTGVYWYHLYTILLDYGFEVSLVNAYHVKHVPGRKSDVSDARWLQQLHSFGLLRASFQPDNLTRSLRNYVRQRKFIIQQITREVQRMQKALEQMNIKLHNVIRDLQGKTGMAIVSSILEGERDPLVLVQLRDPRIKASKETLIKSLEGNWREEQLFNLRQAYDLYFFLQNQLMECDVACEKLIKEMSDDDIPKKEIKSGRMIKNSPKFNASQYLYNALGVDVTQIYGMQSLTSLTILSETGPALKEKFPTEKQFLSWLNVVPDNKITGGKVISSKVKRKRNRAGQAFRDAANALWNAQNPLGNYLRRKKAIAGSRQAIVATARKIAAIYYKMVTEKVEFESQILQASTREYLERKLLYLEKKIKQTKLLLTDNELVT

SEQ ID NO: 292624 - protein, 570 aa, unidentified
MVVVGTDAHKYSHTFVATDEVGRQLGEKTVKATTAGHATAIMWAREQFGLELIWGIEDCRNMSARLERDLLAAGQQVVRVPTKLMAQTRKSARSRGKSDPIDALAVARAVMRETDLPLATHDETSRELKLLTDRRDVLVAQRTSAINRLRWLVHELDPERAPAARSLDAAKHQQALRTWLDTQPGLVAELARAELTDIIRLTGEINTLAQRISARVHQVAPALLEIPGCAELTAAKIVGEAAGVTRFKSEAAFACHAAVAPIPVWSGNTAGQMRLSRSGNRQLNAALHRIALTQIRMTDSRGQAYYQRLQDAGKTKRAALRCLKRRLARTVFQALRTVHQPSSEHTQPAAACHRSYCSSHLGEPPRLTNMTQKTRIQPLPPKRAGLLIRALYRIAKRRFGEVPEPFTVTAHHRRLLIANVVHEALLQRASRKLPPSVRELAVFWTARSIGCSWCVDFGAMLQRLDGLDVDRLTDIDNYATSSKFSDDERAAIAYAEAMTADPHSVTDEQVADLRARFGEAGVIELTYQIGVENMRARMNSALGITEQGFNSGDACRVPWAAPDVPSAESR

SEQ ID NO: 292625 - protein, 403 aa, unidentified
MLAGIDWASEEHAVCVLDEEGRAVDRFTITHSAEGFDRLTARLARHGDPAGVPVAIERPDGRLVDRLLEAGHPVVPVKTNAIKAWREAEVLSGAKSDPGDAEVIADYLRQRRGRLRVLQPFSAETRALRAVVRTRTDLVDQRVAAANQLEAILDAFWPGAKAVFADIWSPIALDFLERYPTPASAARLGEARMATFLTKHGYSGRRPAAELVERLRSAPTGVGEGPEAEARRDTVLAMVRVLRVLGRAIKDLDRSVAAHLDEHPDAEIFRSLPRSGQINAAQMLAEWGDCREAFDSPEAVAALCGATPVTKKSGKHEAVQFRWACNKRFRNAMCTFADNSRRASPWAQSIYQAALDRGHDHPHAVRILARAWTRVIYRCWIDRAPYDPAHHGAIARMERASAA

SEQ ID NO: 292626 - protein, 337 aa, unidentified
MSVFVGIDVHRKRSQVAVVAEDGQVQLNKNVVNGSEPFLRLIGDLPAGTPVAFEAAFGWSWLADLLEDYGFEAHLVHPLRCKAIASARLKNDKVDAAILAQLLRADLLPEAWIAPAKVRQLRALLRHRISLVRLGTQLRNRIHAVAADHGYDRSASYWTGPGRGWLAELDLPATSREIVTDALAVIDGLAPLIERLDGELHARAKADPRVKVLTTLPGVGEFTALVMLAEIGDISRFGSARKLASWAGLTPTVRGSDLKVRHGHISKQGSAWLRWAMNQAAQTAKRSPEFAASYAAITKRRGKKIATIAIARKLLTRAWHLLSEMEPGDAGTPLRRP

SEQ ID NO: 292627 - protein, 320 aa, unidentified
MMAQNEVIVVGIDVAKDKVDACIRSLSLRQTCPSTAQGHRKLMAWLRKHKVTKAVMEASGGYERAWAKVLREAGIEVRIVDPRRVRSFAQSAGRLAKNDAIDAEMIAWFAETFSEAPSQVHDAAREELQILVKARLGLIDYRMRLVSQSEHAAPGLVQKAHAHILKSLASEIAKLAAAICAKVRSTPDFAERAEIIESVPGLAGTSAANLVAGMPELGQVSDGIAAALIGAAPYDDDSGKRRGERHIKGGRRWVRNALYMPCVGAATQNNPVLKAYYQHLLAKGKEPKVALIACMRKLIVILNTMIARRQKWDSSRDAVS

SEQ ID NO: 292628 - protein, 493 aa, unidentified
MGACGLESGDVVLAAIPIRKMTIGIAQTLLLVIEWRIAMPKRTTGDHPELKTVSVGAAAIDIGSKMHMAAVNPACTDVPVRSFGTFTQDLHDLADWFKACGVTSVAMESTGIYWIPVYEILEQRGFDVILVNARYAKNVPGRKTDVSDAAWLRQLHSYGLLRGSFRPDAEIATLRAYLRQRERLVEYAAAHIQHMQKALMEMNLQLHHVVSDITGATGMRIIRAVVAGERNPDVLATYRDVRCHSSPETIRAALVGNDRDEHIFALTQSLELYDIYQAKMLDCDRKLEVLIAALSNKGGKPVGKLSKPRIKTKQVNTPTFDVRTALYGVLGVDLTEIHGLGPSLALKLVGECGTDLRAWPSAKHFTSWLCLAPGNKISGGKVLSSRTRRSSSRAAALLRLAATTVGRSDTAIGAFYRRLSSRAGKSKAVTATARKIAVLFYNTLRHGMSYRDPGADHYEQQYRNRVLANLQRRAKSLGFVLQAIPGDADPAVS

SEQ ID NO: 292629 - protein, 367 aa, unidentified
MKKVSTAGAKPSKKISQQKLTVGLDLGDRNSWYCILDESGQIQLEQRVRSNAKALREVFGQLPHSRIALEVGTHSPWISRLLSELGHEVIVANARKVRLIGESRKKDDRLDAQTLARLARIDPGFLSPVKHRSAQAQADLMMIRARAGLVRARTALVNTVRGLAKSYGERLRGCNVRNMNPEKADGLSPELQSALEPLLAGIEELSEQIREYNERIEKLAQESYPQVALLRQIKGVGTLIALTFLLTLEDPHRFRRSRDVGCYLGLQPGRRNSGQSEPQLHISKEGDPYLRTLLVQGAQHILGPFGVDCDLRRWGLKLAERGGRSGKKRAIVATARKLAVLLHHLWVSGEVYEPLHNSRRTAVAAAA

SEQ ID NO: 292630 - protein, 409 aa, unidentified
MEVVHEVCCGLDVHKKSVTACVLWASGRRRQTRAFGTFTRELLELGDWLRACGVTHVAMESTGVYWKPVWNLLEGQFEVLLVNAQHIKAVPGRKTDQKDSEWIADLLQHGLLRASFVPPTPIRELRDLTRYRASLAQEINRIANRIQKVLEDANIKLASVATDTLGASGRAMLEAIIQGEQDSQRLAEMSRGLLRNKIPQLQQALEGRVTPHHRFLLRELLDHHYFVESKMRRIEQELAERLGPFQSEVARLCTIPGVDRVTAWGLLAEIGMNMKQFPDAQHLASWAGLCPGSHESAGKRKSGKIRKGSLWLRRCLCQGAWAVSTKKNNYLSALYRRLAVRRGSKRATIAVAHKLLVIAYHILRDGTCYSDLGADYFDRLNPEGLRRRLTKRLEGLGFKVTLEPLAQVA

SEQ ID NO: 292631 - protein, 344 aa, unidentified
MHYVGVDLHKEQSWFYVSDHEGKRLISKSITNSNEELKRIFDSIPKPFKLGVEATRNWYFFIDLAEQYAEEVKLANSFELKAFAKRNKKTDKIDAKLICDVLRMGYLPTVNIPPKPIREIRELIRYRISLVYERTFNINRLKNTLGKLGMECNGDLTTYKQLDKIKTEGLPAIYETVIQGHKDRIRFLTEKIRHMKMHLEETFQEDQEIINLISIPGLSYLSAAIVKSEIVDINNFASFNRLCSYAGLAPRVSQSAKKDIHGPLSKNRRKLLQWILLEVTPHFVKASPEKKSKFDELSKRKNYNIAKVALARELLRMIYVVLKEKRKYYSEKIRSTAGVALHGV

SEQ ID NO: 292632 - protein, 348 aa, unidentified
MLHAGLDLSRKRLDYCLLDEGGVVVETGAVAPDADALAGLVRLVELRHGPRPVMAAIESMNGARFVHDVLERCGWDVQIADAQKVKGLAPLACKTDRIDAWVLGELSRRELVPAIWLPGFEQRQERERARFRLYLVKHRSSLKQRVHSELIAFGHACPVSDLFGARGRELLERLEFPEPWRTSVLGAVAMIDDLDRRIDAIERELRQLGADHPYVALLLSVPGIGWVLAYTIAAEIGDINRFASPTKLCGYTGLCPRVYQSGQSDRRGPLAKHGPKYLRWALMVAATNAAKHPLYRDRYQATKQRLGRQRGAKVAQIQLARTLTEAIWHMLTRNQTFAPAGAPLPLAA

SEQ ID NO: 292633 - protein, 403 aa, unidentified
MITFFAGLDWASQTHAVCIIDAHGAVFERFDIDHTAAGLAELRRHLVAAGSPPVAIERPSGLVVDTLMEAGFTVIPIHPNAVKATRPRYRSHGAKSDASDAYLLADLLRTDGHRFKPLAPQGEEIRALRALVRGRDDLVATRVQLANQLRSLLDSFWPGAVAIFADVDSPIALAFVERYPTPESASRLGPKRMAAFCAQHAYCGRRTAEELLARLHHAPITDTGELEADAKGELARSLARTLTRLVEQIRLLTSRIEHHVASLDDGQIVMSFPRAGRICAAQILAELGSVRERFDSDAQLAAEAGVAPVTYQSGKSKSVTFRWACNHRLRAALTCLADNSRHASAWANRVYTAARSRGCDHPHAIRILARAWVRILWRAWTDRKPYDPAQHQGARLAFESTQG

SEQ ID NO: 292634 - protein, 323 aa, unidentified
MQTPSAVLNIGADVAKDAIVVACAEGSFPVREVANQRTTVLAFLKGLPAGSRIGVESTGSYHELFADAAHQLGFQVFLLNPKDTRHYAKAVGLRGKTDRVDAALIARMIAHEHAKLHAWTPPTPQQREIARLLNRRATLISLREAVAMSLNELDGFAADLKALRRRFNQLIARIDLRVKTLVEASPERQQNFTRLCTITGVGPVVGTALVNTLERVPVKSADAFVAFTGLDPRPDDSGQHRGKRRLSKRGPAELRRLLYLAALSAIKTKTWRPLYEHYRAKGLSSTAALVILARRIARAAWSIYTYKTEFDPARLTNPVLRTH

SEQ ID NO: 292635 - protein, 339 aa, unidentified
MVYGAIDLHTRKSYIRIIDAEGQVQRERQVATTRDTLVHAFEGAGPLRILVEASTESEWVAQALEAAGHEVVVADPNYAPMYGALQRRVKTDRRDVAALAEANRRGWYRATHRASAAQRAVRQVLRTRRQLVKARSEICSLRRALLRQDGYRVPAGAAETLSERIDALRLPDRLVEVLAPLQQVADTLTQEIAGVDARLEALAAADPVVTALRTVPGVGCVVGLTFRATLDDVGRFGSAAAVSAAVGLVPREKSSAERQHRGAITKTGPRELRRLLVQAAWACWRSRRCLTLRAWADGVAARRGKRVAVVGLARRLSRILYAMWRDGTTFDAAILARAA

SEQ ID NO: 292636 - protein, 417 aa, unidentified
MQVLYTHCAGLDVHKRTVVACCLTPDPEGGWHHETRTFQTMTVDLLALADWLREREVTHVAMESTGEYWRPVFNILEAEFATLLVNAAHVKNVPGRKTDVRDAQWLAELLQHGLLRPSFIPSVPIRELRDLVRHRSNFVRERATLTNRVQKVLEAANIKLASVATDVMGVSGRRMLDAIIAGEADASVMAELARGRLRTKRAELAKALDGRVRAHHRFVLMELLCQIDSFDETITRFDEQIMDACRPFEQAVKRLDTIPGVGRETAEVIVSEIGVDMTRFPSAGHLAAWAGVAPGNHESGGKRLSGRARKGNQALRKGLVQAAHAAAHTKNTYLATQYQRLAQRRGRKRAVVAVAHSILVIAYHLLEREEEYRELGGEYFDRQRPEATAKRLTHRLEKLGYRVILQKPEPPAVCASA

SEQ ID NO: 292637 - protein, 362 aa, unidentified
MEFFCGLDVAMDETAVCVVDDQGAVHLEAAVMTDPEALFAVLKPFLARLRRVGHEAGSLSPWLHPELKKLGLPAICLETQHVRAALSAQRNKTDKADALGIAHIMRTGWFRQACIKSESCYRTKLLLTHRRNLKAKFLDLENAIRHSLKSFGIRLGKVGRGAFEQAVRQAVADDPLSAELMDAMLSARAALWKQYCRLHDLVVKMVARSELCRRFMAIPGVGPVTALSFMTAIDDPTRFRRSRDVAAYFGLTSRRWQSGSSIDVQGRISKAGDADVRRALYEAASGLMTRFKGRDKVKSWGREIAKRSCHRKACVAVARKLAVIMHAMWSDGTFYVGDAAMSDTDAAQRAHIKDRRLLGAHR

SEQ ID NO: 292638 - protein, 345 aa, unidentified
MSYYAGIDVSLDTSSVCVVDSSGSVVREAKIASEPGALVAWFQALGFVTERIGMEAGPLSQWLHAGMREKGLAVELLETRHVRTAFKTMPVKTDRKDARGIAQLMRMGWFRPVHCKSMAAQEVRTLLTTRKMLLNKRIDMEMGLRGILRGFGLKVGPTTPRNFETRIRELVDGHPILLAAADALLAARSVLIAQSKSIEKRLVALGRIDRRARLLMSAPGVGVIVALTYVSAIDDPARFKSSRAVGPHFGLTPKRYQSGETDVTGRISKIGDAGVRAALYEAANVILTRPVKGSTLKSWAARLATRAGMRKAKVALARKLAVVLHRMLADGTTFVADKAAARAAA

SEQ ID NO: 292639 - protein, 365 aa, unidentified
MKKGSTATATSKRNFDQKLTIGLDLGDRSSWYCVLDEAGEVIDEQKLGTTPKAMREVFATMPRSRIALETGMHSPWLSRLLSELGHEVIVAHARNVRLIGESRRKDDRFDAMTLARLARIDPLLLSPVKHRSAQAQADLTVIRARASLVRARTALVNAARGLTKSYGERLRGCNPRNLDTEKAQSLSPELQAALGPLLQALESLSERIADYNQQIEGIAQHSYPQTALLKQIKGVGTLIALTYILTLEDPHRFRKSRDAGCYVGLQPGRRNSGQSEPQMHISKEGDPYLRTLLVQGAHHILGPFGADSDLRRWGLKLAERGGKAGKKRAIIATARKLAVLLHRLWISGEVYEPLRNTKRTMSAAA

SEQ ID NO: 292640 - protein, 411 aa, unidentified
MENIFLRCAGLDVHKASVEACVRRMEASGRLHQQTRHWGTMTRDILMMADWMAAQGVTHVAMESTGVYWKPIFNILESRFKVLLVNARHLKQVPGRKSDIRDCQWIAQLLQHGLLKGSFIPPRPQRELRDLTRHRTQLVEEKTRTSNRIEKVLEDANIKLGSVASEVMGVSSRAMILALLEGEKDPAQIADLARRSLRGKIPELQKALEGHLTEHHRFLLRLLWKELTQQEALIAELEAKIEERTRSFAPEIERLDAVPGVDRRVAEVVLAELGGDMRPFPTHRHLSAWAGMCPGNEESAGKRRKRRITPGNRWLKRTLVQAAWAASHTKNSYLASQYRRLVGRRGKKRALIAVGHSILVILYYLLKEGRQYADLGTDFFDRLEPQRLTRYYVNRLQKLGHKVVLEPNVTV

SEQ ID NO: 292641 - protein, 420 aa, unidentified
MKEITETGNKVKGRVYPLDNISWVVGIDIGKEKLSCALMKINKALICRFDIEGSLSGYNGLMDRVKRETRGNGKVVFALEPTGHYWMVLGQFFEDHNQSYVLIHPLVVARSREVHHLNKSKTDSLDARLIGELACDKSVIRTQIPEDHWATIRFYAREYIDREKEIAREKNRIMSYLETTLPEFMKIFPRPLCMSGRACLRVLADFKQALKGNGEHFEMRIRKHLACKRLMTSRIRRLHDMLQRGDVLGLRAGRQAMFFRIIHSLDRLEVFEGQEKAAKQAMLDVYEESEYKEYLDSIWGTAPAANALILGFMGDPALYDSPASLVKLAGCDPVPNESGKFKGRTSIFHRGRSLLRKAGDRVSFLLEKRNSVFRAFFNRLMSRQKNKLTKRQARVACINKYFRIVWVLCHYKVHFNPALA

SEQ ID NO: 292642 - protein, 400 aa, unidentified
MISVGIDVSKGKSTVCVLKPYGEIVCRPFEMQHVEKDLEDFHKLLKKLEGEIRIVMEATGIYHLPVLTFLHDKGYFVSVVNPFAMKKYAKDNSIRGAKTDKLDSIMIANYGIEKWFKLQSYEGDEEIYAELKLLGRRYRYYMELHVKALQELTHILDYVMPGIKKMFNSWNEANGKDKLSDFVERFWHFDLITSMSLEKFTEEYIVWAKEKKYHRSRSKAEAVYELTSSGISTLSSGTPSTKMLVQEAISVLRTVDSSLSPILTRMQVLAKSLPEYSTVREMGGVGDVLAVKLMAEIGDVRRLHSAKALIAWAGIDPPPYESGQFIGSKRKITKRGSSTLRKVGYEVMRVLKSHPAPKDDAVYNYILKKEGEGKSKKHAKIAGLNKFLRIYYARVIAVYQ

SEQ ID NO: 292643 - protein, 429 aa, unidentified
MTGSKDTPRRLTLVAIDIAKHYHDVLIEPPAPKRRSRLRLANRREDFERLAEHLRGLRSPVMVGFEATGNYHRPLAYFLHEQGFKMRLIPTLALARTREAMHNSWDKNDPKDAQVILHLLKTGLVQTWHDPLVSGINDVQELSKTHFQVTLARVRVWHSLRNHYFALYFPEIDRFVRSNHSVWMVQLLASFPTPLSITTLSAAEFQTRAWNLIGRKVNKRALLAEIYAVAQQSIGVPVALDSPAITMFRLILEQYLALNQLRERIAEQAATLLADHPDSSRLMTVPGIGPANALTILAEAGDLRRFRHHRQFLKFCGLNLSTLQSGKSRGQSHISKYGNARLRTALWMAAQSAVRMRENSFRRKFDHYVRANPLNADLRRKGYTAITAKLARVVFGLIKQQTDYRPFFEHQFQVDEPALARAVGATSTP

SEQ ID NO: 292644 - protein, 360 aa, unidentified
MQAQRNELNFEGQNIYVGMDVHLKSWTVCIMTEKLEHKKITQPPRADVLYNYLTRNFPGATYYSAYESGFSGFWAHRQLEALGIKSMVTNAADVPTGQKEKIQKDDTRDSRKMARSLRGKELEAIYVPEESTLEERSLLRTRTSLVKDMIRFKQRIKSFLYFFGIPYPERFNKSGSHWSRNFLKWLKEEVQFTQESGKDTLNIMVQELEEQRQLLLQVSRKIKQLSESGKYASNVKLLKTVPGIGLLTAMHFLTEMETIERFEDTDHFAAYVGLVPNRHDSGDKKNDGEMTFRGQSILKKCVIESAWIAARKDPALSIAYNRYVARMEPNKAIIRIARKLLNRIYFVLKNKKEYVICVVK

SEQ ID NO: 292645 - protein, 347 aa, unidentified
MSFVGVDLHTNSFTACRREADGSESFESFTLSRADLGRFCLTLDADDEVAFEATGNSAWFRDQVLPCVGRVVVVNPSQFKVIRQSVKKTDRHDARALALFLAKDMLPETRAKTQAESELGSLTQTRDLLVKQRTRLLNKVHALHNRHGIKLKRESLASRKRLLAITPEPFTPLEWIELEIVRDQALSLTEAIGKIDSAIEAAASALDGYQSLTSIKGIGPRAAAVFLSTIGNIRDFASADKLAAYFGIVPRVSQSNETDSRGRITKRGSRLARTALVQCTLIATRYSPYLKAYYDRIRLRRGSGKAIIATARKLLAIIYDTLKNGRVFTDFAAFQFQPGHVPAGQSS

SEQ ID NO: 292646 - protein, 347 aa, unidentified
MRFYNRQHRHYCGIDLHVKTMYVCILDAAGQVLVHRNVKSTPAAFLESVAPYREDLVVAAECMFTWYWLADVCAAEAIPFVLGHALAMKAIHGGKAKNDKIDSRKIAGLLRGGLLPQAYVYPAEMRSTRDLLRRRLHLVRKRGQLLAHIQNTRAQYQLPEFGRRLAYPGNRTGVSEHFTDPSVRKSIEVDLTLVAQYDTLITDLELTIVRQAKRHDADAFHRLRSVPGIGKVLALTILYEIHDITRFDRVQEFASYARLVKCQKQSGGKTLGTSGAKMGNVHLKWAFSEAAVLFLRHAKEGKRLLAAIEKKHGKGKALSILAHKIGRAVFYMLARGTVFSTEKFLAA

SEQ ID NO: 292647 - protein, 385 aa, unidentified
MSQPSIYVEALQYDHTLVLAIELSSKSWVLAAQIPGLQKTKAKRTIEPDKLALRSAIDGYRARAAAAGCQVDRVVAAYEAGWSGFWLARWLIAEGIEVHVIQPSSVPVDRRMRRAKSDGIDAELLLRTLLAWLRGEPRVCSMVPIPDEADEDTRRCVRERTELVSERVGLANRIGAVLATLGINDYNPLLKNRRRRLITLRTALGEPIPPNALAKIERLLSRLELVLAQIAELERERDAVAESSSPDKAGKMIQQLCSLRGIGVQSATVLVREAFVRRFANGKALGSYAGLTATPYSSGGIEREQGIGKAGNRRLRTVMVELAWLWQRYQPGAALINWFRERTGSTGRRGRKVMVVALARKLLIALWRFAVDGVVPEGAAMKPGI

SEQ ID NO: 292648 - protein, 356 aa, unidentified
MTQETPSRSGHVVIGVDTHKHIHVAAVMDTIGGILATLTIATDTAGFKQLLAWAESFGKVISFGIEGTGSYGAGLTSFLRRQGHKVVEVSRPDRRLRRLNGKSDTLDAENAARAVLAGFATATPKTMDGAVEMIRQLKVAHDTAVKQKAATMVTLKAMLVHAPEQLRIETARKTQRTLARYCAAFRPRGLESPEDANRHALRSLAKRWLRLDEESKELTSMIEELVLQRAPHLLDEFGIGVDTAAEILIVAGDNPERIKSEAAFAKLAGISPIPAGSGITSGKHRINHGGHRQLNAAIYRTVIVRMRFHQPTIDYVARRTAEGKSKRDIIRCLKRYVIRELYHLVKVNPRTGEIVS

SEQ ID NO: 292649 - protein, 338 aa, unidentified
MTTYAGIDLHSSNCYLAVIDEQQRRLFSKRLPNSLDQVQAALQPFKDELSGVVVESTYNWYWLVDGLQEEGYRMHLANPSAIRQYEGLKHTDDKWDAFWLAQLLLLGILPQGYIYPKAERPTRDLLRRRLLFVRHRTAHILSLQSMVDRCCGRRISVNQIKQLTPADATALFSDVQLGFTTRCHVETIGFLTQQIRSIEKAVLPKVSLRPEFEILLTMPGIGKILGLTIMLEVGDIRRFAQAGNFASYCRCVKSQKLSDTKKKGEGNRKNGNRYLAWAYVEAANFAIRYSPRAKAFHQRKRAKTNNVIATKALANKLARASFYMLRDQSAFDEKRLYG

SEQ ID NO: 292650 - protein, 415 aa, unidentified
MDTLYQRVAGLDVHKKTVVACVRVTQPDGSGEEHTRTFGTMTEDLLQLADWLSVASVTHVAMESTGVLWKPIWNLLDGGDWELLLVNAHELKQVPGRKSDVKDSQWIAQLLACGLLRSSFVPDRPQRDLRDLTRHRAQLVGEHTRCANRIHKVLQDANIKLSSVATDILGKSGRDILAALVQGQDAPEALAELARGKLRKKLPDLQRALCGEMTPHHQFMLEQLLDHLGHLEEQIARFDERIANALRPFDEQAHLERLDLIPGVNRQTIENVIAEIGVDMRQFPDADHAASWAGICPGNEESAGKRKRSKTTKGNVWLRRALCEAAWAAGRTKHTYFGTLFRRLAARRGKKRALVAVAHALLVVIYHLLKDPQLNYRELGEHYFDTLDPIRLRRHLVKRLESLGYDVTLTQREAA

SEQ ID NO: 292651 - protein, 414 aa, unidentified
MDTLYAKVAGLDVHQKFITVGVRCRLETGKTFAEVRTFGTMTRDLRAMADYLEALGVTYVAMESTGVLWKPVWNILEGRFTLLLVNPRHVKQVPGRKSDVSDAEWIAQLLQCGLLQGSFVPKRELRELRDLTRDRAQLASEQTRVANRIHKVLEDANIKLGAVASDILGKSGRAMLRALIRGDQDPEKLAELALGRLRAKIPDLKLALGGHFSEHHRFLVEHLLGHLDELERRIEEISERVARKLPSILDDERLEPLDAIPGVNRVTIENIVAEIGADMSQFPDEHHLSSWAGICPGNEESAGKRLRNRTTHKNRWLRRAITEAAWAAGRTKKSYLGAQYRRLAARRGKKRALIAVGHSLLVIFYHMLKYEVEYRDLGVDYFDKREPERLRDYLVKRLQRLGYQVSITPRDEAA

SEQ ID NO: 292652 - protein, 354 aa, unidentified
MSQQLNTTIAVIGIDIGKNSFHIVGLDKPGAIALRQKWSRGQVEAHLANMPPCLIGMEACVGAHHLSRKLKALGHDARLMPAKYVRPYSKGQKNDFRDAEAIAEAVQRPTMKFVATKTTDQLDLQALHRVRERLVSQRTGIINQIRAFLLERGIAARQGQRFLRAGLPTILTTPPDVLSPRMVRIIEGLASDWRRLDERIEGLWSEIKAIACQDSSCERLMSVPGIGPIISSAMVAAIGTGDTFSKGRDYAAWLGLVPKQMSTGDRTILGKISKRGNRYLRVLFVQAAWVVLIKPKSWQRHGLKPWIEAAKKRLHRNVLAIALANKLARIAWSVLAHGRGFEASTINDTATQPA

SEQ ID NO: 292653 - protein, 383 aa, unidentified
MKAVCGLDVHKDNVYLCSLSEFGELIEKVFGILTFQLEEMRDLMLHHHVVEVSMESTSVYWIPIWRVLSPHFKLNLANPYFIKQLPGHKSDVKDAQWIAECTMKELICSSFVPPEIIQQLRQYDRRIFDLNEEIVRKLSKLDAVLQRCNIRLSNYVSNVDSKSYKAVVRAISQGITAPEELLKLIHGRIINHHGIDVITASLKGGVSLAEIDMISQLRDELDMAEAHKEKCQARMLEICEREFPEELKRLQTIPGIKERAATSLIAEIGTDMNKFETANHLASWSGLKPRNDESNKKIKSRSITHGNVYLRKTIIECAWAASRTKDCFFSRFSYHQTQVRKKNKMKVLVAVARKMLIAVWHVLHDNTNYIDFTTDRKTSQTRG

SEQ ID NO: 292654 - protein, 368 aa, unidentified
MKKNTSNKQRTGKGNRQEQEKGAFTFYIGIDLGDKYGEMCVMNPAGEVHQQFRLRMKATDFEDYFRTIGRSRVAVEAGGQSQWVAELIQRCGHQVYVSNTRKVAYIYESDDKDDPGDAYKLAELVHFKPRLLHPIQHRSQALQADLSWIRAREALVESRTHLINTIRGISKAFGERLPRCSVESFTAKLASEIPAAIRGALAPLLETIDHLNEQIHYYDQMEEQIARERYPQYRLLEQVNGVGVHTALSYMLTIGDPERFQKSRMVGCFLGMRPRKQESGESRPQLGITKAGDEYLRKTLVNCAHYILGPHGRDSDLRRFGLRICERGGKNAKKRAVIAVARKLSVLLHRLWVTGEAYEPLRNSKKVA

SEQ ID NO: 292655 - protein, 315 aa, unidentified
MRELFVGVDVAKAELVVACRPEGAGWTASNDAEGIAATVARLRSLAPRLIVLEATGGYERAVVTALAVGGLPAVVVVNPRQVRDFAKATGQLAKTDALDADLLALFADRVRPTLRPLPDAIVQQLDALMTRRRQLLDMLTAERNRLEHAVGPIRRSLVDHIRWLERRVAAVDRDLDDTIARSPVWRAKDDLLRSVPGVGPVVSRTLLADVPELGHLNRKQIAALVGVAPLARDSGTLRGKRIVWGGRAPVRAVLYMGALVATRRNPVIRAFYRRLLAAGKPKKVALIACMRKLLTILNAMMRTSTTWQENAEATP

SEQ ID NO: 292656 - protein, 437 aa, unidentified
MRRKKKNANKSINLQVLPIVNPNAAGIDVGAKDHLVAVPCDRDPKPVRTFQAFTPDLHELAAWLKRCGIQTVALESTGIYWISLYEVLEQYGFEIRVVNAHHVKHVPGRTKTDVLDCQWIQKLHSFGLLNGSFRPDQQVRKLRTYMRLRDNLVVASTQAVHHMQKALFEMNVQLSNVISDIVGETGLNILEAIISGERDPQQLAALCSSRIKASRETVAKSLHGNWDVALLFALKVALETYRFIQIKIQDCDCCIQHHLAQFESRTEVTNSSQNLKTQLHRVCGVDLTKIPAIKEQSAQIIISEVGLDMANWKTEKQFCSFLGLCPNNSVSGGKILHRATRKVYNRAADTLRLCAQSLTYSKSALGAKYRRLKARLGAPKAIVAMAHHLARLVYRMLRYGQNYVEKGIHHYELKFRLQRIKWLKKEAQSLNLQLVAA

SEQ ID NO: 292657 - protein, 370 aa, unidentified
MSQDITYVGLDAHQETIHAGMLLPEAAHPAEDSFANSSEGLRRFVRRLRRRTPGEVVCAYEAGPLGYGLMRELERLGVGCVVVAPALIPVKPGDRIKTDRRDARKLAELLRSGLLTAVHPPTPEQEAVRDLCRAREAVKRDQTRVRHRLSKLLLRRGVRWTQGRKAWTRAHLEWLRGRRFERAADQAILDDHLLALEQLENRLAGLDAKLGVISGEAPWAEPVGWLRCFRGIDTLTALALVSEIHDWRRFASPRELMAYVGMVPSERSSGGKERRGGITRAGNVRVRRLLVEAAWHYRHRPAVSYRLRERRQGQPPRVITIADRAQHRLHARYRRLLARGKAHNQIVVAVGRELVGFLWAALDVKEPKAV

SEQ ID NO: 292658 - protein, 390 aa, unidentified
MIYVGIDVAKDKHDCCILGPDTEELFPVFTIRNNSDGYGELFHKIESVSKDKSQIKIGLEATGHYSYNILGSLLDHGYHTFVINPLHTNLYRKGQSLRKTKTDKVDARSIAEMLVTDKTLKPYTGTSYHSEELKSLTRYRFELVKERAKLKTSVSRLVNILFPELESLVPTLHMNSVYRLLQELPGAYFIASSNLTHLKALLADASKGRYGREKAIEIRETAKSSIGSLMPAKSMELRQTIRRIDTLTSDIKEVEQSIQKIMDECGSPITTIPGIKYRMGAMILAEIGDFTRFSNADQVLAYAGLSPSTYQSGQLISSYARMEKRGSKYLRYALFNAAIYVSGWDERFRLYLSKKRAEGKHYYVAISHVIKKLVRTIFRMEITHTSYQPL

SEQ ID NO: 292659 - protein, 356 aa, unidentified
MMIIGVDYHPSFQQIAFLIEETGEYDEQRLNHEGGEAERFYRDLKRKGIRVRVGMEATGYARWFERLLAELDFELWIGDPAEIEAKRVKKRKTDREDARLLLRLMREDRFPRIWVPSPENRDLRQLLWHRHRLVQMRTRIMNQLQALAMNEGKRWKSKLFSQQGRVAFEKLALGPWASRRRSELLELLDRLNPSIEELTKAVEQEVNKRPEALRLMTHPGVGPITALAFVLIIGTPERFARGKQIGTYVGMIPIEESSGDKQRLGHISKQGSSLLRYLLVEAAQAAARFNPHWRRRYIHLAMRRHRSIAKVAMGRRLGVRLYWMWRNGCDYSPSFEFGSYAGQLGRGGMVGSSTPR

SEQ ID NO: 292660 - protein, 482 aa, unidentified
MKKNNIYQNQSQQLLSLFEQAANNAKVMCVPIDYAKKDHVVMFCNGYGDILRKPFSVKNSPQGVDYLTDQVMRSCRQRAISEKHVFFGGEDVGSFADNFVSTLRCQGWLVAGVNAHEAKTQRENLQASTDRLDLMGIAKSLLNRRANCSPAQSGIYLNMRTVVRHRRKLVDIKTEVRNRIHTVVDRLFPGFLDEAKSGITSFSKSSLWLMKERFSAPQIRRRRRSTLIEALRRLGTKKPECTADTLQQYATQVLKPPQDYVHMLQLSLAQHVKHFCCLQESIGQFEKEIAVNLAQTQGAFLTSVRGIGIVLAAGVSAEIGNPYEQKPLNNLVSYCGIIPRVKQTGGPQGETKTGKVAKRCNRILKDYAVQSASHLGLHGPADLMADYKRRDAASQHADFGMTRRYLRMAMCLMRTSQIYLPSGLRKAQAQIEERADYYLMNWPYLREKWQKLEALETAFKADHPLGQWRKIVQQFYGIKLTL

SEQ ID NO: 292661 - protein, 346 aa, unidentified
MLADELDYVIGVDPHRDTHALAVVDVRSGGVVFEATAVADGEGYASVLRLADQHAPGRRAFAVEGTGSFGAGLARFLVSHEERVLEVGRLRRERQSGKNDALDAIRAARSVLGQTRPARPRAGGEREALRALSAAREGAVTARRAGLCQLRGLLVSAPEPLRAELRSLTRAQLLRRLAAVRPEGRQDPELRGTLLALRALARRVKALTVEERELAREIETLTRKLAPQLLAQPGVGPLAAAQVLISWSHRGRITSEAAFARLAGCAPIPASSGQTVRYRLDRGGDRRLNRALHMILVTRRRSHPETIAYIERRLQEGKSRREATRCLKRYLARNLYRLLENPPMPT

SEQ ID NO: 292662 - protein, 353 aa, unidentified
MNTLYIGVDFHPYSQVVAYVSKHDGEIKYRSFNHSDKRSLRRFYKEAEKGSVIGIEATGSTQWFEKMLSSLGHTLRTGNPRLIRRMAISYHKSDYRDAENILDLLVNGAFPEVEPRSDESQLVLYLLRQRHSMVQQRTANANALQSFARRKGLKRFRMKLKAATEMLLDATENDTEEFMLRSRFKVCDLLTEEIRKAETELKKYASDDERVLLVDTHSGIGLLTSLCLVHTLGDVNRFQKAAQIASFVGFDPINKSSGEKKRIGKISKRGSRLLRFLLVQSVHSTKDSRIREFYFRVSRRRGTQIAKVAAARKLLINCYIMLRDEIDYEEFCRRGEVGLCGQPTTGARKSALP

SEQ ID NO: 292663 - protein, 413 aa, unidentified
MCAHPTLVRRDTTILTETVLIVAGADTHADTIHVAAITLTGGAVDDREFPATRAGYTAAIKFLASLGQVERIGVEGTASYGAGFTRALTAAGIEVVEVTRAVKSTRRLKGKSDPLDAYSAARTALAGDGLATPKDEATAGLRALHIARRSAVKHRTAVINQIKAVLVSAPDAVREKYRGLTTLKLIEAIARCRPDTIADPWAQSVLIAVKMLAQRVQFLETQADALEAQIDALVTEANPGLRAAYGVGPDTAAQLLITAGANPHRLHSEAAFAALSGTAPVPASSGKTNRHRLSRGGDRAANNALHRIALVRMSSHQPTKNYVQRQVAKGHNKMEILRKLKRAIAREVFKLLTHQIAVPDYADLRLARQAKNITVTAAANHFGIWPTVISRIERGLQRDDALADQYRSWLQAA

SEQ ID NO: 292664 - protein, 350 aa, unidentified
MNIYFGCDAHKRYSMFASMNERGQTGRPVRVEHTRMMFRRYLESLPPGSPIAIESVGNWYWMIEEMERAGHEPRLANAGKAKLMMGQINKTDKLDATGLATLLRNGTLPSVWIPPRDLRDERELPRMRMSLVSVRTMLKNRIHATLAKYAIEIDEVSDVFGVKGRELLKNRLEELPPYTRQSVETQLELLDEVEAHIDQAEKEIREVVKTTPAMKLLMTIPGVGPILAVVIALEIGDIARFPSPEHLASYAGTVPRVRSSGGKTSFGKVRPDVNRYLKWALIEAANMIVLHQRHWPDAHLTQLYLRLRERKGHAKAVVAVARHLAGAVFWVLKKNEAYKEPQRSISSSQE

SEQ ID NO: 292665 - protein, 392 aa, unidentified
MRKPKQCRPHNDLSRSLIPLNLNHTLIAVIELSQKSWLVAGIIPGVEHQPLKKLEPGEDALSTLLDRWRKEANKAGYKVERIAVAFEAGRDGFWLARWLRAQGIEAHVIHAASVAVSRERRRAKTDRLDTEQLKRAFLGWLRGERDHCKMAAIPTFAEEDAKRPSRERESLVGEQGRIVNRMKATLARLGIRSFNPKLKNAAESLEDLRTAEGEPIPPNTLTELHRDLERRRLVIEQIRQIEAARLERLRRTPKAKPNAMVLLLARVIGVGIETADMLVQEVLSRNLRDRRAVARYAGLTGSPDESGSKRREKGLSRAGNARVRRGMVQLAWRFLQFQKDSALAQWYRVRTEHARGSRKKMIVALARKLLIALWHFARDGVVPEGVLLRPAH

SEQ ID NO: 292666 - protein, 400 aa, unidentified
MKDRYGSVAYGGMDVHYKFSNVTFRDASGEVVVRERVDHRDREALRAQLRRWPAGTPIVMEASFGWGWLSDEMRAAGLAPQLANCYKVEQMRKTRGPAKTNRKDADLLSLLPAETKPWWRVWLAPPAVRDRREWLRYRMSLVALQTQTKNRIHACFHRQGIYHEYSDLFGSAGRQFLLQVCATGRHAGGEVPPGALANLSGQVRLLFGLRSELARVALALRRELKRDALAQRLNGIPGFGLILSHVVAAEVGRIERFKNHRKLASYAGLAPHPRDTGTPDASRAPLGRHLATHCQRTLKWAFIEAAHGAVRTGGRWRALFDRVTGGGKKDRQRGYIKVARELVKVLYVIWDRGTTYQDDPPARPGRREARSRGALRDSRSGTGQPCHPMVPAASGRETSQ

SEQ ID NO: 292667 - protein, 410 aa, unidentified
MHSVVERGCGLDVHQATVVACLLVLRKNGTVHKQMRFFGTTTRELVSLRDWLLAENCTHVGMESTGVYWKPVYAVLEGPLQIVVANAQHVKKVPGRKTDVKDAEWLADLLCHGLLRPSFVPPKAIRELRDLTRYRRKLVEAQATERNRLLKVLEGANIKLSSVATDVFGVSGRLMLRALIEGKTSPQEMAKLAKGTLRKKIQALEPALEGKLEPHHRFLLGLQLKRVHAAEEDLATLEQQIQQRLEPYAAQLALLDEIPGVNRGLAGAIIAELGVDMKVFERVSQLTSWAGVCPGNNESAGKRKSSRITKGNVYLKSALVEAANSAAKAKGTYLRDKFYRLKARRGYKRAAVAIAHKILVAIYHMLSQNVSYNDLGDLYLDNLNKHHLTRNLVHRLERLGFEVTLQLKPA

SEQ ID NO: 292668 - protein, 462 aa, unidentified
MTPRRRKDGRIVPAPEPLPVTNPHAAGIDVHAARHYVAVPPAAVPADVTAGRPPHVRTFGACTADLEALADWLKACGVTTVAMESTGVYWIPLFELLERRGFAVYLVDPRQTRHAPGRPKSDVLDCQWIQRLHSYGLLTASFRPDDQVVVLRGYLRQRQMLIGYAGQHVQHLQKALEEMNVKLTEVVSDVVGVTGLAIIKAILRGQRDPRQLAQLRHERCRRTEAELARALQGTWRQEHLFALRQALALYECYHARLAECDAQIEACLGAFADQRGGRALPPKPRRRGRKANDVRFDVRGALFRLAGVDLTVIEGIDAATALVLVGELGTDLSKFPTVKRFVSWLGLCPQHQGSAGKIKSRRVRRGSNRAARALRVAAQGCHRAHNALGAFYRRIAARAGGGKAVVATARKIAERVYRLLRYGEAYVRQEQGACEEAYRLRQVKGLARKAQELGYRLEPATP

SEQ ID NO: 292669 - protein, 315 aa, unidentified
MNKSIMKSAGIDVSKKSLDIAVHGCSEVFRTTNDGAGFRLIAERLKALGVSRVGLEASGHYEAAVARHLRQCGFAVLVLDPGQVHGFRRFKNRRAKTDPIDASLIAAVTAAEDTVRPAPDERLAPLAEHLTLIEQIGEDVARLKTRRERYEARAHKSYLEAEIRRLERRREKEIKKLEASVCRHADLAQRYRLLRSVPGIGEMAGLAFVVRMPELGRISRGEAAALVGVAPINADSGDHIGERHIVGGRGRVRRMVYLAAFSASQRWNPLLVQLYRRLIAAGKHHKVAVTACARKLVEIANAVLARGTPWCDNPA

SEQ ID NO: 292670 - protein, 346 aa, unidentified
MKTSQKILKITFGIDIDADNFVVSRGIFYDNMEREANNVKKFSNNQGGFNKLLAYARKLQSKINPNGSIQTLYVMESSGVYGENLAYFLTEKGLNVHVALANKVKSFKKTLQFKSKTDDIDSLAISLYGLEKQLGKWKAPYPEMKKLKELSRELSSVKEMLVSLKNQLHARRSAHKINSGSIKRTTEQIKFFNKQIKSIEKDIDATLQENLEFKAKIDKITKVKGIGSQTVVTVLSETNKFEGITNRNQLTSFVGLDVVENQSGKKTGKTRISKKGNSYIRKALYMPAISCKKHDRKMKHLYERVCERHGWKIKKIGIVAVMRKILHLIYALWKNDTEYDPNYGMA

SEQ ID NO: 292671 - protein, 433 aa, unidentified
MEEVTDEPLYRDRVCGIDIGKAGMAATIRVPSDRDRSRRAAETRSFGTTKREVLALADWLRSWQVPAVVMEATGDYWKGPFYRLEAEGFECVLADARQVKNLPGRPKRDPSDSRWLAACFERGAVTACFVAAPEFRVIRLRTRYRRELTEERTREKQRAEKLLESAAIKLSSVVSDLHGVTGRDIMDHLIAGEHDPKALAQLARARARRKIAQLEEALEGAEFFTADHAALLKVMLARIDRVQREIDRLTAVINRLLAPYEEQLQQAESMPGWGRRAAQDAVAETGAGMTRFRTGGHLSSWAGKTPLDNQSGTRTGRAKSKKGNRYLAAITGETAAAVSKTQTREGARYRRLARRRGKAKALAATGNTQLKVYHKLLSNPGMRHQDLGADYYERQRDTRRQISHHVGKLGALGFEVTLCRRPDPDGSDTTQAA

SEQ ID NO: 292672 - protein, 408 aa, unidentified
MQVTFGIDVSKSNSTVCELIGESKNELTITNDRPSFIQLLHELAAFSKHPQIIFEATGVYSRRLQAFLEDYGYEYIVLNPLKAKKEMNMGLRYNKTDKTDAYHLALIQRLYRHPVNQSESQTYKQLNALSRFYDQLTSDLVIAKNRLHQALQSTFPEIENLFSIARGKNYWQIVARYPHCDLVRKDDKKQIINWLMKLKGIAFNHAQRTTDKLIELAHLAYPVVSCSDIEVQQAQYYARRLLNLSNQRQRIITKMVKLAKTLPNHDLENLESIPGFAQTTAVRVLAELGDLRRFSNPNKINAFIGIDPGRYQSGEMDSNLSITKHGNAVARKLLYRAIGQIDNAAKTNPCHIADYYESKKLSSQTKGFKKIAIASIHKLIRTIYALIINDQPYDYNVATHNQKDFSRN

SEQ ID NO: 292673 - protein, 312 aa, unidentified
MHALFVGIDVSKDKLDVHVRPSGECLTLGTTPAGLHELVERGHGWGPVLIVLEATGGYEVVVAAALASAALPVAVVNPRQIRDFARATGQLAKTDALDAAVIARFAEAVRPPVRPLAPPAAQALGELVTRRRQLLEMLGAERNRQAQARDRQVQRQLGTHVRWLTKALADLDRDITDTIRSSPVWRATDDLLKSVPAVGPVTAHTLIAQVPELGQLGRRQIAALIGVAPLNRDSGTLRGRRMIGGGRAAVRHVLYMAALVGVRYNPRLAAFYSRLTGAGRPKKVALVATMRKLLTILNAIVRDQRPWQPQNA

SEQ ID NO: 292674 - protein, 412 aa, unidentified
MTVTNQFAAHVGLDWADKKHDVCVQFKNGERVFDVIEHTAEALDAWLTELHQKVKGRIAIALELKKGPVVYALQKYPFITVFPVHALSLARYRQAFSPSGAKDDPQDAELALELMLRYPQKIKAIEPDNADIRLLQQLVEQRRQLVEDKRRFVNRIINTLKQYYPQPLEWFSHRGSLLLCELIIRWPSLQQLKRARRDTIRNFLNAKGGRAMALTEQRVASIDNAIPLTTDPSVIEANALMAAALATQIKVVSEIIKTYDERIETLFDTLPDAGLFKSLPDMGPCMGPRMLAALGDNRDRFNSAEEIQNYAGIAPVTERSGQKSWVHWRWQCAKFVRQTFVEWAAKTVNSSYWAKLYYQGLREKRKSHQSAILALAFKWIRIIYRCWKARTCYDEAKYLLALEARHSPLLKP

SEQ ID NO: 292675 - protein, 365 aa, unidentified
MKKVSTASATRIRNLSQRSLTIGLDLGDRSSHYCVLDETGRILVESKVSTNAKAMESVFGGMPRSRIALETGMHSPWVSRLLSGLGHEVIVAHARNVRLIGESRRKDDRLDAQTLARLARIDPQLLCPVKHRSAKAQADLTVIRARAGLVRARTALVNTARGLAKSYGERLRGCNVRNMNPEKAEALSPELQVALQPLLAALESLSDQIGEYNQRIESLAENSYPQVASLKQVKGVGTLIALTFMLTLEDPHRFGKSRDVGCYLGLQPGRRNSGQSEPQMHISKEGDPYLRTLLVQGAQHILGPFGPDSDLRRWGLKLAERGGRNAKKRAIIATARKLAVLLHHLWVSGEVYEPLHNQHAIAAAA

SEQ ID NO: 292676 - protein, 403 aa, unidentified
MIYPQLFVGIDISKLKHDIVIVNEQKKVVHKPLVIPESREGYQSLLAKLNWLKQRYGTETFYFGMEATSDYWKNLYHFIRQQSPAFLATVLNPIQTRAFAKTELRRAKTDPINAKDIALFMVEKRPKPFVSRSPIFEAIKDLDRQIYHLKKQQTMTKNKLRLELAKVAPEIEQAFKQIGGAQVLTVLESFPTAEALTNAALADLCRVRYGKGQWCLPQGFAEKMKALAQHSIAHKTGAGSGEVVQSLVRRIRACQQETELLQQRLVALYQHVHEQDSLLTTIKGITKETAIVLEAYIGDVNRFSEAKKIVAYFGMNPVVNLSGKQQKRASYLEKKGSGIVRHKLFMAILQMVRLKQGPIYDYYARLVAEHKPKLVTIAAAMRKLLVIIYTMLKNQQPFNPKQK

SEQ ID NO: 292677 - protein, 411 aa, unidentified
MIFVGDDWAEAHHDVYVCDEAGGKILARRLPEGIEGVTALHQLLAEQVDDPAEVVVGIETDRGLWVQSLVEAGYQVYAINPRAASRYRDRHTVSGAKSDPGDAKLLAELVRTDRHNHRQVAGDSDLAEGVKVLARAHQNLIWDRTRATNRLRCSLREYFPAALATFNELADRDTLGVLAKAPTPAEAKALPLGKVRSALKAGGRQRNIDTRARQIVDGLRVDELAAQPAVTSAFAATTRTAIAIITELNTQIAALETELADHFEQHPDADIYLSQPGIGVILGARALGEFGDDPNRYADAKSRKNYAGTSPITRASGNRHVALARFIRNRRLADAIDQWAFCSLSTSPGARAYYDHQRDKGLSHHKALRALANRLVGILHGCLHHGTSYDEHTAWAHRPENTLTKKIPNAA

SEQ ID NO: 292678 - protein, 344 aa, unidentified
MAALLPSPVYRLFVGVDIAAATATVAWRLPGAPITRPITLEQTPSGFAQLHARLQATGIATIDTLVVLEATGSYWITLATTLHQAGYAVSVINPMQAHHFAKALLKRAKTDAIDAQTLTQLASQLQPARWTPPPAVYYELQQRLAERDALLDLRQQVRNQLHALVQGPVVIAAVRTRMEQLIATLTDQLAAVEAEIAPALQQDADWAAAAARLQTIKGIGLLTASWLVVTTVNFRVCPSADAAVGYAGLAPMPHDSGSSVHGRRRIGHRGNGRLRSALYMASLSAAQHNPIIRAFYERLRAAGKLKKVARCAAARKLLRIAWAVATKAQDFDPTYAQRQQAGAS

SEQ ID NO: 292679 - protein, 348 aa, unidentified
MEWTVAVGVDTHKATHVAVALDRLGRELGACELEAETAGYERLLRWAGSFGGCCFAIEGAASYGAGLARFLDERGLPVFECERPSRRERRRGKNDHLDAELAARRLLAGEGLSEPRGTGLREVLRVLLVERRSADQARTACLNQLHALVVTSPASLRSRLAGKKGAGLVNAAARLRRRAGTDLEQAALIEVLRRLGSRARLLGEELAEVERRIAELVATVAPGLLRECGVGPICAAQLIVSSGEPGRMRSEAAFAALAGTSPVEASSGPLSRHRLNRGGDRELNCALHRIALTRKQHHAETAAYYERLLARGKSKREALRCLKRMLARYFYRQLRSLPSLAFPDGARI

SEQ ID NO: 292680 - protein, 348 aa, unidentified
MAVVAQVVEYVIGVDTHAATHSYAVVAAATGAVVDRGQFPTSTSGLARAAEWIARRAPGTRLVAVECTGSYGATLVRELLGRGEQVYEVKPPKREQRAVHGKSDAIDALAAARAALASDVDDLINPRSDGLRSALRVLLVARRAIDTRRTADRNALTALIRTYGLDVDARKALTDAQVRTIASWRQRPGEDAATATIRGEARRLAKAVLNATNELAENRRTLARHVSDLMPGLLDVPGVGPVVAATLLCVWSHRGRVRSEAAFAALAGVAPLPASSGKTVRHRLNRGGDRQLNMALDVVARVRMSHDPATRSYVVRRTTEGRTHREIRRCLKRYIARQLFRQMMTLSA

SEQ ID NO: 292681 - protein, 324 aa, unidentified
MYKANRRDGLCERSLTMFPVGIDVSKNTLDLCMLYDGIKGRIKTRNIQNNRHSVENILRWLRLQHCSPEDVHVVMEATGVYHEQLATELHDAGFRVSLANPHRSREFARGMGIMTKTDKVDAYMLACYAFLKKPHRWEPPAPEIRYLGALLRRRDVLLGDALREENRLEKYLSTDTPADIISSCRRMAQLLREEISNIERQIKAHIKASPALRRDYTLLASIKSVGPQLGMHMLVVLRSHNFVSAEQAAAFLGVVPIEKRSGTSVRRRPRMSKIGPPQLRAKLYMSALCGKIYNKRMRNIYDEMCLRGKPKMVAIGALMRKLVH

SEQ ID NO: 292682 - protein, 349 aa, unidentified
MIRNKPRGATVYGIDLGKNIFHVVGTDSAGNVVQRVKFRRDTLRAFFERAERAVVGMEACPGSQWLARKLQAMGHTVRIIPAQFVKPYVKSHKNDTIDAAAIAEAVTRPTMRFVQVKQPEQVDLQSLHRIRDQMVGSRTRLICQMRAFCLEYGVAIRQGAGLFKSDLPRVIADECNDLTPTMRRLLNELFEDLMRLEKRIAEITREIEALAASDEKARRLMTIPGIGPLGATALLAAAGNGQQFKKARDLAAWLGLVPQQYSTGGKPQMFGISKRGNRYLRRLLIHGARSCVMHLDRSRDRLGAWLRQLHSRTHVNKVTVALAAKIARIAWVVLNRPGAIYERRDPALA

SEQ ID NO: 292683 - protein, 355 aa, unidentified
MTILAEDYDYVIGGDPDRDTIDLAVLDTATGGLRAHLEAPADGAGYAHMLDWARDHAPGRRVWALEGTGSFAAGLAGELALAGEDVVEVGALKHARGAKNDRLDAVRAARTAMAREHQSSPRVRGLREAIRALAATRQAVLVSRTKAINELKSLIVVSPEALRALLRGRPLAAQLTLIESMSTPAPATVDHRVTVLTLQSIASRIRFLTGQLADIDPELARLVQEHPAGPALLVEPGVGPVVAAQLLISWSHPGRVRSDAAFASLAGVAPLEASSGQRTRHRLNRGGDRALNRALHTVAITRFRCHAETRAYEARRTLQGKTHRDIRRCLKRTLARHLYRVMEAAAASHSVPSAS

SEQ ID NO: 292684 - protein, 382 aa, unidentified
MKNTYSSVACGGMDVHYKFSNVTFRDEAGRVVRRERLEHPQRSKLREHINRWPKGLPIVLEASFGWGWLGDLLSEAGLDPNLSNCYKLEQMRKARGWVKTNKKDADMLSLLPFETTAWWQVWRAPLNVRNRREQMRFRGDLVALQTTVKNRIHAIFHRHGIFHEFSDLFKGQGRRFLAELYIHGSVDLSQEALQAFRGQIKLLDHLRNQLADVQRILLRQLDKTLLIRRLMAVDGIGLILAHVLAAEIGKIERFRNHKALASYSLLAPRSCDTGQDEPSRSPLGRHLGTRGNRTLKWAFIEAAHGAVRSGGRWQVMFDRVTNGGNKDRNRGYIKVARELVKVVYVVWKKDVAYRDVPPQRPGTNRKKSRSGTGQLCHPMVYA

SEQ ID NO: 292685 - protein, 480 aa, unidentified
MAKRAAQRSEIKAVPQFLNESLYVGIDIGKGKHLAGFLSKTLLERHERFEACPALVFENSREGFRLLIERIRGLAPLEHVFVLMERTGHYHRALAQYLQELDLPVYVMHVQSRPGGMLKTDKRDALTLANQLYSQLELGVQVANKLQLIRRVMPPTEAAAQLKGLIRHRYELIQESTQRKNKLTAICDEVFPELTRVVKDPNSLFALALREQFPTPQALAAISLTTLVEIRGGARSISEAKLLELQRLAAQSIGVKEVARQRGLVLEQTQLIKELRLLREHVEQLEDEIVSIVEHAREGQILLSFPGIGPVMAATTIAAIGSIHNFPSASALKSYFGWAPVVVQSGSTLDHSRLTHGGTRTMKQMLFLAVFQAIRLPDNEWAKLYERLVKARCPFDEKTQSYVGKKRVIGRVAGQMTEAIYALLKRDAELLSKVLPGQDPPPPMLYDPKVHQRHRQGHYRPLKSTPLPNTITVLHPLPSE

SEQ ID NO: 292686 - protein, 309 aa, unidentified
MEIFVGIDVSKDRLDVHLRPSGEAFAVTRDGKGLNELVERLRGLAPYLIAVEATGGFETIVAATVAGANLPLAVVNPAQIRYFARALGKRAKTDGLDAEIIATFAEAVKPEPRALPDEAARLLMELVSRRTQVIEMLVAERQREKRANAPRVLKSLARHIAALERELPVIDRDIDTLVRGSPAWREKEDLLITFPGVGNTLARTFLAELPELGRLTRRQIASLVGVAPFTRQSGRWRGKSMIGGGRSQARVAAFLAALSAIRCNPRLRAFYQALLAAGKPKMVALIAVARKIITILNAMLRDQKQWHAA

SEQ ID NO: 292687 - protein, 328 aa, unidentified
MIYFFGIDVSKEKIDIGWLRDVNTGKKKTKVLNNTAAGHQQAAQWLLKTSQAHAEDILVTVEPTGIYHEALLYYLHQQGFNVLLANPGKARQYAESINQTHKTDSQDAMMLASYGYARHHQLSLWHPEAPEIRELKAMIRRLDALEKDLQRERNRAEAIEHSVSCDRVSESINSMIGTLTEQIKDLQKDIDDHINRYPQLKRNRALLESIKGIGPVMSRELVCLFASKQFKNAKQVAAYLGLVPKLKESGKLKGRTTLSKTGSATIRAKLYMAAVSASHHNPDIRAQRTRLLMAGKLKMEALGAAMRKLVQICFGVIKHQCKYQPQVA

SEQ ID NO: 292688 - protein, 469 aa, unidentified
MVAARKQKQKRMSAQVVEDEDYQLRYEIAAGIDVAKESAVVCVRMPPAAGRKHRTSHLQTVPATVPAIGELAAELKAAGVQMVSMEATSDYWRIWFAVLEEAGLAVQLVNSSQARNLPGRPKTDKEDARWIARLTEMGMLRSSFVPPPEIRALRVYTRHIWDLTADRTRYWQRLEKLLEDALCKLPAVVSKLAGHQTARAVIEKMIAGERDPRVLAALGRGKMRNDKLPALAEALSGMRSGPQHAHAAASLLRAIDLLDAELRDLQERVTAHLAAIPASWGVDADGVTGPEAGRARAAAALPAADRLDEIPGLGREAAAALIAEIGLDMSRFPTPEALVSWAGLTPTARQSGPRKGRGKKGHGNTYAKRIAVLAAYAAANTGTFLGERFRRLASRPGGGGRKKAGCAVGRSILVIIWHLLNDPAARYLDLGSDWHARHTDRSRKARNAQRQLEALGYDVIITLREEDAA

SEQ ID NO: 292689 - protein, 351 aa, unidentified
MENPTTIAVDLSKNVFEIAVEREGRICQRKRLNRRQMVEFFSQCPSATVLMEACGSSHYWGRVLQRLGHDVRLLPPQHVKPYVLGNKTDRRDAEAILSARHRESIVPVPVKSIEQQSVVFLHRLRATWMKTRTSRLNVLRGILRELGVTIPEGASRVLPAVSAALSDPSAPVPEVLHPELMSAMAEVRELDERIEGVKRQLEAVAGTVPMVERLETIPGVGLLNATALAAMVGDFSRFGTGRRFASSLGLTPKEHSSGGRRRLGAISKRGDTYLRTLLIGGARSVLLSAHRTKRPHRLHEWALDVERRRGRNRAAVAVANKLARIIWAVSTRGVPFKPQFDIQNAPKTVPA

SEQ ID NO: 292690 - protein, 268 aa, unidentified
MRYIGIDVSKATFVVAYSSDKGGEIRTFNNTTAGIRQFIGTLPKDGSIHCVMEATGNYSALLLYMLNVAGITVSMENPLKVKNFAKAMLSTIKTDKSDARLITLYGEKMNPRPFKVQGEAILRLRQKRTVIRQLTKQITAMSNLRGSLACLPVPDKGATHTVDETIKFLEKKRDRLQSELTDLVEVEFSRQLALLTTIKGIGITLATALIITTGGFTYFQNAKQVSRYLGICPTYEQSGTSVNIKGHINRNGDAYTRGLLYILSLIHI

SEQ ID NO: 292691 - protein, 425 aa, unidentified
MQTDGANQQQQYAASIGFDWGDQQHAVALQAAGSGRVETQTIKQTPESLHDWVLGLRNRFGGRNVIVAIEQSRGAVTNALLGYGFVHVLRVPPKSLARYREAFYPSGAKDDIPDASLLLEWARDHRDRVKVWTPDKPETRALQKLTEFRRDTVGRRIVITNMLTQSLKEYFPQALSWAGELNTPMAYDFLEKWPTLVKLQKTKPAQIRKFYQEHGCRRTEVIQQRLEEIRSARPLTQDSAVISTSITVLETLIPQLRCLIDAIDRIESQIHVLFNKHEDRDIFDSFPGAGPVMAPRLLAAMGSDRSRYNAALEVQQHSGIAPVMERSGNSTWVHRRFACPKFFRQTFHEFAGLSIRYSSWACAYYKMQIDKGKGHHAAVRALAYKWIRIIYRCWQNRVPYNEEIYLEALRRTNAPLLQFLDQAAA

SEQ ID NO: 292692 - protein, 342 aa, unidentified
MYYIGLDVHKKTISYCVKDASGQVHREGTIGATRNELDRWVRTLPQPRIMAMEATIFTGWIYDHLLPHAEQVKVAHPLMLRAIAAAKKKNDRIDAGKISDCLRCDFLPECHMASTEIRDRRRTLRYRHLLVRQMVQMKNRISGLLMETGVSHNKQRLHKVKYFRELISNNEEVHESIRPLLRLSRETIVRCQKTEYALVSSLERDPLLAERLKRLRTVPGVGPITALTWALEIGDVSRFRSVKQAISYCGLCGEEKSSADKVLRTPLSKQRNKHIQHVLVEAAKLAPRQNHELAVVHERETQKGNRNRATLAVARKMVAYLLAVDRREREFVPAEGGSTAAA

SEQ ID NO: 292693 - protein, 410 aa, unidentified
MQTLVERGCGLDVHQATVVACLLIVLKNRQVQKQVRTFGTTTRELLSLREWLLSEGCTHVAMESTGVYWRPIYTVLEGAFEIVVANAQHIKKVPGRKTDVKDAEWIADLLCHGLLRSSFVPPKPIRELRDVMRYRRKLVETQAAERNRLLKLLESANIKLASVATDVFGMSGRLMLRALIEGKAAAQEMAELAKGLLRKKIPELELALEGKLEGHHRFLLKLQLDRLEALEQDLAILEQHIQEKLEPYTAQMARLDQIPGVDWTLAAVIIAEMGVDMSVFGNVSQLASWAGVCPGNDESAGKRKSSRIPKGNAYLKTALVEAANAAARAKGTYLRDKFYRLKARRGYKRAVVAVAHKILGAIYHMLSRDVSYNDLGDLYLDKLNKHHLTRNLVHRLERLGYTVILEQKAA

SEQ ID NO: 292694 - protein, 401 aa, unidentified
MVSDFRKGRYNLMKIYVGIDIAKLNHFAAAISSDGEIIIEPFKFTNDADGFQLLVSKLESFDKNSLIIGLESTAHYGDNLVRYLVTELYQVCVLNPIKTCQMRKNNVRKTKTDKVDTYVIAKTLMMQDNLRFVSFFDLDMMDLKALGRFRQKTIKQRTRLKIQLTTYVDQVFPEIQYFFKSGLHQNAVYALLKEAPSPKEIASMHMTHLANLLKVNSHGHFTKEQAKELRVLAQKSVGANDSAISIQITQTIQQIELLDSQLEKIEAEMTDIMKFNDSVIMTIPGIGYINGGMILGEIGDIHRFSNPNKLLAFAGLDPSVYQSGNFQAKTTRMSKRGSRVLRYALVNAAWNVVRNNATFKAYYDAKRAEGRSHYNALGHCSGKLVRVIWKMLTDNVEFNLK

SEQ ID NO: 292695 - protein, 430 aa, unidentified
MKYNTQNAKIASITEETLVLGIDVGSATHYVRAFDWRNYEFSDKPLAFSNDEAGFLTFMAWVEDIKEKAGKTAVIPGMEPTGHYWFNLGKFLQDSGMRPVHVNPHHVKKSKEMDDNNPDKNDRKDPKTIAALVNEGRFSYPYIPTGVYAEIRSLSNLRFQTQEEITRIRNRIARWISIYFPEYKDVYGKLDAVSGMMVLKEAPLPVQIKELGAEGINQIWRDAKLRGAGMKRAKTLLSAAEHSVGSQEAPEAASMEIWNLLEDYEKYSSRIDDLMARIEEKIKEVPYVDKLLEIKGIGLKTVCGFIAEVGDLSRFDDPKQLQKLSGYAIVKNSSGKHAGESHISYRGRKRLRYVLYEAAISVIGKNGEFREIHRYYQTREKNPLKKMQSVVAIACKVLRVFYAILTKGVDYDGEKMLGDIRRPAMSVQAA

SEQ ID NO: 292696 - protein, 439 aa, unidentified
MILIREVADAPVIMGISKPADLKSPCGEVKIVNPLFVGIDVSSRSNVAYLMKPDGSKHSSFSVQNNLGGAKLLSERIVSALNSMRLSDVVIGLEATSIYGNNLVYALREDGSLGQFQRKIHVLNPKQVKKFKEAYPDLPKNDFVDAFVIADHLRFGRIAKEVYMDDYRYQALRTLTRARFDVIQNLTREKQRFANYLFLKSSGIAQEKGIQNTSATTIALMEHFETVDDLANADLDELTDFIAQAGRGRFADPDVVAKVIQTAAKGSYRLPKTVNDTVNQAMSVSIASMRALKEQAKVLDKAIEQQFEIIPNTLTSIPGIGKVYSAGIIAEIGDIHRFASQASVAKFAGLVWTQHQSGEFEAEHSRMIKSGNRYLRYYLLEAANSVRRCDSEFRRYYDLKFNEVNKYQHKRALALTARKLVRLVFRLLKDNRLYIPPEN

SEQ ID NO: 292697 - protein, 401 aa, unidentified
MQTVRDNASRVKRFRELKATLRTNRQRLLVGLDIAQAEHVVHLRHAHTRVVTPALTIPNTTRGFAQLWARIQQAQRATGCREIVCGLEPTGTYHQAVAAFLERQGADVVLISSSVAYWNRRTQDGTWDKHDRKDAANCAELLEQGKVLFYSQPTGPLAELRHLVKLLRRARAELASCKARWRTTLRPALGPMGEPLPNRLRAELPAVLQAWEPVAPGRLAHPQGRLPLGLATACADLGAQVTAVQARIATLEAACTPVADRLPAYALLRTIPGIGPTVGAILLAEIGDIAWFTQFSQLRKLAGLDIVRVQSGQFAGQARISKCGRGLLRWALYQAALGAARTVAGRARLAALKAKRHGDRFAGFKALVELAAKVLRVVWGVWRSGTPYDPMRAGGLRRQPR

SEQ ID NO: 292698 - protein, 347 aa, unidentified
MSNHIENGQVRVLGIDLGKSVFQLHGVDARGKSVLKQRLKRDKLLEFMAQLPPCLVGMEASSGAHHWARKFQGYGHETRLMAPQYVKPYVKRHKNDSVDAEAICEAVQRPNMRFVGIKSVAQQEILALHRIRSLAVKNRTALVNQIRGLLAEYGIVFPKSIKQARRAIVLILSDESLELSPLFLRLLEEECEELTRLDERIAMYDNEIEALAKADPQCRLLMTIPGVGPITATALLASVGDVRAFKNGRELSAWIGLVPNQHSTGGKAWLTGISKRGNGYLRTLLIHGARAVLRVAEKKPDRRSRWVVSVSERRGANKAVVALANRMARSAWAMLVKQEAYQVRATV

SEQ ID NO: 292699 - protein, 332 aa, unidentified
MSHLVTESTQFLGFDIGKSEHAYAFVNVNGEVIDRGKLKTDKRSLKSFVSKALKNHQDLVVGVEATGCYHESIARSFLDAGLAVLVLNPQLTTTKAMRSSVRSVKTDAADAIGIAQKLREKRGNIGHDFSWDADRRAVQALGRSYDHLLWHRQSLKAHVAVFAERGLANEYAPDPDILGPEIARLRRDMISEARRVYPTEFEIMVAIPGIADETAARFLAETMGIERFKSGHALAAFAGLDPRVKESGTSVRGKGSMTKTGSSILRHLLGWTGMNIVQFNESFRKRFEYDIGRGKPRGVAYGSIARRLTVILYACLSRKVPFDPSLVGVSTV

SEQ ID NO: 292700 - protein, 345 aa, unidentified
MELHTIGIDLGKTVFHLVGLDLRGEVVVRKKFSRTQLLRFTANVHVGLIGMEACGGAHFLGRALREQRHEVRLIPAQYVKPYVKTNKSDYIDAEAIAEAVARPTMRLVPIKTDDQLDMQSLHRVRERWVMRRTAVINQIRGLLLERGITLRKGRHHVHAALPLILEDADANLSGAVRLLLAQLKLDLDQLSVRIDEADAAIQKTAHENEACRRLVAIPGIGPVTATALIAAIGNGGAFHKGREFAAWMGVVPREHSTGGQQKLLGISKRGNSYLRRLFVQGARAVLLQRTKQSSGLSAWLAQLTSRTHRNVAAVALANKLARIAWAVLAKNEQYRPSVVADVAAA

SEQ ID NO: 292701 - protein, 375 aa, unidentified
MATIARLGIDTSKSLFQLHGVDEREEAVLRKQVRRGQFLGFVAKLAPTKIGVEACGASHYWARQLQALGHEVVLLPPQHVKPYVGRNKNDKIDAAAICEAMSRPRVRERFVAVKSAEQSAAQMLLGTRDGLLHRRTQLSNTIRGHAAEFGLVTPKGLAHIKPLLERIAADDTVPALAKELFATLDEEFAELAPRIARLDKKLKAFQRSDELCRRLVEVPTIGPVIASSMVVKIGNPAAFRSGRRCAAWLGLTPKDHSTAGKMRHGGITRAGDEGLRAALVSGATAYIQQVKRGRTRPSPWLAQLLKRKPEKLAAVALANKTARIAWKLMVSGERYDRARAEAREGLGATQHRGSTPSPSLHPHTADQGANTMTVA

SEQ ID NO: 292702 - protein, 343 aa, unidentified
MEYYVGLDVSLKQTSICVVNQVGSVVREGVVDSEPEAIAAFVRSNASGAVRIGLETGPTATWLWTELKQLALPVICIDARHAKAVLKMQINKSDRNDAAGIARIMQTGWFKEVRVKDLDSHSVRALLASRALLVKIKRDLENQIRGLLKNFGLVIGRAKFNVFALRAEELVESRPELVAAVGPLLEARKAVEQQVGDLDRKVLKLARRDVQIRKFMTAPGVGPITALCFKATIDDPTRFTRSRSVGAYVGLTTRRHASGEVDWSGRISKCGDAMLRTYLFEAANVLLTRVPKWSALKAWGMRLAKRNGLRKAKVAVARKLAVILHRMWVDGTEFNWSTKKAAA

SEQ ID NO: 292703 - protein, 320 aa, unidentified
MTGKAYKNFVGIDIGKFELVAAVHGRKQTETFENNEKGWGLFHKAWKLELKEALVVIETTGGHELGLILFLRKLKIFVHRANTRHVKNFIRSLGQIAKTDALDAQGLARYGAERHESLKLFVVAKDSLKLYQLAQRRRDLKKILVQEKNRVQGPRCDGVVKSSCEGMIRFLEGELKEINSHMQNLIDRDPVLKDRQKVLESVEGIGPITARDLICFMPELGSLNHKQVASLAGLAPHANESGMFKGQRRVKGGRSEVRTALFMAAMAARNSNSRFKIFYEKLVASGKKPMVALTALMRKLIVVANARLKELVGVSPAFSI

SEQ ID NO: 292704 - protein, 383 aa, unidentified
MKEWKEITHYAGFDWARDHHVVVIVNQQGQIVADFEFEHSVEGWKSFGEKTAGFANLAVAIETSQGAAVDQMLQRDYTVYPVNPAAAASYRQRKAPSGTKTDHIDGWSLADALRVDGQGWRALQPADELSTQLRLLCRDEVALIAQRTLLVNQLQQALVEYYPAALEAFEDWVSPATWDFVLEFPTPEALTKAGKRRWEKFLHTHRLWRPETVEKRLAIFSQADQFKASAPVTKAKSQLALSLCKLLRTLQQQLDQYREQIEALFKNHPDHDLFGSLPGAKKMLAPRLLAAIGSDPGRYGTFQVLQSFAGTAPISFESGKIHKARIRWNCDKFMRHTMHLWADCFHRVSPWGQAYYRKKRQEGMTHACALRCLGQRLLKFSFA

SEQ ID NO: 292705 - protein, 419 aa, unidentified
MNKLYVGLDLSLKDFKVSIIDQEGVVVIKPFAATNDLYGAQSLIDAIEGCCMRLNVSTIFVGYESTSVYGWHIQHLLADCTSLKPYHPNIICFNPKIIERFKESLGNLPKNDYVDANAIAERLRFGRLPKSCPVDFRYLALQRLTRHRFHIVDNLVREKSYFLSNLFLKFSGLCQEKVFSNNFGAVATELFQEYLTVEDIATRSLDDLIDFIMEHGKKHFNDPKATASALKEAARKSYRLNPSVDNSLNFVLRSCLENMKALEKQKKAVEKAIENELPFFNNEYLCLTSVKGIGPVIAAGLISEIGGISRFDNDNALAKFSGLYWSEYQSADFVADDTYIKKTGNVYLRYYFVQAAEQLRKYLPEYTAFYSRKFKESKTHHHKRALVLTARKAVRLIFALLHDEKLYNPSTRKGEVDIT

SEQ ID NO: 292706 - protein, 424 aa, unidentified
MNLTQNDRLKQVTSDTLIVGVDVGSQTHFCRAFDWRGFELSRRVFKFSNTGMGFLTFLRWTEELMNKTEMKKVIVGCEPTGCYWLTFQKFLQDQDIQLVTVNPFTVNRSMELDDNSPEKSDLKDPKTIALLVKDGRFSTSYLPSGVYAEIREASVCRDQIMKQHVRLSNQIQGWIQKFFPEYLECYADWDSTSGLMLLKEAPLPQDILKIGAGGINQIWRNAKVRAAGIKRAKTLVEAAQNSVGLEAGEAARLEIWVLVNDYILKAEQLKRLDEYLEEKVKEVPNVEKLLAIKGVGMSTVIGFIAEVGDIGRFTDPKQIQKLAGLEIVKKSSGKKKGQPRISKRGRRKLRRTMYESARALMTWNPAFQDVFLYYRNRTKNPLGGMQAKIAVACKAIRIFYVVLQTGCDFDEEKFRKDIIRPEAA

SEQ ID NO: 292707 - protein, 411 aa, unidentified
MEAIIERAAGLDVHQGSVVACVIVGAAGRRASRETRTFGAMRRDLAALRDWLREMGVTHVGMEATGVYWQPIHAALEGVATLVVGNASHMRNVPGRKTDVKDAEWIADLVRHGLVRASFVPPPEIRALRELVRHRKALAGTMAAERNRTLQLLESAGIKLAGVMSDVFGVSGMLMLRALAEGNADAAAMADLAKRRLRRKVDQLALALDGHLAEHQRLLLGLHIRRLAEIDRDLAEVEAAIHAAMQPFAAQQALLVTIPGVDALLAATIIAEIGADMTAFGTVQRLAAWAGVCPASHESAGKQKRRGTRKGNTFLKAALVTAAISAAQAKGTYLRDKFHRLKARMGSKKAAMAVAHKILVAVFHMLQRGTGFSDLGAGYLDCVNKHRTAKRLIRRLDALGYDVMLRPKATA

SEQ ID NO: 292708 - protein, 389 aa, unidentified
MRMDYTLVNYQPSTEPKIRRQVMKDSITVVGLDVHKNSIEIVTADADGAMEVRRFGRIGGTMDALDRAVRKLVSGGAVLRFVYEAGPCGYEIYRHLTGKGFSCKVVAPSKTPKRSGDRIKNDRRDAETLARLERAGELTGIYVPREEDEAMRDLTRAREDGVKSLKTARHQLNAFLLRYGQRYPSKASWTPVHMRWLSDIALPHPSQQIVLQEYITAVRECTERTIRLTDQIAKLIPEWRLNPVVKALQALRGVAPIVAATTVAEIGDLSRFENPRQLMAYLGLVPSEDSSGESTHRGSITKTGNGHVRRALVEAAHAYGFPARVSRYLLKRQEGLPEPIRAIAWKAQVRLCGRFRRLMARGKLKNKIVTAIARELCGFMWAISREVEV

SEQ ID NO: 292709 - protein, 404 aa, unidentified
MVSVGIDVSKGKSTVCFMRPFGEIVAGPMEITHVNSDLKTFVKLLKSMRDEVKVVMEATGVYHLPMLTYLRDNDIFTAVINPYQMKQYRIQGLRRVKTDKADSITIAKYGLDHWFDLKDFISSDDKYKELTLLSRQYRHYMRIHVISLQELTHILDHTMPGVKKEFNSWNPDSGKDKLSDFVEKYWHYDNIRMKSERQFVESYMNWAKKKGYRLNQNKAAKIYSMAKEGIPTLPADQTTKMLVIQAIEVLKRVDETLNMILARMQEIAKTLPEYSVVRSMGGVGDVLAPKLIADIGDVRRFHSSKALIAYAGIDAPPYQSGQFTGTSRSISKRGSSAIRKTGYEVMRALKSHSEPDDGAVYRFIMKKEAEGKPKKVAKMAGLNKFLRIYYARVMEHSCNIESAN

SEQ ID NO: 292710 - protein, 441 aa, unidentified
MKTLPAVAAEPVFAAFAAIDWASKEHIVALLPAAGGRIEISKLPNTPEAVDLWAATLRQRFPGALIAVAVEQKRGAVIYMLSKYAELVLYPVPPTMSASYRHAFFPSGAKDDQGDTLLILDLLVHHRDRLSPLEPEDPATCLLRFLTQDRRRLVAQKVRVVQQLTDSVAQYFPQIHAWFGPLDSALSQAILQRWPFLQQLQRAHPGTIKRFLSQHRSWDDDRLAEQLRQIYAAVPATLDEVVLEACGRKSAACLAQLQVLRAEIGDYDKRLAAVTADHPDAPIFQSLPGAGDVLVPRLIAAFGTNRDRWRSAAELQRFSGIAPILVSSGNCSRISFRRACPKFVRQTFHEFAAQSIRYCDWAKLLYEHHTKGDHRNHHRAVRAVAFQWIRIVYRCWANHEPYVERVFLEAQRRRNSPLTSKADNAVKFQRQAGFHKIVAKP

SEQ ID NO: 292711 - protein, 401 aa, unidentified
MPSDKQGDAMQISVGIDIAKEIHWVTAIDAGGVVQVDRKLLNTPAGIATLVDELTALRGTVRIGLDVIGGIAGLAEAMLADAGFALVHVPGIAVNRARQGTVGGENKSDPRDARTIAEQVRTRSDLRPIEPATELDLEIRLLVGRRSDIVQAQTQRLSRMRDLLVGIFPGLEACLDLKTKGPLHLLTKFVTPAELRDAAKKRLVRHLQAAGGVPKVEDLADRVLTVATEQRIAVPAERTTARLIRELAVEALASRTRLTELDRELEALLARHPDAALIRSLPGMGAVLTAELIAEAGNLARFRSADALASAAGMAPVLRQSGRSRFLRRPSGGNKGLKRVFYQSAFCSLAHDDSRAFYERKRREGKRHHQAVIALARRRVNVLWAVVHSRTPFQTAFKTAA

SEQ ID NO: 292712 - protein, 345 aa, unidentified
MKYFAGLDVSLEETAICVVDESGRIVKETRAASEPQALSDAFRKVDLPLERIGLEACSLTAWLHDGLRDECLPAICIETRAANAAMKTMPNKTDRNDARALAQIMRTGWYRQVHVKSRQCRLWRSLLFARRTVLNEMRSIENVVRAMLREAGIKLGTPSRTAFAGRVRELADANAEVMAMVEPLLAILSVMLKEFARLTKQVLDIVRKEEVCRRLMSAPGVGPITALTFRATIDRPERFGSSQAVGPHLGLTPARYQSGETDIQGKISRCGDELARTALYEAAHSLLVRSKKWSSLRAWGMNIARRRGMARARVAVARKLAVILHRMWTDATEFRFGKEHAALAV

SEQ ID NO: 292713 - protein, 372 aa, unidentified
MHGLAHSTASTRILALDLGKFNSVLCVYDPATHDHHFVSAQTTPQTIHDLLVTHQTDDPSSTLLVIETCDVAGWVYDIAVALGMNVAVANPAHEAWRWTRVKRKTDKDDALKLAKLAVLGQLPTAHMPTPQQRQRRRLVHYRRVLVDRRTQIKNQVRSIYSQQGLSLPRRGKAWTKAGVAQMAEEAKPLGECESVDDLWRGRLHVELQLLESLNQQVTQVDEKLDALGSQDDRVQLLQSVPGVGPRLAETVVAHLDDPRRFKNARQVASYAGLVPKQFESGTIKRSCRITRRGPALLRSMLVEVAWMVYLRNVWAKQFVQRISRGVASRKNIAIVALARKLLVTLWAMLRDHTRWRDPSPARDASSAPLAMA

SEQ ID NO: 292714 - protein, 362 aa, unidentified
MNKDKYVAMDVDSANIVAGVYDHQGKTVMQCCIRNEGKAIQEFLRLLPGTVHVTFEEGTQAAWLYELMRPLVAEVIVCNPRENKLLKAGNKSDRIDVAKLGKLLRLGELRPVYQGPSAGQGLKQLVHSYEELVDDVRRVKNRLKAVYRGRGINTKGETVYGPKQRKEWLGKLPTQELRTRAAALYEELDCVLRLRAEAAKVMCRAARKQAGYQSISSVPGLGAIRTAQVLATAITPHRFRGKRQFWPYCGLAVVTRSSSDYEWVDGGARRKRKPLQTRGLNQNHNRTMKAVFKGAAVSALQQHPEVQEYYQRLCTRGLRPEMAQLTVARKLAAIVLILWKKGEGYDPKRLNQAAPGTDQQCR

SEQ ID NO: 292715 - protein, 414 aa, unidentified
MLFIGDDWAEDHHDVELVDESGGKLAAARLPEGMEGITRLHELIATHHHTASDPDDHTSTNEVVIGIETDRGPWVGALVAAGYRVYAINPMSAARYRERHSTSRAKSDAGDAHLLAEIVRLDRAHHRPIAGDTAAADAIKLLARAHQNAVRERARQTLRLRSTLLDFFPAAVQAFPELTARDALALLERAPDPDRATRLTATRIIAEFKLAQRKNKEAKAVELRELFRAPALRHPATLQGAYAELVVSLVRAIRAINEQIVHLAGAMDNAFAAHPAADIYLSQSGLGPVLGARALGEFGDDPHRFANAQSRKNYSGQSPITRASGKKTVVMARRSGNRRLTDTLHAQAFSALTASPGARDYYDRLKARNIGHHAALRQLANKLVGILHACLKTNTPYNEDLAWQVQTAPGQLAA

SEQ ID NO: 292716 - protein, 513 aa, unidentified
MAARKSKSRDAQTLQQPLQPKPTRTIVNPDPSKPATPARSAAADHFHRNAKITEQARQEAEACAQLLATPVKHAHAAGIDVGDSTHWVCVESTPDQGDTVREFPAHTPGLRQLVAWLKFCGVTTVALEASGVYGHVLFLTLLEAGFEVVMTAPQFARQIKGRPKTDKRDCQWIRRLHKHGMLPPIFQPDAATQTLRDYVRHRANLVRLSGQHIQRMQKALELMNLKLTKVLGDVTGVTGLKIIRAILDGERDPVQLALLRDRRCRHSVAEIAQALDGRYRPEFLRELRSSLTLWETYQEVILEVDIAIAEHLQTMRRQTTLPPLPPKPRVRGRKPHDPWFDVREALYYVTGVDLTAIEGIDEMHALTLVGELGTDFSKWPTVKHFSNWLGLCPNWHKTGGKVKSSRTRPGKNRAAGALRLAAWSLMRSKSYLGAYLRRQRSRLGAPKAITAAAHKLARIVYNLMRYGLAYMQQTEAAYAEQVRQRLEKQLHRRARELGFELTKIAPPVEPTFA

SEQ ID NO: 292717 - protein, 362 aa, unidentified
MPKMIWLGMDVHAASITVARYEDQAATAMVQTIANDPAQVRRLVRRLPAGSDVRACYEAGSCGYGLHRQLTALGVHCDVIAPALIPRRPGERIKTDRRDAEKLGRFHRSGELTTITVPTPSQEAVRDLVRAREDVRRDRTAARQRLAKFLLRHGHRYPGSHWTKRHWEWVCGRPFEGAARTVFVHYCDHVLALNERLAHLEREIHTFADSPVYQPVVARLSCLRGLATLSALVLIAELYDLRRFRTPRELMAYLGLVPSEHSSGARERRGRITKTGNALARRLLIEAAWAYRHPARQTRRVHQALTTQPPEVHAISDRALHRLTARYRRLLSRGKTPHHAVTAIARELCGFVWAIALVPDLA

SEQ ID NO: 292718 - protein, 314 aa, unidentified
MTKMTDDTIGIDVSKATLDVHRLSDGKMTSFINNTAGFKQLAKFCIETTVIRVVYEATGAYHKEFERSLGAHLPLVKVNPLQARRFAQAHGVRAKTDAVDARMLAVMGDAFVLEPKRPISETQHILKELRAFRSGLVADRTRILSRQKTQTLPITRRQSKTRLAHIEKQITEIAAEIDRLIQADDMMAHSMKILRSIPGIGAVCAATILIEMPEIGGMDRKQVASLTGVAPMTRQSGQWRGKSFIQGGRKVVRDALYMPALVAMRFNPELKAKYKAMIKAGKPPKVALTALMRKLIELANALIKANRLWVNKYA

SEQ ID NO: 292719 - protein, 401 aa, unidentified
MPTMQANVQRVKRFRELKATLRTDRSRLFVGLDIAQAEHVVQLRHAHTRIVVSMLTIPNTTQGFATLWARIQQAQRATGCREVVCGLEPTGTYHQAVASFLEAQGADVLLLSSSVAYWHRRLQDGTWDKNDRKDAANCAELLEEGKVLFYSQPDGPLAELRRLVKCLRRARTELAACKARWRTSLRPALGPMGEPLPNRLRAELPAVLQAWEPAAPGRPALAKGRLPLGLATACADLAAQVTAVQARITVLEQACTPLAERLPAYALLRTIPGVGPTVGAILLAEIGDVGWFTKFSQLRKLAGLDILRVQTGKFAGQWRISKCGRGLLRWALYQAARGCARTAGGRARLAALQAKRQGDRYAGLKAIVELAAKVLRVVWGVWRSGRPYDPTRAGGLQRQPR

SEQ ID NO: 292720 - protein, 380 aa, unidentified
MVDRVVFVGVDTHADVHHAAVVDELGRWLGDRGFATTPAGYAELWGWAGSFGAIAVAGVEGTSSYGAGLTRYLRAQAVRVVEVDRPDRKSRRMQGKSDPLDACSAARAVASGRAAGVPKSHDGVVESIRCLHLARRSAIKARTQAVNQIRALLTTGPAVLREQTRGLGRKALISRMVRLRPELNGAQHPEQATKIAVRGLARRCQALNEEIAALEVQLSQLTLAAAPRLLARPGIGIDTAAQLLITAGDNPDRLRSEAAFARLVGVAPIPASSGRTDRHRLSRGGDRQANRALHTIALVRLHRDPRTWAYLNKRTAQGLSKKDILRCLKRAIAREVYHDLRPTCAAAVATIVDLAPMTSPTSSRAAEVKAGRRPPEGHRP

SEQ ID NO: 292721 - protein, 459 aa, unidentified
MKLTPKDSYDVEEIDSDEAEQILAGAAAVDVAKASGMVCVRRPHPSIEGRRTSRVWEVDSTTKSILALGEDLVALGVERVVLESTSDYWRPFFYLLEASGLVVWLVNARDVKQVPGRPKTDKLDAVWLAKLNERGMLRPSFVPPREIRVLRDYTRLRTGLVEERSRNKQRLEKLLEDALIKLSSVATDLLGVSAREMIEALIAGERDPEALADLARGKLNKKRAELIEALNGRFDDHHADLAQLLLDQIDSCTDKIDRLTARIEALVAGLAEPSAPDDQDPTPGWDLPVESDPGAARLTTVQRLDEVPGIGERAAQIIIAEIGLDMAQFPTAEHLVSWAKLSPQTIQSGPRTKVGRTGKGNRYLKGVLGEVATAAAKTDTFLGERYRRLVRRRGKQRALVAVARSILVIVWHLLNDPDARYADLGSDYYTRQLDPSRKTRDLVRQLQALGHSVELTPAA

SEQ ID NO: 292722 - protein, 442 aa, unidentified
MPLLLVGEHLVIRAPGFSRMGCRGWAGWWEESRLLFVGNDWAEDHHDVEVQDETGRRLGRARFDEGVEGLARFHKLIGTHVGEDSRPDEVVVGIETDRGLWVQALIVAGYRVYAINPLQVARFREATSTSGGKSDPSDAQVLTNMVRLMREQLRPVAGDSARADAVKVVARVHQTLIWEQTRHTLRLRSMLREFFPAALHAFGEDLDGRDALELLDAAPEPVAAAELDEAQITAALRRARRRGVAAKAAAIQAALRAEYLIQPAEVTTAYAVGVRAQVALLRVLGEQVKAVEQQVDANFGEHPDVKIYRSQPGLGTVTGARVLGEFGDDSHRYSNAKARKNYAATSPITRQSGKKKIVLARYVRNDRLADALMHQAFSALNRSPGARAYYDRQRARGLGHRAALRQLANRLVGILHGCLKTGTLYNETTAWPTHEENLTEAA

SEQ ID NO: 292723 - protein, 414 aa, unidentified
MLKIVYPICCGMDVHKNFLVACIASTDNCGVTSYKTKRFSTYSSDLRLCRDWLTANNCNDVCMESTGKYWIPIYNVLESSCNIVLAHPKYVKAIRGKKTDKKDAKWIADIFKHDLVNGSFIPPADIRQLRDLMRYRTKLTAITTGEKNRAQNCLTVSNLKFDNVFSDVFGKASTKLLDYILEHPDETLDDVSRFRTKHLKATNEQILSAIDGEMCVQQAEKLRIIRSHMENLDLCKLNLDSVILSLTEQYMKEINLVLTVPGIQPFSAIAVISEIGVDMSVFPSSKHLCSWAGLTPQNNESAGKKKTTRISRAGAYIKPLLVQCALCAVRAKAFPEVGKRYNALKKRRGHKKAIIAVARMLLTAIYNILKKKEPYNPELFAHSNNTPPEHRTVSVEEAIFILQRQGYTVTPYAT

SEQ ID NO: 292724 - protein, 446 aa, unidentified
MSATFTFTSLFILIVERRKDAMHERIEIGDRNEYIHPICCGLDVHKKSVFAAVFIYDNSDSPVKYYTAQFTTYPKDLKKMTDWIISKNCHDVCMESTGQYWHPIYDAAEEAGLHPLVSHPKYTKPLKGKKSDPADAKWIAKSYASGRVVASFIPSKEFRIMRSTIRYCQKIHNAMTGEKNRILNCLTGEGIKLDVVFSDVFGKTSRSIIDYMLNHPGEKFNVAPFIGKRCKTPIPVIQEAVAKASSVDISSLSKLKVAFSRLDRTVKDEAVLKQDVAERMKPYAHQLELIRTVPGFDRDPFTAMRVLAEIGPDMSVFPSARHLCSWAGVCPSHDSSAHKVKGRKISRAGKYLKPLLVNIARSVVRSKDHPEITSRFNRIKSRRGYMKAIIAICKMFLTAIWHILSKDEPYKTDGYMTAKKPKKAKRVMTRTQLAEYLASQGITVVD

SEQ ID NO: 292725 - protein, 379 aa, unidentified
MSTQITTSPKVYIGLDIHKKTWTVSIQTDLFFHKTYSMPAKSSDLEEYVNKNFHNHEVYLVYEAGCCGFSVARYFLNLAWNVLVVNPADVKTGNKERYQKTDALDAKNLSNQLKYGTLKGINIPTEAEDQFTSLARHRTQVTKKLRTTKLHIKSLLLFHGIEIPQEYDNSNWSNGFIEWLDKLKFSTVCGDLALQGKIRMLKFIKSEYLEIANQMRAYCRKEHKEDYNLLKSIPGIGGFLASVIIAECGDLRRFNTEGQFASFIGVVPGMHNSGGSEKCLGITPRSRSQLRSYLIEAGKNKIELTPQIDVDSILEKIAVIYKNEDVITIHGVKINFQSEWVHLRKSNTEPIIRIYTESNSQDNADQLAFRFINEIQNII

SEQ ID NO: 292726 - protein, 370 aa, unidentified
MLDTTTFVGLDVHARSIKAVSLDVMTGEVRCATFGYDAGAVAEWVRSVDPGARCVYESGVTGFDLQKRLSGLGVDCVVGAVSKMIKPSADRRRKNDRNDAEFLARMLSVGNVVEVWVPDDECEAARDLTRALEDARDDLSRSKQRLSKFLLRHGLVFDERTPTGRRKGNWTRAHWSWIESIRFAEGADEEVLAYYVEAVRRAAEEKARLEGLVGAEARKPRWRRRVESLRCLKGVDTASAADLVFEAGEFSRFRNARSFAAWVGLTPSEHSSGESDRRGAITKAGNKHLRKTLVEAAWHYMTCSGRPKDLAKGQVPDRSARRHAAKGVRRLVDRREALLARGVHGSKANVATARELACWVWAVGLMAEEA

SEQ ID NO: 292727 - protein, 325 aa, unidentified
MNQNLTKSKAKNTQDTTYVGVDLSSRNLDVYINGKYIRYNNSETGRAHMLNKLNSTCNNMLIAYESTGWVSRNFSMYLDEKRVPHCCLIPCRVRSYAKSQGVKAKNDRLDSRVIAEYAGNIKASPDKPLNRKIQELRQLNNLRTLITKKLKDFKVTTAAYTEDSSLSVIAEIRKHLQEQIREIGNKMQGIINENPLLSELYAFYLGQSGIGPVIAYNLICELPELGHLSAKKIASLVGVAPFDYESGGKKGARSIRFGRKRIRNLLYMGMLQGIRKDEAMKTKYDRLREKGKPFKIAIVAVIRQQLTILNARTRDWLVEHGDPLY

SEQ ID NO: 292728 - protein, 354 aa, unidentified
MIVIGTDTHKRTHTAVAVVAGIGELSGEFTAAALPPGFAEMLCWAQDLDDERVWALEDCRHVSGGLERFLVARGERVVRIAPKLMGASRKGLRDAGKSDSIDALAIVRAALAEGPEQLPAATVDEQALEIKLLLDHHDNLVAQRSDDQRRLRWHLHDLWPELELPAGGLDREKWLARISRRLARAAQSRRVKICRELVTAIRARTRRIRELERELGELIAAKAPQLLRLPGCGVLSAARIVGEVGDIDRFGSDAKLARLAGIAPIPVSSGMRDRHRLDRRGNRKLNCAFHRIAVTQGRMHADARDYLARKQAEGRTRMDALRCLKRHLVRRVFTLLNQPIPTTNPAAKPAPALT

SEQ ID NO: 292729 - protein, 345 aa, unidentified
MDHISRIGMDTSKHVFQLHGVNAAEMPVLRTKLRRKEMVAFFANLAPTVIAVEACGASHHWARLLQLLGHTVRLIPPQLVKPYVKRGKNDAADAEALCEAMSRPTMRFVPVKTAEQQAALMLVGLRDRLIRNRTQLANAIRGYAAEFGLTAAKGMAHLPQLLERIQADEGVPALARELFAIQAKEYEQMEQQIDDVDAKLMAWHRANECSRRLAKIPGVGPIAAAMLLMKTPAPELFRSGRQFAAWIGLTPKDHSTAGKVRLGVITRAGDEGLRSVLTVGATAVIKQALRGGSASPWLIKLLARKPPKLAAVALANKTARIAWKLMVTGQSYAIKTKPAATVGAV

SEQ ID NO: 292730 - protein, 273 aa, unidentified
MDQYFVGIDLHRQYFTYHATDKKGKDLLREKLPNSFDALDYLMRQFPSPPKVVIEATRNWMWLVKALKERGCKVTLAHPLRTKAIASARIKTDSLDAKTLCHLLRSNLIPCSYIANEKEQDNRELGRGRIALVHYQTMIKNRVRAILGKENLNYPGSDLFGKKGRAWLKRQRLSETKRQMVEIYLNYLDNLVKAINQVENLIQNKSSRLLEVKLLTSIPGIGTTTAFLLASEIGDIQRFNTAKQFASYFGLVPRLNQSGNHRYYGRITKLGNP

SEQ ID NO: 292731 - protein, 387 aa, unidentified
MRAVCGLDVHKDSVFLCILCETGEIIEKVFGVLTHQLRDMRRMMQSHGVSEVTMESTAVYWIPVWRVLEPHFHLKLVNPYFIKQLPGRKSDVKDAQWIAECTLKDLVRGSFVPPERIQQLRQYDRRIFDLDAEIVRKLAKLDAVMQRCNIRLSNYVSNTDTKSYKNVVRKLCEGVTDPEELIKEIYSRITNRHGRETILAALTGVVSDAEKDTMRQLRDELDLAERHKQECMDKMSHVCRTYYPEELRRLMTIPGIGERAATSLIAEIGVDMTKFQTAAHLASWSGLKPRNDESNKKIKSRRITHGNIFLRKTIIECAWGASRTKDCFFSRFSYHQTQVRKKNKLKVLVAVARKLLIAIWHVLHDETDYKDFYAKNDCETSGSESNG

SEQ ID NO: 292732 - protein, 408 aa, unidentified
MNAVGIDVSKGKSMVAALRPMGEVALLPQEFLHTEVGLEQMAYAIIALGEDTRVIMEATGRYHEPIAAALHEYGIYVCVLNPLFIKQSGGGSIRKVKTDKADAMKIAKYGLDNWVELREYTPMDTVRQQLKLCSRQYNLYMKTVVSLQNNLISLTDKTFPGVNELFSSPERADGHQKWVDFVMTFWHCDCICRVSEKAFTDRYQKWCKRKGYHFSTEKALDLYAGSCGHFTTLPKNDNTKLLITTAAQQLLAGKTTLAALRTEMTRLAKQLPEYDTVRAMYGVGETTAAQLMAEIGDVRRFPRRSSIVGFAGVDPAVDQSGKHSAKSVPTTKRGSPHLRKTLYQIVCTYLKRSPADEPVYQFLDKKRAEGKPYFVYMTAAQNKFLRIYYARVKECLEAFDARQDTVQN

SEQ ID NO: 292733 - protein, 425 aa, unidentified
MNYKQNEKINQVKESTLVVGIDIGSTTHYARAFDWRGIELGKVFPFSNSREGFENFKGWRQCLQDKYKKSDVIVGIEPTGHYWFDLGAYLEDEGILLVMVNPYAVKQTKELDDNSQSKNDRKDPKVIAKLVTEGRYSAPYTPDGVYADLRIMVANRKRLIRELTQIKNRFARWFAIYFPEYKEVFGDYEAQSSMMLLKKACTPEAIVELGAKKINQIWRDAKLRAVGMKRATTLCETAKRSIGLKKGSSAAEYEMKLLLADYEYKKAQLDSIMEEIESLCKKIPESEQMLAIKGIGVITIAGFLAEVGDVRRFESPRQIQKLAGLSLRENSSGKHKGQTTISKRGRSKLRAVLFNAAIPLIAKNPEFRSLHEYYTTRANNPLKKKQSVIAISCKLIRVFYAILANGVTYDPEKLISDIHRPPQAA

SEQ ID NO: 292734 - protein, 365 aa, unidentified
MNQITNGSIEQEGTERKGNWVLKLGLDVHYRQVTVAMQEGDGRIKAVGKMGQDAFGNWVEKKLKAGFEIYSCYEAGASGYWLHRDLAELGVKNLVIAPKAMGQDKRQKTDRRDSTQLCDALDRYLRGTRTALSPVAVPTAEQEEKRALIRYHRQIMADRSRCEARGKGLLCAQGIEVGGKWWQPKTWKELKTHPRFKSWMEQALQAWRSKLLAAEAEQQELRRQVEALAPALLPKGVGAYSAVALEYETKGLARFKNAGQISSYTGLCPGIYSSDGRAKEGSINRCGNAAVRWNLVEMVWRLLKWQPYYRPVRQLAAELVKSKRAKKRLVVKAARHLAIDLWRLQTGRTTPEALGLIMQPTAKAK

SEQ ID NO: 292735 - protein, 343 aa, unidentified
MQAITTIGLDIAKSVFQVHGVDAKGNVVLRRQIKRRYVLAFFQKLPPCLVGIEACASAHHWSRELQALSHTVRLMPPAYVTPYVKRHKNDAIDAEAICEAVTRPNMRFVATKTREQQSCLTLHRTRHLLIRQQTSVINAIRAHLAEFGIVAPVGRNGVDQLLGIVADASDKRLPELARACVAALGTQLGTLKAQILQFDRLIMAWHRSSEASRRLDDIPGVGPALATALVATVADPRAFRSGRNFSAWIGLVPKQHSSGGKDRLGSISKRGDRYLRFLFVAGALAVIRYAKIHGTKHRPWLTALLARRHTKVAAIALANKIARMAWAIMAKGEHYKEPVALAA

SEQ ID NO: 292736 - protein, 355 aa, unidentified
MNSVRYVGMDVHRDTISVAVLDESGRPMMQSVLATRAAAILDCIHGLRGPLHVTFEEGTHSAWLYDVLVRRVAKLVVCNPRKNALLKSGSKSDAIDARKLAELLRAGMLSPVYHGETSALQVQQVARSYTQLTEDTTRVMARLKAVFRGQAVSCLGKKLYGKRHREQYLEQLGGSGLRRRAEHLYEELDALQPLRHAVRRELIIECRKHAAAQWLQSVPFLGPIRAALLIGRVQTPHRFRTKRQFWTYCGLGLETRDSGQYRLVSGRVERRRKPALIRGLNWNHNHEMKNLFKGTATAASVREGVWREFYLGLLAKGMRPEMARLTLARKIAAITLKIWKKGETFNAEHLKLQAA

SEQ ID NO: 292737 - protein, 316 aa, unidentified
MDLGDRSSFYYVLNDAEEVILERSLPTTPKALQQVFGGMPASRIALETGAHSPWVSRLLTQLGHEMIVAHARNVRLIGESRRKDDRIDAHTLARLARIDPQLLSPVQHRSAKAQVHLTVIRARAGLVGARTALVNTARGLAKSYGERLRGCGTQQVSRELAAGLSAELRQALEPLLREVESLNERIQEYDRQIDRMAKEIYPEAALLKQVKGVGNLIALTFALTIEDPHRFRKSRDVGCFLGLRPGRRNSGQSQPQMHLSKEGDPVPGDAAGARGALHFGALWGGQRSEPEGCVRGGLKSLCPNSRAQPPSSGDCD

SEQ ID NO: 292738 - protein, 402 aa, unidentified
MNCVGIDVSKGKSMIAVMRPFGEVVVSPFEVLHTDSELSKLAGLLKSLDGETRVVMESTGNYHAPVAWLLHDAGLYVSVVNAMLVHDYGNNSLRRAKTDKKDAVKLANYGLDHWLTLPRYVPEEDTRLLLKNCYRQYQQYSKVQTMLKNNLISLLDAIFPEVNRLFNSSPRADGSEKWVDFVSTFWHCQCVSTLSLKSFSARYLKWCRKHGYYFSQEKAFEIHSKAQSCIGVMPRNETTKLLVQQAIAQLKATSAALAALKQEMQSLAASLPEYPVVMEMFGVGSTLGPQLMAEIGDVRRFHSKKALVAFAGIDAPPCQSGQMDIHSRSISKRGSAALRRTLFLVMGIYLQSAPLDEPVYQFMDKKRSEGKPYKVYMMASANKFLRIYYASVTAYLNTLARI

SEQ ID NO: 292739 - protein, 352 aa, unidentified
MVVVGADVHKHTHTFVAVDDVGRKLGEKVVKATTAGHHDAVLWARTQFGAELRWGIEDCRHLSARLERDLLTCGQQVVRVPPKLMALTRASARTRGKSDPIDALAVARAVLREPDLPVASHDEVSRELKLLVDRREDLVGQRTSTINRLLWRVHELDPAHAPKAGSLDRAKHRQLLGAWLATQPGLVAELARDELADITRLTEQINALATRIGDRVRLVAPALLALPGCGELTAAKLVGETAGVTRFKNEAAFARHSGVAPVPVWSGNTRGRVRMTRSGNRQLNAALHRIAVTQIRLDGLGRTYLPPPPRPRRFHHRSPALPQTTPGPRRIRTPTHRSQQPSPRLPNSSGLT

SEQ ID NO: 292740 - protein, 413 aa, unidentified
MAKDITTWVGMDAHKKAINVAVLSPGSREPIEWKVLNRTEDVRRLARKLTRMGEEGEVRACYEAGPCGFALKRQLEAAGSLVCEVVAPSLIPIRPGERVKTDRRDARKLARMLRAGELTEVHPPSEPEEAVRDLMRCREDVREDLLRSRHRLAKLLLRRGRIYTGRAWTQVHREWLRSLVWEEAPDQVVCDDYLRAVELLEDRLRGLDAQVELVAGQGPYCEAVGWLRCFHGIDTVTAMTVLAELHGLDRFQRARDLMSYVGLVSSEHSSGERRRRGGITKSGNAHVRRVLVEAAHHYRHRPQVGRGLSRRRIGQPTWAIAQADRAHARLHRRFGALSARGKPMGKVVVAVARELVGFLWAVVREGRQRQVQLLRRAAGRRVNVPRRDSAPRVSRAGRAQGAMLTTRSAARAR

SEQ ID NO: 292741 - protein, 317 aa, unidentified
MTQESSPAVGIGVAKARLDPGPGDGSVHPFANDPAGCAAVRDRLLEINPKVIVIEATGGYEWPIVAELAAAGLPVVVVNPRQVRDFARATGRLAKTDKIDALVLAKFGAAVEPPRRALPDEQALAMRELLARRRQVVNMITAETNRLKQARTDRVLRSVRQVIDLLEAQLDAINDDLDSRIRSNPELAERNAVLRDVPGIGPATARTLLLELPELGTCSRQQIAALAGLAPMNRDSGTMRGRRTIRGGRASVRSALYPAALTATRHHPVIRVYDRRPREAGKCPKIALIATARKLLTILNALVRDKIVLPRKVQPCT

SEQ ID NO: 292742 - protein, 414 aa, unidentified
MEVLYPRCCGLDVHKSSITACALLREQGQVRIERQRFTTMTRDLQDLAAWLRQLQVTHVAIESTGVYWKPVWNVLEGQFTIILANAQHIKNVPGRKTDTKDSEWIAELLQHGLLRSSYVPPEIIRDLRDLTRARVRLSQEASRLGSRIQKVLEDANIKLSSVASNTLGKSGRAMLDAIVGGQTDPEQLADLALGHLRSKIPQLRLALEGKIREHHRFLLKRLLHQLRFIEDEIDLLDQRLEQLGQQDSTLAAAVNRWITVPGVDRIAAWSLAAEIGVAMEQFPTAAHLASWAGLCPGNCESAGKHLSGKTRRGSPWLSRMACQCAWAAARTKNTYLSVQFRRLAARRGKKRAILAVAHSILVIAYHLQKNQRDYCDLGSDYFDRLNADGLKRYLVRRLEALGHKVTIEGAADAA

SEQ ID NO: 292743 - protein, 337 aa, unidentified
MNSNQNNQKHFVGTDVSKETLDVTIFFNSSKHFHQQFSNDSKGFKQLQKWLETYPEFSFENALFCMEHTGIYTRQFVEFLLSKEAKVWMESALHLKRSMGMTRGKNDKIDSLRIARYAMTHQDQARLVNLSNKTLLLIKDLMSARERTKKAYQSIKVSIDEMQRVDAATAKELLRINKPALSGLLKSKMALEKRMMELIAMDPELNELFELVTSVKGVGNVLATELIVYTHAFKRMDEAKQLACYCGVAPFSHTSGTSVHGRNGTSNFANMGLKSTLHLAALSSIRYEPELKTYYQRKVAEGKSKMSVINAVRNKLLQRVLAVVKRGTPYQENYLVN

SEQ ID NO: 292744 - protein, 412 aa, unidentified
MKQIRTKVAGLDVHRDNVVACTRLASPDGSGEVAKARVATTRKGLGELAAFLTGAGVGTVAMEATGVYWKCVYYALEGLFAELWLCNAQHVKNVPGRKSALSDAEWLADVAAHGMVRPSFVPPPPVRELRELTRYRKTQVDARAHEVQRLEKVLQDAGIKITSVASGVWSQSSRAMVEALVAGERDPAVLAGMAKSTMRKKIPELEEALAGSFGRHHAVVCRAAIDHIDFLERSIAALTQEIAARLAPFDGALKVLRSITGVSDTTAQVIVAETGADMSRFPTAGHLCAWAGVAPASHESAGKRRPAGTRQGSQWLRRTLIEAARAAARAKDSYSSAQYARIARRRGPNKASVAVANSILAVAWHLLRAGALYEDPGAGYFERRHDPALEAKRLKRRIEDLGFDVTLVPKAA

SEQ ID NO: 292745 - protein, 339 aa, unidentified
MIAVKQVIGIDISKDSFDAQFAITNEKQEQRFVALAQFHNTLAGFRKLSRWAKKMVGPSTGPLWFVMEATGVYHEHLAYYLAEQNQHVTIVLPTKMKNYVKSLDIKSKTDRLDARAIAQFGLERMLQPWQVPSTQLRTLKALVREYDTATEQLTKIKNQLHAKDHSYRPAMQTLARLDAQHKLYEAQLKAIEDEIRALVEDDDDLHARINNITSAQGVGFMTTVRVIAETNGFALITNAKQLTSYAGLDIRIKQSGLRSGKPSISHRGNSHLRRAMFMPALAATRCNPALRRFYLRLVQTKANKMVALVAVARKLLCLIYALWRDNVPYQRNYRPTVVS

SEQ ID NO: 292746 - protein, 343 aa, unidentified
MKITAIGLDLAKNVFQVHGVDERGHALVKKTLKRAQLAAFFASVPACLVGMEACSGAHFWARKLQGFGHTVRLISPQFVRPYVKSNKTDAADAAAICEAVTRPDMRFVPIKSIESQGLLVLHRARQGFIRSRVAQTNQIRGFLAEFGIIIPQGAYHIQPRVAEILEDAENALPGTVRELLLQLVAHVRYAHEQEQLLEARIKRWHKDNEASSRLAQIPGIGPLTASALVASIGDVSAFRNGRQLAAWLVLVPRQHSTGGKAHLLGISRRGDSYLRTLLTHGARSVIICAKQKPGYEQSWLGRLLKRKHHNVVVCALANHNARVVWALLKHDRQYRADFSPQAA

SEQ ID NO: 292747 - protein, 324 aa, unidentified
MKKDTPYFGIDISKDFFDVMSQKGVHYQFKNTPKGFSDFLKILTKKSHCVMESTGYYHYQLAYFLVGNNILVSVENPLSVKRFIQMKLSKIKTDKRDAKMICEYAQCVALKLWKGESEAQQECLQIIRMLSVYGKQRTALKNKIHGEDTLGNTRTLVVKSIKRSLKSIKKETDLLEKQLLEIVKKSHQDLLTRLESIPGLGRKTSLMLIVLTDGFDRFETASALCCYSGLTPTIRQSGSSIKGRPRISKMGNPKLRNLLFMCSFTACKYNKNCKALYDRIVAKEKSKKLALIAVCNKLLKQAFAVAKSGLPYDENYRSTLAKNN

SEQ ID NO: 292748 - protein, 310 aa, unidentified
MHEEVWVGVDVAKAHLDVCVLPGDESWRTSNNEVDIAELTQRLQALEPRGVILEATGGLEQALVVALLDAGVPVHVMNPRQMRDFARAIGRLAKTDKLDAAVLALFGQTVRPEPRELPDEATQTLKALVARRHQILEMLVMEKIRRQQAPKRVRKSIDVNVAWLKKLLQDIDDDLDATIRSSPVWREKDDLLRSVPGIGRVVSSVLMAGLPELGRAARRKLAALVGVAPFNRDSGLMRGRRTIWGGRSAVRVALYQAVLVATRHNALIRAFYQRLLAAGKPKKVALVACMRKLLGILNAMLSSGQRWQPA

SEQ ID NO: 292749 - protein, 357 aa, unidentified
MNNSSAKISYQGKKVFVGIDVHKKSYSVVAVVEGIVAKKWRTLASPDQLAEQLQRYFPGASIYTAYEAGFSGFVLHRVLTEAGIDNLVVNPGSIEVAVNNRVKTDKRDARKIATLLEAGRLPRIRVPSPQQEQERLLTRTRQQLVEERSAIKNRIRMKCHQMGLIDPNDNREMSHKLVEEMLAQSPSPEFTLVIKAYWSVWKSIETQIRKLEQKLKEQAKTDPNETIYRSAPGIGFLSARILSLELGNMSHFANERQLFSYTGLTPSEFSSGDTVRKGHITHQGNKRVRYILTEAAWTAIKKERHLKEFFERLYPRTGKKKAIVAVARKFIGRIRAAFRHQTTYQINPIISEVAQTG

SEQ ID NO: 292750 - protein, 376 aa, unidentified
MNAVGIDVSKGKSMVSVIRPFGELVAKPFEVRHTSSELSELAKHLKSLEGETRVVLEHTGRYYEPIAQMLHDSGIFVSAVNPLLIKEYGNNSLRKVKTDKADALKIARYGLDNWTELRQHAPMDTIRYQLKSMNRQYGLYTKNKTAMKNNLIALLDQTYPGVNALFDSPVRADGSQKWVDFAASFWHVDCVRGIEQTAFVERYRKWCRRHGYNFNVGKAAQIHAESKELIAMLPKNPLSKVMVQEAITQLNAVSKTVEVFRKEMNRLARQLPEYDVVMSLYGTGPSLGPQLMAEIGDVRRFAHKGSLTAFAGVDPGANQSGTYEAKSTRSSKRGSPELRKTLFVLMTILLQKAPSDDPVFQFLDKNEPRASPIMST

SEQ ID NO: 292751 - protein, 355 aa, unidentified
MTFKIREDSVAASVIGIDIGKEVFHLVGFSADGRLVLRQKIKRLALEATFKKLPPCIIGMEACLSAHFVSRTLRGMGFEPRIIPAIYVKPFNKGQKNDYNDAEAIAEAALRPNLRTVSEKSQDQLDLQALHRVRSRLVSRRTATINQIRAFLIEQGITIRKGLRAVQNSLLTLLDERRDEISPRMRHIILDLHDDWMRLDARIEAISGEIAEIGQSEAHCRALRTIPGVGPVISTALVAAVGQGEAFDHGRDMAAWVGLVPRQYSTGGRTTLGRISKRGSRYLRTLLIQAAKIILMRPKKWPELSFGAWLAEADQRMHRNKLAVALANKLVRIAWAVLRYGRGFDAPRDTVAEAI

SEQ ID NO: 292752 - protein, 319 aa, unidentified
MKTLSHPSIIGIDVSRDWLDIHCLPDGQSLRLPNTAEGHQQLIALARERGALVGFEATGGQEWPLWTALEEAGVAARQLPPAQVKAFAASCGTRAKTDRIDAALIARFMAFRPEAGRRLPDGKVRLLRMLVVKRRQLVEMRKRLIVQMKAWDKQGAGAMFADMNAELHDLLTAQIARLELQIEQVIAESEVLARRAALLRSILGIGPVASAALLAEMPELGQISATQAAALAGLAPFAHDSGALRGRRAISGGRQQLRHVLFQAALVASCHNPTLKRFAERLRQAGKPHKVVITAVARKLLSIANAICKSQQMWHPQDT

SEQ ID NO: 292753 - protein, 345 aa, unidentified
MIIGCDFHPSWQQVSWLDTETGESSEGKLVHASGETQAFYRQLPGPALIGMEATGNSQWFIEMVEDLGHQIWIGDAAQIRASYVRKQKTDKRDAAHILRLVVEGRFPRLWTPDREQRDLRQLVLHRHKLVEIRSRVKNELQHLSLNKGMQKKRTLWSQAGMQLLRELPLKPWASCRREDLLGLLAMLDQQIGKLDQAVQKAADQHPQAKLLMTQPGVGPNTALAFVLTIGDVTRFPRGKQVASYLGLIPREESSGGRQKLGAITKQGNRLVRSLLVEAAQIAVRFDPGFRKQYLHRCHQKPKGVAKVAAARRLAVRLYWMLRTQVGYPEIVRIESSPRVPLVGAS

SEQ ID NO: 292754 - protein, 386 aa, unidentified
MQKLNDLSRSLTPLEPDGTLIAVIEMSQSSWLVAGIVPGVERQPLKKLAVDESALLKLLHRWREEAEKAGRRIERIAVAFEAGRDGFWLARWLRARSIEAHVIHASSVAVSREHRRAKTDRLDTELLKRAFLGWLRGERDHCKMVAIPTTKDEDAKRPNRERESLVGEQTRIVNRMKAALIRLGIRGFNPKLKKAAGRLEDLRTPEDEPIPPNTLAELRRDMERRRLVSDQIRQIEEARLDRLKQAPGDGPHAMVRLLARVIGVGIETADMLVQEVLARNMRDRRAVARYAGLTGSPDESGTKRREKGLARSGNARVRRGMIQLAWRFLMFQKESALAQWFRARTETARGTRKTMIVALARKLLIALWRLVREGVVPDGVVLRPAQ

SEQ ID NO: 292755 - protein, 327 aa, unidentified
MKSIYVGIDISKNTLDFCVRSSGVASFHKIGNKTKSIRKLLKSIAKIDSKAFIAMENTGYYNYNLYQTLKGFDFNVYVIDPKHIKRSIGLVRGKNDKVDAKRIAIFIERNHQDFECWEPCSEAIRSLKILMGQRRSKIKQRKGIKQQMADLKDIVFNGSTRKLIKINQKAIKELDRHIHEIETLIRAEIKSDPVLQEQLKRIKTVPGIGDVTAWMIAIKTEGFQRLTDPRKLACFAGVVPFEQQSGTSLKTRPRVSKMADMALKSVLQMAAMRAVRMQNDLQVYYLRKVEEGKNKMSVLNAVRNKLLHIAMALIKNQTNYKNRLELS

SEQ ID NO: 292756 - protein, 402 aa, unidentified
MNSVGIDISKGRSTVAVMRPFGEVVISPFEVRHTDSELSELARQLKSLDGETRVVMEATGNYHAPVAKLLHDAGLYVSVVNAKLVHGYGNNDLRRVKTDKKDAVKLANYGLDRWLTLPRYVPEEDTRLLLKNCYRQYRQYSKVQTVLKNNLISLLDMVFPNVNRLFSSPIRGDGSEKWVDFVAEFWHCRCVSEKSEKAFTNKYQRWCKTHGYNFSEAKAHTIHAEASGHIGIMPKSETTKLLVEQAVVQLRATSAALIALKREMLTLAAQLPEYPVVMGMFGVGPTLGPQLIAEIGDVRRFYSKKALVAYAGLDAPPNDSGDVTGRHKSMSKIGASSLRRTLFLVMGIYLQNAPLDEPVYQFMDRKRAEGKPFRVYMMASANKFLRIYYATVKAYLESLEQV

SEQ ID NO: 292757 - protein, 448 aa, unidentified
MNNLMPPENAAVSPPPPPVVAPPVVCWVGLDWADKKHCLAVRTVPTGPAQIQTVDHTPAALDDFFLRLRAQHPEGRIAVGIEQSRGPVLYALLKYDFLLIYPINPRCLSDYRNAFKASRAKNDPSDADLLGEIPALHPDRLRPLEVEEPITRQLRLLVEARRQFVADQTQASNRLRATLKCYYPLALDLFGEDLITPMTLEFLRRWPNLAKVKATKPGVLRAFFYRHNSRSEEKIEQRLQAVLQARPLTEDAALLQPFQFQMERLLATVRTVQQTIDQYDARIRQVFATHQDAALFQDLPGAGPVLAPRLAAAFGTRRANFPLAQNVLCFSGIAPVQKQSGTQNLIHFRYARPLFLHQTFVEFAKCSILKCDWARLLYEHELKEGSAKWAALRKVAFKWIRILWRCWHDGKAYDETTYLRSLQRHGVKLYESLYAQLPPLPQPTVNNS

SEQ ID NO: 292758 - protein, 415 aa, unidentified
MKRWVERRRWDLIFVGVDWAEKHHDVCVMDGAGTSLQSFRIAEGIKGIERMHATIAEHCQEPDEVVVGIETDRGLLVGALATAGYEVYAINPMSVDRYRDRHSTSGAKSDPGDAKVLADLVRTDRHNHRPIAGDTELAQEVKILARVHQSFIWDRQRQVNRLRSTLREFYPQALEAFGTDLSAIEAVGVLSIASTPELGRKLSRSKIASALRRAGRSRRIEASAEKIQQALRSPQPQASAGLSAAFGTVVSSLVELIASLNERIAALEAELEQHFESHPDAEILTSLPGLGVVLGARVLGEFGDDRTRFRDAKSRRNYAGTSPITKASGTRRVVLARFARNRHLFDACYQWAFCSLTLSPGARAYYDRQRVKGKTHSQALRSLANRLVGILDGCLRHRQIYREEMAWGEGLALAA

SEQ ID NO: 292759 - protein, 316 aa, unidentified
MVVVGFDVGKDSLFGARLDRSGVVKEHWELANTQAALLPLLRGLRRKYKHLLVASEATAEYHRPLAQLCLTLNIPFSLINPITTKQFTRATVRKKKTDKTDAEVIARVAVQGQGTLVTKETFNDIKPMLRTAVKLIQMSRMLTLVQYHVADVLSNEPTLLQQVATCQEALDVAAATFRSTARQRVSPSLSKLLQSVPGIGPQTAALLIAELGDITRFKNANAVVAYMGFDPRVKQSGTSLKRNTHLTKRGSPYLRRALYLAAAAAQRSDPELKATYDKKRAEGKRYREATIVVARRVTTRVYAVWKRGTAYQKKIA

SEQ ID NO: 292760 - protein, 400 aa, unidentified
MLSIGIDVSKGKSTVCGMKPGGEIVYAPFEVQHTREGMSELVSLLRSSGEEVRAVLESTGSYHCPVVAALLENGIFVSVINSLRMKRFCSQSIRKVKTDRIDAMQIALYGLAYWQELQPTRLPEDTYRELQRLARQYYQMTSMLIKAKVDFNALCDQVLPGMQELMSDHAGRHKLSDFVLRYHHTTHILEMGETRFRKDYCKWAEKKGYRNHERMAALIFATAQNGIPVLPNAPSTQIVITEAIRVLHTVEASRDAILTQMQALAKTLPEYSLVREMPCIGDTLAPRLIAEIGDVRRFHSKRALTAYAGIDAPPYQSGKFCANNRHISKRGNRYLRKTGYEVMQSYVMHKPANDPIFTFIEKKRGEGKSGKLAMVAGLNKFLRVYYGKVTELYRSLPAIE

SEQ ID NO: 292761 - protein, 347 aa, unidentified
MTIVEARRTITGGVDTHLEFHVAAALDPVGALLGTKSFGADASGYAALLEWLSEFGEVTKVGVEGTGSYGAGLARFLSRHQIAVIEVNRADRGEQRRSGKSDPLDAIAAARAALSGKAKAISKGKDGHVESIRVLLVAKRSARQARAKAIIQMRNLGITAPDELNRRLRGLTVIGLVTEGTRLRPKRSSDVVPAATKTALSSLAHRILALDDELEELNAQITEHVKVVAPELLARSGVGPDTAAALLVAAGDNPERLHSEAAWAHLCGVAPIAASSGKSSGHVRLDNGGDRQANAALWRIVLVRIAHDPRTTDYFDRRVKEGLTKRDAIRILKRYVAREVYRYLPRG

SEQ ID NO: 292762 - protein, 481 aa, unidentified
MSQQKKDSKVLGEEQIAVGKGKRGRKRKGMCLEDRPILEANAAGIDIGAREIFVAVPPDRDEHPVRVFSTFTEDLEKMAQWLVSCGITTVAMESTGVYWIPLYDIVEKHGVKACLVDARGMKNVPGRRTDWHECQWLQFLHSVGLLRAAFRPDGDVCAVRSMMRHRTELVEMTSQHIQHMHKALTQMNVQIQHVISDLTGVTGLAIVDAIIAGQRDPVALAKLRDPHIKASEETIRKSLVGNWRAEHLFTLEQSRQSYQHYQEQIGACDEAIEKLLLAFVPRVDPAERPLPTDRKRKQRGRKKKNVNPKTGFDLRTESYKLFGVDLTQIPGLMAMVLTLFSEVGRDMSRWPTAGQFVSWLALCPDNDISGGRVLWRGMRRVHNRAGDLFRMAAYSLHHDQTPLGDYLRRMKSKLGPAGATTATAHKIAIIFYTMVKKQVEYDASIWAERDAQREKRFEAKLKRQAQQLGYKLVPIEEKPTA

SEQ ID NO: 292763 - protein, 348 aa, unidentified
MTLTIVETRAITGGVDTHADMHVAAALDPIGGLLGVQEFPATPAGYGRLLGWLGGFGTVCLVGIEGTGSYGAGLARHITRAGVRVVEVDRSDRQDRRRQGKSDPLDAVSAARAAQSGRAAGASKGRDGVVEAIRALMVAKRTARSERTQTINQARSLVLTGPDDIRVRFAHHTAAGLVAALAALRPRPGEVVGYATRIALRELGRRAEFPGAQLGRLDELIVPLVTARAPGLLSLYGVGPDTAALLLIAAGDHPERLRSEAAWAHLCAAAPIPASSGKTVRHRLNPGGDRQANHALWRIVITRMSSHPPTRTYAGRRGKEGLSKTEIIRCLKRYVAREIYPHLRPPAG

SEQ ID NO: 292764 - protein, 339 aa, unidentified
MMNFSNHLLNRKSKVMKNIIIGIDISSKTLDICIKNETVSYFSIENKVPVIKRFLKSYSREKVIIAMENTGRYNWNLFEVLEKFDFKVYVISALHIKKSIGLVRGKNDKIDALRICNFIEKNHQESREWKPCSCSIKKIKILLTERASRIKIKKQLIVQQHDYKLMKSIGLDKQLKDLNIKLLRDIDVQIKIIENDIENIIQNQESLNQQQKLIKSVPGVGQVLSWTLLSKTEGFTTITDPRKMACYSGVVPFDFQSGTSLKRRPGVSMLADKNLKTILHLAAMSAIRSDNDLRTYYIRKVDEGKNKMSVLNAVRNKIIHRVFAVIKNQIPYQKDLVLS

SEQ ID NO: 292765 - protein, 478 aa, unidentified
MIYSVGIDLHKGRHRVYCLDEKAQVCDAFSFQTTPEGLATLEQRIFRDGSNPVVVFEPAGLSWLVVAAYLRSQHPGCRLVKAKGQKVAALRRYLRGSAKSDRIDALTLAKMPFIDPERLDELYLAPAETHALQRLTRQRKRLEDHITAHKNRIGTIVDGYLPGVRQAFSHRWSAQARAFLHSRINPFAVVRDGEESLHSFLTQAKAQDKGERAESYLVYRACQNVLALLELCQAARSLDEDFFVDLQDEIDRELRLMEAKEAESETLDQRIEELYRKLHPSDNLRTIPGVGEHTAPVFVASIGDPTRFPGQSAFANWTGVVPGAKQSAEAESKGLRMTKAGPATIKWALYQAGQIGRQWDPQLASVYYRQMVHHGKNHKQAMGAVMSHMGARVFRVLREDRPYELRDTEGKPIGKAAAKVLILAKYQVPEDIRQERRRSKGRKANTPESRKKEGTVAGRVYEAVVAPQPVAILPSPGI

SEQ ID NO: 292766 - protein, 407 aa, unidentified
MEVLYPRCAGLDVHKDTVVAAVRCVSAPRHHEVRSFPTTTAGLLALADWLAAHGCTQVAMEATGVYWKPVWHVLEGDFELVLANAQHIRTVPGRKTDVSDAAWIADLLAHGLIRGSFVPPARIQALRDLTRTRKQLVREVAQHARRIQKVLEDANLKVASVLANMLGKSGRAMLAALIAGETDPERLAALAQGTARQKHAALVEALRGHVTPHHRTLLALHLQLVDALQAALAELEAAVGNALAPIRQQTELLMTMPGVSDTVAHVIVAEIGLDMTRFPSAAHLVSWAGLCPRSDESAGKRRSTRARYGAPWLKTTLVTAAWAAVHTKGCYLQAQFLRLKARRGAKKAILAVAASMLGACYYMLRDGVPYRDLGADHFARRDKAKTIGRLVRRLRELGCEVDVTHAA

SEQ ID NO: 292767 - protein, 430 aa, unidentified
MEASITTPGAVAAYIGIDWADKKHAIALRSAAEPNKIEHQLIDQKPEALMDWIGQLEQRFGAQGKILVCLEQSRGALIYHLMGYEFFELYPVNPLQLARYRETFSPGGAKDDRPDAELLNELLFCHGDRLRALKPDSELGRKLSFFNQGRREAVDQRTRLSHVIKSQLKVYFPLALELLDQDTSTALAADLLLCWPTLEAIQKQNTQRLRKFFYGHNCRGEQRMLQRLELIQKAKALTKDPALIEPAALRVQMLARQLKHLLPDIVRYDNKIAQLFAAHPDRFLFENLPGAAEALAPRLLSAFGSDPERWQSALEIATLSGIAPVRRASGTKSGKKGERKASVHFRQACPKFLRQSFHEFAGCSIRYCSWAKAHYDHQRARGKGHHAGVRSVAFKWIRILFACWKNRIPYDPQRYLKALHHRGSPLADPC

SEQ ID NO: 292768 - protein, 424 aa, unidentified
MHTTQRKRMKTWPQLTHYAGFDWSRDHHDIVIVDPQGQIAAEFRIPHTLAGWQDFRQKIAAYPALGIVIETNQGAAIDQLLQIDLTVYPIHPVAAQRYRQRKAPTGNKTDRLDAWAMADALRLDGSQWQALQPLDPLTQQLRLLCRDEISLIEQRTALINQLRQALSEYYPAALEAFDDWTRPSTWKFVLEFPTPEILLKRKRSRWEKFLHKHKLWRPDTAEKRLEIFAQAQAFCGSPAVTAAKSLLAVSLARLLGALQNQLDEYRGQIEKLFAQHPDSGLFGSLPGAARYLAPRLLGEITADPGRFDNPLALQCLAGTGPVSYQSGQVHKVKVRHQCHKLLRHIIHLWADCARHAAPWAQTYYQKKRQNGMSHACALRCLGQRLLKILWKMIQTRTPYNADLHTKNQLAHGSWVLQLMPSKSA

SEQ ID NO: 292769 - protein, 436 aa, unidentified
MRGCRCSMIMGFTKPIEHFNLQRKKVITMNTLYVGIDVSSKSNVIYLMLPNGDKHSNFSVANSHEGSTQLVKRILSALTSHSLDTVLIGLEATSVYGDNLVYFLREDATLAPFNRKIHVLNPKQVKKFHDTYNDLPKNDYVDSFVIADCLRFGRINKEVYMGDYRYKALQNLTRARFFAVQNLVKEKQRFMNVLFKKYSTMTQEKVFSDAFSTTALAVYDEFESAEALANMDLHELTDFIIEKGKNRFPDPDAVAKAIQKAARSSYRLPKTVNDSVNQVLSISITSMKALESQIKEFDKAIKAQMELLPNVLISIPGIGPVYSAGIMAEIGDINRFNSQAALAKYAGLAWKQHQSGGFESEVTRLIPSGNRFLKYYLCEAAFSLVRCDKEYSDFYRLKYKEVNRCQHKRALALTARKFVRLVFRLLKDNRLYCPAK

SEQ ID NO: 292770 - protein, 411 aa, unidentified
MPKIVHRVCCGIDVHKRFVVACIATTDDNLVTTYSRQRHFPTFTKDLRLLAEWLAENNCKDVCMESTGKYWIPVFNVLEHTCDCVLAHPKYAKAIKGKKTDKRDSKWIADIFKHDLIVGSFIPPPEVRQLRDLVRYHNKLTSYTTGEKNRAQNCLTVSNIKLDDVFSDVFGKAASAITARLLESNEPFDVTPYLTKNIKASPEEIQAAVDGEICVEQAEKLRIIRSHMDSLNLCKANLESAILTIAEKFLPQINLVLTVPGIKAFSAVAIIGEIGVDMSVFETSRHLCSWAGLTPQNDQSAGKKKTTRISRAGAYIKPLLVQCANAAIRCKDNPEIVNRYNSIKKRRGHKKAIIAIARMLLTAIYNILKKNEPYNAELYRNSDKPPIQRVVTMEQAVFILQRQGYLVTDSP

SEQ ID NO: 292771 - protein, 332 aa, unidentified
MSIIGCDLHTRYQVIARLDTETGEVTTRRLEHEGGEAKAFYAGLGKPALIGIEATGYTQWFERLVADLGHELWVGDPAEIRARAVRRQKTDTRDAEHLLDLLINKRFPRVWIPTPEERDYRQLLKHRDKLVKMQTSVRNQLHFLAMSQGVCWKRRLWSTRGRRELEALQLGRWASVRRQELLAFLDGLAPRIEEMDQAVKAEALRRAEAVRLMEQQGVGPVTALAFVLTVGPVERFPSSRKLVSYLGLNPREDSSGGHQRLGHISKQGNEMLRWLLVEAGHTAARLDPELGRVYQRLKFRRGGRVAKVAIARRLAVRLYWRLRNGHAGSHVQ

SEQ ID NO: 292772 - protein, 388 aa, unidentified
MQTAADHPEAPTAIRHDLGAIFISLELSRSTWLITSLSPGGGKKMSKHSVRGGNVAGLLERFAQLQEKARARTGRTFPIIVIQEAGLDGFWIHRVLQNEGIESHVVDPASVATSRRRRRAKTDRIDGEALLRTLLAYKRGEPRVCAMVKAPTPEEEDRRRLCRERKVLTNERVQHVNRIKGLLFGQGVSGYEPLRRNRRQQLNELRTGDGRPLPKHLKTQISRELDRLELLLEQIKAVETERDALLAAQKVALPGPAAMLLDFNGIGPEFTAVLWSEGLFRHFDNRRQVASYAGLAPTPWQSGSVDHEQGVSKAGNPRLRTTLIQLAWLWLRHQPQSALALWFKERVARNGGRHKKTTVVALARKLLVALWKYVTAGVVIEGAVMKTA

SEQ ID NO: 292773 - protein, 427 aa, unidentified
MDKKDINRIERFRQFKKRVRGSQEILIVGIDIAKSKHHAFLGNANGKTVLKGVVVENTASGFEHLLTMVQFYMDRDGFKEVVFGVEPTGVYHKPLAEFLINQGFLVVYVTNEAIKNNRSLLNGRWDKNDTKDSANVTDLISQGKCHFYDLPDIQLRDIRSLLLLRRRLRKQLHSYRVRIRNNLVAQYFPELDRLWNQSELENLAIVRWCLSPHKIDQLKFEEFYQMVTSRNRGFRQHRRLHKIWEIAPYSIGCRPGSALELEAKVLIDNINQIKEQIEEIDSSIKDLCQSYEEYEYLQTIPGFGPYISAVVLAAIGNPFRFENSSQLIRLAGFDLNANRSGKKSQAAVPVISKKGKADLRFALYQAALIATSVTTHLRAYYHKILEGRQREPGIRTKMRVKLAVKLLVVAWTLMKKKEPFDPAYLNT

SEQ ID NO: 292774 - protein, 431 aa, unidentified
MAVRVEGADVLGVGIDWAEEFHDIALGTAEEGVIEQFRIEHGPAGVARLIGRCLALEPDPAEVRVVLETRHGLLVEALLDAGFTVVPVNPDLVARRRGPARKKDDAEDARICCLLALDRHAALKRLVGHGQLGGELRAIARDDERAARDQRRLLNRLRADLQATYPAALTLAGADLGAPTVLRLLDRWPTQHQLAAATRDELVAFARAGRHGWPDRFADRVTAALATPTLPVRDYLVRAKTAGIRLAAVQLLALHEARRGWERRMGEILLGAPRTGRDHTAKDPDPGNAFPGGEIYLSFPGLGDCLAARVAGEIGEHHTQFDTPNALQCYAGRAPVTRRSGKSDFVVARRLAHNRYLGDAVHQWAFCSLNLSPWAREFYDSKIAAGKSHHNALRALGNRWLEILWHCLNKGVLYDEATHQANRNHALGRAA

SEQ ID NO: 292775 - protein, 341 aa, unidentified
MKKELDLGLDVHKDCIATAVAEQGRRGEVRDTGVISHDLHAVEKWIGRLRQAQGKDTLIRACYEAGPCGFGLARRLQQLGVECQVVAPSMTPTRAGDRVKTDKRDAGKLARLLRAGELTAIYIPEPTDEAIRDLCRARTDAVDDRRRSRHRLKGFLLRHGYRYQGKSAWSAARQRYLRELVLPHPAMKVILEEYLISIEAAGERIERCEAAMRDLLSGWRLEPAVQALMAMKGFQIVAAMILVSELGTIDRFTHPRQVMAYLGLIPSENTSSDKRRQGAITKCGNAHARWLLVECAQHYAPPPKVSKELSRRQEGQSREVRAISWPCSRLLLCREGPSFRR

SEQ ID NO: 292776 - protein, 355 aa, unidentified
MLSVGLDLHKRYSQLEAVDEAGRKRAAARVNNERGEIAAFFSSLGEPCRVVLEAGWNWGLMHDWLEGMENVTAVELAHPFGVRAIAAAQVKTDRIDAGKLAQLLRTDLIPRAHIPGRETRELRELVRQRLFLVGLRTRIKNRVHALLDRHHVVPPPMSDVFGKAGRTYLAKVELPGTAQPMLDQDMRLLDAIVGEVRATERLLSQQVGDDPRVRRLLTIPGLGMILATLIALEIDQIQRFARPAKLVAYAGLVPTTYSSGGKTSHGGLMKMSNKWLRWALVEGAWVAVRRDPYFRAQYGRRSKTKGPKTAIIAVARRLTEVIWHVLSEDRNYQAHPPRQNPEGYASKPRPLSLKD

SEQ ID NO: 292777 - protein, 381 aa, unidentified
MPATTRTLIRLPEPPVLYLALELSNRSWKLAFSTGLGQKPRLRSIPARDLDALLREIASARRRFHLDDAHPVLSCYEAGRDGFWIHRFLSSEPGRHNLVVDSASIDVKRRRRRIKTDRIDATKLLAMLVRYHNGEADVWSVVHVPSPDAEDARHLHRELLTLKAQRTRITNRIKGLLAAHGLTVSSMTRAFPRQLAALELWNGEPLPPLLHERLLREWDHRVLLSKRIRRIEQLQLERLQDTSDPAIATVRQLMTLKGIGLQSAWLFTFEFFAWRYIRSRQQLTALAGLSPSPYQSGDEARDQGISKAGNASVRAMALQIAWGWVRFQPDSTLTQWFDRRFAHGGRRVRAIGIVALARRLLIELWRFLETGALPEGAISSS

SEQ ID NO: 292778 - protein, 336 aa, unidentified
MTNVALFVGLDYSESGVQVCLLDRQGRQVANRLCPNDWRAIAGFAAQHGTVVQAAIESCSGAANLAEELATRAGWSIHLAHPGYVERMKQSPDKTDYQDARLLADLVRVGYLPRVWLAPAVVRDLRQLVRYRQQLAEQRRATKLRVRALLREHRCQAPAQLNPWTKGWLRWVQQAAEVGEQSRWVLNKHLAELVRLTGELGEVEQRLTEATANDALVKRLRELPGVGPVTAWVIRAEVGRFDRFTSGKQLARFSGVSPRNASSGNRQADAGLIKASSPLLRAVIIETAHRLPRQEIRWAKFRARLQAAGKKGSVIAGAIGNRWVRWLYHQMKEVAA

SEQ ID NO: 292779 - protein, 410 aa, unidentified
MEVVHAHCAGLDVHKDSVVACARHMVDGKITTSVKTFNTTTAELILLSDWLSGEGATHIAMEATGVYWKPVWHILSDGEFELVLANAAHVKNVPGRKTDVNDATWLADLMAHGLIKASFVPDEPTQQMRDLLRTRKQMVRERSSHTQRIQKTLEDANIKLDSVVTDILGLSGRRIIEALIAGQTMPQALATLAHRRIHASTDELEAALRGRVTRHHRFLLKLHLDQIDAFDAAIARIDEEVSANVEPFRIAIEMLAAIPGVGDLSATVIVSEIGIDMSRFPTAGHLISWAGLCPKNDQSAGKRRSTRMKKGAPWLKSTLVQCAWCASRTKGSYLQAQYLRLRSRRGAKKAVCAVAASILTAAYHMLKNGTVYQDLGASYFDNRAKDKQALRLVSRLKNLGFQVQIKPVAA

SEQ ID NO: 292780 - protein, 342 aa, unidentified
MGEVTIIGVDLAKNVLQVHGAAADGRPVFRKKLSRPQFARFMAEQRPCLVAMEACASAHHWAREMARHGHEVRLIAPHYVKPFVKRQKNDAADAEAIVEAAMRPTMRFVEPKSADQQARAVAFRTREQLVKQRTEAVNALRSHLYEFGHIAPEGIGYVPRLERVVEEPDAGIPDLARDVCRMLIEQITHLTDRIKALKAKIAAMSSEAEMPRRLQTMPGVGPITALAVETFAPPMEQFRRGRDFAAWLGLVPRQHSSGGKQKLGKTSKMGQRDIRRLLVIGATAVIRWASRRGAPAGSWLARMLERKPIPIVAMALANKMARGIWAMLTRGESYRGPVLIGA

SEQ ID NO: 292781 - protein, 457 aa, unidentified
MHIVYEHCCGLDVHKKTVVACLITLNAQGQRQKEIQTFGTMTRDLLALLDWLRAAGCTHIAMESTGVFWKPIFNLLEAEMTVLLVNAHHIKAVPGRKTDVKDAEWIADLLQHGLLRPSFIAPAPQREMRELTRYRSSLVADRARVINRIHKVLEDTNLKLTSVVTDVTGVSARAMLRALLDGQTDPWELANLARGSLRGKQIQLAQALVGRVKEHHRFLLIHQLTLMDVLDEHIAELDREIAQRIGTTEQEPLREPAEEAPQQETSVLGSANSAASHEKSASAQASEPGLEGYAQALARLDMIPGINRRIAEIVLAEIGINMRVFPSAGHLASWAAMCPGSKVSAGKRLSGKTSKGSPWLRAALVEAAHAAARSKDTYLGEQYRRLAKRIGKKKAIIAVAHTILVISYHMLKEERSYQELGSTYFEERERETVKQRAIRSLERLGYHVRLQEGDDAA

SEQ ID NO: 292782 - protein, 338 aa, unidentified
MELYAGIDLHSNNSVVTVLDEQDRTVYAKRLPNDLCSIVAALRACAGEVRGVAVESTFNWYWLVDGLQAAGFTVHLVNTAAVKQYDGLKHGGDFSDARHLAHLLRLGILPVGYIYPREERAVRDLLRKRSQLVRQRSTQILSIENLIARNLGVRASGNEVKRWDAKFIDAMELLEEHKQALKANLAVMNCIDGQVVELERCILAKVKLREDFKGLKTVSGIGQILALTIALETGDIGRFAGPGNFASYARMVDSRRESNGKKKGVGNAKCGNKHLAWAFIEAAHFAVRFDATIKRWYQKKCASSLSVVAIKAVAHKLARACYHVIKDGTPFDAAKAFG

SEQ ID NO: 292783 - protein, 415 aa, unidentified
MALKIVYKICCGIDVHKTFVVACIASTNDKGITSYESHRFSTYTSGLKTLLQWLLDRNCKDVCMESTGKYWIPVYNILESDCSIVLAHPKYVKAIRGKKTDKKDAKWIADLFKHDLVAGSFMPPADIRQLRDLMRYRFKLTCFKSSEKNRLQNCLTVSNIQLGNVVSDTFGKSAQAILDKLLENPADTSFDLEPLVYKSLKKKLPELRDAIDGYITTEQAGKLKVIKAHYENLESRKAELEELILALAAPYQQELAILQTAPGISSDFTAIGIISEIGTNMEAFPSAKHLCSWAGLTPTNNESAGKKKSVRVSKAGCYIKPLLVQCANAVVASKKHPEIRNRYLRLKKRRGHKKAIIAIARMLLTALYHMLKNGENYNAELYQKSDLLPVDREITVEQALMIARNQGYKIKSATA

SEQ ID NO: 292784 - protein, 355 aa, unidentified
MNSFRYIGLDVHQDTISAAVLNRDGKLLMQSVFATRAAAILDFLHGIKGTLHVTFEEGVHSAWLYDLLQRKVALVLVCDPRKNKLLKSGNKGDLIDARKLAELLRNNSLSPVYHGAMSALEVQHRTRSYTMLTEDTTRVMNRLKAVFRSQAIRCHGRKLFRLDLRQSHLAQLSTPGLRYRADSLYRELDALHPLRLRAKREMLAECRKHPAMKWLQSVPFLGKVRTAVLIGRVQTPHRFRTKRQFWSYCGLALETHDSAEYRVIQGQVQRKSRPAQIRGLNWNHNHELKGLFKSAATMAAFREGIFREYYSGLLAKGMRPEMARLTLARKIAAITLKIWKEGETFNAEHIKPQAA

SEQ ID NO: 292785 - protein, 367 aa, unidentified
MIKNSTAFVGLDLGDKRSNVFMLDQGGELIEETRIPTTEPAFRRKFASLPPCRVAMEAGTHSRWASRLLEQLGHEVLVANPRRLRLIYENSRKADEADAEHLARLARLDPQLLSPIRHRGPEAQAHLTVIRSRDSLVRARTLLINHVRGSVKSTGARLLACSADSFHHRVEPSIPAELQPALLPIVQTIASLTVQIHAYNRQIEQLCQEQYPETQGLRAVGGVGPIVSLAYVLTLDDPDRFRKSREVAPALGLVPKRDQSGSRDPQLRITKTGDSYLRRLLVGSAQYILGPFGPDCDLRRWGLKLAERGGKNAKKRAVVAVARKLAILLHRLWVTGEVYDPFYHSHPDPTSLTETNRLVRQPEAVCA

SEQ ID NO: 292786 - protein, 426 aa, unidentified
MSVRDYSKQVARRQRIGNTTLVVGVDIGCASNAVGFMSKEGKVLGSYPNMPNSREGFEQFVKMTEGLKAKHGLTDVLIGLEPTGHYWRKFAYFAKGKGYEVRFVRTTALKHHRELDESSSAKSDKQDALTITNITREGKYIDTVIEDGRMRHLRTLAKVREKIRKRNVSAKNSLHAALDDYFPELKEIFWSMHSRGLWALLQRCPFPVDVVTLQVSTLKEIIARASRRRAEASRKATALYQAAKESIGLKQIGSADRYRLRMCLEEVKRTELMIKDIEREIRRMLKDIPHAAYLLSIPGIGPISAAVFLGELGNPSYFQSARQVVKYAGYDPQESDSGYRVSRKFISKKGRWLLRKYIFFMSMRVVVLSRYFKEYYQRKLQTKNRVGQLPRKKEVLCAVAIKLIKVIFALLRDKRNFEDTVSCPVE

SEQ ID NO: 292787 - protein, 347 aa, unidentified
MIVGIDAHKRSHTAVAVDASGRRLGQRTIGTTSEDHLALLGWAEQFGPQRSWAIEDCRHLSRRLEADLLAAGESIVRVPTKLMAHARRAARSYGKSDPIDALAVARAALREPDLPTAQLDGPARDVRLLSDHRDHLIAERTRVINRLRWHLHELDPGHEPPARTLWRPKHLTAIAARLAEFDSVVARLARAEIEDCRRLTHQIQALDEELQTIVKKLAPTLLDICGCATLTAAKIIGETADVRRFRSRHAFARHNGTAPLPVWSSNKPRHRLSRTGNRQLNAAIHRIAITQAHYHEPARQLLDRRREGGKNKAESLRVLKRRLSDVVYRALLSDAEHAASPIPLAAA

SEQ ID NO: 292788 - protein, 354 aa, unidentified
MKNQAIQYLALDVHQATVVSCLRDEGGNVVMWATVATEAKAILRLVQSAGPRVHVAFEEGTQAQWLHDLLIDHAERVIVCNVRGRSETTNKSDRIDAGGLSELLRLGALKPVFHGVPEILTLKELVRCYTALVNDSTRVMLRIKAIFRARAIPTPGVSVYRTSQCKQWLAKLEGGARIRAASLMTQLDMLLELRPKAKAAMIAAARRQPGWKILSSIPFLGPVRVALILAIMRTPFRFRTKRNIWPYAGLAVVKRSSADHEFKDGRLQRSKKAPLTRGLNRNHNPLLKSVFKGAAAAAAAKPGPLRDYYEASLARGVKEDLAMVTLARKIAAVALRLWKKGELWDPKKLTTQAT

SEQ ID NO: 292789 - protein, 316 aa, unidentified
MTASLLFAGIDVAKATLDIAVRPSDQTWQVIYDDAHVEALVTQLNDLSPTLIVVEATGGLERTLVAALLTAGLPVVVINPRLARDFAKATGRLAKTDRIDAQVLAHYGEAIRPSCRPLPDADTQQLRAMVDRRRQLVDMMTAEQSRLSTAPARIRDSIASHLIWLRQQLASLDNDLDERLQASPIWRERDDMLQSTPGVGPVLSRTLMSQLPELGALNRKEIAALVGVAPFNCDSGAWQGRRTIWGGRAAVRSVLYMSTLAATRHNPVIREFYERLLAAGKAKKVALTACMRKLLTILNAMVKNQQRWQPRVAKSM

SEQ ID NO: 292790 - protein, 338 aa, unidentified
MTIVMGLDQHRAQITADWVDRSTGETSRARVAPADRAGVREFLERFRGHGLEVALEATTGWRFVVEELRRVGAVVHLAEPAETAARRGNKKRAKNDRADARHLRELVMICRLPESWIAPDHILDLRARVRLRHTLSEQRGEWQQRIQAVLYHHGCPQRRNLMTGEGQRWLAAQPLPPCAREQVKVALAMIDALDAQLAPLTRELRAYARRQPGCRALTRHFGIGQLTAVTILAELGDARRFSSSREAVRYGGLDITVHQSDMRRAAGHLSRQGPPALRWALFEAAQSAARAGSPDRDYYRQTAERLGANRACLSIARKLLKRSYHTLRELGEEALQPA

SEQ ID NO: 292791 - protein, 416 aa, unidentified
MTFKVVRFICGGMDVHKNLIVATIGTTDRQTLITEYIQQSFSTFYSDLIRLKEWFISHDCYDVCMESTGKYWIPIYNVLETELNICLTHPKYVKAIKGKKTDKRDSKWICDLYKCDLVKHSFIPKKEIREMREIARYRCKLVYMRSSERNRYQNCLTVSNISLASAVSDPFGKTATNIMKELMQSEVIEDDKILKLIHKNCKDKDKILDSLQGYHIESDQRFKMDTVMNHIEYLDKQIQACEAELIKRAYPLRDYFQHITHIKGISALSAILIVSEIGTDMNQFESDKQLVNWAGLSPANNESANKKKSVRISKAGQYLEPLLVQCALSSIKDKNSYFGIKYCRIKKRRGHKKAIIAIARMMLVCIYHMILTGEEFNPCDYESLTNPKPKKEPIMTVESALQFLKDSNFDFSSIQL

SEQ ID NO: 292792 - protein, 347 aa, unidentified
MKQISTIGLDLAKHIFQVHGAGGDGSPVLNRRLRRSEVLRFFEKLPPCLVGMEACGSAHYWAREIATFGHQVRLIPPAYVKPFVKRGKTDAADAEAISEAVTRKTMRFVPIKTAEQQAAMMVLKSRALLVKQQTQTINALRSHLAELGIIAAAGRTKVEALVAIVRDVADVRLPAAARVALTAVADQIEAQADQIDKLERAIVAAAKTDKDMRRLTTIPGIGAITAATIKALVPDPGGFKSARHFAAWLALTPRQHSSGGKERMGRISKIGNPELRSLLVLGATSVLRIARKADRARPWLRALLARRPYKVAAVALANKTARIAWALLNKGGIYRCPETLATTTAAA

SEQ ID NO: 292793 - protein, 433 aa, unidentified
MNTPHPHDLIIGLDRSDKKADLHLIDTRTGRRWSQTIDTAPEALRDWLLALRQQYPHARVGLCLEQPAVHLVAFLEAYEWITLYPINPITLQKFREAFVTSRAKDDTRDAYFLAELLLTHPGQLQPWAPEDSATRALQQLVVHRRAVVDERTALSNRLIALLKQYFPQALLLCGEDLWRPLATRFLLKWSSLQAVQKAKPATLKQFYYLNGSRSAQLLEQRLALVQKAVPVTDETALIESLALRVQLIGRQLQLVQQTITHFDQQIAQAYAAHPDRAIFASLPGAGPVLGPRLLASLGAQRERYETAAALQQYSGVAPVTKQSGGSKKVHRRYRCPKFQRQSFHEYAKESILWSRWAAAFYLQQRTKGCPHHTAVRALAFKWQRVIFRCWQNRTVYSEATYETALRKSGSNLIALLDRVELGKSPYKNPVKKS

SEQ ID NO: 292794 - protein, 310 aa, unidentified
MTPNTYTYIAVDIAKDTLEVQTPREHFRCSNNPEGYAQLCRRLAGIKNAMVVYEATGGYERNLMEELFKRNIPQARLNPARVRAFAQSEGIKAKNDRIDARMILRYAQEKRPVPARAAAAERQQMADLLDRRSQLTEQLAREKNRLQKAPSITRKSIRHMIKLIEREIARIDAQIESIIQAHEQLKWQSDTLQSIQGIGAITAWSILAYLWEIDQLNRNQTVALVGLAPFDKDSATIRKKRTIQAGRAKVRKCLYMAAQSAARFNPVIKAYVQRHRAREKPYRWLMTAAMRKLLIHIHSLLKNPQPTLAS

SEQ ID NO: 292795 - protein, 417 aa, unidentified
MCHKIKRKLLLEIIFYGGFLLFYCGIDIAKNNHEASIIDEKGKRLIESISFSNSQRGCEKLFKLFEKFEINPENIVIGMEATGHYWLSVYSFFIENNFNTKVINPIQSEAFRKMYIRQTKNDSKDSFIIAQIMRFGQYSETKLAEENIIALRQLSRFRLVLVDFCSDCKRRVIALLDQVFPEYQKFFSDTFGTSSKEILLKYPTPEDILSISTKKLSKILEKASKGRFSLEKAENLKSVAKNSFGVSFAKDAFSFQIKQLMQQVIFIENQIQDLETQISNLLLKTNQVITTISGIGETLGAIIVSEIGDIHRFGSPSKLVAFAGLDVKVNQSGEFSGTKNKISKRGSPYLRRAIWLAANKAAFCDPILSDYYQSLTSRGKHHLTAIGAVARKLCNIIFVILRENRAYQVNPPINQKL

SEQ ID NO: 292796 - protein, 460 aa, unidentified
MMPHKDHFPHSGPRPRRRLTLRVTNPDAAGIDVGADAHWACVPADRAAEPVRRFGTCTADLEALAAWLQACGVSTVAMESTGVYWIPLYELLEARGFQVLLVDARQVARAPGRPKTDVKDCQWIQRLHSYGLLAAAFRPADQVVVLRAYLRQRDMLVTYAGQHIQHMQKALEQMNVKLTEVVSDITGVTGMSIIQAIVRGQRDPEALARLRDPRCKESAATIARALYGNWRQEHLFALKQAVALYAFYHEQISACDAAIETHLRTFADQSRGRQLPYRPRRRKREANEPRFDARARLFWVCGVDLTAIEGIDETTALVLLSEIGTDMSRWPSVKHFCSWLGLCPQHKITGGKILSRRVRRGASRAKRALRLGARSLHHSKSALGAFFRRIKARHGTPAAITAAAHKLARLVYSLLKHGTVYVAQEMAEYEAKYQERKLKVLARQARELGYQLVPAAAEAS

SEQ ID NO: 292797 - protein, 340 aa, unidentified
MKKRYIGIDLHRNRFTCCIRLDNDRTYVTEWALEALARLVKKLRATDEVAVEITSNTRLFHEAVLPHVARVVVGDTNQFRVISQSVKKTDPNDARLLSLYLSKNLLPEVRMKDKDLAQLASLTQTRDTLVKQRSALKNKVNNILSARGLNLAKEALSSEKKLAEVLGLPFDEIVRIELRVIVEQIRGLNKSIAELEKTIGEEGSKLEGHKGLSSIKGIGKITGAILLSVIGDVNDFADEGRLASYFGIVPRVSNSNQTERSGRIHKRGTKLGRTALVQSALIAANYSPYLKRFYEQVKARKGAGKAILALAHKFLGIIYRTLKNKWVFEDFPNFVLAEES

SEQ ID NO: 292798 - protein, 352 aa, unidentified
MKHLQLKEGDRLRRQCIGVDISKKKFTFCLCQSTDLDLHFYTTPKEFDNSESGFRCLLEWSGKEVDSSVPYSFLMETTGCYHESLAIFLVRKGLTVFVVHANKAKNFARLNGQRTKTDLVDSKMLATMGCDTANLKVWPLPDEKYLHLREMSRLSEQLEKTRTQVLGRIEAVTNSGFADKTVLNKHKALLKSIEKLQTANEKEMDELVDGDLVMCSGVQNMESIKCVGRKTAVLVVAETLGFHQMTSAKQVASYAGLDVKKEQSGDTDKKGHMTKRGNAHLRAGLYFPAIVASWSNPQLMEDYARICASHPQSKTIALVALERKLLCLMYSLWKNGKQWDPKYEEHKKEKTS

SEQ ID NO: 292799 - protein, 375 aa, unidentified
MTKIIRIGVDTSKSVFVLHGVDEADRPALRKKLRRKQMVEFFARLEPTRIGLEACGASHHWARTLQGLGHDVALLPPQHVKPYVQRNKNDSRDAEAICEAMSRPRIRAVPVKTMEQQAALMLAGTRDALVRRRTQLTNTIRGYAAEFGLTAAKGLDKIEPLLARIAAAQELPELARELFGFYAQEHAQLKEQLRTIETRLMAWHRGHEASRRLAEIPAVGPIAASLTVMKIPDPKAFRCGRDFAAWLGLTPKDHSTAGKTRLGGITRAGDEALRSVLVAGATAVIQQARKGRGRHSRWLLDLIARKPPKLAAVALANKNARIVWKLLVSGERYNPARAMRDTAASEGRVAALGEAPRRDPRLPASRADATATTGG

SEQ ID NO: 292800 - protein, 344 aa, unidentified
MELVVGMDVHKDTVAVSLIDTTGRERAATTVENTAAGHERLIVWLSERAPAARCGMELSGGIARGLAIALGAAGHLVVAVPPRLSSREARRLRSRGKADPSDALAVARVTAREPALPAVRTGDAEEDLKLLVDHRDQLWSERTRVANRLHADLSIAYPGYQRTVGRALTSRSSLARTEDLLAADASTRAELARRRIWRLRELDGEIRELERRLAVEVGSHPTTLTTIVGISTLMAARILGEVGDVRRFPSPAAFASANGTAPVPASSGRTERHRLNRGGNRRLNRALYVIALTQTRHEPRAIAYLQRKRTEGKTRREAMRCLKRRLSDVVYRQLVADAEARLDT

SEQ ID NO: 292801 - protein, 351 aa, unidentified
MNIIGCDLHPRYQVVAWVDEETGEIRTRRLEHGKEEVQAFYVGWPRGARIGIEATFPALWFERLLAECGHELWVGDAAQIRAKAVRQQKTDTRDAKHLLDLLLTNRFPRIWVPAVAERDLRQLLVHRMKLVRVRTLVKNQLHALAMSQGVCRKRKLWSVRGRADLRSLVLLPWASRRRDELLAWLDQLEAAIAPLDRAVEQEAKARPEAVRLMTHPGVGPVVSLAFVLTIGPVERFPNSRKLISYLGLNPREHSSGGRQRLGAISKQGNSMMRWLLVEAAQTAAWRDPELRRAYQRLKFRRVSGVAKVAVARRLAVRLYWMLRARVDYAQLVCMSGSPSSAVVSPAAGSTV

SEQ ID NO: 292802 - protein, 471 aa, unidentified
MKVTTLGIDLAKSVFRLHGVDARGVAVLRRQLTRQQLLPFLAKLSPCLVGMEAGPGAHFWTREIGKLGHEARLMSPHFVKPYVKSNKNDANDAEAICEAVGRPSMRLVPNKNTAQQDVQALHRIRAQLIKWRTALANEIRGLLAEYGIVVTRGIAPLRRMLPVILDDVENGLSGLFRELLVEMAERLRSLDERIRQYDLRVVRVFGQDERCQRLAQVEGVGPLIATALVAAVGNAHEFKSGRELSAWLGLVPRQRSSGGKTVLLGISKRGDRYLRTLLIHGARSAVRTMEGRRDPRSVSISRLKGRQGPNVAAVALANRNTRVLGRYSPRVRVIEQRRFPPASPKLVEGRRAENGYYQPEIAQAVFNDDGEPVRPALSKPELRRGPRGHRSDEVESARIPSGPRVPKCHPNRRPDICEQPILRIKRQPCAEAGSIYASTNTSLSHSTMRATRSKSGGSNITGNNRTRVSAT

SEQ ID NO: 292803 - protein, 343 aa, unidentified
MDHYAGIDVSLEQSSVCVVDAAGGIVREAKVASEPEALIGFLGGLPRPVARVGLEAGPLSQWLQAALVKAGYDAVLLETRHVKAALSAMIVKTDRKDARGIAQLLRMGWFRPVHGKSAPAQEVRALLVARKQLQAKMRDVELSLRGLLRGFGLKVGEISKGQFATRVRFLVAGHSMLERIAEAMLQAREALRTEFTKLHRAMLAIVRDDAVCRRLMTVPGVGALIAVTFTSGVDDPGRFTRSKGVGAHFGLTPRKYQSGETDVTGAVSRVGDAMVRTALYEGAHILLTRAVRFSALKRWALEVARRRGMKRAKVALARKLAVILHRMWVNGTTFRWGREAAAA

SEQ ID NO: 292804 - protein, 324 aa, unidentified
MSSHEIVGIDVAARKLVVIGERLALAEYENTAAGRSKLVNALCRNQRPVRVVLEATGIYFLDLACALAAAEIAVMVANPKATHHFAEAILQRRKNDPVDAAMLREFGRRMDFVSWQPPRHELFGFRALTREVQALSKTVAAARNRLHAITTTQLAPATLIGALERQIAHNQALIDELVAAAVAQTESDPELARLLARTDSVPGFAAKAAVLVIGELAVLPPMTARQWVAQAGLDVREECSGTSLARRPRLSKRGNKRLRVALFYPALTAARCCPAAQAFVERLVTHGKTRLQAIVALMRKLLHGLHAMWRNDEDFDAEKLFAPA

SEQ ID NO: 292805 - protein, 349 aa, unidentified
MESTKYIGMDVHKEATTIAVMNSAGKLVMESIVETKAATIVQFIEGLRGELYVTFEEGTWAAWLYDLLKPHVTKVVVCNPRNNALLKAGNKSDRIDARKLAELLRAGLLSAVYHGETGLRTLKELGRSYLAISKDLARTMNRIKALYRSWSIPCGGVSVYAPRHRAGWLNKIMEPGVRRRAELFYQQLDGLQKLRQEARRDLLTESRRHGATSLLQRIPYIGPIRAALLIALMQTPHRFRTKRQLWAYSGLALETRNSAEYQYVKGQLQRTKRPVALRGLNQNHNHDLKNIFKGAATKAGSTKGPFRDFYTALVAQGMTPTMARLTLARKIATITLLVWKKALPPAWPD

SEQ ID NO: 292806 - protein, 349 aa, unidentified
MQATTRSRTLTIGIDLGDEFSVLCVLDADGAVQERCQVRTTPAAFEARFRAWPASRCALEVGTHSPWVQPLLRAVGHEVLVANARKLRLIYAGDRKNDRLDAEKLARVARMDPALLSPIEHRGPAVLADRAQLRARDVLVRCRTLLVNHARGVCKGFGARLPRCSPERLPAHLAAVPAELRPALTPILEMIAAHTTQLRAFDRALVRVARAHYPITAALRAVPAVGSLTALAYVLLIEDPSRFKDSRTVAAYLGLCPRQRQSGATDPECRISKAGDGFVRRLMVQSAQRMLQKRSPDTALKQFGLRLAARGGKTAKKRAVVAVARKLATLLHRLWVTGRPYRPFPAGTA

SEQ ID NO: 292807 - protein, 441 aa, unidentified
MSTTIQPSRTDRQRQWAEQFPVHVGVDTGKTRHALVVRPPDGLRRPAFRVSIDRAGFEAADAHIRSFCPGIAPEQVLIGFEFAGHHGFTFADFLRRKGYRVVSVLAAVTKATKGVEQGSRNKSDDIDATQICKLVGDGLFVRFPFLETPYLELKLLVAHRHRLTVEATRLKNRLQGLLDLAWPEFVRQFSGVHKPTPRAILARWPVPADLLESAPRTVAAEIHRASRGHVGPERVRTLLASARDSVGLQDALDERRLEIRQLLARWDLVDEQLADLVTRIEALVEQCPEAKLLCTVPEVSAVCAATIVTELGRPQDFEHYRQVLKLAGLQLTGRESGQSVGRRRVSKHGRPLLRRHLYLLAGRWCQSRGLYRAEYLALRARGVQGTKAVCTLSRKLVPLLFAILQRGEPFNRVRFEANRRRAELPATVRHAGRSRTVPRLG

SEQ ID NO: 292808 - protein, 343 aa, unidentified
MQTVTTIGLDIAKSVFQVHAVDAAGKVIIRRQLKRRYVLAFFEKLPPCLIGIEACASSHHWSRELQALGHSVRLMPPAYVKPYVKRQKNDATDAEAICEAVTRANMRFVETKTADQQSGLVLHRTRHLCMRQQTSVINAIRAHLAEFGVVAPVGRNGVEELLRVVADPDDRRVPEVARVCLVALGAQLRRLKDQVLEFDRMITAWHRSNKMSIRLDECPGVGPVLATALVATVADPKSFRSGRNFSAWIGLVPKQHSSGGKDRLGSISKQGDRYLRSLFVIGALAVIRYAKVHGTRHRPWLTALLARRPAKVAAIALANKIARMVWAMMAKCERYKEPVALAA

SEQ ID NO: 292809 - protein, 324 aa, unidentified
MNVIGIDVSKAKLDCAWLKEDEKRKTKVVSNTLDGWKELVEWSLKNTGVAIEQLYFVMEATGIYHQRLATYLFDAGANVSVINPAQVKFYGQSLGVRTKNDKKDSVVLARFGLKANPKLWQPEALEVRELKALVTRLEGIEKDLQREKNRQEKALCGETPQAVLDSIAQMIALFETEQQKLKKLIEEHIDKHKKFKEDKALLETIPGVGNVIATRMLMVISSRQFEKASQCAAYLGLVPVQHESGSSVKGRVRLSKAGNPAIRAKLYLGAVSAKNYNPDVKALYDRLLIKGKSKMSALGAAMRKLVQICFGVLKHHLPYQPQTT

SEQ ID NO: 292810 - protein, 358 aa, unidentified
MAGKVTETAVVGGVDTHKDLHVAAVVDQNNKVLGTQFFSTTRQGYRQMLAWMTSFGALKRIGVECTGTYGSGLLRYLQNAGLDVLEVTAPDRMERRKRGKSDTIDAECAAHAAFSGIRTVTPQTRNGMIESLRVLKTCRKTAISARRVALQIIHSNIISAPDELREQLRNMTRMQLIRTLGSWRPDASEYRNVTNVYRISLKSLARRYLELHDEIADLDVMIAAIVDELAPELIKRNAIGYESASQLLITAGDNPQRLRSESGFAALCGVSPVPVSSGKTNRYRLNRGGDRAANSALHIIAIGRLRTDDKTKEYVARRVAEGHTKMEAIRCLKRYISREVYTLLRNQNRQINSIPITA

SEQ ID NO: 292811 - protein, 452 aa, unidentified
MGSPRLFERLYRGDVGCGGRVQKGESSLKQRRSVEGEFRIYVGLDWGTEFHRACVLDSTGKILRQCRVDHNGQSITDFLRSLDYLANGQPATIAMAIEVPRGPVVEAFLEGGFAVFSINPKQLDRFRDRYTAAGAKDDSRDAYVAADSLRTDQHCFRRIATDHPDVLRLREISRTEESLGEDLRRTVNQLYQLLLRYYPQLLQLNSTPDEPWIWALLEAAPIPQRGAKLTLSRLKSLLAKYRIRRWTAEELQVILRTPPLPLSAGSADAISEHALLLLPQLRLLYSQRNKVRNRIEALLKHMTLLGREHPECREHRDVGLLLSIPGLGNLIAANLFTEGTDALAQRDYDALRAHSGAAPVTRQSGKSRQVIMRRGCSERLRNAVYHLARCSVLHDPHSKRHYAELRGVGHKHGRALRGVADRLLTVLIAMLKNGQPYDANRRSHTTTPAEAT

SEQ ID NO: 292812 - protein, 369 aa, unidentified
MKKDTLYVGLDTDKKHIDVAVADALPSREVRFWGRTANTPAAVDRLIKKLGQGSRELVVCYEAGPCGYGLYRQLAGKRGVRCLVVAPSMTPRRPGDRVKTNRRDALKLAKLLRAEELTAVWVPDAAHEALRDLVRARATAVSVLTRCRQHISSFLLRQGIPYVGKPWTQKHRAWLAALEFEQAAHRLLLIELLVALDQAQARRDRLTDHIRELVPGWSLAWLVEAVQALRGYDLINAVIVVSELGDPRRFASPRQLMGFVGLNVSEASSGDTVRRGHLTKTGNKRARKALVEAAWTYSRPSATSKPQAARLPAQVQQIADKARHRLSRRYRHLLARGKLKQVAIAAVARETLGFIWAIAHAAAPAHQQT

SEQ ID NO: 292813 - protein, 412 aa, unidentified
MQAIIERCCGLDVHQETVVACLLIGAPGAQPKKEVRTLRTVTRDLEALRDWLQEAGVTHVGMESTGVYWRPVYAVLEGYFELIVGNARHIRNVPGRKTDVKDSEWIADLVRHGLIAKSFVPPRPLRELRELLRYRRKLVESQAAERNRLLKLLETANIKLASVASDVFGVSGRAMLRALIAGEASPQAMADLAKGQLRRKRADLILALDGRPEEHHRFLLAMQLRRLEAIEADIAALDLRIGERLEPYSAPHALLMQIPGVDWVVAAVIIAEIGVDMSVFVSAYHLSAWAGVCPGNHESAGRQKSGRARKGNIHLRTILVSAAISASRTKGSYLKDKFHRLKARRGGLRAALAIAHKILVSAYHMLAKTLPYRDLGEAYLDQIGQTRTVANLKRRLERLGYRVILEPNAQPA

SEQ ID NO: 292814 - protein, 413 aa, unidentified
MEVIHARCGGIDVHKRQVTVCVRVASGSKVDLEVREFGTMTRDLLSLSDWLKECGVSHVAMESTGAYWKPVYNVLEGEFTLLLANAQHMKAVPGRKTDVKDAQWIAELHAHGLLRASFVPKLEQRGLRELTRTRTTLLAERARLANRIQKVLEDANVKLASVATDVLGVSGRAMLRQMIAGRDDAKATAQLAKGVLRKKIDSLELALEGRIRSHHRIVLDELLNQVESLDASVTRLDEAIGEALKEADDPFEAAVAILVTAPGAGRVSARAVLAEIGTNMEQFPSAHHLAAWAGISPGNKQSGGKRLSSRINPGNKWLKTTLVQMAQAASHQRGTYLHALYSRIAARRGKKRAIVAVAHSLLVSFYHMLKNGIAYQELGAEHFDKLNQTRTIDRLTARIATLGYRVSLEPVPA

SEQ ID NO: 292815 - protein, 315 aa, unidentified
MNERFVGIDVSKDKLDVFVRPEERHWQTANTEEAFPELVERLRALEPALIVIEATGGLERAVVAAMAEAELPVAVVNPRQTRDFAKATGRLAKTDEIDAADLAFFGEAVGPEPCSLPDAAVQTLSALNTRRQQLVKMLTAERNRLHTALPAARPSLREHIRWLEREQEKVESELQRLIDQNLSFRNKFKLLCSVKGIGPATSYTLISQLPELGTVNRKEIAALVGVAPFNRDSGRWRGKRTTWGGRAGVRAQLYMAALAASQHNPVIRAFYQRLIEAGKPKKVALTACVRKLVVILNAMVKNGTLWDPEYAASAA

SEQ ID NO: 292816 - protein, 348 aa, unidentified
MKNKSFIGIDISKNVIDVSIFCEETPIKDFSHDVFNNSRKGFGEMCTWLKKNHVVLSNSLFGMEFTGSYSMELEKFINTRNYQFCMLSTHVVKHYPMGPKDKSDKIDSAKIADFLYRYNGTECVKPYNMPDKTMQRLKALMNERKFLVEQRTCFMNRRQLCITKEDAQLYDGYIKKFSRDIENIELEEQKLLATDDTRKMIVDSLLSTYKNLLTIPGIGFVNAINVIVITRNFTAFETARQYASYVGVAPHFRTSGTSVKWRPRPSARCDGQAKADLSMAATVVVQYDAELQSFYNRKLGGKQDSDTKRKALNAVKFKLVLRMFAIGKQNRKWEPLDSKSSNEKLAIS

SEQ ID NO: 292817 - protein, 459 aa, unidentified
MTAEPRRVTGGVDTHADVHVAAALDSGTGRLLGTESFATTAGGYAALVDWLRTFGAIDQVGVESTGSWGAGLTRHLRGEDIEVIEVDRPDRKARRFEGKSDPTDAVAAARAVLSGRATGVAKTKDGAVEAIRALEVVYHGAVKDRTRAINQFKALLVTAPEALRANLRPLAFSAQLQRARRLGPVDDVVEAETRLALRELAGKIKFLDAQCDRLETRIGELTAQASPALVGLCGVGSHVAAQLLAAAGDNPQRLRSEATFAKLCGACPIPASSGKTTRHRLNRGGDRRANNALFTIVLVRMRHDPATRAYVARRSAEGKTGKEIIRCLKRFVAREVYQALTNPPDDLPTGAELRSLRQHQQLSLTVVASALGTTPIRLSTLEQGLVHDHPSRPPLPHLARRTRRLTSIGASGHQASGDAARGGRRTSHAGAAGGSRQPIAPPVAASTATISTGSAPTKW

SEQ ID NO: 292818 - protein, 352 aa, unidentified
MKEVSKERQISVVGIDLAKCSFHLYAVDAGGQPRLSKKLTRARLGAYVANLSPCTVAMEACGSAHHWARQFRSYGHEVRLIAPQFVKPFVKSNKNDAADAEAICEAAQRPSMRFVAIKTLAQQDIQAIHRMRSLVVDRRTAQTNQIRGLLLEYGIEVAQGRPAMQRRLPEILEDADNGLSPRFRSELHGLAEELRHLNERVAHYDAQIDAIARGDRQARDLMTIPGIGPKGATALLAAVGEDATLFSNGRGLAAWIGLVPRQHSTGGRDRLLGISKRGDVYLRNLLIHGARAVLRTLEHKEDRTSLWAKALKARRHTNVAIVAMANKMARVAYAVMTTGKPYDPAIGTVATD

SEQ ID NO: 292819 - protein, 356 aa, unidentified
MSHDVKYIGMDVHKEAIVIAVLNGSGKQVMETIVETKASSILQFIHGLRGELHVTWEEGTWAAWLYDLLQPQVEEVLVCNPRRNALLKEGSKSDKVDARKLADLLRTGMLRPVYHGENGLRTLRELGRSYQTIGKDLIRVMNRLKAVYRGWGIPCAGTRVYAPRYRKEWLDKLPPAGVRRRAELLYQQLDGLQALRREVRREFLAESRKHKAAKLLRKIPCIGPIRAGLLIALMQTPHRFRSKRQLWTYSGLGIETHDSAQYRYVGGQLQRSKKPQQLRGLNRNHNHAMKEIFKGAATRASCCTGPFHDFYAALLAKGMKQEMARLTLARKIAAITLTLWKKEERFDAEQLKTQAA

SEQ ID NO: 292820 - protein, 443 aa, unidentified
MHPDAAGIDIGSRSHWVAVPANRDAQSVREFSSFTGDLHRLADWLASCGITTIAMESTGVYWIPVFEVLEERGFEVLLVNAAHLRNVPGRRKSDVLDCQWIQRLHSFGLLRGSVRPDEQIVELRAYVRQRARIVQDAGRHIQHMEKALLEMNIQIQHVVSDITGVTGMRILKAILAGERDGNKLAALRDPRCRQPRERIAAALQGNYKREHLFVLEQALTAYDLHQSLLAQCDQRIEALLAELPARSEVPEEPCPPRRHGPPTHNQPRFEIQSPLHRLCGNVDLTQIPGLAPATALTVVSEIGTDVSRWPTEKHFTSWLNLAPGTKITGGKLLSARRAPSKNRAGQALRQAAVSVGRTQTALGGFYRRIALHRGAAKAAVATARKLGVLVYRALKYGMAFVESGLAAYEREQNARLVQHLQKRAAALGYQLLQAPAEAPAGAG

SEQ ID NO: 292821 - protein, 455 aa, unidentified
MDGSYAGVDWASEKHDVLVADAAGEKLLAATFAHDEKGLRSLCRALVRLRVQLVAVERPDGLMVERLLDAGLRVLALHPNQVAAARDRFRVSGGKSDGFDAFVLCELARTDHHRFRVLEPDSDATKAIRALTRGREDLVGARTALVNQLRAELERFWPGPLGLFSDLHSQISLAFLERYPSPADAHGLGEARVRAFLARERYSGRQKPAQLLAKLKAAPTGRVGERELAIRRQLVCGLVAMIKTLNAQITELERQIATAIREHPDGAVFTSLFKGAVITAAELLAEMGDCRGRYPTRDTLAGDAGQAAVAIESGKRKAACFRWGCNKRLRQAFHTLADSSRHHNPWAQDLYAQALARGHDHPRALRTVGRAWSRIVWRCWQDRVPYDPARHRALQRHVTVTIPTASGPVPDIAASQRMAGAAVTRRAARRAERPALDGKPTSAKPAARRAKRQRG

SEQ ID NO: 292822 - protein, 455 aa, unidentified
MPKQKRTRNARTLPVARVLEPNAAGIDIAATEVYVAVPTGRDPQPVRRFSTFTDDLHRLADWLQACRVQSVAMESTGVFWIPLFQILEDHGFRVCLVNARHVKNVPGRKTDVSDCQWLQYLHSVGLLRASHRPTQTICAVRSIWRHRESLVQMAAVHIQHMQKALDQMNLQLHHVISDITGTTGLAIISAVLGGERNPENLATLRDPRIVASRETIARALVGDYRAEHLFTLRQSLQAYRQYQQWIAACDSEIERQLQVLPSNLPDDPKPLSKPRDHHKPRRNEPRFDLRSQLYRVFGVDLTAVPGVSSLTAHTLLTEVGPDLRRFPNAAAFASWLGLCPDNRISGGRVLSVVTRKVKNRLTIALRMAAQSLHRSQSYLGQYFRRMRIRLGTPPAITAAAHKLARVLYHLITTRQPYEESTFAAMEERARQRQLLRLTKQAARFGFQLVPGRSVP

SEQ ID NO: 292823 - protein, 385 aa, unidentified
MSAHPTPIQAAAQLQANTLFASLELSKARWLVTVSAPGSDKLARHQVPGGDGQALLELLWRLQAAAARRTGAPVMIIVIQEAGLDGFWIHRLLVQNGITSHVVDPASIAVNRRHRRAKTDKIDGVKLLRTLMAWMRGERQVCTMVQPPSPEDEDRRRLARERARLLKERIQHTNRIKGLLSGQGIPDYDPLHRDRRRCLAALTTGDGRPLPERLKAEIGRELDRLEMVVSQLTVVERERDALVARTAEADACAAPAALARLRGVGPELAALLWLEALFRRFDNRRQIAAYAGLTPSPWQSGGIDREQGIAKSGNPRLRRAMIELAWFWVRHQPGSALSRWFVERVGTARGRVRRIAIVALARKLLVALWRYVTQGVVPQGAVLKA

SEQ ID NO: 292824 - protein, 346 aa, unidentified
MMIIGCDFHPSWEQVAWLDTETGETGEQKLVHADGDAERFYRGLPVPVLIGMEATGNSHWLVDLVSELGHELWVGDAAQIRASYVRQQKTDKRDAAHILKLLVEGRFPRIWMPSSEVRDLRQLLLHRYKLVMIRARVKNELQHLCLNKGVQRKHKLWTKAGQQVLRELPLKAWAGRRRDDLLGLMAMLDQQIEPLDEAVKAEAQRDQMALLLQAQPGVGPITALAYVLTMGDVRRFPRGKQVASYLGLIPREHSSGGRQHLGAISKQGNRMLRMLLVEAATTAVRLDPEFRKEYLHRCHQKPKAVAKVAAARKLAIRLYWMLRTQTPYPEVVRIESSPRVPLVGAS

SEQ ID NO: 292825 - protein, 355 aa, unidentified
MYGLKHQKEKRSMDHFAGLDVSVKETSICIVDDTGRIVREVKVASEPEALLAVLANPTYHFKRIGLEAGPLSQWLFSALAEAGLPVICVETRHMRAVLQAQINKTDRNDARGMAQMMRAGLYRPVHVKTLRSQKLRMLLTHRKLLQSKAVAIENDLRGTLRNFGLKVGVVGKVRFEARIRELVENLPDLAVLVEPMLIVRRVLREQIGILHRRLLAIVRDDDVCRRLMTIPGVGPVVALTYRATVDVPARFKNSKAVGAVLGLTPSKYQSGEINRSGAISKCGDEMMRVMLYEAAQVMLTRTNKWSWLKAWAMKIARHRGMKKAIVALARRLAVIMHRIWVDGTEFQWTREAAVA

SEQ ID NO: 292826 - protein, 352 aa, unidentified
MKYYIGCDAHKKYSVFSVVNERGQAGGPERVQHDKELYRKYLNYLPAGSKIAIESVGNWYWMIEAMEQAGHIPILVNPKKAKLLMGNINKTDKLDARGLAMLNLNGSLPEVWIPPAELRDQRELSRMRISMVGVRTQFKNRIHATLAKYAIEFNEVSDIFGKTGRALLQEAIRELPPETKNSVEVQLKLLDQVSGQIEELENHIRKVVKETPAMQLIKSLPGVGDILAIVIALEIGDIDRFRSPQHLASYSGTVPRVSSSGDKTRYGRVRSDVNHNLKWAYIEAANCVALQQERQAGRHAVQLLKRIQKQKGYPKAAVAVARHLAEATYCMLKKNQPYQEPNLRKTVLSSQG

SEQ ID NO: 292827 - protein, 308 aa, unidentified
MNCTTIGIDVSKQKLDIFFSSSGEWVTLPNTEEGFVEFLKICKKTYPNIQKVIVEHTGSYQNALVSCLHINKIPVCVVHPTRVRNYAKAIGRLAKTDKIDAELLANYGEKMSPELSSEKPFNIQRLRSLVKYRKQLTDNLTLTKQWLEKKPDQEIVKQISQLVDFLNKQLSKIDTDLHQLIQSDKILSDNFLILTSTKGIGKVTACILLSELPELGTICRNKIVAICGLAPLNRDSGKLRGKACIQGGRKVVRNALYMSVIAALRSNKHIRDFYDNLRKNGKPAKVAITACMRKMITHLNTELQKKEE

SEQ ID NO: 292828 - protein, 340 aa, unidentified
MELYTAFDLHANNSYAAMIDQEGHKVAGKKLNNDPQEVLSFLKPHRKNIMGIVVESTFNWYWLVDSLMDQGYKVHLANTTAIQKYNGLKHSGDKEDAFWLAELLRLGILPEGHIYPKEERPIRDLLRKRSHLVRLRTSLILSLQNIIDRNCGTRINVKAIKKRKEDLVSPFFTGNDDLSLTGKVSKEAIDFFTTKILTVENFVEDKLELKKPYQYLLTVPGIGKILGLTIMLETGPVERFEKVGNYVSYCRKVSTRWTSNDKTKGKGNKKNGNKYLAWAFSEAAEFARRYDEKARAYDNRKMQKTNFMIAHNALAHKLARAAYHIMKDQVPFMPDKLFTS

SEQ ID NO: 292829 - protein, 357 aa, unidentified
MDIILKQCLGIDVSKLTLSFSLGLLTNGLGKEFKFHPDVSNDLSGFKGLQAWLKSSLEPTVDFIIVMEATGVYHQRVAHYLHGLGYAVCVMQSGRVKRYAQSLDQRSKTDALDSRMLSMLGLERDLRLWHPPSMELQQLKALSRERSSLLKDRTMEVNRQGAITSGFYSYAKVLKRHKARMKLFNTQIEVIEEEMRVLISKNGVLKKKLDLLMSIPGISFISAATVVGETLEFESIANAKQLASYPGYDVVLRESGNFKGKTRISKKGNSHIRAALHMPSMTCVRCNPTLKQFYTRLKPKKAKPLVALIAVQRKLLILMFTIWRNEEIYDPEFENKKQQRHKALAAQDNNLINQLVS

SEQ ID NO: 292830 - protein, 403 aa, unidentified
MTTFFAGLDWASRTHAVCIIDVHGAVRAQFEINHDAAGLAELRRRLTTVGVTAVAIERPSGLIVDALLDGGFTVVPIHPNVVKATRPRYRSHGGKSDASDAYLLADLLRTDGHRFQPLAPQSDDIRALRALVRGRDDLVATRVQLANQLRSLLQSFWPGAAELFADVDSPIALAFIQRYPTPESASRLGPKRMAAFCAQHAYSGRRSADELLSRLHQAPAVAVGELEMEAKGELARGLARTLDCLVTQIRLLTSRIEHHVGTLDDGRLLMSFPRAGQLCAAQILAELGSVRERFTSDEHLAAEAGVAPVTYASGKSKAVTFRWACNHRLRAALTCLADNSRHANQWAVHVYAQARARGCDHPHAIRILARAWLRVIWRAWIDRKPYDPNQHRAAQMLLNTARG

SEQ ID NO: 292831 - protein, 320 aa, unidentified
MGTEKAYVGIDVSKETLDVAVHATDRRWRFANSDKGITETVCCLEELCPTLVVLEATGGMECPLAAALAVAGVPLVVTNPRQVRDFARATGRLAKTDAIDARVLAHFAAAVHPESRRLPDSQEQELKATLARRRQLIEMLTAERNRLHSARSKAVKANIKAHIDWLEKETTHIDHDLEQSIRQSPIWREKDDLLKSVPGVGPVLSTTILADLPELGLLNRRQIAALVGVAPFNRDSGHMRGQRTVWGGRAVVRSALYMATLVATRHNPIIRDFYRHLLSQGKPKKLALTACMRKLLTILNAMVKHQTPWHYPVSGPLQTP

SEQ ID NO: 292832 - protein, 407 aa, unidentified
MRVVHERCAGLDVHKKTVVACVLTPEGREVRTFSTMTEDLLSLSEWLQQRGCRAVAMESTGVYWKPVYNLLEAADFEPMVVNAQHIKAVPGRKTDVLDAEWIADLLCHGLLRASFIPDRGQRELRELVRYRRSLVQERTREANRLQKVLEGANLKLGVVASDVLGRSGRDMLAAISKGTDDPAELAQLARGALKRKSDQLQQALRGLVGPHQRFLLQEQLSHIEEIEARIRRLNAEIEGRLAPFGPILERLQTIPGVGRRVAEDLLAEIGTDMSRFPTHHHLASWAKICPGNRRSGGRPKPEHIGGGNRWLRSTLVEAAWAAARSKNTFLAAQYHRLARRIGGKRAAVAVAHSILVIAYHVVKDEQPYQELGATFHDQRSSQIVARQLTHRLEALGYQVTLQRKEAA

SEQ ID NO: 292833 - protein, 349 aa, unidentified
MGEVSTIGVDIAKSVFQIHGVDADGTVVIRKRVGRAKVLEFFAKLPPCLVGMEACATAHQWARELKKLGHDTRLMPPTYVKAYVKRGKNDAADAAAICEGVTRPSMRFVPIKSVEQQSALMLHRTRDLLIRQRTQLINALRAHLAELGLVAAKGHEGLQQLVKVVTESSDERLPSDAGFACQSIVGQLHAVQTQINGLDKRINLAHRANADSKRLEAIPGFGVILSTAVVATMTDPKAFKTGREFAAWIGLVPRQNSTGGKERLGSISKQGDRYLRRLLVLGAISIIGTARARPDKYPWVTELLGRRPAKVVAVALANKMARSAWVVLARGETYRAPTRSSNVAIAAAA

SEQ ID NO: 292834 - protein, 341 aa, unidentified
MAIVGGFDVHRAQITFDQVNTDTGEVRTGQVCPATRANLRKWLEPLNGRPEVAFALEGCTGWRFVAEELARAGIEVHLAEPADTATLRGKKKRAKTDRADARHLRELLVQNRIPESWVAPDHVLEVRALGRLYVGLMDERRQWQQRIHAQLFHQGVPPIKHLLTVASRETLDTAALSPAGHRVVETALDVIDHLSTQIDPLRADLADLGRHQTACRALTSHYGIGALTAPIIWAEMGDCRRFSSSDKAVRHTGLDITVWSSDNKRSGPGHLARQGPPALRWALVEAAQCAARSSSPDHGYYLEVKARIGANRAALSVARKLARRVHHHLRSLGDAAWVEAA

SEQ ID NO: 292835 - protein, 408 aa, unidentified
MEHTTIAVDLAKSVFQVAVSHRPGRVDEERRLSRDRFLECFAQRAPATILLEACGSAHYWARQLQPFGHVVRLLPPHDVRPYVRRNKTDRTDAKGLLEANRNADIHPVPVKTIEHQAIASLHRLRSTWLATRTARLNTIRGLLREFGIFIPVGAHPVVARVRTLLLESTTVPVLLHTTLAAACEEIDVLEADMRAVERQLGALAAQMAEVTLLQTVPGVGLITATALIALVADIRRFPSGRHFASFLGLTPKEDSSALRRRLGAISKQGDVYLRMLLTHGARSFLWHAKAARQPTALPHWALSVEQRRRHNVATVAVANKLAPNRRGRLDSTAAVRDGPPTTVIGSIVDRLIGRIASSSRDHDAPAAARRMPRFSACALRPPTGPVPVSRHSRPLPHSQNRLSESVRP

SEQ ID NO: 292836 - protein, 350 aa, unidentified
MIIIGCDYHPGFQQIAFVDTETGECSERRLGHREEAEKFYRDLRAQGAAVRLGMEASGHARWFERLLGELWFELWIGDAAEIRTKRVRKQKTDRQDAELILRLLLEDRFPRIWVPSGENRDLRQLLWHRHRMVQARTRIMNQLQAVALNEGLRCKKRLWREAGREQLESFELSPWASRRRRDLLELLDRLTPTIAELTQAIEQEVEKRPEAQRLQTHPGVGALTALAFVLIIGRADRFQCGKQIASYLGLVPLEESSGQRRRLGHITKQGNSLLRFLLVEAAQVTVRSDQEWRSKYFHLAMRRGRKIAKVAMARRLAVRMYWMWRKGWDYEQLKKFGSHAGQPGHRDGVR

SEQ ID NO: 292837 - protein, 340 aa, unidentified
MIGIDPHKATHTAVAVDSDENVIGEFTLEASGRQVDKLTEWADDFEKREWAVESGNGLGYLVSRQLVAAGETVFDVPPVLASRVRLLGSGRSQKNDPNDARSVAIAALRSDRLATVRPDDHVTVLRLLVKRHRDMARLRNRHCSRLHALLLELVAGGIGTKISVRNASELLNRIGVTDEAARYRILVAREVVDDIARLDTALKASKQRIAVAVQASGTSVTDIVGVGPIGAATIIGYTKDVSRFPTRGHYASYNATAPIEASSGGNKRHRLNLRGNRILNHAIHIAAVTQLRHDTNGRTYYDKKIAEGKNSKEAIRALKRRISDAVYRQLTLDAQRTITY

SEQ ID NO: 292838 - protein, 483 aa, unidentified
MALVFAVVLGLLILEVARSRRKPNPTSPDPASLALLHTLHPHAAGIDVGAAELWVCVPPGAVSIPRPPTVLPAHVRRFGVFTADLQAIAAWLHQCGVTTVAMESTGVYWIPLYDLLEQAGFEVLLVDPRQVQRAPNRPKTDVHDCQWIQRLHSLGLLTAAFRPEEPIRVWRSYQRHRASLIEDAGRHLQRMEKALEQMNVKLPEVVSDLTGLTGMRIVRAIVRGERDPKALAKLRDHRCKASAETIARALQGTWQPEHLFALQQSLALYDYYHEQIRDCDRVIEAHLMGMALPEVPPLEPKRRSRRRKDNEATFDARQRLHHVAGVDLTAIEGIEESTALVVLSEVGTDMSRWPSEKHFGSWLGLAPNPKKSGGKMKSSATRPGVNRAAQALRLAAKNLQRSHSALGAFFRRIAARRGLAKAITATAYKLARIIYAMLKHGMAYVAQGLEAYETAYRERVVRQVKRKAVALGLGRQREARPSH

SEQ ID NO: 292839 - protein, 318 aa, unidentified
MKTYHNFIGIDIGKFNFAVAVYNNKETREFENNPEGIAKFFECYNSKLRESLCVLETTGGYEIELLVALCNNNISVHRASTRKVKNFIRLFGNDAKTDILDAKALALYGAERKDKLQLFVPKTTNDIELYQLAMRKQDLIKMLIAEKTRLQGPNVEFTKASCKFMIDAISDQIKLIANQISSLIEGNMDLNSKKETLKTISGVGDNSASQLLILLPELGTLNRKQIASLTGLAPRSNDSGTYRGYRSIMNGRDNIKPILFMVAMAARRSKSEFKIFYEKLISRGKKKMVALTALMRKIIVIANAKIRDLISQSNVVEI

SEQ ID NO: 292840 - protein, 365 aa, unidentified
MNLLRKGVDGKPHLNEVRSFGTMTDDLLKLSEWLEKAGCTHVAMESTGVYWKPIFNILEADFEVVLVNARHIKNVPGRKTDVKDCQWIAQLLQHGLPQASFIPPLEIRQLRDLARERKNLIQDRSSIVNRIQKVLEDANIKLASVATDVMGKSGWDMLVAIVGGEEDPEKLSELARGQLKAKKQQLRFALQGRLTDHHRFLLRQYMRQVRNLEQTIEDFDQRIEEQTKPFLEYLSLLDTIPGVNRRAAETIIAEVGVNMAQFGDAPHLCSWAGISPGNNESAGRRHSGATTDGDKWLKATLVEAAWAAGRVKKSYFSAQYRRIASRRGRKRALVAMGHSILVVVFHILKDKVAYQDRGEGVRYFV

SEQ ID NO: 292841 - protein, 409 aa, unidentified
MVVGIDIGSTTQYARAFDWRGIELGKVFTFSNSREGFEAFKAWMQRLQDKYRKSDVIVGIEPTGHYWFDLGAYLEDEGILLVMVNPYAVKQTKELDDNSQSKNDRKDPKVIAKLVTEGRYSAPYTPDGVYADLRIMVTNRKRLIREMTQIKNRFARWFAIYFPEYTDVFGDYEAQSSMLLLKKVCTPEAIVELGAEKINQIWRDAKLRAVGMKRATTLCETAKRSIGLKKGSSAAQYEMKLLLEDYEYKKAQLDAVIEEIEKLCRKIPESEQMLAIKGIGVITVAGFLAEVGDVRRFESPRQIQKLAGLSLRENSSGKHKGQTTISKRGRSKLRAVLFNAAIPLIATNPEFKSLHEYYTTRANNPLKKKQSVIAISCKLIRVFYAILANGVTYDAQKMLSDIHRQPQAA

SEQ ID NO: 292842 - protein, 367 aa, unidentified
MKKVNTAATKQSRNISRQKLTIGLDLGDRNSWYCVLDETGRIQLEQRVRTTAKALQEVFGAMPRSRIALEIGTHSPWISRLLGELGHEVIVANARKVRLIGESRKKDDRLDAQTLARLARIDPELLYPVKHRSAQAQADLTLIRARAGLVRARTGLVNAARGLAKSYGERLRGCNVRNMNPEKAESLSPELQAALEPLLNAIESLSERIVEYNEGIEKLAQESYPQVALLKQIKGVGTLIALTFLLTLEDPHRFGKSRDVGGYLGLQPGRRKSGESEPQLHISKEGDPYLRTLLVQGAQHILGPFGIDCDLRRWGLKLAERGGRNGKKRAIVATARKLAVLLHHLWVSGEVYEPLHNSSRLTVAAAA

SEQ ID NO: 292843 - protein, 394 aa, unidentified
MIYAGVDIAKTDHVIGAVDERGAEMCRPMPFKNTEAGLERAVAWLEGLAGSPSDVVVGMEATGHYWMACYSFLVARGYSVAVINPMQVKAVRKLKGLDKVKNDRVDAGLIAEALRIGQYDETRLATDEMASLRSLSRYLQSLRGMVAELKTQCICLMDAHFPEYAGIFSDMFGAGSRAVLSRSPLPFELARRRADSLARDIAEASRRGGKSAGYAARIKAAARSSIGVRLGQEAASFQVKSLIRQIEFADSECAKVEARVRALLDEVEPLVLTIPGVSYATGAQIVSEIGDVSRFRNASALVSYAGLNSSVSQSGQFDSGGGPITKHGSPYLRRALWLAANRARQYDPGLRAFYDKKRAEGKPHRVAVTAVARKLCHIVFAVMRDQVPYDPGRE

SEQ ID NO: 292844 - protein, 387 aa, unidentified
MQKPHDNSKASPAAFMQDNTLIAVIELSLSNWLVAGLIPGVSREPLKKLEPNPEDLLKLLHSWRDEAIKAGRPITRIAVAYETGRDSFWLARWLRERGIDAHVIHATSVTVSREHRRAKTDRLDTAMLKRGFLGWLRGERGHCTVAIVPTMEEEDAKRPHREREGLVHEQTRAVNRMKSALIQFGVRNFNPKLRKASVKLETVRTPEGKSLPPNTIAALRRDMERLKIIKEQIKAIEQARLQQFEQKPEALANRMVYLLVRIYGLGLETADLLAHELLSRTLRDRKAVARYAGLTGSPDESGSKRREKGLSRSGNARVRKIMIQLAWRMVKFQPDSALVQWFKQRTENAKGSRKPMIVALARKLIIALWRYANDGVIPEGFRLHSAA

SEQ ID NO: 292845 - protein, 350 aa, unidentified
MNKLSRDLSAVTVVGLDLAKHVFQVCCVDAQGHIVVNRALKRREVLSFFRGLPACLVGIEACGSAHHWARMLIGVGHEVKVMPPAYVKAYVRRQKNDAMDAAAIAEAVTRPSMRFVPVRSIDNQAHLMHHRVREMLVQQRTQIFNALRSHLGEVGVIAAQGARNVRALANLLSSGHEDIPVPVAQALQPLVRQIEKLDEEIAGLDKILALAAKADADACRLMTIPGIGAHTAHAVIATLGSDGIAQFCGPREFAAFLGLTPRQNSSGGKTRLGKISKMGNQYIRKLLVVGAHAVLCHRDKHDDALRIWARRLIANKPFKLVAVALANKMARLIYALLKGQGHYIKVMQPA

SEQ ID NO: 292846 - protein, 383 aa, unidentified
MSDHSEAFVAFDTSKLRNAVAIADGGRGDEVRFLGEIDNTPAAIAKLVRKLAGKYERLTFCYEAGPTGYGLYRQVKGLGHECIVAAPSLIPKKAGDRVKTNRCDAMSLAKLLRSGDLTAVWVPDCQHEAMRDLTRARETAMLDLRAKRQQISAFLLRQGLHYPEDKRTWSKGHLTWLASQKFDIAEHRIVFEELMEAMRQAQGRLDRLEAAIRAAVPDWSLGKLVIALMAMRGLDMISASTIVAEVGDLSRFRTPRELMAYVGIVPSEDSTGDKVKRGPITKTGNRRVRRMLVECAWSYQFPPRLSKDKQVKVDAVPQAVREIAWKAQSRLNQRYRALLRRGKLKNVAITAVAREFVGFIWAVAQAVGAAPAATKTTTPAAAR

SEQ ID NO: 292847 - protein, 416 aa, unidentified
MNAVGIDVSSRKSTVAVLRPLGEVVCLPFDVTHDIAGLASLAEKLKALDGETRVVMEHTGRYYEAVEKALHEAGLFVCAVNPLLIKEYGANSLRRVKTDKADAVKIARYALDNWADLRDFTPMDAIRYDLKTLNRQFQLASKQRTASANNLIALLEQSFPGIRKCFDSPVRSDGTQKWVDFAHSFWHVDCVRKQPFAAFCERYRKWCKRHAYLFKQSNAEEVYALAKRAVVLTPKSKVVKVLVQEAANQLSSISRSVEVYRAEMDRLAAMLPEYPVVMAMYGVGKSYGPQLMAEIGDVRRFERKQALVAFAGIDPMPNQSGDKNVRSNKSSKRGSPYLRKTLFNVIRTYLQCAPQDEPVFQFLNRKRAEGKPFYVYMLAAANKFLRRYYAKLRDYFASLDTLQPVAPIPTILKATL

SEQ ID NO: 292848 - protein, 459 aa, unidentified
MQAEVPCFIPAALSALQQYGTSPLWDFMNEPDAGVISPQISMQDMTHKDMRNCLYINRKAGANTMFIVGIDIAKRSHEAIIIAEDGQVVRKAFSFRNNCTGYNLLLEQVRRLTLVKSQIVFAMESTAHYWLALYARLLKDGYAVMVLNPIQSHSLRELYIRKAKTDARDSLIIADLVRFGRCKASNVPQDKILALRELCRSRAYLVDMAADLKRKLIALLDRIFPEYESLFESVFSKASIAVLSKYSTPQKAKNAHLGKLTDILMESSNGHFGEWKAHQLKEAACSSFGIDDSGGVYSTLLGMFLEQILSLTAQADSLEKQISVFFQEFNNPLTSIPGVGTVLAATILSEIGDITRFSSADKLLAYAGLDPSVKQSGEFKSNQNRMSKRGSPYLRRAIWLASTVAVHRDPMFQTYYEKKISEGLHYMNVIGHVSRKMTAVIFAVLRDGQPYQPILQSAG

SEQ ID NO: 292849 - protein, 459 aa, unidentified
MNKKTAKERQSKNIVEMPLVNCHAAGIDISDTEHVVAVPPGVDEPRVRKFGAMTCDLEAIVTWLKKCLIETVAMESTGVYWKPLFSMLVRNGFEVYLVNSKHVKNVTGRKTDEDDAMWIQKLHSCGLLKSSYLPDDEQDALRTLVRYRRTLVQDSSRFVNRIQKSLELMNIKFHTTIRDITGKTGTAVIEAIIAGERKAENFLPLIGKGIKADHETIRKSLEGNWREEHLFTLKESYEFYKTYQQRIAVFDTQIEKQLQQYEAMRNEGVIENKANKKSTAASSRTKKKKDKNHPKFDVRSYLERIHGTDVLSIYGLSETSGLEILAETGTDLSKWENNKHFVSWLNLCPNNKISGVKIISSKLMKKKPNAASQAFRHAANAVRKSDHWLGDYFRRMKSKEGNKYAVVATANKIATIYYNLVRYKEAFKPVNLEQYQQKQHQVKIAYYQKKLTELKQRAA

SEQ ID NO: 292850 - protein, 351 aa, unidentified
MAKKIWAGLDVGVETTSVCIIDDQGEVLHEAVCPTVLKSVHAEIRPLRRRRFARVALEAGTGVNLARGLRTLGYSVDIYESRQLSKFLRVRCNKTDAGDASGIAEAGRVGASAVSKVYLKNLDCQALQSRLAIRRHLIRERVAAVNLLCRQLEVYGGRVQGSSRARRLRETVEAELKQLFGKESSPLVAELRLLLDRCEDMVFHQRALDDELERLALDNEVCRRFMAIPGVGPICALTFYAAVGEPGRFARSANIGAYFGLAPTIHQSGLTNRRGRISRMGSAAMRSLLVQASMTFMRLSSADSDLRAWASGIEARRGAARARVALARKLAIVMLSMWKTGETYRPRRATA

SEQ ID NO: 292851 - protein, 342 aa, unidentified
MWIIGCDYHARFQQIAWVNQETGEYENRRLDHKSGEAERFYRGLAGQQVRVGMEATGGMRWFERMLGELGFELWVGDPGKVRAAAAQKAKTDKKDAELLLRLLLEKRFPRIWVPTVAQQDARQLVLHRHRLVQTRTRAKNQLQAIARNEGLFAQRRVWTQAGQVELMNLPLSPWATVRRRDWHELLGELNQRIRPLDQALQREAEQRPEVQLLMTHPGVGAVVATAFVMTICEPGRFQTSKQVAAYLGLVPKEQSSGNRRQRLGHITKQGNRMVRGLLSEAAHIAVREDPQWKRKYLRLAMKKNRSIAAVAIARCLAIRLWWMWKLGLEYRQILQESRSHAE

SEQ ID NO: 292852 - protein, 400 aa, unidentified
MNAVGIDVSKGKSTVAVLKPFGEVAASPFDVIHNDSDLKQLAELIKALPGESKVVMEYTGTYFEPIAQFLHNNGIFVSVVNALLVHDYGGNSLRKVNTDKKDALKLASYALDRWSELEEYVPADEQRKTLKLLNRQYNQSVKIQTMIKNNLISLTDSVFPGINKLFTSPERQSDGHEKWVDFLKNFPHRDSVAKLYLSSFKAKYKSWCSKNKYNYTDSKAEEIHAYARSVIAVLPLNDSIQLLVTQAVTQLNTILETVSSIRREMDRIASSLPEYETVMAMYGVGKVYGPQLIAEIGDTRRFRNRRAITAFAGLDAPPYQSGQLDVASRHISKRGSSALRKVLFQITEIFILNKPEDEPVYQFIDKKRSEGKHYYSYRIAAANKFLRIYYAKVNQVLNEQ

SEQ ID NO: 292853 - protein, 412 aa, unidentified
MKDLLEISCGLDVHKEKIVACILTGPLGKPTRSEIREFSTLIPDMIALRNWIVSKNCHHVAMESTGIYWMPIYEILEDAFYGDITLLVVNARHMKNVPGKKTDMRDSEWISTLLRAGLLNGSFIPEKRIREFRDLNRYRKSVIRDITSQKNRIEKFLQSSGFRLSSFISDIFGASGRNIILHLMEHGQIDKAALDSCLKTKTRNRIDEILMSVNGTLSEHQKAFLRILMTHYDSLKKHLAEIETSLEKDMAPFALQVEQLNSIYGISTTASCAIIAEIGIDMKPFKTAEHICSWAGLCPGNNESAGKRKSTSVTKGNPYIKSMLCEIAWVIAGKRNTYLSAWYWRIKQKKGAKKAIVALARKLLVIIYTMLKQGTLFDESCFETRRKHCEQKQLSRYIRELEKHGYHVEAQS

SEQ ID NO: 292854 - protein, 363 aa, unidentified
MSIYCGVDFHTRQQLIKWCDTRDGEIKEQRLFHDSLDEVRNFYSQFSDEVLVGIEACGYSEWFERMLHDLGHEVWVGDATKIRRRARSRQKTDRRDAELLIDLLLKDEFPRINRLSFESLEILRRLRYRHRLVQMRTRMRNSLQAIALGSGIVLKSKLRTKRGRAKLNDLPLSPVLSEQRSGWLEMIGEVERRIAQVEGELEKAAVGDERVRRLRTHPGVGLLTGLALVHTLCPISRFANSRKVTAYVGLEPRESSSGERKRMGRISKAGSRVLRFLLVEAGIKATREDAELKKLYYRVMHRREQARAKIAVARHLLIHAFIMLRDGIDYAEFKVRGAEMRSDARTVHRLTMPDHLIERPASE

SEQ ID NO: 292855 - protein, 411 aa, unidentified
MYYVGIDIAKSFHVVSVIDDNEIKVINKPFKINNDNKGFEKLLTILDSVTLDKDCFLIGIEATGIYGENLLEFLNSKGYSVKLLNPFQTSRYREQITMKKVKNDNIDSLVIALFLKDGKYSSGYVTDDEYQSLRTLYRNRTSIESDMKEVKKRILTQITVTFPEFEGFINPFTISGLALLDKYPTAHHYKHSSVDRIMKVFNHIQGNNFNKDKALKLLELSRESIYSGKAKDARAIAIRSTIRLLKMYLSEIDIIEAEILSLLDKKGINSAALDELPESNTLIDNLKTIPGVSDKTVAAVISECGDLTRFPSIPKFIGYLGLFPTENSSGNSKNIGHLSKRGSSLVKHALYMSATSCLVHNKQMKQLYDTKRSQGKSKKEGLVAVSRKLATIIYSIFKYNTPYNPERVFTN

SEQ ID NO: 292856 - protein, 429 aa, unidentified
MNMNTNTLPQPATAPAAAAPPPVAWIGLDWGHHTHAFALQDRSGPPAEGTLLHSAEALHTWLRDLEKRFGGRPVALAIEASRGAVIHALVQYPWLTVYPINPVTSARYRSAFTPSGASDDLPDARVLLELARDHAAKLRPLETQDAQTLKLTGLVEARRDTVDRRTQVLNQLTSLLRAYYPQALELVGGLDTELAVAFLSRWPDLLTLKAVQPGVLKRFYYAHHLRRPERLTARLQFIQQAVALTTEDARVSVAVLQLRCLLDQLRAFRKHVAILDAEIKTTFAAHPEVALFRDLPGAGPALAPRLCVAFGTLRTLYPDPASLQKHAGVAPVREKSGQSLWTHWRWLAPTFLRQSWVEWAGQTVVHSAWAKRYYERMKAKGKGHHAILRALAFKWIRVLWKCWQTRTPYDETRYLKQLVHRKSPNAVPA

SEQ ID NO: 292857 - protein, 413 aa, unidentified
MEIIYQCCCGLDVHKRSIAACVRRLLEDGGIHQETRTFGTMTRDILELADWLAAAGVTHVALESTGTYWKPVYNLLEGRFRMVLVNARHVKHVPGRKTDVKDCQWLAQLLQAGLLRGSFIPERPQRELRDLTRHRSQLVGERSRAANRIQKILEDANIKLASVATDILGASGRDMLRALIRGETDSEKMADLARRQLRSKIPELRPALEGKVTEHHRFMLGELLNHLEYLESRIEGFSRRIEEVSRPFAPAIAKVATLPGFDQRSAQNVVAEIGADMDTFPSAQHLASWAGVCPGNNESAGKRKSGKTTKGNRWLGSALSQSAWAAARKKDSYFQAQYRRLAGRRGKKRAIVAVAHSLLTIIYHMLKDASEYRELGCHYFDKLNAHRLLPHLLKRIKDMGYQVTLQELSQEAA

SEQ ID NO: 292858 - protein, 320 aa, unidentified
MIYIGIDISKDSFVAAYPTKSGYTTKTFNNDTKGVRQFIKSLPDESHCVMEATGNYSMLLLYLLQQAGILVSMENPQKIKHFSRAMMSVAKTDEIDAKLIAIYGEKMNPAPYKIPSESILLLKQKRTVLRQLKKHLAATINLQQSLAVLPKQDTTSKVAVEQTIKFLHKQISKMEEEITNLSNKEFKRQMDLLTSIKGIGNTLASALIVATGGFTYFTSAKQISRFLGICPTYQQSGTSVNIKGHINRNGDTHLRCQLYLAACSSLRCNTACKQAYDRLRANGKSGKSAIIAIANKLIRQAFAVVTSNRPYIDGYVSTLA

SEQ ID NO: 292859 - protein, 452 aa, unidentified
MAKKGKRRSDQLPVLHPDAAGIDVGASELFVAVSADRDPQPVRSFPTFTRDLNALADWLQQCGIRSVAMESTSVYWIPVYQILESRGLEVYLVNAQHVKNVPGRKTDVSDCQWLQYLHSVGLLRASFRPPGVICAIRSLWRHRSSLIRMASEHVLHMQKALDQMNLQIHRVLSDITGLSGLRILDAILAGERDPVTLARLCHSRVKSSEDTVAKSLEGDYRPEHLFALRQSLAAFRYYQELIVQSDAEIQRQLGDLETATIAEKTTPKRTKASPYQRRRYEPKEFDLRSELYRIFGVDLTNVPGISAITAQTILCEVGTDVSRFRNASAFASWLGLCPEKKVSGGKVLYTKSRRVRSRVATALRMGAHSLHHAKDYLGEFFRRITRKLGKPQATTATAHKLARIVYHLLSTKQAYDESVFHRCEEDTLRRAELRLRKHAAKLGFHVIPAANG

SEQ ID NO: 292860 - protein, 413 aa, unidentified
MYGEDSTIVTSARRIVIGVDTHLDTIHLAALTDAGQLLGDAEFPTTPTGYYVALRWAQSFGEVFIAGVEGTSSYGAGFTQALQGNGIHVVEINRPDRAARRRQGKSDPLDAYSAARAVLAGHSLAVPKDSNTSALKALLIARRGAVKARTAAIQQIKDLLVTAPAELRERYRRYTTTLRLVQALARCRPTTDEDPTTVSVLTACKALAQRIEFLERQTDELTAELDALTTTLNPALRAAYGVGPDTAAQLLVTAGTNSHRLRSEAAFAMLAGVAPIPASSGKTIRHRLSRGGDRAANNALHRIALVRWSHDPRTRDYITRQLAAGRSKKDILRLLKRAIAREMFTHLTAPCPVDDYSDLRPARQTRNITLTAVANHFGVWPTEISRLEPGLTRNDALAANYRQWLNTQLIDAA

SEQ ID NO: 292861 - protein, 354 aa, unidentified
MPRKRILVKSIDTSISYQVIGIDLAKHLVSACLITGAGEIFGIDRLTYDDLLKSAERMSPTLFCMEPCPEVHYLAEKLQGYGHHTKVIDGAAVKEYIKTHFGGQKTDLNDAQAIAFLSLDTNLPEITPKNTSNSVLSSIQAVREQFRKEYIQSFVSLKGICQRWGLPISKGVMNKNKVEELVSESKKIPQEVKDWLLELLQSCRELQKRLNKISKYLKEYADNDEICQKIMSVPGIGPITATRLKATIGDIQRFEKPKSIVAYYGLVPKSKATGHNEKKGGITRRGDRVARSLLIEGAGVVLNLAAKGFLRSKPLNKWIEKKEKTQNALGKALLCIGGKNAENSSCYPNPRNFL

SEQ ID NO: 292862 - protein, 345 aa, unidentified
MRHYAGLDVSLEETAICVVDETGKVIRELRAASEPDALVETLAATGFTFERVGLEACSLSSWLHQGLTRAGLPALCIETRAAKAAMGAMPNKTDRNDARGLAQIIRTGWYRAVHVKSTPCRSARALLGARRTMLNKQRDIENAVRAVLREVGLKLGTPSRKLFAGQVRELASVDAAISDIVEPLLAVLDTMARQIEQLTKRVLDAVRVEPICRRLMTVPGVGPLTALAFRATVDQPGRFRRSRDVGAHLGLTPRRYQSGETDIQGRISRCGDELARTALYEAAHTLLTRCQKWSTLKAWGMRVAERRGMAKARVAVARKLAVILHRMWSDQAEFRWSTAPALAAV

SEQ ID NO: 292863 - protein, 403 aa, unidentified
MNSVGIDISKGRSTVAVMRPFGEVVISPFEVRHTDSELSELARQLKSLDGETRVVMEATGNYHTPVAKLLHDAGLYVSVVNAKLVHGYGNNDLRRVKTDKKDSVKLANYGLDRWLALTRYVPEEDTRLLLKNCYRQYRQYSKVQTVLKNNLISLLDTVFPNVNRLFSSPAREDGSEKWVDFVAEFWHCRCVSEKSEKAFANKYQRWCRKYGYNFNEAKAHTIHAEASGHIGVMPMSETTKLLVEQAVAQLRATSTALAALKHEMQALTSMLPEYPVVMDMFGVGPTLGPQLIAEIGDVRRFYSKKALVAYAGLDAPPNDSGDVTGRHKSMSKVGASSLRRTLFLVMSVYLQTAPLDEPVYQFMDRKRAEGKPYRVYMMASANKFLRIYYATVKAYLESLEHTA

SEQ ID NO: 292864 - protein, 340 aa, unidentified
MTIATIGIDLAKNVFAVHVVDHNGKTVLVKSRVTRAALPGLIAGFPPCIIGMEACSGAHYWARLFRQYGHEPRLMAAKFVSPYRMAGKSGKNDAADAQAICEAVRRPHMRFVPVKDESQQSMQCLHRTRQGFIEEKTATYNRLRGLISEFGVIAPQSTDGLRHMVSAQKDSLPLQVQQCVDDLLEHVDRIEANIAEYDRILSRMAKTDHRSQRLMELKGVGPTTACALVASIGNAHDFKNGRQLAAWLGLTPSQYSSGGKSKLGRITKAGDSYLRTLLVQGARSALIGAEKKSDSFSRWACSLVERRGYWRAVVAIAAKNARLCWASLHYGDDFRLYSAG

SEQ ID NO: 292865 - protein, 387 aa, unidentified
MARKRTLSTLDTSIAYEAVGLDLAKEDTAIAAFGPDHEGPYLIDRMPYDKLYELLADMAPTLVAMEPCSGAHQIAEQIQELGHEVMMISGRHVQAWVKDHCNGQKTDLNDAFAILNLAYDRWLTPIRGKTREECRLLALQASYRQLKGQRTKTMVHVKATLHAWGFPIRAGSFNQKALHELIDANREAFGDEVVETLHLMINRVHDLDHDIATVLKLLTEATQRDPRASLLRSIPGFGVLTTSRWCAVVGDIARFDTPKQTMAFIGLVPNNRITGHHTETSSGREARGQGKMSKRGDKMLRSLCILGAGALCLMVRNDRLPDCPFVASIKERLASPRPWFKVLVYVAAKLVRIATALLKYGETFSFEKAGISKAVLKQWELEQAKAA

SEQ ID NO: 292866 - protein, 351 aa, unidentified
MKYYTTTTEFNCGIDLHSKQMYVCIMDRQGKILVHCNVKGNDFGHFLKLAKPYLHDLTVVCECTFNWYWLADACFAAGIRFVLAHALYLAHIHGGKNKNDRLDSEKLAHLLRTNLIPPAYVYPSERRPMRALLRQRMSYVWRRSEVLAHVSTKQSAEGLAPAAKSGHNRDVWEDRIQAQYANPLHRFGAGCDLEIVRAYDRQIHKLDKETERLAKQHEDRDYRLLLTVPGIGRVLALTILFEMDTVKRFPTVKDFISYSRLAKGSVASAGKLKGLCGGKMGNAYLRWAFGEASVIAKRNHPLLKPYAERLVAKHGKYRGNAILAAKLARAVYHMLESGTVFDAERVVATSI

SEQ ID NO: 292867 - protein, 354 aa, unidentified
MEFAKIDTEYYCMTDLHSDSLYATVMDRSGKIHFRKRIANNFDSFKDYMTPFMDDLAVGVESTYNWYWLGDGCHEAGIPFYLGHALYMKAITGGKKKNDRLDSKIGADLMRTNFFPLAYAYPKEMRSTRDLLRRRNYFVMLRAALYSQILTIFAQQAVLDVGTEHLKKKPTRRQLIERVSDTDLQLSLECDLDSVDAFDPIINKLEKRIIHQAKHHDHKMFALLETTPGIGDILALTFTYEIHKIDRFPSVQKFSSYSRVVRCDRSSNGKNTGGGNPNIGNPYLNWALHQIIVRAQKHSPLIRSYFQRLVSKHGPRKARSIIAHKFAIALYYMLKNGDAFDEVKFVQSKLSHKK

SEQ ID NO: 292868 - protein, 355 aa, unidentified
MESLKYVGLDVHRDTISVTVLEESGKMVMQTILATHAAALLDFVGGLRGSVHVTLEEGTHSVWLHDLLVRRVARVVVCDPRQNALLKAGNKSDKIDARKLAELLRAELLSPVYHGETSTVTLKHLCRSYAALTEDTTRVMGRIKALYRSQAISSAGQKPFGRRHRGQWLAQLTQEGMRRRAERLYEELDALQSLRREARRELIVESRKHDAVKLLCTVPFLGPIRAAVLVGRVQTPHRFRTKRPFWAYCGLALETRSSADYHFQEGQLVRAKKPVFIRGLNVNHNHDLKNLFKSAATTASAMPGPFHVFYENLLIKGMQPAMARLTLARKIAAIALCVWKKGEPFNAEHLKPQAA

SEQ ID NO: 292869 - protein, 384 aa, unidentified
MNKHNILFIGLDTHKEFVEVAYIEGQRGTQAVHFGRISSAKTAIVKLAKQLQSKYSQATLHFVYETGPCGYWIYRLLTSLGHCCYVVAPSLIPKKPGDKIKTDKRDALKLAKLLKTEDLTPIYVPEPEDEAVRDLSRARETAMKDLKDAKYQLKALLLRNNINYAGTANWSAKHLRWLTELVLPHPAQQIALQEYLHTINKRVARLKRLDNELTHQVQAWRYYPVVKAVQAMRGVRLLVATGLIAELGDIRRFDHPRKLMSYLGLVPSEHSSGGKRHIGAITKCGNGRARRLLIEGAHSYRYPANISSDLQLRQEGLPKAIVDKAWQAQLRLCRRYQRLMHRGKHYNVVVTAIAREMIAYIWAIAKQVVLVDVNPKLRLARVPA

SEQ ID NO: 292870 - protein, 402 aa, unidentified
MFKTPPIDSTFPGRVREASSGARSHADAAAGPQPIVSGSNTPVTEQGSSRPRVHSPEQPSEPSPRLKRSHSQERVPHVTTSPVTPSPQKSFAGIDVSKDFLDWAGSGSPQSWRHANDPDGIAALIRRLQEHPPECIVVESTGGLERPLLEALLDAHLNVALVNPGNVRHMAKGLGILAKTDAIDAHMLARFAELATPRLLEKRPAVQAELDALVTCRRQLLKSKTEQTNRLATTASPAAQKTLKAVVLFLDKQINKLDKKIREHIDSDGQWKHVDELIRSAPGAGPVLANTLLANLPELGKTENRELAALVGVAPFNRDSGHFQGYRSIHGGRADVRGVLYMATIAAMRCNPVIKAFGDRLLKAGKKPKVAIVACMRKFLILLNVMVRENLQWNELSLVKNA

SEQ ID NO: 292871 - protein, 353 aa, unidentified
MKPKTESDTALPMVIGVDIGKEVFHLIGFGGDGKIVFRRKIKRLGFAAVFEKVPPCIVGMEACLSAHFVSRTLRTLGHEPRIIPAIYVKPFVKGQKNDYNDAEAIAEAALRPNLRFVQEKSQDQLDLQACHRVRARLVSRRTATINQIRAFLIEQGIAVRSGPRALRTSLFAILENRKDEISPRMARLILDLYKDWCHLDERIDTVTGEIEELSRVEAKCQRLMTVPGIGPVISTGLVAAIGSGEAFERGRDFGAWLGLVPRQYSTGGRSVLGRISKRGSKYLRTLLIQAAKVLLMRPHNWPRYSFGAWLKTASERLHRNKLAVALANKLARIAWSVLRHDKAFDTHLETAAI

SEQ ID NO: 292872 - protein, 404 aa, unidentified
MNDSMIGYAGVDWAMDGHAVCVVNGHGTAVIEFDVEHSAEGLSEMCRRIAGTGARRVAIERPDGPVVDALLGAGLEVVVVSSRSVKALRERYGTSGNKSDRSDAFVLADCLRTDGHRWRSLEPDSPATVTLRGHVRARKDLVETRVAVANQLRAHLRIVFPGAVGLFSAIDRPIALRFLERFPSATSAGWLSEKRLATWLRANSYSGSKDPAELYTRLSAAPAGVIGVDGDARGAITLAYVNVLKTLRTQIDELNTRLDELLDAHPDAPIFRSLPRCATVRAATLLAEIGDCRARFPDPESLCCLAGVAPSTRASGRHRTVTFRWSADKKLRDAICDFAGDSWRGNEWAAHRYHELRASGKTHPHAERILARSWTHIIWRCWQDNTTYDPTRHGAHQRLTTQTA

SEQ ID NO: 292873 - protein, 482 aa, unidentified
MKKRTIFPYQSQELNTLFEEAGNNAKVMCIPIDYAKKEHVVMFCNGHGNILRKPFSIKNSPKGIEYLTQQVLSSCHHRGIDPKYAFFGGEDVGSYAENFINTLRSGGWLIAGVNAHDAKKQRANVQASTDKLDLMGIASMLLSRRANCSPAQTGIYRNLRGLTRHRKKLVDMSTEEKNRIYTVVDQIFPGFLDEKNTGISPFSNSSLYLMADRFSPAQIRRRKRQKLIETLRRYGTVKPEVSADKLQLYAAHVLNTPTEYLSALQISLAQHIKHFNCLQESTEQLEKEMALWLAQTQGAFLTTLRGIGIVLAAGATAEIGDPTKQKPVANLVSYSGIIPRVKQTGGPEGQTRTGKVSKRCNHILKNYVVQSAHHIGLHGPEDLMADYKRRDANGQHADFGIGRRYIRTAMCLMRNAQIYIPKRLRSKGINPEERAGYFLMIWPSLRDKWAKLGALETAFTNDNPLGRWRNMVQELYEIKLKL

SEQ ID NO: 292874 - protein, 402 aa, unidentified
MIQRACGVDVHRDGFVAAILTSRGCESRDFEKSLEEIEAFKAWLRASRCRAVVMESTGVYWIPLYAALEGEFDVKLANPERTRKTPGRKTDQSDSEWLAYLLRAGLIEASYIPERKIRVLRELTRLRTKMVQNRTDYKNRVHKVLQRCNIRLGSKLHSVFGKAGLEVLNGLMAGRSMNEIVDESNSRVLKMKRDELEKIVRAGLDQEDVFVLKRCLRMIKSLDEELKELDARISMLIADREKEVKNISKVPGVAQVSASSILAEIGDARRFADDKKIASWSGLCPSVYQTADKNLTGSLKRGSKNLRRMMIQVAHVASRASDSRLRLFFLRVAAKRGRKKAYVALARKILCIIHHLLVTGEEYVEEGFVKRFRLRMRALEGLPLDEMARILAGAGYLVQAPA

SEQ ID NO: 292875 - protein, 230 aa, unidentified
MVSRGIDISKSSFVAAYPSTNGNPTKTFPNTTARMRELIGTLAVAEHHCVMEATSNYGCCCTCYIRTVLPSVLTPPKKLIKHFSRMMMPVTKTDEKDAYMIAMYGEKMNPPIYKMPSQATIRILTTEGFTYFDNAKQLSRFIGICPTYQQSRTSVNIREHINRNDDERLRSLLYIAFWTALRYNSRECYIRLKANEKPFKVALIAVTNKLVRPVLTITTINSIYRWICPG

SEQ ID NO: 292876 - protein, 416 aa, unidentified
MKLFVGLDVSSDKLDACFLTDTLTILHQGSYANDIEGATQIKETIVNMFEQFAFDKVVIGMESTSMYSAHPLIFFHEDEDLKNMNCVVTIEDPFKIHNYAKVFNADKTDTNDAFFIADFLRSERYSHSPLKEEQFLSLQRLTRSRMQLVNMLVETKQHFIENLYYKCNTLSRELRDEESLSTTVFSTSIIELITSDMGLDEIAQLPLNKLAETLQTLGRGRFKHPEKLAKTIQKAIRSSYRLSPTFETSIDIVLATLVGQMRSLEASIKQLEKGIERIVKAMPEYQCLTSIPGVGLVYAAGIIAEVGQIERFENQAKLAKYAGLHWKKSESGNYKSENTPLTKRGNRYLRYYLIEAANSVRRHLPEYNEFYRKKYQETPKHQHKRAIVLTARKFVRLVDTLLRNHQLYTSPRSVES

SEQ ID NO: 292877 - protein, 367 aa, unidentified
MKKLSTAAANEIRNFSQQKLTIGLDLGDRSSWYCVLDETGQVRMEEKVATTPKALRERFAVVPRSRVALETGMHSPWVSRLLSELGHEVIVAHARNVRLIGESRKKDDRLDAQTLARLARIDPQLLCPVKHRSAKAQADLTVIRARAGLVRARTALVNTARGLAKSYGERLRGCNVRNMNPEKAEGLSPELQRALEPLLAAIESLSERICEYNEGIDEIAEKSYPQVALLKQVKGVGTLIALTFLLTLEDAHRFGKSRDVGCFLGLQPGRRNSGQSEPQMHISKEGDPYLRTLLVQGAQHILGPFGADSDLRRWGLKLAERGGRNGKKRAIVATARKLAVLLHHLWVSGEVYEPLRNSREHVATAAA

SEQ ID NO: 292878 - protein, 339 aa, unidentified
MEHWIGIDVSSATLDFALLDEKGEHLESAQVSNDRKAVTKLMGQWRKRHGVDPSKSLICLEPTGHYTLMLLNLVVEQEWPTWLAHPLDIQQAMGIKRVKNDKVDALRIAQYARTFREKARLFTAQNLKLDKLKHLLTRRQHLVRVRAMYKKHLSDLNRYMDADIKKVFDPMDRRLIAASDRAVLRIEQLIMAQIRGDQQSSAQYDLLRSIPGVGPQLAAYLIALTDGFHRFTDPRELACHAGVAPFERTSGSSVRGRTQVSHKANKTLKTLLHMAALANVQRAGELQVYFRRKVDEGKKPILVVNAIRNKIVHRVCAVIRNGQAFKPFLEPSKTHLEMT

SEQ ID NO: 292879 - protein, 339 aa, unidentified
MQIHSIGIDLGKTTFHLVALGSVGKVLVRKKFTQKQLLAYTANLQTSLIGLEACSGAHFLGRALRKQGHDVRLIAAQFVKPFVKSNKNDFVDAEAIAEAVERKNMRFVPIKTDDQLDLQAIHRVRDRLISRRTAVINQLRAFLLERGMVFAQKPAKLKAAMADILENAEADLTPLMRNLIDTLWGEWKLVEQQIEELNDELERISANDAGCTRIRKIPGIGPVVATAIVAAIGNGAAFRKGREFAAWLGIVPRQYSTGGKAKLLGISKRGNVYLRKILIHGARAAVLRIKRDRAPIGAWLDALDHRAPKNVVVVAMANKLARIAWAVLSSGNDYRPVIA

SEQ ID NO: 292880 - protein, 345 aa, unidentified
MQVSTVGLDLAKNVFQVHAIDEAGAVLVRKALRRRQVMPFFSRLAPCLIGMEACGTSHFWAREIAALGHEVKLMPPAYVKPYVKRGKTDAGDAAAICEAVERPTMRFVALKSPEQQSMLALHRSRDLLIRQRTQLVNMIRGQLAEFGIVLAKGIQHALKLVGRLLDGEALDIPALAAKVIIILAEQVRDLQVRVGILERDLKTWSRDNQVVVRLQTIPGIGIITASALAASVTDPQQFTSGRQFAAWLGLTPRARSSGGKERSGRISKMGDQYLRRLLVNGMTSRLRWLRHHPETQPWAAGLLQRKPAKLVAVALANKVARIAWAVMTRGETYRAPQPSTREVTT

SEQ ID NO: 292881 - protein, 316 aa, unidentified
METPQPFVGIDVSSQRLDVDSLPASHYFSEPNTEDGIASLVLRLRKLNPQIVLLEATGGYEIPVAYGLYEAGLPVVIMNPKALRHFAKAIGKLAKTDKLDAQVLALYAQSIQPPVRPLKDQEQLELANLMTRRRQLQGMIVMEGNRHRTCTPKVRGNIDQSLAHLRQLLKDLDREIHDSIRRTPLWHENSEILQSFTGIGPKVSASLIAVIPELGTIPGAKASALAGLAPMNRDSGQYRGTRKIQGGRPAVRQALYMAALVAAHHNPVIMEFYQRLRLAGKPAKVALTACMRKILVILNAMLKNRTYWNPQLPLAA

SEQ ID NO: 292882 - protein, 385 aa, unidentified
MTVWTVSRAATHGETVRCLFAIELSKQSWVIGFITPLSSRISRRILSGGDWKGLLELIEEVRARVSREMGRTVEVMSCYEAGYDGFWLHRQLEAHGVRNYVIDPASLQVDRRVRRVKTDRIDTERLLRSLMAYLRGEPKVWSLVRVPSVAEEDARRLHRERDRLICERVQHVNRIKGLCALQGIYDYHPLRPQAVARLEQLRTAQGGALPPRLKSEIKRELHRLEVVVEMITTLEAERDAIVEDEASTHVNAEKIQALHKLKAIGPEFAAVLVGEIFHRDFNNRRQLASYVGYAPSPFQSGNVAHDQGISKAGNRKGRTTGIELAWLWLRYQPDSDLSVWFRARVGTVKGRIRRIAIVALARKLLVALWRYLETGLVPRGAVLKG

SEQ ID NO: 292883 - protein, 427 aa, unidentified
MLDKDYNRQVERRQRIKRTTLVTGIDIGDDFNAIAYMHKEGTVLGRYPKVFNSREGFDQFVRITEELKKKHGMKDVLIGLEPTGHYWRKIAYFAMEQGYAVRFIKTTSVKHERELNESSSAKSDIKDAITLANLTREGKYIDTVIEDGVSRQLRTLAKVREKIVRQSTGAKNLLHAVLDDYFPELKKLFHAMHTRGLWAVLETCPFPEDVLKCDQSALAAVITKASHSKTEGNKKAKALYLAAQTSIGLKYVGDADRYRLTVCLNDVKRTDRMLHEIKKEMMELLQQLPAARYLLSIPGVGPLSAAIFFGELGNPEYFHHAKQIIKYAGYDPQESDSGKRIGRKVISKKGRWLLRKYLYLMSVSAVNHSTFFRKYYQRRLKTKNRFGQLLKKKEALCAVAIKLIKVIFALLRDKREFQDTVRFALAA

SEQ ID NO: 292884 - protein, 349 aa, unidentified
MRFYTNQHRHYCGIDLHTKTMYVCILDRDGQVLVHKNLPSNPEAFLEAVAPYRDDLVVAVECIFTWYWLADLCAAEGIAFVLGHALYMKAIHGGKAKNDRIDALKIVMLLRSGILPQAYVYPTGMRATRDLLRRRLHLVRKRGQLLAHIQMTNQQYNLPAFAKRIAYPSNREGVANHFEDRVVRKTIAVDLALLDRYDTLLTDLESYLVRQAKQHDAQAFQLLRSIPGVGKVLALTILYEIHDVHRFDRVQQFASYARLVKCAKESAGKKHGTSGAKMGNVHLKWAFSEAAVLFVRHSEPGKKLLARLEKRHGKGKALSILAHKLGRAAYYILLRGKAFEIERFVATVN

SEQ ID NO: 292885 - protein, 409 aa, unidentified
MRYYVGVDWADQTHAVWVVDASGTKITARTVPHTAAGFSEWGRELDEWRAQGIERWAAIERPDGRVVDFLLDHGVVVYPVNPKALDRARDRFRLSGAKSDAFDARVLADFLRTDYLHLQALQPSSDVAQELKLLTEDCQRHIRQQTRLVNQLTTTLKAYYPRALEVAELTTALAREFLQAYPTPDALTALTTRQWQRWAHGRRLSEARIGALWAVLQQPQLPVPAHVVRAKARLMLSLVEQVTPVVAAVAQYRKAIDDFFASMPAAQWARTLPIGKHGITAPTLWARLGDAPGRWESFRHLQAQAGTVPVTKRSGKQRSVHFRFACDKSLRHVVDQVAFLSLLSSAWAREYYDQQRARGHAHHQALRAVGAKWLKIIFVMWHRQVPYDEPYHLATMARQQLRQRQQQIA

SEQ ID NO: 292886 - protein, 414 aa, unidentified
METCLFVGIDTHKDSNTAAVMDSYFNTVDIITFSNRYGGFDKFMEKLSTIAGKKSMIFGLEDSQGLGFYLADYLIQKGFRLLDVNPIYTDRARKATIHRDKSDEGDAVLIAKALIRERNKLSPVKIDKASIQIREMVRYRQMLVEESTRLKNRLHNLIFSQYMGIANIFSDLFSKAALAFFLKYPDPGHLIGVSEESLANLLKAHSRGRYGIDKAKSILSLLPVSIDKSLSGTRAYIIESHIKRFISLKAEMDSVNEKIKELVEKSCYSCLTSIPGIDFVTAAKIISQVIDIGRFRSASKLAKFAGIAPREKSSGRKKRHEKSKYGKKFLRSTIFYMALFHIGRTRTGKDKNSISRAYYLKKISEGKTKKEAITCLSRRLVDLVFAIMRDRSIYNFSKSKFLSEHTNILDTVAS

SEQ ID NO: 292887 - protein, 355 aa, unidentified
MTSTKYIGMDVHKESISIAVRNSAGKVVMECVIETKASMILQFIDGLRGDLQVTFEEGTSAAWLYDLLKPHVTKLVVCDPRKNKSMREGNQNDKIDARRLAELLRLDHLTPVYHGEHGLRTLKELVRSYLTITKDLARVMSRVKAIYRSWAIPCTGKQVYAARHRAEWLGKINEPGVHRRAEFYYQQLDALRVLRQEVRRDLLAESKKQKAWKRLCEIPSIGPIRAAVLLGILQTPHRFRTKRPLWNYGGLAIEMHSSADHRRVDGQLQRSRKNVLVRGLNRNCNHDLKNLFKGAAAVASSKPGPFQEFYAGLVAKGMRPEMARLTLARKIATIVLIVWKKGVCFDASHLKPQTA

SEQ ID NO: 292888 - protein, 459 aa, unidentified
MAKQVGKNKEMQKADGPGGLPPLNRDAAGIDVGSAAHYVAVPAGRDPEPVQEFGSFTADLHRMARWLKACKIKTVVMQATGVYWTALYDVLESYGFQVNVVNARHTKTLPGRKTDVQECQWLQKLHTFGLLNNSFRPAEEIRVLRSYMRQRENLVTAAGTAIQHMQKALTEMNIQLANVISDISGTTGMRILRDIVKGERDPDKLAMHKHERIQASRAEIARSLEGTWRPELLFVLEQNLDLYDTYLKKIMECDQRIDEHLKAMDAKVGATQLAPAPRRMRWPRKHEPRFNLREQLYRITGVDLTQIDGVDVQTAQTVISEVGVDMSRWKSEKQFASWLGLCPDNRISGGKVLKRGTRQVVNRASTALRLAAWGLLRSQSALGAKFRRLRSRLGAPKAITAMAHLLARLIYRMLKYGHEYVDKGMEYYETKYRQQQLQWVAKQASALNMQLIPITEVAG

SEQ ID NO: 292889 - protein, 394 aa, unidentified
MAFKIFRKNCCGLDVHKTWIHACIGITDTNGRTEYKQARFSSFTKGLQELADWLAKYDCNDVCMESTGKFWIPVFNILEKTCWVTLAHPKYTKPQKGNKTDRKDAKWICDLYMCDMVNPSFIPPPDIRQLRDLMRYRSKLTNAMTSEKNRALNCLTVSYLKLDDVFSDVFGKSSRSIIRYILEHPGETFQVAPFIDRRCKHPVEEIQAVIDGAISHQQAVKLRECLQHLDELEVHKTNVEKEILCLVQQYPYQLELLQTVPGFSGNIMTAIALISEIGADMSVFPSAKHLVSWAGCCPRNDQSSKKVKSTRISRAGVYLKPLLVQVAIQPFTANADKLSAAGALEIRCQICDGRFLSMWAALFIFLGCPLPPCPKNLHVHNGRIVILASVAWIF

SEQ ID NO: 292890 - protein, 408 aa, unidentified
MNTLYVGIDVSSKSNVIYLMLPNGDKHSNFSVANSHEGSTQLVKRILSALTSHSLDTVLIGLEATSVYGDNLVYFLREDATLAPFNRKIHVLNPKQVKKFHDAYNDLPKNDYVDSFVIADCLRFGRINKEVYMGDYRYKALQNLTRARFFAVQNLVKEKQRFMNVLFKKYSTMTQEKVFSDTFSTTALAVYDEFESAEALANMDLHGLTDFIIEKGKNRFPDPDAVAKAIQKAARSSYRLPKTVNDSVNQVLSISITSMKALESQIKEFDKAIKAQMELLPNVLISIPGIGPVYSAGIMAEIGDINRFNSQAALAKYAGLAWKQHQSGGFESEVTRLIPSGNRFLKYYLCEAAFSLVRCDKEYSDFYRLKYKEVNRCQHKRALALTARKFVRLVFRLLKDNRLYCPAK

SEQ ID NO: 292891 - protein, 340 aa, unidentified
MRLIGCDLHAIQQSIAMFERDTGAVIEKTLKHEGEAVREFYASIPPPVVVGIEATGSMGWFLRLMEELAIECRVGHPVAIRKAEARRQKHDRRDAALLLRLLAEDRFPTIWMPSTELRDLRALLLHRHQWVRMRTRVQNALHAIAMAHGVRRGHTLWNREGQALLASLPLAPHTAHRRSELQALYQHLDAHVDRLGERVKKVAEERPRATLLMTHPGVGSVTALATEVFVGDPARFLDGKALASYVGMIPSEYSSGKRQRLGALTKQGNPFLRFLWCEAAAHAVRRDPDLQRFYRRKVAQKGFAKANVAAARKLGIRLWIMLRDQIDYAEFCRRGLARQS

SEQ ID NO: 292892 - protein, 313 aa, unidentified
MSPNTTTTIYAGLDIAKSNLQLHLAGQFHDLPNSAAGHRRLLNLLAAHSAVHVICEATGGYERDVVAALHAAQRSLSVLNPARVRHFARAQGQRAKTDRIDAALLTHCGQALRPKPTAARSEQEQQLSELVRRRAQLLDTLVAQRQQTERLTLPVLRRQAQSLVRRLERDLAQIEGWLSELREAVPQLDQRAQRLEAITGVGSTTALGVLAELPELGTLNRRQAAALAGLAPHPRESGQWQGRRTIGGGRAAVRRALYMAALSASRSNRPLREFYQRLRTAGKPAKVALTAVMRKLIVLMNHVLKNPNFALAT

SEQ ID NO: 292893 - protein, 360 aa, unidentified
MCSAFSPQLKELAMKQVTYVGLDVHKKSITAVFGPVKSKPESMKVTNDPKGWNRLTERLKTWDAQAVYEASSCGFEVYDEMTARGWSVVVVAPSLMPKSEKEKKNKTDLKDAVELRSRLMAHREAGATLPIVWIPPVQVREDRELTRRRLNLGEKVSSAKAAILSLLQMHKVREIHESKWTRDHMGWLESLCGEKSRLGRPVRIALDSQLSELRFLLDEAKRLEKELKALAEEPRHQAAVEKLTQVKGVGTLTAMTFLTELGDVGRFRNRRQLANYLGLTPSCHESGEAANRKGHITRQGPPRIRRVLSQAAWVHVRCQPEAKKRFANLAIRRGSKKAIVAVMRRLGIELWHRAVDAIAA

SEQ ID NO: 292894 - protein, 286 aa, unidentified
MQVTTYGLDLAKSVMQLHWVNMETGEIHRKQLKRRALLEFFANRQPGIVAMEACGSAHYWARELRKLGHEVRLIAAQFVRPFVKTNKNDAADAAAIWEAVQRPDMRFVAVKSEEQQSILSLHRIREQLIKMRTMQVNQIRGLLYEFGADLPQGRQRGLKEVPDALADLEKSISPMLLDTVHQQLKRLEGMDKDIADIEKRLMLWKKDQVAVTRLMAIPGVGLLTATAIIATVGEMKSFCSGREFAAFLGLVPRQSGTGGKVRLLGISKRGDTYLRTLLTHGERGQS

SEQ ID NO: 292895 - protein, 340 aa, unidentified
MKLYGAIDLHSTNNVTVVIDEQDRVVYQKRLPNDLALILKELSVYQSELEGIVVESTYNWYWLVDGLMEQGYKLHLANTAAIQQYEGLKYTDDHSDARWLAHLLRLGVLPQGYIYPRAERPVRDLLRKRSQMVRQRTTNLLSIQNLLTRSTGSSLSANRVKGLDVQQVDELLPNGDLALAVKANLSVMCSADEQTEILERTVTERVKLRPQFSFLKTVPGIGQILALTIMLETGDIGRFSSVGNFASYCRCVGSQKISNGKKKGKGNTKNGNKYLSWAFVEAAHFAIRFNSKIKSFYQRKKAKTKVVVAIKAVAHKLCRACYYIMRDRVAFDVTKAFGQK

SEQ ID NO: 292896 - protein, 293 aa, unidentified
MLIHYIDIAKRNFVIAVSSLSKTKTETNNPKGIAHTIEYLKKHKVALVVTESTGGLEIPAAKAIRRAGIAVIIANPRQTHQFAQSQPLTKTDAKDAKMPAFFAQMTAQKEDSQTMPYQPPTEAEEVLEALVNRRNQSADMRTAEKNRLHQVHETQVGSVKQLIAHFDRLIDELDKQIDDHTHTHFDGKAQVAEQIKGIGSITTATLMAMLPELGRLSHKRIASLVGIAPHPRESEETKFKAAALAEGLRCVRHCIWLPWQRHVLNRLFGISTNACCPRVSRIRLPLRHVCANC

SEQ ID NO: 292897 - protein, 363 aa, unidentified
MIVIGADIHKSSHALAAVDGSTGVLAGEVEIRADEAGHLTGLRWARELSRERVWAIEDCRHLSRRLEGALIAAGERVVRVPPRMMGQSRRGEREPGKSDQIDARAVARAVLREGVERFPAAFLDERALEIRLLADHRSDLVAERTRQINRLRWHLVDLCPELEANIPSRQLDSGVMLNRIARRLRREERSARARVALELVTSIRAISRQANELEREVRSLVMAYRPALLAEQGLGVLTAATLIGRTAGAERFPTDAHFARQAGVAPIPVSSGRKDRHRLHRGGDRQLNRALHVIAITRARIDPETRAYLDRKRGEGKTNREALRCLKRHLARHIHRLLSMPPANPNPKTRIELNSAISVPCLT

SEQ ID NO: 292898 - protein, 402 aa, unidentified
MRFFVGIDWASQAHAVCVIDQTGRIHWQGCVPHTAEGLTEVLRRLQRYRRRGHLRVALERPSGLLVDTLVDAGLEVVPIHPNALKASRPRYSAAGGKSDPGDAFILADVLRTDGHRFRPLRPPSDDTRALRALVRGRDDLMAQRVALANQLRALLERFWPGAAAIFADVDSPIALAFLTRYPTPHSAARLGEARLAQFLGQQGYSGRRPVAELLARLRRAPVSQVGATEAEASGEVVGALVAVLTPLVTHLQQLSARLEAAVPQHPDGPLVQSLPRSGAVNAAQILAELGDDRARFATDEQFAAEAGLAPVTHASGQHHAVVFRWACNKRLRRAVTTFADNSRHGSRWAALVYQRARARGCRHQHAIRILARAWARILWRCWQDRTPYDIRRHRAAQMLGVA

SEQ ID NO: 292899 - protein, 395 aa, unidentified
MFIVGIDIAKRSHEAIIIAEDGQVVRKAFSFRNNCTGYNLLLEQVRRLTLVKSQIVFAMESTAHYWLALYARLLKDGYAVMVLNPIQSHSLRELYIRKAKTDARDSLIIADLVRFGRCKASNVPQDKILALRELCRSRAYLVDMAADLKRKLIALLDRIFPEYESLFESVFSKASIAVLSKYSTPQKVKNANLRKLTDILMESSNGHFGEWKAHQLKEAACSSFGIDDSGGVYSTLLGMFLEQILSLTAQADSLEKQISVFFQEINNPLTSIPGVGTVLAATILSEIGDITRFSSADKLLAYAGLDPSVKQSGEFKSNQNRMSKRGSPYLRRAIWLASTVAVHRDPMFQTYYEKKISEGLHYMNVIGHVSRKMTAVIFAVLRDGQPYQPILQSAG

SEQ ID NO: 292900 - protein, 341 aa, unidentified
MIYRGMDVRSKSFVVHAINEKKQVVFSGEIEPTRYGLKKLMKGLGEEEKLVVFEAGNQLKWIALTLKKMAGVHIHVVHPNEIKWINQSSGKTDKIDAKELAQLARGDMLPRKVHIVEGTIRELRELVSARQRIQSKRVALINSIRGCLKQEGYQLPEKFFQGVQWREKLGKMRIGKTQQKIIGSYMKCIEGLVEAEQELTEGIVAIESRDIELLKSIPGIGELSSRVIVSAIDDAGRFESKKGVAKYGALTPRIYQSGEVVHLGRINGDGRREVRRVLLQCAHAITRMKSYGAKPLKEFFERIKRRRGKKIAVVALARKVLTIAYGVLKTQVGYNPALAGR

SEQ ID NO: 292901 - protein, 310 aa, unidentified
MENCVGVDVSKHHLDWALGGEGSVARVPNTPAGVRQMVAKIRHREVALIIVESTGGYERVLTEALTEADLPVALVNPWRVRRFGEGLGVLAKTDSLDARILALYGERARPTRRPLPGPRQRQMADLVRRRRQLIAMIVAEKNRLDTASGGIRRDIQALVKLLERRVGKIDERIDAAIAADPEKAENYERLQSAPSVGPGVARALIVDLPELGALGRKQISSLVGLAPFAKDSGRKSGNRRIRAGRTGPRTALYLAAMNGARFNPVLKEMYDRLIAAGKPPKVAFIALARKLLTILNAMVRDGTTWQQAAG

SEQ ID NO: 292902 - protein, 359 aa, unidentified
MRIIGCDLHARQQTLAMLNTETGEVVNRTLQHEGKEVREFYSQLAHPVLVGIEAIGPMQWFLDLLQELGIECQVGDATKIRAAEPRKQKHDRRDAELILKLLVEKRFPAIWMPSKELLDLRGLLLHRHQWVRLRTQIQNALQAIALANGLRRGPGLWSYDGQAKIAFLPLPPHTSYRRSALQAEYRDMEEEIENLTAQVAEQAEHRSGAQLLLTHPGVGPVTALATDVFLGDPRRFADGKALASYVGLIPQERSSGRRRRLGKITKQGNPLLRFLWNEAGAHAARRDPELKRFYRRKLVQKGLGKARVAVARKLGIRLWIMLRDQIDYEEFCRRGQKQSGAACAGMLGTRLVHNHRPVD

SEQ ID NO: 292903 - protein, 309 aa, unidentified
MKEELVYVGVDIAKAYLDAAIGNEKRRFANDALGHRQLINWTKQMPASVQVICEPSGGYERALVRALVAAQLKISLVPANRVRQFARAAGILAKTDRMDAKVLCAFGEAMQPGTISASQLEQEHLREVESQRRHLTHLLVMEQNRAARMSDLWVCKLNRRLITQIKKQIEQVDLLIQQQIKASRELSSKAEKLTAISGVGARTAALLLAQMPELGQLNRREVAALVGVAPFNRDSGRMRGKRAIYGGRRSVRHGLYMAALVAARHNPILRAFYLRLRAAGKPAKVALTATMRKLLIVLNSSLKPDLTYA

SEQ ID NO: 292904 - protein, 343 aa, unidentified
MQQLYHYIGLDIHKRTVAFCEKRADGKTMDAGMFTAKRDCIQQWAAERSTPWIAGMEATLFTGFVYDVLTPYAVEIQVGHPLQLKAISCAKHKSDDIDAETLANLLRADLFPACHMASPLVRELRRVLRYRNFLVRQAIAMKNKTTGILMEVGVQYDSRRIHRQGYFYELLDNLEETPESVRELLRTTRCGLEMFQSAQKQLLEALKKHDHLRERVARLMSIGGVGEMTALTWALEIDTPARFSNLKKVQSYCGLCSGRNESAGKNKRAPLSKQRNAHLQTILIEAAKLAPRYNTQLAQVHAAALERGYNRNRATCAVARKLVAYLMAVDRSGRDYEDRSPTI

SEQ ID NO: 292905 - protein, 310 aa, unidentified
MEEVKFEQVVSRGCGLDVHKEVVVATIDGEGIRKVTREFGTFTRSLTELRDWLLEHGITHVAMESTGVYWKPVYHVLEPTGMKVWIVNARHIKYVPGHKTDKKDSAWLCKLLLAGLLKPSYIPPREQRELRDLTRYRKKLIESVSANRNRIDRILEDCNVKLSSVLSHTSGVTGTKLIDKLIDGKVITAEDIDQVYHRKLQASKEELLEACNGYITGHHIFMLQTVRDDIVSTESVISKIDVRIKAMLAPYDHVLELLKQVPGLSTKTVEDLVVEIGLDMRVFPNEKHLCSWVGIAPGNNESAGKKKADG

SEQ ID NO: 292906 - protein, 413 aa, unidentified
MLKIVHPICCGIDVHKKFLVACIATTDDKGVTTYKSSRFSTFTNGLRKLSEWLCANSCTQVCMESTGKYWIPVYNILEATCKITLAHPKYVKAIRGKKTDKKDAKWIADLFKHDLVAGSFMPPLPIRQLRDLMRYRFKLTNFSSSEKNRIQNCLTVSNIQLANVVSDTFGKSSMAIIDHLLENPDDKDFDFVPLLHVSMLGKVDDIRLALDGMITSEQRQKMNIILQHYDDLGKCKSNLESLILSLIEPYAKELSLVCTVPGIKNLFSAIAVISEIGVDMSVFPTAKHLCSWAGVTPQNNESAGKKHSVRISRAGVYIKPLLVQCANAVVKSDKHPEIKSRYLSIKKRRGHKRAIIAIARMLLTAIYHILKKGEPYNPELYKKAETIPASREITVEQAILIAQRHGYSIIKEQ

SEQ ID NO: 292907 - protein, 346 aa, unidentified
MKITTVGIDLAKVVFQIHGVDERDKVAVRKQLKRAEMSKYFANLEPCLIGMEACGSAHHWARKLEGYGRRVKLMAPQFVKPYVKTNKNDMADAEAICEAVSRPNMRFVAIKNVEQQAILSVHRARQGFVKARTAQGNQIRGLLSEFGIVIPQGIGQITKQVPEILEDGENGLPGAMRNLIERLAANLKEMDRQVKELEAQIQLWHRENEASRKLAEIPGLGPITASAIVATVGDAREFKNGRQLAAWMGLVPKQNSSGGKQKLLGISKRGDTYLRTLLIHGARSAINAAEKKAEPDSWLRKLMGRRNTNVAAVALANKNARIVWALLAHGRTFLPDYTPAAGAACM

SEQ ID NO: 292908 - protein, 350 aa, unidentified
MLIIGCDYHPSFQQIAFVDTDTGELQERCLEHREEAEKFYRDLAAQGIEVRVGMEASGHARWFERLLGELNFELWIGDATEIARKRERKQKTDRQDAQHILKLLLKDEFPKIWVPSGENRDLRQLLWHRHRMVQARTRIMNQLQAVALNEGLRCKKRLWREHGRQQLESFRLAPWASRRRQDLLELLDRLNPTIAELSQAIEQEAEKFPEARCLMTHPGVGPLTALAFVLIIGRAERFQCGKQIAAYLGLVPLEDSSGKRRRLGHITKQGSSILRFLLVEAAQVTVRSLPEWRSKYFHLMMRRGRKIAKVAMARRLAIRLYWMWRKGWDYEQVKKFGSHAGQLEPGDGVQ

SEQ ID NO: 292909 - protein, 347 aa, unidentified
MTIVEDARGVRGGVDTHLDVHVVAALDPVGALLGTAAFPTTPKGYEALLGWLESFGPVVKVGIEGTGSYGVGLSKFLAQAGIRVVEVNRPNREERRRSGKSDPLDAIEAARSALGGKAKSIAKSKDGPVEAVRALLVAKRSARTARTSALIQMRELLVTGPDQLRSRLRGLRISALVAEAARLRPARSGDSVVIATKAALSSLAHRVQELDGELAELDGRIEALLMRHCPDLLGLFGVGSDTAAALVVCAGDNPERLHSEPAWARLCGVAPIPTGSGQTSGRVRLHRGGDRQANAALWRIAMVRIAHHPETTAYYERKLRDGRSKQDVVRLLKRYIAREVYRYLPRS

SEQ ID NO: 292910 - protein, 339 aa, unidentified
MQQDVVTVGVDLAKNVFQVHAISADGRVLVRRQLRRGEVLKFFTSLPPCLVGMEACASAHHWGRELLALGHDVRLMPPAYVKPYVKRGKTDAADAEAICEAVTRPTMRFVAVKSVDQQAVLMLHKTRDLLVRQRTALINALRAHLSEYGIVTSKGPGGVAALMKLLHEGQEKLPAHAQSALHTIGAQLRSLASEVDRLESQILAWHRGNDTSRRLATIPGIGPITASAIAAAVPDASLFRSGRQFAAWLGLTPRPHSSGGKERLGGISKQGDGYLRKLLVVGATAVMRMARKDATRQPWIAQLLERKPVKIATVGLANKTARIAWAVMARKEVYAAAAA

SEQ ID NO: 292911 - protein, 381 aa, unidentified
MSSISTSPIFWVGLDVHKESVTAAVFRNRDPEPMRVDRLPYDLKKLRRYFQRLQAEGTVRACYEASGAGYVLQRSLTDWSVECHLAAPSLIPRRAGEHRKTDRRDAIKIARDFRDDRLVLIHIPTEDDERVRDLVRCRETFQREIVKSRHYILKFMRRRGFIYREGTHWTVRHLNWIRQVLAPGTLAREDRTVLAEYLALLEYKIQRRDELDERIHELALSPRYKPLVDRIGCFRGFKTQAAMVIATELGDVRRFESPRQLMAYVGLVPSEHSSGDRRRLGGITKAGNTRVRHVLIQAAWHYRKRPAVGAPLRRRQRGQDADVIRHAWKCQHRLYTLFHRLAVKKPNQVAATAVARELVGFLWAVLREIDVTELQEVSAAA

SEQ ID NO: 292912 - protein, 361 aa, unidentified
MVVQRTSVGLDVHARSVVASALDGATGEIAERRLTPAHADVAAWLEALPGPVRVTYEAGPTGFGLARFLTARGVDVEVAAPSKLLRPSGDRVKTDVRDARHLARLLHAGQIVAVTVPDQATEAARDLVRAREDARGDLMSARHRVAKLLLRQGILWSGGKAWTGVHDRWLRAQRFDSVPLQLAYEVAYETMLAAVARRDRLDEAIADLAADSAFTPLVRRLGCLRGVSTLTGFGLAVEIGDWHRFTGRSIGAYLGLVPTESSSGATRSQGGITKTGNGHARRLLIEAAWHHRPAYRAPGADLRRRWKAASPAAQDRGRRANRRLQTRWAHFDARGKRSTVANAAIARELAGWCWSLAVLED

SEQ ID NO: 292913 - protein, 462 aa, unidentified
MAERREDESRSEEARQIEGLPVVRAQVGGIDLGSQRHWVCAPGLEGRGREIADFGATTPELQRMLEWLKVRQVESVAMESTGVYWIAPQEVLEAGGLEVLLVDTRQLARVPGRNKKTDPSDCEWIQRLHSCGLLTGAFRPPEQVGMLRTLVRDKANLVAEAGDWVRRMQKSLDQMNVRVHRAVSDLDGVTGLAIVRAIVAGERDARKLAQLRDRRCQKSEAEIAEQLSGHWREDHLFSLRQSLKMYEATQERIAAYEQEILRKLREMTPEERAGQTAPAVKNPHKANAIRERGEEPRRQAWYRMSGVDATQIDAIGVGTIEVVLSEYGPDLSCFPTEKQFISHATLAPHVPRSGGKVVKKKKRYSASTRVAAALRMAALALRHSPTALGAYYRSLARRIGGDVAVFATARKLATLIYRLLRWGQPYIDEGAQTFEERYRQQRIRSLTAKAKELGYQLLPATT

SEQ ID NO: 292914 - protein, 373 aa, unidentified
MNYSTVYVGMDVHKESFSLCCYTNEKEQAEYPQKINAHYSKVINYLEAMRFHYGDDVLFICGYEAGCLGFTLYHELTAHNVKCVILAPTSMPVPGGKKRVKTDKRDAAMIARCLAHHDYSPVHIPTQKDEQVKEFIRMRDDHRLALKKIKQQILAFCLRHGYHYDGTKNHWTQTHLNWLRTLHMEGLYQEILEEYLLTYDYLTAKLGRIEQRIEALASEEEYRENVHKLTCFLGIKTQTALSVITETGDFRRFPDACHYAAFLGLTPGEDSSGGDQKRLGITKAGNRHVRMLLVEAAQSFARGKIGYKSSVLAARQEGNSPTVIEYADKANERLRRKYYRMTLKNGKKSNVAKTAVARELACFIWGMMTEHYA

SEQ ID NO: 292915 - protein, 341 aa, unidentified
MEEYIGLDVSMKETAVSIRRADERIWRGKCASDPSVVAELIRKRAPSVKRVVFETGPLSVWFYHSLRTEGLPAICIDARHAKAALDMATNKTDANDADGLAQLAEVGFFREVRVKGFDSMLTRTLVAARTRLVRITTELSNQIRGVMKTFGLLVPAGKGSTFEKNVRSLLADRDRLASIVLPMLEAWRGIRVRAAELGRQLVRDARQSRACRILMTIPGIGAITATSFTTAIEEPDNFRKSRSVGAWIGLTTRRYQSGEVDYDGHISRRGDRPLRGLLYEAAAVILTRSSTHSTLRTWGLQLRERIGFKRAAVAVARKLAVIMHTMLKTGQLFNPNAGAAA

SEQ ID NO: 292916 - protein, 341 aa, unidentified
MSAIGVDTHKDSLAACAVDELGAVLAEATFANDPTGHAALGRWANEVAPAARLGFEGSSSYGAAAARALDTAGFDVCEVPPHLSRRERVRTRRAGKSDPGDALAIARVTAREAELPPIRRVDPTTELALLIEARADLVAEATRVRNRLHADLVVLVPGYSGRIANLVAERNLVRTGRALRGRSGVHAELARERLAELRRLGDRIRNLASRIERLVAGHPLLRLPGIAALTAAALIAESGDVRRFRSADGFAMLAGVAPIPASSGQVQRMRLNRGGNRQLNRAIHTIALVQARVSPLAKAFIARKVSEGRTWKDAIRSLKRHLARIVFRLLLEGDSRLQAAA

SEQ ID NO: 292917 - protein, 429 aa, unidentified
MIDDVSRYNYFCQFRSTIRSSRNHLIVGIDVAKDKHHAFFGTAYGKTLWRRLLFSNDKNGYMRLIEQVNALMPQHQLEQVIFGMEPTGNYHKPLANWLIESGYEVVLVGGKAVKDNRQLLDGRWDKNDSKDSANVADLMSQAKCQFYEYPEDDLVGLRNLLSLRKRLKKEEHRLRMQTRNSLLTKYFPEADCYLKNCTEEDLAVIRWYLDPRKIVSTDFKEFVRHVTTTDRGDRQVQRLRKIYDAAENSVGLPVNSATVFEAQMIVDKIRSVRKELLKLMNEMKVLCDNFYGYTLLQTIPGFGPYISALVLATIGNPFRFKSRKQVIRLAGLDLNANRSGKTSSDSVPVISKKGNADLRYGLYQAGLIASNFNESFRRLFHGMLEGRQKERGIRTKMRVKLAARLLVIAWTMLKKNEPFDASRLTTDTE

SEQ ID NO: 292918 - protein, 400 aa, unidentified
MLPKVSKKGLLVEGFSGAAAQQPQKKFAGERSMVCRRSDAAPKRDPRRPRGLSPNSRQSRSRPTAVASSHQQDRDDSMDGSTQNPIVSFVGIDVSKAKFDVRILPAGTRMVCAYDDEGIAELMVELARHPDSLVVMEASGGIERRLAAELTTAGYRTAIANPRQVRAFAHGIGVLAKSDPIDARTLAIYAQHVQPRLHRKPAEKQQELTALVVRRRQLLALRTAESNRLQQTAIKSAVKSIRHVLDLLRKELKTLDAEIARLIADNDDWRSQSELLQSVPGVGPATSASLVAELPELGKLNRQQIASLVGLAPFNRDSGQFRGQRSIWGGRGSVRRALYMAAFNAKQFNPVIRAFAERLKRAGKRPKVVLTACMRKLLVILNTMVRNQTTWKITIIPQNS

SEQ ID NO: 292919 - protein, 346 aa, unidentified
MKIIRVGVDLAKSVFHVHGVDRKEKPVWQRRLSRGKWLRAVMDKLEPGSEVGMEACAGAHHWARELQGHGYRVKLLAPQFVKPYVKSNKNDRNDAEAICEAMSRPTMRFVSVKSVEQQDIQAIHRVREELVSQRTAKSNQIRGLVMEYGLVAPKSLSKLRAALPDWLEDAENGLTERFRRLLAGVRGDLVELDRRVGELDEEIAALAKSHPVARRLQQLRGVGPIISTAMLATLGSGEQFAKGRDFSVSLGLTPKQHSTGGKERLLGISKRGDPYLRKLLIHGARSVIYAAKDKDDPLSQWVRGLAARRHVNVATVALANKTARMAWAMVRNETDYEPERAASALG

SEQ ID NO: 292920 - protein, 384 aa, unidentified
MRRVCGLDVHKDSVFLCIVDKKEEIVCQKKFGVLTPELEDMSKLLLDNKVEEVAMESTSIYWMPIWRILEPNFSLKLVNPYFIKQLPGKKSDVKDAEWIAVCLQKNLIRGSYVPDEQIQQLRQYDRRIFELNGEIVRKETKLDATLQRCNIRISNYVSTIDSKSYMKVVDLISDGVTDPEKLAGCIHRRTVNRCGLQNIVDSLHGVISEVDIDVIRQLRDEIRLAVKHRDDCLAKMLEICGRCYPEQLENLRTVPGVSERSATAVIAELGVDMSSFEDAAHLVSWCGLKPRNEESAGKIKSRKITHGNKYLRKTLIECAWAASRTRNCFFSRFSYTQTVIRKKNTMKVKVAVARKLLTAIWFVLNDNVQYRDFGKDIIPDRNVG

SEQ ID NO: 292921 - protein, 457 aa, unidentified
MRQRGRRTKGMEEAHPFAGMSQVNANAAGVDIGAEEIVVCVAGDESTQIVKAFGNYTVDLQNIGKWLEEHNVKTVAMESTGVYWIPLFEEMEQQGFECLLISSRSLRRVPGRKSDIQDAQWIQTLHSYGLLESSFRPQGELVVLRTLLRHRAQLLEHRSPHIQHMQKALLQMNVQLSQALSDVTGETGLTIIRAIVAGERDPQKLAALRDRNCKKSAEEIGKALTGTWRTEQLFIIKQSLELYDFYTQQVEACDAEIDRMYTLTRPDWEAGNVSPLSVRKRNSHSKNAPQSTAAIRQHLKRISGVDLSVVDGFGVSLAQTVIMEVGTDMSKFPSEKHFCSWLGLAPKHEISGAKVLKNRTLKTKNRAGQAFRMAAQSVKRADCVFGSLYRRLKGRLDKAQATVATAHAIARVVYRMLKYKVEYEKINVEEYEQKYKEQQLKYMKKKAEKLGFQLVPT

SEQ ID NO: 292922 - protein, 340 aa, unidentified
MTITTVGIDLAKNVFAVHGVDQNGKTVLIKPKVSRAALPELIASLPPCVIGMEACSGAHYWARLFRQYGHEPRLMAAKFVSPYRMAGKSGKNDATDAQAICEAVRRPHMRFVPVKDESQQAMQCLHRTRQGFIEEKTATYNRLRGLVSEFGIIAPQSTDALRHVVSEQKYSLPLQVQQCVIDLLEHIDRIEENIAEYDRILSKAAKTDHRSQRLMTLKGIGPTTACALVASIGNAHDFKNGRQLAAWLGLTPSQYSSGGKSKLGRITKAGDSYLRTLLVQGARSVLIGADKRTDSFSRWVCMLVERRGYWRAVVAIAAKNARLCWASLHYGDDFRLYSAN

SEQ ID NO: 292923 - protein, 338 aa, unidentified
MKVYAGIDLHSSNNYVGIINDQDQRVYQKRLPNQVEHILEALEPFKESMEGVVVESTYNWYWLVDGLQAHGYKLHLANPSAIKQYEGLKHTDDKWDSFWLAHMLRLNILPEGYIYPKEERPVRDILRRRLLFVKHRTAHILSLQSMINRNRGTGMSVRAIKRLDEGDAEILFDQPHLVLAAKSNIAVIHFLKERIKTIEKAVKTHIKLRDEFKCLLTIPGIGDILALTIMLEVGDINRFPTVGDYSSYCRCVKSEKLSNGKKKDENNRKNGNRYLSWAYVEAANFAIRFCPYSQAFYQRKMAKTNRIVAIKALSNKLARASYYIMRDQVPYDPEKLFR

SEQ ID NO: 292924 - protein, 342 aa, unidentified
MRKMQEYIVKGKTIYVGIEDSKKTWKVCVRCQRMIVHETHMPTDYEDLKGYLKNKYPGCSIKAIYEAGFQGFWLHDMLEEDGIDCVVTPPNKVTCAKDDRVKTDRRDAYRLALNLENGDYVSCHVPDRERREDRQISRTLSQVQKDIIATKNRIRKMFDYHGLNGGLKKGIWTDKDYEALHNLKLSHSLKVCLETHLHHLMELRALCEKERYKVGVRAKRSCPGIGWFTAIRLTLEWGDMSRFPTGKHIASFTGLTSSEYSTGETVRRGRITGQSSEQVRSWLIECAWRAIRKDPVLLEKFRAVWRNSGSKKKAAVAVARKIAVRLWALEKTEIPYCIGVVE

SEQ ID NO: 292925 - protein, 428 aa, unidentified
MADPANATPACNLVAIDIGRYGNAVLIEATSGKRHRFKMANTAADFGRLLGFLHGLPGNCRVGLEPTGDYQRPLAHRLLRAGFEVVSINSVALSRYREAIFNSWDKNDPKDAGVILEMLRRGDVQRYVDPIMVGTHDLQELAKTYYQVSRARTKVQHSLINHGLTLYFPEMHRYWCTTRNDWFVRFLLQFPTPAHVRSLSCAEFVDAAWDVVGRKVNKRAKLEEIWEMAGATAALPHAPDSLAVETFRITLRRYQQLNALRAELEVRAEQALASNEDFAHLKTLPGIGSVIAMTVLAEGGDLRRFGHHRQFLKYCGFDLAKNQSGTQRGKEQLSKRGNARLRLAFWLAAVAAVHMKENSFRAKYERYIRAAPEDPDLRRKALTAVAAKMARVAHGMIKKNQPYRQFFEQSLPSGSIPLSAAVGAHATP

SEQ ID NO: 292926 - protein, 397 aa, unidentified
MYIVGIDIAKRKHEAAVIDGEGTVIIKPFSFTNNCSGYNRLLAMLAKAKLPLDEVSFAMEATGHYWLALFTRLQKEGFRVQVINPVQTNSIRSFYIRQAKTDPRDALLIAEVIRFGHFSESTLHPENIYELRELCRGRHAIVSMQADVKRKVVALLDQVFPEYETAFTNMFSDTSMAILQTCPTPKELSEMPLEELCHLIEVSSRKRFRMAKARELQELARNSFGFAMAGDVFSTMIRLYAKHLDFLKQQVREMDRKIAEIMDTLDTSITTITGIGPTLGAYILSEIGDISRFSSAAKLAAYAGIDPTMRQSGEYNGVRNRMSKRGSPYLRHAIWLAASSAVLHDPALKFYFQKKRDEGKPYMASVGHACRKMVSIIYAVMRDNKAYTPCIPNEISA

SEQ ID NO: 292927 - protein, 341 aa, unidentified
MSIKAIGIDLAKSVFSLYGVDDHGKCVLRKTVKRHQLLNEIAKIPKCLIGMEACSSAQHWAREFIKHGHDARIMPARFVIPYRKSQKNDSNDAEAICEAVTRPNMRFVAIKSAEQQAVLCLHRLRRGLIKDRTARINRLRGLLAEYGFAAPKGRYPGQATMYALLEDAENSLPDLARRLLKECWDSIEALNQEIQSYDRQLSELAKQSAAAKRLMTIPGIGEITATGLVATISDGKQYDNGRQLAAWLGLVPRQYSTGGKPRLGRISKQGDSYLRTLLIHGARAVVSTCKDKEDKLSLWIKSLLARVGFAKTTVALAAKNARIAWALLTKETEFKTEIVTS

SEQ ID NO: 292928 - protein, 431 aa, unidentified
MEEVDEQDLHVERVAALDLGKAALEACVRVPHESRPGRRLQEVRGCATTTAALLALADWLHRWGVTRVVMESTSDYWKGVYWLLEAEGFECWLVNARDVKHVPGRPKTDKADAVWLAKVAERGMCRPSLVHPRPIRQLRDLTRYRRSLIHDRTREMQRVEKLLEDAQIKLSSVATDIFGASGRAMLEALVGGQRDPKVLAQLARRRLRAKISELEEALRGFFTDHHAAILRMMLDNIDRHSEQVAALDTRIEQAIAPFAGQVAQLDEVTGVGATAAQELIAEVGVDMGRFASAAHLVSWAKFCPQVHESAGKTKPKGRGKGNPWLAGTLGNIVATAVRTDSFLGARYRRIAKRRGKQKAMVATGNSVLVIVYHLLSDPDARFRDLCADHYESRIDKQRRARNLAWQLQALTGQRIVIRDSQVVIVEPTEAA

SEQ ID NO: 292929 - protein, 398 aa, unidentified
MTRIFGLDVHKKQVQLAELTPEGQLVRSAEFPATPEGLSTFAATLRPTDEIALEATTNTWAIHDALAPHVAKVAIANPLKVRLIADAHLKTDAVDASVLAHLHRTHFLPEVWVPDPTTRRWRSLVAHRQELTKVQTMWKNRVHSILHRNLVTPPPAGDLFGVRGRRWLTSVALPADQRLQLDSSLRLLDATRADRDQLDAVLSREAHGEPRMALLLSVPGLDLATAMTLLAAIGNVARFDDPKKLVGYLGLCPRVYQSADHSYHGRITKAGSASARWMAIQAANLLVRTPSPFQHWFRKLKKAKGHNIAIVAVARKLVVLVWHMLTNGEPYRYAQPARQQAKLARIRIRATGERKRGGVPKGSPVHPNTRAATIKRWAEYRAKKAAGAAVADPMRRVC

SEQ ID NO: 292930 - protein, 349 aa, unidentified
MNFYTNTHPYYCGIDLHTRLLYVCIIDNENNILVHEKIDDSPDKLLALLKPYLGNIVVGVECMHCWYWVSDFCEEHNIDFILGHALYMKAIHAGKTKNDKIDALKIAKLMRGGNFPLAHAYSKEHRSIRDALRRRTHIMRMSAQLKAHVASTVSQYNLPVLETRLDLRNSPDREKMRHFFPDEAVQKSMDLNLNIIETMVSELYKIEHYVKTQAQTHCATDLHILKSFPGIGKILALTILYEVGDIKRFSSVQKFASYSRLVKCKAESAGKTHGTQGNKIGNAHLKWAFSEAAVLYLKGNDNAKRYLAKLQKRMSKAKALSALAHKIGRCTYFMLKNQQVFDEERFLNG

SEQ ID NO: 292931 - protein, 373 aa, unidentified
MKKVRFLGLDVHAETIAVAIAEPDGEVRSLGIIPNREEPIRKLVKKLGPAEQLQACYEAGPTGYVLYWQLTALGVKCEVVAPTLVPVKAGDRVKTDRRDATKLARSYRAGDLTAVWVPNEEHEALRDLVRAREVAKQDQLRARNRLSKFLLRHGRRAPTGVKAWTQKFQEWIKEQVHFEQPAQEYTLLDYLHEVEHVADRIRRLEQAIVEAVKLAPPQMQEVIQSLQALRGIAQISAVTLVAELGEISRFEGARQLMGYSGAVPSEDSSGKRIQRGPITKTGNAHLRRIAIEAAWAYRHRPAIGLTLRKRQEGLSEEVKEIAWKAQHRLHKRYRTLSAAGKEKQKVITAVGRELLGFIWAIGVQVERKHKQVA

SEQ ID NO: 292932 - protein, 421 aa, unidentified
MTPPNEVVWAGIDTHTDTHTIALLDERGRPLGAETFTADPDGYDRLIGMLPGPGRVAAVGVEGTNSFGAALARRLTAAGYEVRAVLRPRRSVRRRDGKSDPLDAVAAARSVMAGDGTSLPKSSDGWVEALRHLNAQRSQLVSAMTAISNSTNGLLVTAPEPIRERYRGLRSETRMNRLAECRPAGGLVERSVLAALKSAAKAWKALKRQAGLLEERMRLILEEHARPLLDMYCAGAVIAATLAIVAGDNPERIRSEAAFAKLCGVCPIPASSGRTNRHRLNKGGNRQGNMALHRIAIVRLRYHKPTRDYMAKKTREGKGKLEIIRCVKRFIAREAYRALISIRNGEVGRGTPAERGAKLRELRVSRNITQQQIGEALCVPSSRISEIERGARDLPELEQRAIQWIHSTTNPKQHTQTLDNV

SEQ ID NO: 292933 - protein, 360 aa, unidentified
MFTERTSVGLDVHARSVAAAAIDGVTGELFQSRLTPSHDHIRSWLGDLPGPVAVAYEAGPTGFGLSRALSAAGIRCEVVAPSKLQRPSGDRVKTDAKDAVHLARLLRLDEFTPVAVPTVDQENARDLVRAREDARGDLMRARHRLSKLLLRQGIVYSGGKAWTGTHDAWLRRQHFAASALQLTFESDYDAVLTVKARRDRLDTAIAVMAADSEFAALVQRLGCLRGIGTLTGFALAVEIGDWHRFTGNTIGSFVGLVPSEYSSGQSKVQGSITKTGNSHVRRLLVEAAWHHRARYVVGKTMRDRWELASPAARARGDAGNRRLHARWDTFRARRKRSVVANVAVARELAGWCWSLAVLEE

SEQ ID NO: 292934 - protein, 344 aa, unidentified
MGEITTIGLDIAKSAFQVHAISATGTVVVRRQLKRRYVVQFFASLKPCLVGIEACATAHHWGRELAKLGHEVRLMPPRYVKPYVKRNKNDAADAEAICEAVTRPNMRFVPIKTIDQQSILVLHRTRMLFIRQRTMTINAVRAHLAEFGIIAGIGRNGLQALLDLIRKGEKPEIPPEAWLCLVALADQIDLLKQRILGMDRQIMKWHRTNDLSRKLEGIPGVGPLVATALAASIPDPTAFRSGRDLSAWIGLVPKQNSSGGKEKLGSISKAGNRYLRQLLVLGALAVIKRAKLLGHARHPWLVGLMERRPSKVAAVAFANKMARVAWAIMSRNEPYRAIPAVAGT

SEQ ID NO: 292935 - protein, 341 aa, unidentified
MDQFVGLDISMEDTSVCVVNQLGQVTYEGVVATKPEAIAKVLRAKGALAIKILFETGALSNWLWHALNDAGFPVVCVDARHTHKALSMRMNKSDKNDARGLADIARIGWYREVSVKSANNQLLRSLLSARTKLVSLRRNLDNQIRGLCKGLGILFGKAGSVSLAKKVEAKLADAVELRPIIGPLILAQKCMSEQIESFDRQVLAIAKADETACRLMTVPGVGPMTALSFMATVDDPRRFKSSADVGAYFGLTPRRYQSGEIDRTGRISKWGDSLSRCCLYEAATVLLTVVRRGSALKRWGAKLVKRIGQKKARVAVARKLATILHAIWSDGTEFQPEGQKI

SEQ ID NO: 292936 - protein, 449 aa, unidentified
MEQPQEVEDEEYERVYQRVAAVDVAKASGVVCTRVPDDDRPGRRKMHVWTVGATMGAVTELGDHLRCQGIEIVTLESTSDYWRIWWVVLEACGLTVQLVNARAVKNVPGRAKTDKKDAVWLAKLTERGMLQPSFVPPYDIRRLRDYTRLRADLVHDRSRHWARLEKLLERALIKISSVASTLDTQSVRAMLEALIAGQRNPKVLAELAIGKMRAKRKELAEALDGRFEEHHAELARILLDQIDALTRQIDQLSARAGELIAQIPAAQGIDADGSTGPGAGRGPDAAVLPAVARLDEITGCGIIAAQAIIAEVGLDMTVFGTPGRLVSWAKRCPQTRQSGKKTSAGKAGKGNPWLNGILGEIAASASRTDTFLGERYRRLARRRGKRKALAAIARSILVIIFHLLADPAARFRDLGPDHYDNRVSRDRKILNHVRQLQALGLSVTIEEAA

SEQ ID NO: 292937 - protein, 343 aa, unidentified
MKLHVLGVDLGKTVFHAVGLDSTGKVVIRKKCSRRQLLAFTANLQVPLIGMESCSGSHFLGRALREQGHEVRLMPAQYVKPYVQTNKSDFLDAEAIAEAVQRPRMRFVPIKTEEQLDLQALHRVRERWVMRRTAVVNQIRSLLLERGLTMPKGRRHVDALLPRILEDAELKLSGSFRVLLAQLKVELDQLTTRIEQMDAVIQQRAREDEACQRLTTIPGVGPVTATALIAAIGNGAAFRKGRDLAAWIGMVPRECSTGGKQKLLGISKRGNKYLRTLFIQGARSVVQQRHKQAPGLSSWLAQLLARAHQNVVIVALANKMVRMAWAVLCKNQSYRAPVLAVAA

SEQ ID NO: 292938 - protein, 389 aa, unidentified
MSSFSDHHVQRQAAIHPHYARLAVSLELSRSTWLVTSLTPGSEKLSKHSVPGGNGPALLDLLARLRTRAEQRIGGSVEIVVIQEAGLDGFWVHRLLEASGMESHVVDAASIAVPRRHRRAKTDVIDGETLLRTLIVWKRGEPRVCSIVVPPSADEEDRRRISRERDALLRERIQHTNRIRGLLFSQGISDYNPLRKDRRERLEMLKTGDGRPLPPRLKAQILREIERLEVLLRQIAEVEAERDTLAKMKRPAVSGSPVASLARLKGIGPEFASVLYLEGLFRSFGNRRQVAAYAGLVPTPWKSGQINREQGISKAGNPRLRKTLVELAWLWVRHQPDSTLSRWFRERVGVERGRIRRISIIALARRLLIALWRYVTHGEVPDGAVLKVA

SEQ ID NO: 292939 - protein, 387 aa, unidentified
MSKQNDLSKSLVALDQDATLIAVVEMGQASWLVAGIVPGLDRYPLKKIGPDRDALLQLLHRWRAEAAKAGHAINRIAVAYEAGRDGFWLARWLRAQAVEAYVIHPSSVPVPREHRRAKTDRLDTELLKRAFVGWLRGEPKHCSMAAIPTLEDEDARRPSRERQTLVGERTRILNRLKANLARLGIRGFRPNLARAEGQLEALRTPEGAAIPKNTLAEMRRDMDRLQVVKRQIKEIEKTRAKRLSKEPSEQRDAMVQQLGRVVGVGIETADMLVQEVFSREIRDRRALARYAGLTGAPDESGQRRRERGLAKAGNSRVRRGMIELAWGHLLHQKGSPLTEWFWKRASDARGGTRKTMIVALARKLLIVLWRLATTGETPAGLRLRPAA

SEQ ID NO: 292940 - protein, 343 aa, unidentified
MKLHVVGIDLGKTVFHLVGLDSTGRAVIRKKCSRTQLLAFTANLEVELIGMESCSGSHFLGRALREQGHQVRLMPAQYVKPYVQTNKSDFLDAEAIAEAVQRPRMRFVPIKTEEQLDLQALHRVRERWVMRRTAVVNQIRSLLLERGLTLPKGRRYVDRQLPRILEDGGLRLSGCFRVLLAQLKIELEQLTARIEEMDRVIQKTAKENEACQRLTEIPGVGPVTATALIAAVGNGSTFQKGRNLAAWMGIVPGEYSTGGKQKLLGISKRGNKYLRTLFIQGARSVLQQRHKQAPGLSSWLAQLLTRAHQNVVIVALANKLVRMAWAVLSKNERYRAPVLAVTT

SEQ ID NO: 292941 - protein, 341 aa, unidentified
MKSQVAGLDLGKNQSYITVMDGNGQILGEKSLESSADSILNYLGKFGKPEVVFEATRNWYWLYEALQRKGYDVTMAHPKKTKAIGEAKIKTDKIDSHTLAHLKRADLIPESYLAPLETRELRELLRHRVFLVRERAKVKSKVRTLLSKLNLTCPYSDVLGKEAIGWLKERREQMPQVFTSKLDDLLQLGGSLSTIIQVVEKKVGNQAADDRIVKLLVTIPGIGEFSALVIKAEIGTISRFPDSDHLASYCGLVPSVSSSGNYTHRGSITKEGNRWLRWVLVEAAGKLKKKSPHFKDFYYRILSKKTKQVARVATARKLAVAIYYIWKREEPFKEPEPRSTG

SEQ ID NO: 292942 - protein, 345 aa, unidentified
MLYAGLDLSRKRLDYCLLDEQGVVHEQAAAPPDRDGLRSLAERVGRGSPVVAAIESMTGARFVHDQLERHGWQVEIADAVRVRGLAPLACKTDRIDAWVLAELCRRDLVPAIWLPGFAVRGERERARFRMHLVKHRTALKNRIHQTLVSFGTPCPLSDLFGARGRRLLAQLELPEPWAGTVAASLRLIDEFEREINALEAELRRLGADHPYLPLLRTVPGISWILGYTIAAEIGDIARFATPAKLAGYSGLCPRVYQSGDNDRRGPLSKRGPRYLRWALLEASIHACRHPLYAERYQRTKQRLGRQRGPRVAQVDLARRLAEAIWHMLTRNQPFAPAGASQVLAP

SEQ ID NO: 292943 - protein, 369 aa, unidentified
MAKSITYVGLDVHKDTIAVALADAGLRGEVRQHGKILNTPAALKALAVKLIRKGRDLQFCYEAGPCGYGIQRQLTGMGHDCAVVAPSLIPRKPGVRIKTDRRDATNLAKLHRAGELTPVWVPDQAHEAIRDLVRARQAAVRTLRQARQQLSGFLLRQGYHYHRPAWTQLHRRWLASLKFEQAVHHIVLEDSIAAVEAATARRDRLEAHIEAALPEWSLASVVQALQALRGVGLVAAATLVAELGDITRFTNPRQLMAFLGLVPSEHSSGGTRRQGGITKAGNGAARRMLIEAAWSYRFPARISREQLLRQERLAKPIREIAWKAQERLCRRYRKLAWAGKQPTVITAAIARELAGFIWAIAKQVQPMAT

SEQ ID NO: 292944 - protein, 336 aa, unidentified
MPMYQLGIDVSKNTLDLCLLREGIKGRIKTRKLKNTADAAKVVAEWLKKQSCELGEVHIIMEATGVYHEPLAYGLHFAGARISLANPHRTREFARGMNILTKNDKVDAWMLACYGSLKEPEAWTPPPESVRYLRALLRRRDALVADSTREKNRLEKSVFTDSPDAVRASIENMLQELSNEIEHLDVLIQEHIKTHPELNQDFRLLTSIKSVGYLLGLNMLAILKSHSFESAEQAAAFLGVVPVERRSGTSVKGKPKLSKIGPPEIRTKLYLAALCGLRFNPVMKQMYTKLCQRGKSKMCAIGALMRKLVHWCYGVQKTQLPFDAEYNQQSHYKTTC

SEQ ID NO: 292945 - protein, 346 aa, unidentified
MNQIIRIGMDTSKHFFQLHGVDAAELPVLRRKLRRHEVLAFFAKQARTVIGMEACGAGHYWARELRKLGHEVKLIAPQHVKAYVKRNKNDGRDAEGLCEAMSRPTMQFVPVKTEEQQAALMLAGVRQQLITRRTQLSNAIRGYAAEFGLITAKGLVKVEPLLADIARDESLPALAREMFAVQGRDYARLQVELKAVEARLMAWHRGNADSCRLAKIPGIGPIGATTLVMKAPDPRLFPSGRHFAAWIGLTPKDHSTAGKTRIGKITRAGDEMLRSVLVAGATSVIQQAKKGRGRPSPWLVALVARKSPKLAAVALANKTARIAWKLLTTGESYDGARMPVASARAA

SEQ ID NO: 292946 - protein, 318 aa, unidentified
MLIHYIDIAKRNFVIAVSSLSKTKTETNNPKGIAHTIEYLKKHKVALVVTESTGGLEIPAAKAIRRAGIAVIIANPRQTHQFAQSQPLTKTDAKDAKMPAFFAQMTAQKEDSQTMPYQPPTEAEEVLEALVNRRNQPADMRTAEKNRLHQVHETQVGSVKQLIAHFDRLIDELDKQIDNHTHTHFDGKDQVAEQIKGIGSITTATLMAMLPELGRLSHKRIASLAGIAPHPRESGETKFKSRCFGGRSTVRKALYMATVAATRFEPLIRDFHQRPLSEGKPYKVAVTACMRKLLTISNARMRDYFAENDTAENGIRTA

SEQ ID NO: 292947 - protein, 349 aa, unidentified
MRFYTESHQHYCGIDLHAKTMYLCILDREGQILLHQNVRSRPEAFLEAVERYRDDLVVAVECIFTWYWLADLCRREGIAFVLGHALYMKAIHGGKAKNDKVDAFKIATLLRGGNLPKAYVYPPEMRATRDLLRRRLHLVRRRGNLLAHIQNTHHQYNLPVPAAKVAYKANREGVAEAFAEPDARKSMEVDFGLIEHYDDVIRDLQLHLERRAKQHDPQAYHRLRSVPGIGKILALTILYEIHDIARFPRVQDFLSYARLVKCEHSSAGKKLGTGGAKIGNVHLKWAFSEAAALFLRNNAEGQKHLRRIAGRHGKAKALSILAAKLGRAVYLMLSKERAFDRERFFAQTH

SEQ ID NO: 292948 - protein, 408 aa, unidentified
MQVLYPRCAGLDVHKDTVVACVRCVSEPEHHETRSFATTTRELLALGEWIASHGCSHVALEATGVYWRPVWHVLEGQVELVLANAHHIKNVPGRKTDVNDAMWIADLLAHGLIRSSFVPPQPIQELRDLTRTRKQVVREISQHSLRIQKVLEDANIKLGSVLSEVLGVSGRAMLGAIIEGERDPHKLADLAHGTARRKHDALVEALHGHIRPHHCTLLKLHLNLIIALEHTVAEVDAAVGKCLDPIRQRARLLTTMPGVRDTVAEVIVAEIGIDMTRFPTPGHLLSWATMCPRNDESAGKRRSTRLLKGNNWLKTALVTAAWAAVRTKTSYLRAQFLRLKARRGAKKAIIAVAASMLTAAYFILRDGVPYRDLGPNHFDRQQRGKTVRRLLRRLHDLGYNLPPQHQPV

SEQ ID NO: 292949 - protein, 374 aa, unidentified
MTMMQHRQIRYIGLDVHKVSITVAIAEESGAPTSYGSIANDPSAIRKLMTRLGGPEVELRVAYEAGPTGYALHRQLAKMAIDCIVVAPSLIPKQPGNKVKTDRRDALKLARLLRSGDLTPVWVPDEAHEALRSLVRARADAKADQLRAKHRLSKFLLRQGCRPPSGVRNWSQRHVQWLRQLEFEHLPDRVVFADYLAEVTAAGERIKRLEAALHQCAQSSSQVAVIRALEAFRGIGFLSAVTLVAEAGDLRRFRTAPQFMAYAGLVPSESSSGGKQQRGSITKTGNSLLRHVLGETAHHARHAPRVSSKLKQRQADVPHEIVELAWRAQLRLHARYRHLSSRIGSLKALTAIARELAGFIWAAGQVLQEVPTAA

SEQ ID NO: 292950 - protein, 428 aa, unidentified
MHENNENNWQQRRYYMGLDWAKEKHDIVVVDGNGRIILDIRIEHAAKGWHRLRTKLIKLAGPDLSVVAVTIETNRGPAVERLLELGCAVYPLNPKAAQRYRDRKAPSGGKTDHLDALSFADALRTDGHGWRQLKPEDPKIQELRLLCRDEINLIEQRTALVNQLQEALHEYYPAALDAFDDWTAPAPWAFIERFPTPQALKKAGKRRWEKFLHTHHLYRPETYQKRLDVFSRATEFCGGQAVTNAKSMLAVSLAKQLRLLAQQLKVYRQRIEEVFQEHPDNYLFGSLPGVGEKLGPRLLSECGEDRERFIDHQALQCYAGTAPVSFQSGQIHKVKFRYACNKNLRAAVHLWSDLSRARCTWAQIYYQQKRLQGKSHACALRCLGQRWLKILWKMWQTKKPYNEQVHTRNQIEHGSWVLALKPVHSSAK

SEQ ID NO: 292951 - protein, 333 aa, unidentified
MVEGTVGSHHKEGSTKMSKSSTVVAGIDVAKAHLDIAIHGCKQGWQVANMAEGFGKLVRLMRQHQVSRIGLEATGGYEHGVVEHLRAAGFSVVVLQPKQVRAYAEINLRRAKTDRIDAALIAAFVSEHGVVRETPDPRLTALAERLTYLEQIEEDMARIKVRLEHVRDPDLRHSWKDDLARLKQRRATIIARLLTLLRHHQDLASRLDLLLSIEGIGPRTAIALLIRMPELGRISRGQAAALAGLAPFNNDSGKRSRPRSIAGGRTRLRTSIYAAALPAAFRWNAALVRLYNRLKTAGKPHKLALVACARKLLTFANTVLARGTPWIKAPAPV

SEQ ID NO: 292952 - protein, 281 aa, unidentified
MRYVGIDYHKRYSVLCATDERGQELKQRRISGNSATGFAQFFSELGEESKVVMEACWNWGWLYDLLAKIDGIDEVMLAHPYKTRLIAEAQIKTDRLDAQMLAELLRGDLIAQSHAPSAATRARKHLLRQRLFWVRLRTMLRNGMHAILDRQQGLERPQLKNFFSRRGQTWLEEVQLPCAEDQPLLTQDLEVAELLEEKIKQLDRSIGQSQSEEEKLLESIPGIGPLFSSVIATEIDGVGRFNSATKLAAYAGVVPTTHTPAADAYSMVACSGSAINGCAGH

SEQ ID NO: 292953 - protein, 372 aa, unidentified
MGEPERRWKRLSGAGRRPRPGRSHRARGQARPFQPIVQPEQLLGATTPHDKPGIPIMTQFKAFVGIDVSKAALDVFLHPEAISFQVPNTKTGLKTLIKRLGAREGAAVALEASGGYERRAIGELRQAGFAVYLLDPLQVKGFARSLRQKAKTDRIDASLIARCLAACVDDLIPASESAQADLAELVAYRRTLVRNLSELAIRLEQTGNGLVKRLMSQKARRIEAELRLIEGAIATAIGKDGPLAQKARLLRSAPGVGPVLAATLLARLPELGGASSRQIASLAGVAPFARQSGKTEKPARCQGGRPDVRATLYMGALAVLRQKHHPFSAFAQRLTVKGKPSKLVIVAVMRKLIVALNAMIQTKTPWKAQAAA

SEQ ID NO: 292954 - protein, 411 aa, unidentified
MFKENFIYVGIDLHKETHTAVMIDCYNQKLGEITFPNRPADFPKLVTKVKKCNTDAKEVVYGLENAYGYGRPLAVWLIDKGYFVKDVNTAISHRQAKHRGAMYRKSDSDDAEAIALATLNMLDKLPDACPNDAYWSLGQLVHRRDNIMKQRTRLVNQLHEQLCIAYPSYKSFFNDISRPTALYFWEHYPSRKYLRGKSVEDLRKELVPVSHNRCSTKNCEKILDAAASDKVKNNAYQDARDMVTLSIVSDLQHYDSQLAEVDKMLEQMYKMLGCTLTTIPGVNVITAVKILAEIGDIKRFSNANKLAQFAGIAPLHLSSSGKGKDVATKQGNRRLQATIYFLAIQMVQVSSKGTPRNSVVRAYYEKRKAEGKTSQQALICISRRLISIIYGMLKHGTEYRMPVVENAGEKL

SEQ ID NO: 292955 - protein, 453 aa, unidentified
MRQPSSLPHINPHAAGVDIGAHSHFVAVPQGADPQGHDVREFEAFTADLYALADWIAACGVTTVAMESTGVYWIPLFQILEERGFDVKLVDPRRMKHVPGRKTDVVDCQWIQQLHSFGLLDGAFRPSDQIVVLRGFLRQRAMLLRSCAQHIQHIHKSLEQMNLKLHLVVSNIVGVTGLRIIRTILAGERDPLKLAALRDRRCKNDVATIARALHGHYRPDLLFALRQAVELFDLYQTKVAECDKEIEAVLASFQDAAKGRTLPPPRRKAGAYRNAPSFDARSALFRISGIDLTRVEGIDTSIALTLISEIGLDMTRWPSEKHFASWLGLCPGSKVSGGRVLSSRTKLCANRAATAFRLAANGLHNSHSALGAFFRRKKAQLGTPKAITATAHKIARLVYRLLRYGQDYIQVAEEEYERRFRARTVRNLERKAHALGFALLPVSQSPGLSALPA

SEQ ID NO: 292956 - protein, 356 aa, unidentified
MIKRNKLDFTGQPIYIGMDVHKKSWSVSISTKYGQYKTFSQPPEVDKLVHYLRHHFPGAQYYSTYEAGYCGFWIHDRLREKGIGCLVVNPADVPTKNKERRTKRDRIDCRKLSRSLRNGDLEGIYVPPRGKVEDRSLIRTRLSMVRKQTRCKNQIKSMLLFYGVVIPEEKGMGHWSRRFIRWIEGIRMERASGDMALQIHLEELCHLRQIIAKLNRAILALSRTEEYRSWVLLLRTVPGISTLTAMILLTEIGEISRFPSIDELTSYVGLIPDTDASGEKEHIGGITQRSHPQLRWVLIEASWRAVQKDPALMIAFGHYCKRMRKTKAIVKIARKLLNRIRYVLKNRSEYVPAVLE

SEQ ID NO: 292957 - protein, 346 aa, unidentified
MEYYAGLDVSLKEISICVVDGDGKTIARGTCPADPEGVAGWFRNRDLKPRRIVHESGILSIWLQRGVARLGLPATCIDARKAHKSLSARLNKSDAADAEGLAQLARTGWFTPVHIRSEEADRLRSLIGARERLIRLRKDLEGHIRGVLKTFGIRMTGMGQGRQRQAFRDQLAAAGETDPVLRAIADGFIAAHATLCQAADDLDKAVKRKAKAHPVARRLMTIPGVGPVNALSFIALVDDPGRFGRTSDVGAFLGLTPKRHQSGEVDWSGRVSKCGDGAMRGLLFEAASCLIRQVKRFSPLKSWAVRLSGRRGFRKAAVATARKIAVLMLTLWKDETEYQWTREATG

SEQ ID NO: 292958 - protein, 465 aa, unidentified
MIGDLEEDRVVRRLVGVDLGIASCHTVRVLDGEGRDVCRRRCEPTVESLGRVEAAALAGTPAGTVLEVVMEPTGPAWLPVAVFFTARGHLVFRASSAKAADLRRFRSRHAKSNGIDADTLARLPLVDPAGLHPLELPGEQAAALDRRVRATDRLTMLAAQHKTRIKDLVRQLMPCSPLTGDLGLADMAVLERWADPRALLAAAPARLTRLIGTASHGHQGADRAAQWRQAAANAVALYAGHPAAAFSDLADEVRTEVRLLRATQAELAGHAAERETAYRYTDVGGLARSLPGLATVGGPVLVAVMGRPGRFATAAAFKSFTGLAPKASETGNTDRKGQPMSKAGSALLRTTLIRAADTARKQDPQLARIYHTQMVDRGAEHLKALCVVAGALAERGWAVMNRQMPYVICDIDGHPVTPQQAKRIIAEQYTVPEEVRRRRRSSKTARRAPAQAQRGRPLSKPPAAA

SEQ ID NO: 292959 - protein, 344 aa, unidentified
MSIKVVGIDLAKNYFQVCVLNIDGTISSNRKVARVKLLHTIRQLPDNTPLAMESCASSHYWGRVFLRLGFKVSLIPAQHVKPFVGRQKNDANDARAICEAYSRPDIHFVPVKTIEQQDLKALRNVRSRLVEQRTALANQIRGLTAEYGIVFPTSIRALRNHLPLIIEDAENELSHVMRNLLQNLYCDFTSISSKIDDVTQDITSLSQQSPRYKAIKNIPGFGPILTAAIVSEVGSGEQFQNGRQFSAWCGLVPKQNSTGGKNSLGALSKSGNRDLRTLLIHGARAVLRCRASSTDPMGAWLRGLIERRGKAKAIVALANKLGRIVWRALATDCEYDVNRAFKPI

SEQ ID NO: 292960 - protein, 412 aa, unidentified
MKEKVEFEQVIERGCGLDVHKETVTATIKGEGIKQETREFSTYTRSLISLRDWLLKNGITHVAMESTGVYWKPVFNILGEHFQIILVNARHVKNVPGRKTDQLDSQWLAKLLMAGLLKASFIPIKKIRELKDLVRYKTKLTRQVSSEKNRFVKILEDANIKLSSVLTDIFCVTGMKMIREIIECDYDPDKLLYHVHGSVKKSRSEIKEAITGYVTNHHRFMMQTILESIEKTEDIIAKIDSQIAEQTKEYGLEIELLETIPGVGHDGAIGIISEIGADMSVFPDEKHIAKWAGMCPGNNETAGKKKSSRASYGNAYIRALLVQLAWSASRTKKTYLSSKYKSLVRRMGKKKAIVAVGHKILIASYFIIKDKVTYNELGEEYLSNFRKDKLVAYYKKMLQELEPNLEFETKVA

SEQ ID NO: 292961 - protein, 355 aa, unidentified
MTSTKYIGMDVHKESISIAVRNDAGKIAMECVIETKANIILDFVHGLRGELQVTFEEGTWAAWLYDLLKPHVTKLVVCDPRRNALLQDGNQNDRVDARKLSDLLYLNKLSAVYHGDHGLRTLKELGRTYLTITRDQSRVMTRVKAMYRSWAIPCSGKQVYGSQHRAEWLAKIHEPGVRRRAELYYQQLDALRTLRQEVRTDLLAESKKHKVWKRLCEIPSIGPIRAAELLGILQTPHRFRTKRQLWTYCGLGVMTSSSADHEVARGQLRRKKKHVQIRGLNENCNHDLKNLFKGAAVVASIKPGPLAEFYAALVCKGMRPEMARLTLARKIATIVLIVWKKGVCFDAQHLKPQTA

SEQ ID NO: 292962 - protein, 338 aa, unidentified
MKLYGGIDLHSNNSLVCLLDEKDRVVYQKRLPNRLDQILSELSPYREALQGLAVESTYNWYWLVDGLMEAGYRVHLVNTAAVQQYSGLKYTDDSHDARWLAHLLHLGILPEGYICPKAARAVRDLLRKRSQLVRHRTAHLLSIQNLLARNRGQSLSGNLVKRLSEAQVEELLPEPDLALAVKSNLRVMQCLEEEIKKLEKVVKARVRLKPAFRSLLTLPGVGSTLGLTIMLEAGDIRRFQKVGNFSSYSRCVRSIKLSNGKKKGEGNRKNGNKYLAWAFVEAAHFAIRYSPQVQRFYQRKRAKTNGIVALKAVAHKLARAAYFVVRDQVPFNVVKAFG

SEQ ID NO: 292963 - protein, 418 aa, unidentified
MKLMEITAVGIDVSKSKSTVAIRRPGGVIVARPFDISHSNHDLEKLVSILKTTGGDIRVVMEHTSNYWKPIALTLKEAGFYVSVVNAMLIHDFSDNSIRKLKTDRADSLKIANYALTFWNELPPFNDEDETRLVLREQSRMYERLSSTATALRNGLIALADQTFPAIDQAFGHAIKNADGHEKWVDFFSIYWHRDCVLRLSIDKFTESYRKWCLRRNYKFRTNTAHKLYALAQDAVPTLPKNNGTKALVLQACKSLNAVCEAKQATQEEMNRLASLLPEYEVVIQMEGTGPITGPALMAEIGDVRRFKNKKALVAFAGIDAPPFQSGNFESKSRHVSKRGSPHLRRTVFLVANIILTLSHEDNSVFCFMDKKRAEGKHYYVYTIAGSAKFLRIYYARVTEYLRTQEKPVAAGCPNGNS

SEQ ID NO: 292964 - protein, 452 aa, unidentified
MEEEKISMEIVNPHAAGIDIGSRSHWVAVGQSEKDIREFDVFNQDLFEMADWLHEKQVKTVAMESTGTYWQNLYAVLMSKGFHVILCNGKFTKNIKGKKTDVKDCQWIQKLHSLGLLSSSFLPDGKTEELRTYCRQRANLLHQAAASSRKMQKNLRLLNLRLDVVVNDICGLTGLLIIRAVCNGETNPQKLAALRHGNCRKSEAEIARALQSNGRKDYLFALKQELDTYDHLQKKIEQCDVEIKKMLDEIINSDDNKRQHHLDPKPHKRINKNTPENIDLNLKSYQMFEGTDLLAIEGMSYSTVLSLMSEVGVEGIRKFPTAKHFCSWLRIAPNNKVSGGKVLSSKVPKGSSRLKIALRNAANAIGNLKDSTPLRDFFQRINFRKGRVSAISATARKLAVIIWNMVVKGVPYNNPAGYLFLDQKRKLGLVKRIQKQITKFAITVDDLQIIKM

SEQ ID NO: 292965 - protein, 347 aa, unidentified
MMIIGCDVHSRYQVIAMLDPGTGEVMDRRLEHENGEAKAFYAGLPKPSLIGIEATGYTQWFERMVGELGHELWVGDPAQIWARSVRRQVTDQRAAEHLLDLLLTQRFPRVWVPTPEERDLRQLLKHRDKLVGMRTSVRNQLHFLAMSQGVCRRKKLWSAVGRRELEGLRLGEWASRRRQELLELLDRLDPGIEELDKAVQAEAERRPEVARLRQQKGVGPVTALAFVLTLGPVERFANSRKVVSYLGLNPSEHSSGGHQRLGHISKQGNEMLRWLLVEAGQSAAQFDPELRRKYQRLKFRRGAKVAIARHLAVRLYWTLRQRKVAPSPVRTSESPARTLVDSGPSIL

SEQ ID NO: 292966 - protein, 353 aa, unidentified
MKKVLKEVAGIDVAQKELVVSLGRLYENLDIEIISYKVFKNTDNGIKSLIGWVASNGNNANSVRYVMEATGVYHEKLAYALDESGFDLSIVLPNKISNFFRTLDINTITDKTASQAIMRFGLERKLDNWNRPKEAYRQLKQLTRERDQIVDQRSMVKNQLHAEKAEAVPNERSLKRIAERIKFLNGQENEIKMDIATLLKDYPDIMERVKNICTIPGVGELTAVIVLAETNGFELIRNKKQLTGYAGLDVREKQSGTSVKGKPRISKKGNRHLRKSLHLPSLSSVKYNKSHRDLYARIVAKSGIKMKALIAVQRKMLELIFVVDKNKTEFDNDHQQKRTLDANAESIPLQTSL

SEQ ID NO: 292967 - protein, 372 aa, unidentified
MLYLAIDQHRKQLTVNERDEEGNVLLRRQVSTRWKAVRMYFEELQARSREHGGFVVILEVCGFNDWLLQMLRDYGARDIVLLQPEERDRQKTDRRDANRLGELLWVNRRRLLAGLRVQGMRRVAIASGQERDDRQLTSLRWRIGQHLTRTLNGVRHLLRRHNLEQEGPTKGIKTKAARKWLRELPLAALDRLEMDHLLERWELLEQQRATLDERIRQRQSHDEAAAILATIPGAGAFTSLALATRVGDVDRFPRPRSLANYWGLTPGCRNSGETKKRLGAITKCGSALARFLLGQLTLHVLRKDPVLRSWYKGVKRRRGSKTARVAVMRRLATIIWHLLKRKEPYVNGGPRRPHGEVVPPAKEPCTAGVSQE

SEQ ID NO: 292968 - protein, 311 aa, unidentified
MIIAPGFIGIDVSKNHLDIFDAAIGRSIRIDNSVPALAGLTEGWAQRKDAFVLFEATGRYDLLLRRALAAGGIRFARVNPGRARDFARAAGFLAKTDAVDAHMLAAMAHCLHPRTEEARTEPREQLALLNKRRDQLVATRQQERTRRHECSDPISLDSIAEHLAWLDAAIEAMQAQIAALIASTPELDRARRLLASTPGVGPVTAATLLALLPELGQRSPKQLAALVGLAPFNNDSGARRRQRSIRGGRKRVRDALYIAAFSAAHHAPRFVAFYKTLISAGKPTKLAIIAVARKLLTVLNAIVRDQQPFRA

SEQ ID NO: 292969 - protein, 484 aa, unidentified
MHPRTTNKPTQTSEVRRFNFESAGALALDNEYSGFAVLPAHYIAFAQRKRARPWTSIYHSGRHDVKPLTTQQFTAYVGIDWADTKHAICLQALGNESREFDCIGHQMADIDQWAQSLHQRFGGQIAVALELAKGPIVYALQKYDFFVLFPINPLTLAKYREAFAPSRAKDDPTDAELALDLLMRHPERFTPLQPQSVKMRTLLSLTEHRRELVGDKTRFTNRLTNTLKQYYPHALDWFDQRDTLLFCDFLTRWPTLAQVKRARRASLEAFFYAHNGRRTHVISAPLDAIKAAIALTEDWGVIAPCRLQILVLVEQLRITLQAIDRFDREIAELAPQLPDYCLFQHLPGAGPHLTPRLLVAFGEDRQRYQHVDELQKYAGIAPVTERSGKKSWVHWRWQCPTFMRQTFVEWAGQTINKSFWAGAYYRQQRAKGSSYQAAVRSLAFKWVRILYRCWQTRTPYDESKYLNALRKRGSPLLKHLELNV

SEQ ID NO: 292970 - protein, 409 aa, unidentified
MTITCGIDWAENHHDVALVDDTGQLVAKRRISDDAEGYRQLLGLLADAGDSPQDPIPVAVETARGLLFACLRATGRKVYSINPMAVARYRERHRVARAKSDHADAKALANILRTDADVHRPLPADSELAQAISVLARAQQDAVWNRAQLNNQLRSHLKQYFPAALVAFQVRAIGLDSREARAVLAAAPDPATAARLTRTQLRSLLRKSGRQRNIETWTDRLRAVFTSDYLHQLPLVEEAMGRQTAALVRQLDAACQAADDLAAAAAEAFAQHPDNEILSSFPGIGPLTGARVLGEIGDDRSRFRDARALKAYAGAAPITVASGKSHAVRHRRVKNQRLAAAGYVWIFGALPSPQVKEHYDRRRARGDRHTAAMRNLFNRLLGCLYQCLATGQKFDPSKAFPTAAEPATT

SEQ ID NO: 292971 - protein, 370 aa, unidentified
MQEAITSYVGLDIHKDSIAVAVAEAGRLTPRFLGTVVPTTRALCSALKRCGNPRDTLIVYEAGPCGYGWTRYLNAHGWRCEVVAPAHITRKPAEKRIKTDRRDALLLARESRSGNLAQVIVPDERDEAIRDLSRAREDANAARMRARLQLKALLLRHGYIYRGKTSWTAAHERHLASIRFAHPAQEIAFTEYRQAVTEAQERLDRLTEALRAQCEQWRMKPLVKALMCMRGFDCIAAITFVAEIGALSRFEHPRALMAYLGLVPSEFSTGNSRHQGSITKAGNKHARRIMIEAAWTYRFKAQVSRELQVRQQGQLKTVRTIAWKAQLRLAQRYRSLLMGRKLHKNKVCVAIARELAGFVWDLARQVKLPA

SEQ ID NO: 292972 - protein, 433 aa, unidentified
MVKQEPEIKGCWVLGVDCGEQKHRFVMLDESRARQGALWVTNRMDKVRESLVKMLTKLPEGYELEIVTEGLRSIGGMLMQGATELGVRIYQVNPKALDSYRSVEGQPRKDDDRDAELLAKMRLNRAQGCRLALDPRPEELVLCRLTRLHTQLVGQKRQAVSRVRSRLLELSPEVVDSQWDGPGYSSTGMRAVLERWPGFEGMGNTRVSTVERVLRPVTRQGKACTKMARAVKEMARRITLGAQERRVISMELDMAMQLLRLTETSLAKVDKEIKTAVEVHPKGRNLLEMSGVGQFTAGVLIGEILPLARNQSEGKSATYGGITPLSRRSAQSEGRSKLARGVNKHAVRALYLSAVSARQCSALDSAYFQKQLERHKGHPKAHVKSFLSLARQRFKVMYKILTTDARYDKETLIRSHLKRQELERTKKEGHLIA

SEQ ID NO: 292973 - protein, 340 aa, unidentified
MSIQPVVAVGVDPHVDTIAVAGVDGLGAVVWESTAPNTPGGIAGLVGSAGSEVWAVEGSGALGRLLADSLIGRGVSVFEVPTRLTARLRLRAGFSKSDRADAAAIARMALAETLPPVDHDPIIEALRVLVGQRESLVKGQVEASNRIRARLRELDSEAARRLPRLRGRAMFEAILERLPEADPDPHRQALIVATGLQAQECIDRIGRIRRLEAEIRKVMPPGGSKLMEIPGIGLITAAMILAATGNIDRFPTEGHYARYAGTAPLDASSGRQQRHRLNRWGNRSLNQAIHIAVVTQLQRGGQSHHYITRRIAEGKTKQEAIRAAKRYLTRHIYRTLKQHP

SEQ ID NO: 292974 - protein, 425 aa, unidentified
MNYKQNEKINQVKESTLVVGIDIGSTTQYARAFDWRGIELGKVFTFSNSREGFEAFKAWMQHLQDKYRKSDVIVGIEPTGHYWFDLGAYLEDEGILLVMVNPYAVKQTKELDDNSQSKNDRKDPKVIAKLVTEGRYSAPYTPDGVYADLRIMVANRKRLIREMTQIKNRFARWFAIYFPEYTDVFGDYEAQSSMLLLKKTCTPEAIVELGAEKINQIWRDAKLRAVGMKRATTLCETAKRSIGLKKGSSAARYEMKLLLEDYEYKKAQLDAVMEEIEKLCRKIPESEQMLAIKGIGVITVAGFLAEVGDVRRFESPRQIQKLAGLSLRENSSGKHKGQTTISKRGRSKLRAVLFNAAIPLIAKNPEFKSLHEYYTTRANNPLKKKQSVIAISCKLIRVFYAILAKGVTYDAQKLISDIHRQPQVA

SEQ ID NO: 292975 - protein, 414 aa, unidentified
MKTCGLDVHKDMIFCAIYNGKDSVVKQFSSFTPDLRDMCGYIKGEGVTTVAMESTGIYIEAIRTVLRQSGMKAVVVNPFLIKQMPGRKSDVKDAEWIAKLHHKQMLSESFVPDGTLAELRAYTREHCKLTQRRTQVLTKIDRLLVAGGIRLSSCVSSLDTKGFLKVARAVAGGDTDPERLEKMVQGCTKYKRDGTLRKALTGCMERHHMWRIAVAMEELDLYDRLIAEAKDKMEGLTEAHYHEEARLLQTIPGVGRLGAISIIAEIGTDMGVFGSGGRLAGWAGLRPRNDESAGKCKSTAITKGGAHLKPILVQCAWSAVRVRDSKFQQCFTRLCVRKSAKKAIIAIARKLLVTAYALLLNHEEYSPNKAGDGVTPEQLHRRIQYHIAQTERLRRRMTLASRMTAPNSNNTIIA

SEQ ID NO: 292976 - protein, 390 aa, unidentified
MESAQMLQPVFVPREFEVFAGLDVDKTRIAVTFTDHNRLLKSLQMPYSSQHLLNYTRKHFADRRVAFVYEAGPTGFGLHDDLLAAGHRCLVVAPSMVPRAPGQRVKTNRIDSRKLSEGLRGGQLNSIHVPSLAYRHLRHLVQLRDSHVRQMMAAKYRIKALLLYEGIPFPEAPASNQWSARVLQELGTLPCTSTVGFKLNSLVASLYFHKLEAAATQKQIRRFCQQDPELSRSIRYLTTIPGIGWIVASHLVARLGDWRLIRNVRQIASFLGLVSGEHSTGDQVQRGSITRTGDVRLRNKLVETAWTAVRKDPEWEQFYRRIYQRHPRPIAARKAIVAVARKLTTRIYSVLKQQRPFRLKTVTQAPLTPEETACPRGRLDQPQNEGTHGS

SEQ ID NO: 292977 - protein, 344 aa, unidentified
MDHYAGIDVSLECSSVCVVDASGKVVREAKVVSEPEALIGWFGSLGLGLARIGLEAGPLSQWLYAAMKQAGLAVELLETRHVSDAFKAMPVKSDRNDARKIAQLMRLGWFRPVHCKSITAQEIRAMLTARKLVQSKLLDLENSLRGILRGFGLKVGKTTRTNFAGRIEELVKGHPNLQTIGQALLRARAVLLAEFNGFEKRVRAMSRLHDKARLLMSTPAVGPIVSLTFACAIDDPSRFTSSKQAGPHFGLTPKKYQSGETDYTGRISKHGDASVREALYEAAHIMLTKPIKGCSGLKSWAMRIARRAGTNKAKVALARKLAVIMLRMLKDNVPFNPAAKPATA

SEQ ID NO: 292978 - protein, 343 aa, unidentified
MTNNTMIGVDLAKNVFQVHGASMAGHVKFRKKLSRPQFQKFMAKHVPCLVVMESCGSAHYWAREMAKLGHEVKLIAAQYVKPFVKRQKNDVADAEAIVEAAQRPGMRFVEPKTEEQQARAMLFRTREQLVRQRTELVNALRSHLYELGYVVPQGIRNMKRIALVIEDPGNSLPDLVRDLGRGLLDQIAEQTTRIEAMMQKIKAQTSDVETARRLQTMPGLGPITAIAVEAFAPPMETFKCGRNFAAWLGLVPKQHSSGGKHKLGRVSKAGQADIRRLLIMGAMSRLNWLGRKSIPEGSWLARMLATKPRMLVAIALANKMARTIWAMLTKKEDYRDPTQMIAA

SEQ ID NO: 292979 - protein, 348 aa, unidentified
MLIIGCDYHPGFQQIAFVDTETGEFGERRLTHREEAEQFYGTLKERSVRVGMEASGHAGWFERLLKDLQFELWIGDAAEIRTKRVRKQKTDRQDAQLLLKIMVEDRFPRIWVADAENRDLRQLLWHRHRLVQMRTRVMNQLHVVALNEGLRRKKALWRPAGRSELESLILAPWASRRRQDLLDLLDHLTPKIQGLTRALEEEVEKRPVTRRLMTYPGVGPLTALAFELVIGTPERFHCGKQIASYVGLVPSEESSGDRRRLGHISKQGNSLLRYLLVEAAQVTVRSQPQWRSKFFHLAMRRGRKIAKVAMARKLAVHLYWMWREGWDYEQWNKFGSHAGAPGNRHGVQ

SEQ ID NO: 292980 - protein, 341 aa, unidentified
MRSGKVTPRPAKGKSVLLQDFDHFVSVDWSQQTMAIAHMRRRDKEPVVFERASDLKALKEYLRTLRGTTVLTFEETTTAHWLYLELRDDVDRIVICNPYTNRLLSAGPKTDKIDAAKLCLLLRAGLLNEVFHSDDGLYDLRLLVSAYTDLVQAGVRALNQRSAFFRGHSDSGTHASFILAHLDKSIELYRHAKQEYDAKFGQFCHHNKQLKLILPVSGIGTIGAVSILATIVDARRFPRSGKYLSYCGLVKLEKCSGGRSYGRRKPQYNRSLKAVYKIAALAAIRGNNPIREYYDVLIARGVATHHARHQIARYIATVTYGILKTGTRYDPYQWRKYTKVA

SEQ ID NO: 292981 - protein, 409 aa, unidentified
MSVIEFPQLIERGCGLDVHKDTVVASIRGNDLAEETRTFCTFTSDLEDLTCWLQNQGVTHIAMESTGVYWKPVYNVLEEFFEIILVNARHIKNVPGHKTDKKDSEWIAKLLLSGLLKQSFVPDKPIRELRSLYRHRKKLINQRSREKNRLQNVLEDANIKLASVISDIFSKTGQAIMEQLTKGNTNPEILSELAKGSLIRKKPAIQKALHGRFSTHHQFMLGLIMDTIVSINGMIDRVEKQMERYLKHIKQEITLLQTIPGVSQQTALGIVAETGTDMSKFISYKHLASWAGVCPGNNESAGKKKSSRVTIGNAYLKTTLIEASWASTHTLNTYLAYKYAKLALRRGKKKEAMAIGHHILVASYYIMRDKVPYQEPKLKKEILIERKKAEMERLEKRLQKLKISASQIS

SEQ ID NO: 292982 - protein, 441 aa, unidentified
MEAVYRRCAGLDVHKDVIEVCVLPPAGQSGSPQRRRFATFTSDLIRLRMWLVSLKATEVAMESTGLYWVPVWRQLEGHIGKRLLCNPQQVKALAGRKSDRRDGQRIAEFLQDGRLDPSFVPPKEIQQLRELLRMRVSLVQEHNRLSNRVEKLLQSYGVKLSSVASDILGKTGQRILTALAAGQTDPDRLSWKAVGSLREKEAQLRRALRADFDEHSCWMLGVLLGQLKENEQWREQLEQRITEGMKPYEPIVIRLMTIPGVDRLTAWSMVAELGTDMSVFPDQRHCASWAGVCPGTNESAGKQHSTRTRRGNRYLRRILTQSAWATSRCKRGYLRAAFHRIAQRRGHKKAVVAIAHKILVAAYFIIRDKTTYLELGEDYFDLLHPERTARRLARRLERIGYQVTLTKAAATAPRSSEGQQPKKRGRPCKCAERGIDCKHKR

SEQ ID NO: 292983 - protein, 368 aa, unidentified
MDYRVYCGVDFHARQQTICSLTTESGVMSTHELKHQNKAELKAFYAQFSGPVLVGLEASGYSPWFEQLLEELGHEVWLGDAIEISRRGRRRQKTDRRDAELILELLIHDEFPRIHRPTPQSREILRMLRYRQKLVKMRTIIKNSLQALALQSGLSRRSQLFTKAGLEQLGTATMSPVMQYQRDQWLAALEPLNQRIAETVTWLKQQAKSDPRIRRLRTHPGLGLLTALVIVHTLEPVERFSNQRQVAAYGGFDPREHSSGEKKRYLGISKAGSRLLRFFMIEAAHTAVRYDDDLQRFYRRLHQRRGKPTAKVAVARKLLIRSYILLRDEIDYPEFSRRAVAAGLARVLHRPEVPEVLIGRPASTVQSQ

SEQ ID NO: 292984 - protein, 364 aa, unidentified
MLADQVDHVIGVDTHRDWHAAAIVAAPSGVLELDTTIAANPVGYKRLLRFARRHAPGRRVWAIESSGSFGAGLATFLLEHGEWVVEVERPARPARRNGAKSDELDALRAAREALSREHLAQPRCRGDREAVRVLLVTRRGAMRARTRAINQLKALVVTAREELRHQLRGLDTDELVTRCARLRTAPSHSVEHRATVIALRHTARRALALEADANDLETELAAIVTRVVPGLLAETGIGPISAAQLYCSWSHRGRLRTDAAFAMLGGSAPIPASSGQTVRYRLNRGGDRQLNYALHTIVLSRLKHDPATRAYAARRLAEGKTPREIKRCLKRYLARRLFRLLEASGPHPTAPRRPPRSRAIGHCS

SEQ ID NO: 292985 - protein, 379 aa, unidentified
MERTTIAIDLAKSVFQVAVSSRHGSIDVERRLSRDRFLTFFAQQPPAKVVVEACGSAHHWARQLQRLGHTVRLLPAHDVHRYVRRNKTDRMDAKALLEADRHEDIHAVPVKTVEAQAIASLHRLRSAWVATRTARLNGLRGLLREFGIGIPLGAHHVVPRVRELLVEPTPVPDLVRAALANACDEIAGLEANMTAVEHQLLTIGSTMSAVALLQTVPGIGWLTATALVALVSDIRRCRSGRHFASFLGLTPKEHSTALHRRLGAISKQGAVYLRMLLIHGARTVLWHARAKAHPTALQRWAVHTAGRGGPNVAAVAVANKLARIVWAVWARQRPYEAEPLPVGGESTGTRFSRELHRARSANGAPVRPARGKPDKAPGL

SEQ ID NO: 292986 - protein, 340 aa, unidentified
MEIAVLGIDLGKNSCSIVGLDDDGAVVLRRRMRREGVIKFAGKLRPCAVAMEACCGAHHLGRVLRAQGHDVRLMSPEYVRPYVKSQKNDDRDAEAIAEAATRPTMRFVELKSEEQLDMQTLHRARDRLVGERTALINQLRAVLLERGITVAQGRRRLERHLAGLDAQGGLSQRMRVLIEDMRLQWRELDRRIAEFDKELAEWARNEEAARRLMSIPGIGVLNATALIAAIGQGGSFARGRDLAAWLGLVPRQVTTGGKPRLVAISKRGNKYLRKLLIHGARAALPTLLASPTPLGAWLRGLMARMHKNAAVVALANKLARMAWAVLRHGETFRFAVSATA

SEQ ID NO: 292987 - protein, 349 aa, unidentified
MNEKYVAMDVHKASVAIGVRDAEGKYIMESIVETKAITLLEFVKGLSGTIHLTFEEGTHSAWLYDLLKPHVAECVVCNPRKNQLLKEGNKSDRIDVRKLSQLFQAGLLRPVYHGDHGTRALKELVHGYESLVRDRTRVKNRLKAIYRGRGISCAGEEVYDPRKSERWMKQLKERGVAQRAASLYQQLESLNTMVAAAQRQMLAESRKHKAAAILRSLSTLGPISVAMIIATCDTPHRFRSKRQFWTYCGFAVVTRTSSDHYFENGELRQRRKPALTRGLNRNYNRRLKLVFKGAATRGISRGPFKPVYEQLLAKGLKPDLAKLTLARRISAIALAMWKKGERFDPKRLK

SEQ ID NO: 292988 - protein, 410 aa, unidentified
MRTRTRPDTTVTVGVDTHTDRHVAAALDQIGRLLGTHAVPSTDAGAAALLAWAGRFGAVERVGIEGTGAFGAGLSRWLRARGVAVVEVERPKREQRRRRGKSDPIDAEAAARAVLAGTATAQPKAGTGPVEMLRALQAARRSAVKARTQAANQLHALVVTAPDALRTRLRRLSLVRLVATAAAFRPGALITPAAATKLALKSIAVRYRRLDAEVAALDAHLGQLLAEAAPDLLAVKGVGTDTAATLLVTAGDNPERLRNEAAFACLCGVAPQPASSGRTVRHRLSRGGDRQANRALHLLAVRRMGWDPATRAYAARRTAEGLSTPEILRCLKRYLARELDPLLVRRPAPRPPTLDRCGSRSGPAHSPPRGSGGHPQGRSGAEDPAAAGLTAAGGGATASPTAPNLARATA

SEQ ID NO: 292989 - protein, 332 aa, unidentified
MDGEKRFVGIDIAKAALDVFIGSGGAAFSVTNDEVGIRELLRHLAPGDFVILEATGGLEMPAASALAAAGIAVAIVNPRQVRDFARATGRLAKTDRLDAEVLARFGEAVRPEARPLADEQAQALEALVTRRRQLVEMLTAEKNRRARAPKILHRSIDEHIRWLEKRLAGFDDELAELIRDTPLWRERDELLRSVPGVGKVLSSTLLAQLPELGMLNRKQIAALAGLAPFNRDSGNMRGSRCIWGGRAQVRRVLYMATVAGVRSNPTIRTFYLRLRANGKHAKPALIACMRKFLVILNAMLHHKTHWQTPALAPSTVALSPLPGAVSEHGCCC

SEQ ID NO: 292990 - protein, 341 aa, unidentified
MNSIYYIGLDIHKKTIAYCIKKIDGSLVQQGTIAAERKALLQWVQGLPGPWIGAMEATIFTGWVYDFLKPHAVDLKVAHPEMLKAITAAKKKNDRADAEKITDLLRVNLLPECHMLPEALRELRRILRYRNMIVRTAVKMKNKISGLLMETGTSYNKKRLHGRKYFEALLERVEDIPESVKDLLKLSRSSLEMFEAVQKKLVKTLREDKLIHDRVKRLMTIRGVGEVMALTWVLETGEQNRFSSISKAVSYCGLCSAQRESAGKEQRGPISKKRNKHLQTMLIETAKLAPHWNPDLALLHEKELAKGNRNRATMAVARKLVAYMLAVERREEAFQAPQAAA

SEQ ID NO: 292991 - protein, 327 aa, unidentified
MMFIGIDISKEKIDLSWLRDQLTNKIKTKVFKNKHQDFLEIEKWLLNTTKSTASELVITLEPTGVYHEALMYFLHEQGFNIILANPGKAKKYADALNIIHKTDKSDATMLAHYGCAKHAVVDYWQPEALEVRELKALIRRLDALESNRQREANRLEASEFSNVSARVRQSIKVTIAFLDDEIKQLKSDIDDHIDNEPGLKRNRKLLESIPGIGPVLSRELTYLFAAKKFNKAKEAAAYCGLIPRHNESGKLKGRTSISKLGPARIRCKLYMAAIVAGQWNKTIKRHKLTLINNGKTPMQTVCANMRKLIHICFGVIKNQEAFKLQVS

SEQ ID NO: 292992 - protein, 398 aa, unidentified
MNEEDGIRLREFRQLKKEIRGSGEYLIVGIDVAKEKHHAFFGTATGKTLLKRLIFDNTLEGFRKLLDQVQAIQETRSLSKVVFGLEPTANYHKPLGEHLIKCALMVVLVSGVAIKRNRELLDGRWDKNDDKDAANIADLISQGKCLFYEYPRMWLRDLRSLLSLKRKLKKQEHSYRVRIRNQLLAQYFPELDRYSGRPEVESVIRWCLDPSRIAGLENDQFMNQIALGRKTQALHRRLQAIQDLAVESIGCEMGEGAVFEAQILVDGLRYIRKAIQSTDDRIEEICRQFPEYGYLLTIPGFGPDVSAKVMGALGNPFRFQNRRQVLKLAGLDLSADRSGKTSDSAIPVISKKGKAGLRYALYQAAFIASTRNKEFSRYYSQQMVGREKEKGINTQTVG

SEQ ID NO: 292993 - protein, 349 aa, unidentified
MRYIGVDLHKTNFVVCFLSEDDRAQTETFLLNAAGLARFKRRLRLDDQLAVEASANTFYFRRQVKERLAKVVVVDTYRFAVIARSKKKTDKQDALMLARFLKLGWLPEVTVPSEQIEQLRHRLQARESLVRMLRQLKNMAHAALVRSGYAMSRSAFASPRTRGRMAKLENLTAVDRQIIEMALRQMQEIEQEVGKLEAEIIAGGKGRRGLPRLLQIQGMNLLAAIGLLVEIGDIEQFETSKQLVAYAGLAASVRQSNQTERRGKNTKQGRRRLRTICIRAVRSMVNRTKRPLMEFYAEKKREKGAGKAICATARKLLVMVFVMLKKELDYWYVEDRLYNRKLKALRACA

SEQ ID NO: 292994 - protein, 339 aa, unidentified
MWHSGIDQHKQFGVITTYGPEGPRVKQSRVPSTPLEVARYFAEFPGPHRAVVESTGGWYWLADTLAGLGVELVLAHATRVKAIAAAKVKTDKVDSDTLALLLRADLIPLAHMIAPAQRGPRDLMRTRLRLVEKSVSAQNSIERLLEKFNLTSVTELEACYQLQASCHTAQLALLDTQIASLERALYPHLIPNADVQRLLWIPGLGKVNAFTIYTEIDGITRFPSARQFFSYCRLVPGADNSAGRTRHRSGSKAGNRYLKLAFSHAGIRAVQYNPEIRAFFKAKARKKPIRIARTLVALELARIVYHVLARHEDFNGQFKGRELSHRKHAKWPRRASPPA

SEQ ID NO: 292995 - protein, 388 aa, unidentified
MQSMNHDAGRVVIGGVDAHADSHHAAVIDDRGALLGSTSFAVSARGYVDLLAWLRSFGELDRVGVESTGSYAAGLTRHLLAESVEVLEVNQPHPHTRRLRGKSDAIDAELAARHALSRAHLVSPKQTTGIVESIRQLRVARESAIKSRSAAMVQLRDLVLTAPSDLREQLASRKSLTAKAALCRRLRPDTASIDQPITAAKFSLRSLARRIALLDDEIAELDAHLQPLVATAAPRTTALLGISTGHAGQMLVTAGQNIDRLTGEAAFAAICGASPIPACSGKRGRYRLNPGGDRQANRALHLIAVCRLRYCPRTRGYAARRTTEAKTNKEIMRCLKRYIARELYRNLKADLADLGAHHRPPARRQTLATTITCGAGFTGRRQRLASTP

SEQ ID NO: 292996 - protein, 352 aa, unidentified
MALKIIYPICCGIDVHKTFVVACIASTNKGVTTYKRHRFSTFTKGLKELSQWLCENNCKDVCMESTGKYWIPVFNVLEDSCKITLAHPKYVKAIRGKKTDKKDAKWIADLFKHDLIAGSFMPPLAIRQLRDLMRYRFKLTNFMSSEKNRLQNCLTVSNIQLGHVVSDIFGKSSMNIIEKLLENPLDTSFDIEPLIHGSMKNKLPELELAIDGFITPEQAEKLKVIKQHFEDLQSRKEDLEKIILSLAKSYSEEIKLILTVPSFKNIFSAIAVVSEIGVDMDVFPTAKHLCSWAGLTPTNNESAGKKKSVRISRAGCYIKPLLVQCATAVVKSEKHPEIRNRYLKLKKHRGHK

SEQ ID NO: 292997 - protein, 354 aa, unidentified
MPHNTSRLEAVATIGIDIGKNTFHLVGLDRNGAIVLRQKLSRRQIEARLANTPPCLIGMEACVGAHHLSRQLKAYGHDARLMPARYVRPYSKGQKNDFRDAEAIAEAVLRPTMKFVAIKTVEQLDLQALHRVRERLVCQRTSVINQIRAFLLERGIAVRQGPPALRSEIPIVLSMTDKLSPRMIQMIEDLCADWRYLDERVETVSDEIRTLSEQDDGAKRLMTVPGIGPIISTATVAAIGNGDAFSKGRDFGAWLGLVPRQMSTGGRTVLGPISKRGNRYLRMLFVQAAHAVLLHPQCWERHGLKSWIAAAARRLNRFKLAIALANKLARIAWGVLHGGRSFEVRSMKPAAQCL

SEQ ID NO: 292998 - protein, 339 aa, unidentified
MKYTPVGVDIAKHLIQVHFINEHTGEVVDKQLRSKDFLTFFSNREPCLIGMEACGGSQHWARELAKPGHRVRLLQARFVKAFVMGNKNDVMDARAVWMAVQQPGKEIAVKTEEQQSVLVLHRSRRQLVKFRTAQINALHGTLLEFGETIHKGRAAMDREFPAALERMKARLPPYLITVLEDQYNRLSELDTLIDGIEKQLHSVARQNEGCKRLMEIPGVGPLIATAAVATIGEISAFKSGREFAAYVGLVPKQTGSGGKVRLLGISKRGDTCLRTLFVHGARAAALVAKEPGPWITELKKRRPTSVAIVAMANKLARTVWAIAAHDRKYDKNHVSIRPY

SEQ ID NO: 292999 - protein, 345 aa, unidentified
MKHYMGLDVSVKETAICIVDETGKICREVKVPSHPDDLIAMLRDPAWNPERVGLEAGPLSQWLFEALARAGVPVICIETRHVKAFLKAQPNKTDRNDARGIAQMMRVNLYRPVHVKTLASQKRRALLTARKLLQEKAIAIENDIRGLLRNFGLKVGNVGAVKFEEWIRELVNDMADLQEIMEPLLAARRKLREEFSRLHKKVLDISRNDAMCRLLMTIPGVGPVVSLAFTSTIDIPQRFKNSKAVGPILGLTPKLNESGESKRVGCISLCGDAMMRTLLYEAAQTLMINVKKWSWLKAWAMNIAKRRGMRKAIVALARRLAVIMHRMMSDGTEFCWTRNDLPAAS

SEQ ID NO: 293000 - protein, 360 aa, unidentified
MSTIADGDDLRVVAGVDTHKDVHVAVVLDEVGRLLDTASFPTTVRGYRNLTGWVTSFGEVLAIGVEGTGSWGAGLSRHLRARGLNVIEVNKPNRHNRRRRGKTDPIDAEAAARAVLAGDATATPKSGDGPVEALRQLRVARAGALKARTAAANQFHSICDTAPDAVRGQLRGLSTRPKMTVAGRYRAGDPLTPTSAAKMALHSIARRWAALDTEIRALDRDIKTILDTIAAPLLARHGVGYETAGSLLCAAGDNPDRLATEASFAALCGTSPVPVSSGRSNRHRLNRAGDRQANAALWRIVIVRLRSRHAPTIDYLERRVTAGNSKRDAIRCLNRYLARELYNDIQTIVTTTQPRSNIAA

SEQ ID NO: 293001 - protein, 437 aa, unidentified
MGSRYAGVDWAADKHDVVVQDEAGEELFAGSFAHDEKGLRSLCRMLVRMNASLVAIERPDGLLVERLLDAGMRLLPLHPNQVAATRARFRAAGGKSDRFDAFVLCELARTDHHRFRVLEPDSEQTKALRAMTRAREDLVGARVALCNQLRSELERFWPGPIGLFKDLDSPISLAFLARYPSPRDARALGPKRMEAFLADQRYSGKKPAGELVAKLRSAPDGRAGEGEMTARRQVVLALVATLSPLVAQIRGLERQIATAVRAHPDGEIFLSLFKGSTITAAELLAEIGDCRSRYPTRDALAGDAGQAAVAIESGKRKTACFRWACNKRLRDAFTTLANTSRQWHPWAADHYAAAIARGHDHPRAIRTLGRAWSRVIWQCWQNRVPYDPAKHRALQQRLTVTIPTTSGPVIDHAATARMAAGLLATNPPADSLEVSVA

SEQ ID NO: 293002 - protein, 372 aa, unidentified
MGAQPEVGMSFTRADGSDPTEREVRAPMKVLIGVDPHKASLAVAAVNEAGELVEGAHFLQNRVGLRSLERWSKRFPKRRWAVENAGGLGRHLAQRLAAAGESVVDVPPKLSARVRVLSTGNSRKNDGLDALATALAAWRNERLAAVDPEDSSEALRLLSERREDLVAERTRALNRLHGLLRDLVPGGVAGTLSARRAARILRGIRPQSSSSRIRRRLASEVLSDVRTLDRKIADLNGRIKAEVEASGTTLTEIFGIGPILAAKIIGTVGSVARFPTKAHFASYSGTAPVEASSGEVVRHRLSLAANRHLNYALHMVAVCQARSDARGGAYYRKKIEEGKSRKEALRCLKRRISDAVFASLVADSQAPWRSAA

SEQ ID NO: 293003 - protein, 432 aa, unidentified
MEVPQMNYTQNEKIMSITERTLVVGVDIAKSIHYARAFDYRGIELAKVFRFENTREGLELFKEWISILEKENSKSSSIVGMEPTGHYWFNLGHFLKEEGIRLVLVNPFHVKRSKELDDNSPTKNDRKDPKTIAKLVIDGRYSIPYIPEGIYRDLRIVMDMRDSISKSLTRIKNRVIQWLDKYFPEFFDVFADWEGKAALITLREFPIPEKIIAAGIDDIVVTWRKGVKRAVGSKRAARLVEAAKGSIGVKEGLRMAQKELRAIMQQYDLYMEQLSEVELDMEELALQVPGVSEMLTIKGVGILTAAAFMAEVGDISRFSHPSQIQKLAGLNLVEDSSGKHKGQTTISKRGRSRLRSTMFKVMMPLVAKNDEFKALHEHYTTRRENPLKKKQSLILLCCKLIRIFYALITKEVAYSPEKLLKNISYLQLQDAA

SEQ ID NO: 293004 - protein, 343 aa, unidentified
MDHFAGLDVSVKETSVCIVDDTGKIVREVKVASEPEALLAVLKNPAYRFKRIGLEAGPLSQWLFSALAEAELPVICVETRHMQAVLKAQINKTDRNDARGIAQMIRVGLYRPVHVKTLRSQKLRMLLTHRKLLQSKAIAIENDLRATLRNFGLKVGMVGTVKFEARIKELVENQPDLASLVEPLLIVRRALREQIVILHRRLLAIVRDDAVCRRLMTVPGVGPVVALTYRVTVDVPARFRNSKAVGAVFGLTPSKYQSGESERTGRISKCGDEMMRMMLYEAAQVMLTRTIKWSWLKAWGMKIARHRGTKRAIVAVARRMAVVMHRMWVDGTECRGTRDVATA

SEQ ID NO: 293005 - protein, 323 aa, unidentified
MTRTICGVDISSVSLEARIGREGAFASFPNNPEGIAALAAFCHAHQVELVAMEATGGYEQRALTLLSEQGLPVAILNPRAVRRFADSMGQMEKTDRLDAGMIAWYAETRRSQPVCLSSASQQQLRALVTRLRQLTEVRTAQLNQSRLVTDPAVVVLIDELLAVVARQIRELETSIAQLVAQDPLWHQLDQVFRSIKGVADRTVARLMAEMPEIGTLSNKTISKLAGVAPLARDSGKHQGKRAVRGGRASVREILFVVASVVGRHEPDFIAFQQRLSVAGKPRKVIRIALAHKLLVRLNAKAREVRQQHAATNKTMPVPVLVKS

SEQ ID NO: 293006 - protein, 349 aa, unidentified
MSQNLNSAVTVIGIDIGKNSFHVVGLDNRGAIVLRQKWSRGQIEARLANLPPCLIGMEACVGAHHLSRKLQALGHDARLMPAKYVRPYSKGQKNDFRDAEAIAEAVQRPTMKYVATKTVEQLDLQALHRVRERLVSQRTGIINQIRAFLLERGVAVRQGLRFLRAELPRILATPPEVLSPRIVRVISDLAEDWRRLDDRIDQLSSEIAVLARQDAGCERLMSVPGIGPIISSAMVAAIGTGDAFSKGRDFAAWLGLVPKQMSTGDRTILGKISKRGNRYLRVLFVQAAWVVLIKPMSWDRHGLKRWIEAAKKRLHRNVLAIALANKLARIAWGVLAGGRTFEANKLQAA

SEQ ID NO: 293007 - protein, 335 aa, unidentified
MTYIGIDVSKDTFVVAYSPEKSSKTKTFKNTTRGIHEFIRTISKDEHHCVMEATGNYSALLVYLLSEAGITTSLENPLKVKNFARAMLSTVKTDEIDARLIALYGEKMNPAPYKLRSDALLILKQKRTVIRQLKKQLIATRNLKGSMEVLPFFDAKCKRSIEKTIAFLEKQIKDLEEDLATLARSEYKKQMDLLTSVKGIGVTLAAALIMATGGFTYFDNAKQLTRHLGLSPTYQQSGTSVNFKGHINRNGDSSLRSQLYIAACSSLRCNAECRAFLTVCGLRASLGKSLLLPWLTNSSDRLLPLSFRRNPMSMVIFLQRSNSCISPRCTGIDKI

SEQ ID NO: 293008 - protein, 436 aa, unidentified
MTLINFVAANQKYYAFNLLSVFIMVFWSVQYLLQHLLVQTQVSHQLLQPLILILQLPQTPQFRHARPGKFFLPVNGMDYFLPLRLTVRNVLTRRITMNIVFLGIDLAKNVFQLCGLNQAGKPVYTKRTGRQELLQTLANIPACLIGIEASTGAFYWQREFEKLGHKVKVISPQYVRPFVRGQKNDGNDAQAIAVALMQPTMQFVPPKSPEQQDIQALHRARQRIVNHRTATVCQIRGLLLDRGIPIGSAVSRARRAIPLILEDAENGLSSRMRRTIAELYDLFNDLGRRIHFFDKEIETVFRQSEACPRIAKVKGIGPKTATAVVAAIGKGTEFKNGRHFAAWLGLVPRQHSSGDRQVLMNMTKKGDKHLRTLFIHGARAVVRVATNNNDGHMNQWVNQLKERRGFNKTTVAVANKNARIIWSMLRNDTGYQVVCN

SEQ ID NO: 293009 - protein, 417 aa, unidentified
MSDNVRFYAGVDWATEAHQVCLIDAGGKVIDERAFAHGGVGLAEMCGWLETTSGAEPSAIVVAIETPHGPVVEILLERRFQVDAVNPKQLDRFRDRHTVAGAKDDRRDAYVLADSLRTDRHCFRRLRVEDPIVIELREWSRMAEDLQQERNRLANRVREQLWRYYPQALELGDDPAADWFLDLWAVAPTPAKAARLRESRAASLLKANRIRRIDAAEVVRILRQKPLVVASGTVEAATAHIAAVAARLKLVNQQIKQAHRSLDVLCARLTESREQDAPGQRPEQRDVTILRSLPGVGRIVLATLLGEAAEPLRKRDYHALRSLSGVAPVTRRSGKRCIVLMRQACQLRLRAAVYHWARVAIQHDARSRARYAELRKRGHSHGRALRSVADRLLAVACAMLRTQTPFNPHRAAVADAA

SEQ ID NO: 293010 - protein, 475 aa, unidentified
MANLGGRAQKGYEMPGRDEIVSSGKRRGQLAGLPIIRENVAGIDLGSEQHWVCAPTLDRSGREVASFGATTAELIRMAEWLKARQVESVAMESTGVYWIAPHEVLEGQGLQMLLVDTRQLARVPGRDKKSDPTDCEWIQRLHSCGLLRGSFRPEAAVCMLRTLVRDKASLVAERSDWIRRMQKSLDQMNVRVHRAVSDIDGVTGMAILRAIAGGERDAQKLAKLRNRGCSKTEQEIAEQLSGHWRADHVFSLQQGLKMYDAVQERIAAYEQEILRKLGEMERNEPHEPTAAPLQNANKARTIKNRGQEAKRQALYRMSGVDMTQIDAIGVETVEVVVSEYGSDLSRFPTEKQFVSHATLAPHVPKSGGKPVRKKKRNSASTRVAAALRMAALSLRHSQTALGAYYRRIAQRRGGDIAVFATARRLASLVYRLLRWSQPYVDEGAAAYENRYRQHRIGRLAATAKELGYQLTPVTT

SEQ ID NO: 293011 - protein, 390 aa, unidentified
MANSAEDYGRLVTFLRTRPGTVRVALEPTGNFHRTLAFRLLKEGLSVVSVSSVAGARYREAMFNSRDKNDPKDATVILQLLKHGLVQHYHEPLLAGHHDLQELAKTYRQVTLARKRLADSLLNHYLPLYFPEIARYWESTRVEWFVAFLSRFPTPQVVRALSLPGFIEAAWPLIGRKINKRAKLEELYELARSSIALPVAVDSPAIDTFRLQLTHFARLAELRRELEAQAHRLLKDRPDYQCLCSLPGVASVLAMVILAEGGDLRRFHHHRQFLKYCGLDLAKSQSGQFRGREMLSKRGNALLRMAFWMAAQRAVRMTENSFRDKYERYMKQDPGNADVRRKALTAVAAKMARVAYALVKRLEPYRGYHEHALPSGSIPLTRAVGAAATP

SEQ ID NO: 293012 - protein, 347 aa, unidentified
MTTELLSVGIDIGKDTLHIVGFNDDGSYAFRKKIRRLSLVATFEKLPHCNVGMETCMSAHFVSRTLRKLGFDPRIIAAKYTKPFVKGQKNDYNDAEAVAEAVLRPNLNYVQEKSQDQLDLQALHRVRSRLVSRRTATINQIRAFLLEQGIAVRTGSSSLRNSLFAILDNRANEISSRMHDILIGLYEDWLWLDERIDATSTEIEQISKYDVGCQLLMSIPGIGPIISTALVAAIGNGSAFERGRDLGAWLGLVPRQYSTGDKPILGKISKTGNRYLRMLLVQAAHVLMMRPKLWQNLSFGDWLERASKRMHKNKLAVALANKLARIAWSVLYNCTEFDNHTTDMEAI

SEQ ID NO: 293013 - protein, 353 aa, unidentified
MLAELVHHVIGVDPDRDWITLAVVDAHTTGVTAHDRFPATAVGYAEAVEFVDGHSVDTERAWAIEGTASYGRGLSVALSRLGEWVIEFDRPTRKTKDGAKSDHLDAVRAARETLGRDRLSEPRAHQGAREAIRVHAVTRAGAVRARTAAINELKAMIVSADEELRGSLRGLRTSQQVARCARFRERASMSIEGRGTRLSMRALARRIEHLNDEIDDHDRALKTLLDDTAPQLLTERGIGYITAAAFYLAWSHPGRCRSEAAFARLGGTSPVEATSGQKQTCHRLNRGGDRQPNRALYLVAVTRRRCDPATRAYIARRAADGISERFAIRCLKRFIARRVWRLLEHPESALDKT

SEQ ID NO: 293014 - protein, 397 aa, unidentified
MIAVGIDVSKSKSTVAILNGDGSIRAKPFDVHHVADELQALVDYIKRTSEPPTILMEPTSHYHYPLLKAFTEAELPVCLINPYQMKKYGDTELRKAKTDKRDSLRIAQYALEKSYSLIPYTPQDQKYEDLRFLSRQYSQRISTLTVAKVQLLSLLDETMPGITTILPLKSRDPDNCVLLRFIKRFKSFDVIRKMGKTRFLDSYQVLVKKTKDRFAGSKGLAIYELVLNSITTRGENPLSAITQDQCVDLVSTAQKAADEINLQMRIIADTIPEYKVLRSMAGVGDRLGPIILGEIGDIRRFHSGKALNAYAGNDAPPYQSGQFESRNRHISKRGNPALRKACFEVMQALKLTKPQDDPVYLFLLKKEQEGKPYNVAKMAAVNKFLRIYYARAMELYK

SEQ ID NO: 293015 - protein, 355 aa, unidentified
MSQEKYIGMDVHQATISVAVMDSRGKLIMECILETKAATILEFIQGLHGSLSVTFEEGTSAAWLHDLLKPHIAHLVVCDPRKNALLKDGSKSDRIDARKLADLLRLNRLNPVYHGEHGVRTLKELGRSYLTITKDLTRVMNRIKALYRSWAIPCSGTTIYAPRHRAEWLAKISEPGVRLRAERFYQQLDGLQPVRQEARRDLLLESRKHKAVKLLRQIPSIGPIRAALLVALLQTPHRFRTKRQLWAYSGFALETHDSGEYRSVRGKLRRNRERMTVRGLSNNHNPDVKNLFKGAAISASSRPGPLYDFYAARLEKGMRPTMARLTLARKIAAITLTIWKKGVDFDAKQLHRQAA

SEQ ID NO: 293016 - protein, 342 aa, unidentified
MIVVGIDTHIATCDFYAVNSGGKVIGEGTFQTSAKAFRELVDKLNDKEIVLVIEQGPLTDWIRRILRPQGCRIAVSETRRNRWIAQDNVKNDRFDAKKLASLFLGGFIKEVVQRDERNEELLRLVMHHHDLIRQRTQVKNKLKAKFRQNGIRAAGRSVYNPSMRESWLGQIATNPHLVWPVEAAYAQLDLLDEQLDKTDGKIALVAKRYDVVRLLDKNFPGIGLVNAATFVALIDTPARFATVKRLWTYCGLGLDARSSGLRPGRPQLTRRGNRMLKYMLKQATITATKQSGPNRYQDWYHEALKKGREEHKAILTCARKLAKDMWLLWRKSEDEYVASAQT

SEQ ID NO: 293017 - protein, 424 aa, unidentified
MKNCNKQNEKIELVDEKTLVIGVDIGSYDEYARAFTCRKQELSKKPLHFHNTAEGFKTFKDWAVNIMKANGLEKIIVGMEPTSIYWEALATYCKDNGMILVHVNPAAVHKSKELDDNDPSKNDRKDPKVIAGLVADGRYQFPYMPEEEYAELRELSNLRIRTQESLTQCKNRLARWYSRYFPEFKEAYKNVVSKTAMMILDLYPLPEDIVTLGVEGILQIWRSKKVRGAGERKARKLYEAARNSIGRKEAASIARIEFKSIKEDLDRYQERLDEIEKKADEILPKIKNVDKLFEIKGVGKATVLTFLSEIGEISRFDNPKEIQKLAGYAIVTNESCKHQGEKRISYRGRKRLRWVLYQTALSVIAKNAEFRQIHAYYTTRANNPLKGIQSVVAVACKMIRIFYKILTDGVSYDGTKMTQDIVHA

SEQ ID NO: 293018 - protein, 393 aa, unidentified
MSLDHRFAEPTAIRSNLGAIFVSLELSRSTWLITSLSPGGGEKMSKHGLSAGNIAALLARLSELKQKAFARTGQSFQVIVIQEAGLDGFWIHRVLQSEGVESHVVDAASIAISRRRRRAKTDRVDGEALVRALLAYKRGEPRVCAMVRTPTPEEEDRRRLCRERKTLTNERVQHVNRIKGLLFCQGISDYEPLRRNRRQRLDELKTGGGRPLPPHLKAQITRELDRLELLLGQIEAVEIERDALLSAMKPDGMNADAVRSPPAMLINLNGIGPEIAAVLWSEGLYRSFANRKQVAAYAGLAPTPWQSGSVAREQGVSKAGNPRLRTTLLQLAWLWLRHQPQSALARWFHERVRRNGGRLRKSTIVALARKLLVALWKYVTAGVVIDGAVARAA

SEQ ID NO: 293019 - protein, 333 aa, unidentified
MDTDTGEFQECRLEHREIAEKFYRDLAAQEVEVRVGMEASRHARWFERLLAELNFELWIGDAAAIRTKRVRKQKTDRQDAQLILRLLLKDDFPHIWVPSWENRDLRQLLWHRHRMVQARTRIMNQLQSVALNEGLRCKKRLWRDSGREQLEAFRLAPWASRRRRDLLELLDRLTPTIAELTAAIEQEVEKCLAAQRLQTHPGVGALTALAYVLIIGRPDRFQCGKQIASYLGLVPLEDSSEQRRRLGHIAKQGNSLLRFLLVEAAQVTVRSDPEWRSKYFHLALRRGRKIAKVAMARRLAVRLYWMWRKGWDYEQLKKFGSHAGQPGHRDGVS

SEQ ID NO: 293020 - protein, 418 aa, unidentified
MKNDDYAALVALDWGDKTHAFARQIGGADRLECGAIEATAEALHAWLEQLRETCGGRPVALAVEAGRNALLHALLEHPWLTVYPVHPATSARFRRAFTPSGAKDDGPDAVVLLTLLRRHRDQLEPLSLDTPATRELAALVAARRHAVDQRTGASNQLGSVLKSYFPQALTLAGDDLTKPLALAFLRRFPELAAVQRARPATLSAFYRDHNVRSAERIAERLALAARARALVQDRALIAPAVREVAWLVDLLEVHARHIAGLETRIAEVFAAHPRAALFAALPGAGPALAPRLLVAFGDQLARYPNAQSLQKYAGVAPVREKSGARSWTHWRWAAPKFVRQSFVEWAGQTVVHCDWAHAYYDQQRRAGKAHHAILRALAFKWIRILWRCWHDQTPYDEQYYLAALRRQRSTLAVALPKT

SEQ ID NO: 293021 - protein, 433 aa, unidentified
MQDVQDEPLFVQRVAGLDIAKAEVEVTIRVPSDTRPGRRQQETRTFGTTRRALEDLGDWLRCWGVTTIGMEATGDYWKPVFFLLESRGLDCDLYNAAQVKALPGRPKTDRADSIWLAKITERGMISSSFVPPEPIRTLRTHTRYRRHLTQARTAEKQRVEKLLEDGHLKLSSVISDIHGVSGRDMLNALAAGQRDPKALAQLARGTMRGKIRRLEEALECSFFTDQHAAVLAMMLTTIDHYTTQIEQLTARIEVLAEPYLHQVGQLDEVDGIGVICAQDIIAEVGADMTVFPTASHLVSWAKWSPQVRQSAGKRKGSNSAGRGNPYLGAALGEAASSAGRTQSFLGARYRRLTRRMPKKKALVATGNSMLTIIHALLSDPDARYTDLGADYYEQRMHARRQARNHVTSLERLGYKVTIQAITPDTGQPQLATR

SEQ ID NO: 293022 - protein, 459 aa, unidentified
MNRKRSKPKIDRKMPMVHPNAAAIDVGATMHMAAVRPDRTPEPVRSFGTFTTDLHRLVEWFKECGVETVVMESTSVYWIPIFELLDAHGFTVFLVNARDAKHVPGRKTDVSDAQWLQRLHSYGLLRASFRPKGQISELRAYMRQRERLLEYAASHIQHMQKALTEMNLQLHHVVADITGATGLRIIRTILAGERDPKVLARLRDYRCHSSVETIEKALTGSYRAEHLFALEQALALYDAYHEKASACDARIEAVLKELSIGRGRCSETELPSPRRSRTDQANALAFDVRAALFALLGKDITKIDGLGPYLSLKLIAECGDDLSAWPSPKHFTSWLCLAPSNKISGGKVLSSRTRRSGSRAAALLRLAAVTVGRTDTALGAFYRRLSARIGKAKAVTATARKIAVLFYNAVRYGMEYVDPGASFYETRYRTRVVDNLHRRAKAFGFVLMPLEAPPSVVVS

SEQ ID NO: 293023 - protein, 400 aa, unidentified
MQIVGMDIHRSFAQVAILEDGTIIRQLRVDLVHDRLVAFAKTLSLEDEVVIEVTGNSAAVERILRPHVKRVAVANPRLVRAIAYARVKTDKVDAGTLAKLHAAGFLPEVWVADEDTYSRRRQMAERAGVLAQIIRIKGRMKAILHAHLIPPYKGYLFGKRGQHWLDSLPLPSEERAMLWRLIVELERVTKQLSEIDKVVAQQALDDPRALKLMTIPGVSSVVASSVLASIGDIARFPSPDKLSSYFGLTPRVRQSGEHPARHGRISKQGNRDARKMLVEAAWSAKTAPGPLRAFFNRTQKKHGAGVAAVATARKLAVMIWHVLTTGKDYAYARPAFTAMKLRKVALKAGAPHAYGKAGPGRDYWIKEIREREAGYVARVEQAYERMVAAWKEKPKKAATN

SEQ ID NO: 293024 - protein, 323 aa, unidentified
MFYLGVDVSKAKLDCQLLDSTTGKVKSKSIQNTTAGFKQLIEWLAEKKAPNAHVIMEPTGVYHEPAALALTDAGLTLSLVNPAQLRQFAQGLGIKNKTDKADSNVLARYGETLKPEAWQPPSKSARHLKALLARRDAIADDLQREQNRQEAIEFAISPDEVKQSINQSISFLKAELKRLEETIKEHIDRDPDLRGKKDLLETIPGVGERVSSNLTALFAAKAFDSAEQLAAYLGLVPVQWESGTSVRSRPRLSKAGPSHLRKLLYMPAVVARQWNPHIKSFSDRLIAKGKSKMAVIGACMRKLAHLCFGVVHTGRPYDPNYAM

SEQ ID NO: 293025 - protein, 343 aa, unidentified
MKTVTTIGLDIAKSVFQVHGIDAAGKVVIRKQLKRGRVLPFFMKLPPCLVGIEACASSHHWARRLTALGHEVKLMPPAYVKPYVKRQKNDAADAEAICEAVQRPSMRFVPIKSPEQQAGLALHRTRHLLIRQLTATTNSIRAHLAELGIVAPVGRRGVDALIALVRSDEDGRIPSLMRACLMTLSLQAQALKEQIRILDRRLLDWHRSSELSKRLDAIPGVGPALATALVASVADPKAFRCGRDFAAWIGLVPKQNSSGGRERLGNITKAGDRYIRSLFCAGALAVIRFVKIHGAKHRPWLTSLMDRRPIKVAAMALANKLARMAWALMAKGESYKEPVALAR

SEQ ID NO: 293026 - protein, 411 aa, unidentified
MDVVNARCAGLDVHKAPVVAGVRVPGPQPGARRGETKTFATTTRGLRDLTNWLLTHGVTVVTMESTGVYWRPVYEALEGLVQLVVVNARHVKMVPGRKTDVKDCEWLAQLLECGLLRGSFVPPRAVRDLRDLTRLRKALIRERGHHVNRIAKTLELAHLKLSCVVTDLMGKTGRASLQALSAGIDDPERLAACAQGVLRKKQAALREALGGRLTPHYAFLLQQHLSLIDGLDAHIATLDTRIEAAMAPFAEAAALVQTMPGVAARAAQAILAETGVDMDLFPTPAHFASWARLCPGNHESAGKRQNTTTGKGAPWLRATLQETAWAAVRSKKSYYRALYHRLKGRRGAKRAIVAVQHAMIVALWHMLKHRVAHQDLGADYFERRNIARIRRHHVRRLEQLGYDVTLRGKAA

SEQ ID NO: 293027 - protein, 415 aa, unidentified
MEIIYGSCCGLDVHKDKMVACAIHKSEKEIRSFGGTTDELLQMTAWLKEIHCEMVAMESTGSYWKPVFNLFEVEMIPAMVVNAQHIKTVPGRKTDVKDSEWIAELLRHGLLRASFVPNRDQRELRELVRYRSSIVEERAREYNRLQKVLTGANIKLASVTKIDSQSARDMLNAILDGESDTEVLANLAKGVLRSKIPELKAALKGLIGSHQKMILKSMLRHVDALCSQIAELDSEISRRLSDYRQELELLETITGIGERSAQIIVAEIGVDMSRFPDEAHLASWAGLCPGNNQSGGKKKSGKTRDGNPTLKKTLVQCAKSASHGKDTYLSAQYRRIAARRGRNRATVAVAHSMLGAAYHILKNREAFKDLGGGYFDKKRREAIVKQSIKRLQSLGLTVSIVESPESGLQYTANIA

SEQ ID NO: 293028 - protein, 413 aa, unidentified
MEVLYPRCSGIDVHKRFLVACLSIVGAKGQRHKELRQFGTMTGEILTLKEWLKAAGCTHLALESTGVYWKPIYHLLEDSFEIVLVNAQHMKAVPGRKTDVKDAEWLADLLQHGLLKASLIPGKEQQAVRDLTRTRMRLMQERTRLINRIQKVLEDANIKLASVVSDVMGVTGQAILTALVAGQKDPEHLAHLARGSLVKKEDQLQAALQGKLTMHHRMQLEELLLLITTLDRSIARFDREVAERLRWLDALIERIDTVTGLSRYSIEVLLGELGWDMSRFPDAAHAASWVGICPGNHETGGKRLSGRTRQGNRWAKTVLIQAAHAAGHTQTYLGEQYRRISARRGAKKAAMAVGHSILVIFYHMVKTGEPYHEKGSDYFTNVNKEKIQQRLIRQLERLGNTVILQPNAETTLA

SEQ ID NO: 293029 - protein, 408 aa, unidentified
MNTLYVGIDVSSKSNVIYLMLPNGDKHSNFSVANSHEGSTQLVKRILSALTSHSLDTVLIGLEATSVYGDNLVYFLREDATLAPFNRKIHVLNPKQVKKFHDAYNDLPKNDYVDSFVIADCLRFGRINKEVYMGDYRYKALQNLTRARFFAVQNLVKEKQRFMNVLFKKYSTMTQEKVFSDTFSTTALAVYDEFESAEALANMDLHELTDFIIEKGKNRFPDPDAVAKAIQKAARSSYRLPKTVNDSVNQVLSISITSMKALESQIKEFDKAIKAQMELLPNVLISIPGIGPVYSAGIMAEIGDINRFNSQAALAKYAGLAWKQHQSGGFESEVTRLIPSGNRFLKYYLCEAAFSLVRCDKEYSDYYHLKYKEVNRCQHKRALALTARKFVRLVFRLLKDNRLYRPAK

SEQ ID NO: 293030 - protein, 336 aa, unidentified
MKKYKIFIGIDVSKSTLDVFILDGESTSVVYHQVFENNLKWIRQIIRFVKQHTKAVSTEWLFCLEHTGVYAMPLCCFLSEQGMNYALIAGMQIRKSIGIKRGKSDKADCKDIARYAYMHQQEIQCYQLPEKQLLKLKLLLSYRERLMKCRKMIETSKESELFLDKDLMGGIAKDSRSLVKTLQRKIKQVDNQIQELMKTDETLHRTYQLATSIPGVGMQIACHMIVCTRCFRSFDNARQLACYAGVAPFEYSSGTSIHGRNKVNHLANKKLKTLLNMGALTAIKLDRELSLYYKRKVNEGKNPMLVLNAVRNKLAARIFATVKRGTPYVPMMNYAA

SEQ ID NO: 293031 - protein, 392 aa, unidentified
MTCFIGLDLSKFKHDCFIMDEHGEVVRNAFSFTNDQEGFNTLLNVLNDLDPFQEKRIGFESTGHYGSNLKLFLEANGYSFMEFNPLLVNRFFKSESLRKTKTDKADAQKIALYLYSRDYKPNPNSSYHLQCLKSLTRLREALVDERSLQLVRLTNIMDKMFPEFKPLFAKQGLKAASAMYLLENYGSPSRMSNMTLASYHKMVSKLRRTISYAKFCKIKELAKSTVGNENDILSFELEVCLELFKELDQKVLQLDKKICFELSLLNTHIPSIKGIGDVLAAGILAEFESIDKFDNPAQLAAFAGIEPSENQSGTHDGGGRMVKHGSPHLRRYLIQAANNMLVHNPILYEYYLKKRSEGKSHNVAISHVARRLTRIIFYLEKKDVDFNIENMR

SEQ ID NO: 293032 - protein, 340 aa, unidentified
MGEYVGLDVSKADTAVCVMDESASIIFEGKCGSDPHEIFKLLRKETLCPELIVLETGTLSKWLQRGLRDLGLPAEVIDARHAHGVMGLQLNKSDASDAVLLAKIAQTGFYKPVAVGSLQSQERQTYLKARKQLIKSARSTENTVRGLLGSFGVKMPTGVPKFINRVRLALDDHPNLKPSIEPLLAAIAALREQLGVIDKRLLKNAKSDAACQLLMTVPGVGHLTAQAFVASIDDPARFTSSRNVGAYFGLTTRRYQSGERDVSGRISKIGDSMTRSLLYSAASAFLLHVKRPHPVKAWANRIKKRSGHRKAVVALARKMSVIMHKMLVTGEPFHWPETAK

SEQ ID NO: 293033 - protein, 385 aa, unidentified
MTVSTTVSSIIPAQFDIFAGVDVDKKSMATTFTDHGTLFKSLRLPYSSTQLLNYVDKHFPGKRIAFVYEAGPTGFGLHDDLMAQHRTCLVVASSMVATAPGNRVKTNRLDSKKLSVQLRGGELRGIHVPGRRYRELRHLVQLRDTQTRQLTATKCRIKALLLCEGIEFPERSGYWNAAAIDQLRRLPCTSEVRFKLDHLIGTLYFHFNSAALVQKRIRQFCQNDPELRQSISLLSSLPGVGGITAAHAVARFGDWREIKNVRQIAGFLGLVSSEHSTGEKENRGPITRSGDSRLRNKIIQCAWVAINKDPELRAFYRSVYQRQPKKVAARKAIVAVARKLTTRMYVVLKEQRPYIIRPEISAAPLTAEETVGPRERLDASQNEQL

SEQ ID NO: 293034 - protein, 339 aa, unidentified
MKNIRYFIGLDVHKKSTTYAVRDKIGNIVTDGETATLYSELSERLRPYLKSCIIGLESCTSYYTLYQNFLKNKHNIKVANTIQLRQLITKNDKLDAKRLSEMLRLGTFPCSYIPDEKIQHLRSLLQVRHSLMEEKNRCNNRIQALLDRNGIIMPDQEAFGKKWRQQLMQHIGSGEISLELRYEYDHFVYLEKQAEHLGQEISGYTMKHWKSDYMLIQSITGFGPVLSCYVIAHILPISRFPSNRKLRRYAGVVPAFHESGEKKSKGHIPKTSSRKHLRWALIQAANAAGKTNTKLGRYYRKKKKQKNNAGIAHVAVASSMIDIIYKVLTTKKPYNPRVC

SEQ ID NO: 293035 - protein, 342 aa, unidentified
MQINTIGLDLAKTVFQVHGVDAAGAAVVRKQLRRVQVIGFFAKLPPCLVGMEACATAHYWARELKALGHDVRLIPPSYVKAYVKRGKSDAADAAAICEAVGRPSMRFVPVKTAEQQAALMLHRTRDLLIRQRTQLVNALRSHLAELGLVAQQGRDGVKALIAVVMDESGTRLPELARTALAALVAQLAALAEQIGALERRLHAEHRGSDASRRLETVPGIGVIGATAIAATVTDPSAFRSGREFAAWIGLVPRQNSTGGKPRLGSISKKGDRYLRRLFIGGAMAVLRHARAHPERHPWLMRLLARRPAKVAAVALANKMARMAWAVLVRGETYRAPAVVAAA

SEQ ID NO: 293036 - protein, 392 aa, unidentified
MGISVGIDIAKEIHWVTALDGDGVVQIDHKLLNTPPDLAALAAELAALGAPVRIGLDVVGGIAGLAEAMLAQAGFALVHVPGLAVNRARQGTVGGENKSDPRDARTIADQVRTRSDLRAIEPLTEIDLEIRLLVGRRADLVDAQTQRLSRMHDLLVGIFPGLERTFDLTTKGPLHLLTRFVTPAELRSVGKRRLVRHLRAAGGLPNVGALADRALLAAAEQTIAVPAEAMTARLIRELAIEALASRARVIELDRELEGLLARHPDAALIRSLPGMGAVLTAELIAEAGNLSRFRSADALASAAGMAPILRQSGKVRFLRRPNGGNKGLKRVFYQSAFCSLGHHDSRAFYDRKRREGKRHHQAVIALARRRVNVLWAVLQNRTPFQTGFKTAA

SEQ ID NO: 293037 - protein, 317 aa, unidentified
MPYASRFVGIDISKSFLDVCLLPDQKRARFANTPEGIATFIAFLAPLEGIERLILEPTGGYERFVVTALQAARLPVAKVNAGQVRQFAKACGQLAKTDTIDAFILADYARRMQTRILPQRSSQQTALEQLVLRYRQLAHMIVQEKNRREKLTHDAQGRTKDWIEQTLRFLLEQRQAVVDDMTECLKADPELGTKAAVLMSLKGIGLRTACFLLAGLPELGLLDKAQIAKLVGVAPLNRDSGAMRGKRMIAGGRRPVRDALYVAALPAIRFDPDIKAFYTALRNRGKPGKVAVVAVIRKMLIILNARLREHNAARLDG

SEQ ID NO: 293038 - protein, 414 aa, unidentified
MDGSKGLLFVGDDWAEEHHDVELQDPTGRVLGRAKLPEGIAGIARLHAMIGEYVGDDDEPAQVVVGIETDRGGWVQALITAGYRVYAINPLQVARYRERHSVSGAKSDTGDAHTLADMVRTDRHQLLPVAGDSVHAEAVKVVTRAHKTLIWERTRHLLRLRSGLREFFPAALAAFDDLTAPDALQLLGAAPDPASAGRLSIAQITAALKRARRRNIAEKAAAIQAALRAEQLRQPAVVSAAYAATVRAQVAILSTLNTEIKNMEEQVEAHFGKHPDAEIYLSQPGLGVVLGARVLAEFGDDKTRYADAKARKNYAGTSPITRQSGKKKLVLARYVHNDRLIDALNRQAFATLRASPGARAYYDRLRGRGVGHHAALRQLGNRLVGILHGCLKTATAYDEATAWAHHQQDLQAAA

SEQ ID NO: 293039 - protein, 320 aa, unidentified
MTSRGAEKMKNDTIGVDVSKDHLDAHRLADGSTRRFANNKGGHKALIKWLAETPLHRVVFEPTGPYHRAVERALGASGVPFVKVNPRQARRFAEATGKLAKTDRLDAAILARMGALLELEARPARSEVLLELKELYVAREALVKDRTAAKNRGKALTLSLLKRQNAQRLEQIDRQMATVEAAILQIVEADASLSDRFAILTSIPGVSNITAFALLIAMPELGSLEAGQAANLAGLAPIARQSGRWTGRSFIRGGRADVRQALYMPALVAARFNPDMKAKYAHLIQTGKPAKVALTAIMRKLVVLANALLKANRPWTPRTA

SEQ ID NO: 293040 - protein, 332 aa, unidentified
MKEFKETVGIDVSKETLDARLHKKGAYLKVENSKKGFSILLQWVKETTELPVENVLWCFEHTGMYSLNLSTFLAEKNIPFVMVSALEIKKSLGIVRGKNDKVDAARIAQYAYEKREKIKLTLLPSTKLIQLKELLSLRERMVVQRAGYISSLKEFKFLFPKSHNPQLFKTQENIIKVLDQNIKSLEKEILELIESEPEIKKVYSLITSVVGIGLILAANLIVTTNRFTSFENSRKLACYSGVAPFKKQSGKSIKSNARVSHYANKKMKALLDRAAHSAIQHDPELKIYYERRIAKGKSKMSTINIVRNKILHRVFAVVKRGTPYVKIHRYAA

SEQ ID NO: 293041 - protein, 426 aa, unidentified
MGYRIVGIDVHKRMLAVVIADVAVEGEYQFERRKVGTSPSELCRLADWLTTEQVEEVVMESTAQYWRPVWATLEQRWRPKRLGEGAGARSGQLHLAQAQSNRGASGRKKDFPDAERLVKRLVAQELKLSFVPDVEQRLWRTIMRRKHQLTRNRVQFQNRLECLLEEAHIKVSSLVSDLLGKSARRMLQAVAEGASSPEAIAALADHRLRATAQQLCDALGACRDLHPVYRQLLKMALEELKLMEEQIDKLDQEMASLLSAHQDVVQRLTEVPGLGVDSAQQIIAEVGPAAAAFPSAKHLVSWVGVCPGEEESAGVNYSHRSPKGNRQMKGLLNQVSNAAVKTKGSIFEFIYRRLVPRLGHAQAIGAIAHRLCRLIWIILHRAIRYEERGPAVSRSKTERRAAKMIRELRRLGYRVEPNPCHTGASI

SEQ ID NO: 293042 - protein, 372 aa, unidentified
MAVRPNGLPWGVMSKLKCISNPQRVIGFAEVIMFYVGLDIHAKHIAICVLNETGQFVHRSQVRTIDQMMRILEGLPDRFEVCYEASCGYGHFHDLLYPVAARVLVAHPGQLRLIYRSKDKNDRKDAERIAKLLYLGEVPTVHVPSLDVRTWRELINCRSQMIAKRTRAKNVVRSLLRSAGISPPRQPGLWTKQGLSWLCQLTLPTLSQQLRRDLLLEEIETLNRQLRRIEQALSRWAQHIPAVLLLQSIPGVGVRTAEAVAAFVDDPHRFPNAKAVGRYFGLVPRQDQSGDRNRLGHITREGAPVVRKLVAEAAWQARRHSPTVRAYFERAQRDDPQRKKIALVATAHYLVRVMWAMLKRGTFWEENKAAAG

SEQ ID NO: 293043 - protein, 360 aa, unidentified
MGFAKIIALDLGKFKTVCCVMNALDRTHAFETIEMSPANVHDLVLRHVTDVATDTLVAFEACDCAGWVHDVATALGTSVIVVNANDERWRWRRVKRKTDRDDALKIARLAALDQLSAVHMPDPPARQRRRLMIHRRSVVSRRTQSRNAVRSIFSQQGIALARGGKQWTIAGVAQLREHARSIAACADVNDLWRGRLQVELDLITATDAQLKLLDARLDDLSNGDPRVTLLRSFKGVGPRLAEAVVLYLDDPNRFASAAAVASYAGLVPRQIESGTMRRSGHITGRGPGLLRSLLVEAAWTVYRCHDWAKSFVDKVSAGGRARRKLAIVALARRVLVICWGMLKTNTPFRPPRARATAAPG

SEQ ID NO: 293044 - protein, 417 aa, unidentified
MKSARNTLPEEPLNAVTAGLDWARDDHAVSVVNARGREIDRCLVEHSAAGLRNLIAMLGRNGVGEVAIERPDGPVVDALLQAGVTVVVISPNQVKNLRGRYGSAGNKDDRFDAFVLADTLRTDRARLAPLTPDSPATVALRRACRARKDLIGHRVAVANQLRAHLRNVFPGAVGLFKDLDSPISLAFLTRFDTQDRADWLSPKRLAAWLAGVGYSGKKDPAVLHAQLTAAPRGLTGADAEVQAHITHALLAVLTTLAEQIKTLSSQIADQLTAHADSHIFTSLPRSGRVRAARLLGEIGDCRARFPTPESLACLAGAAPSTRQSGKLRSVAFRWACDKQLRDAITDFAADTRHVNAWAADLYQRARDRGHDHPHAVRILARAWLFVIWHCWQDGTAYDPTKHRALQRILNPTEPQAA

SEQ ID NO: 293045 - protein, 339 aa, unidentified
MKHMIVGVDIAKNVMQMHWVDPHTGEVVNKPIKRAAFLEHFANRSPCLIGMEACSGAQHWARRLIEMGHEVKLMPAKFVKAFNSGNKNDAADARAIWMATQMNSKAVAVKTEAQQAVLALHRMRQQLVKFRTMQINSLRGLLTEYGEVMARSRVALDKAVAGVLERLSGRLPAVLIDTLREQWNGLEGLDKQIAEIERRLHAWMKQDEACKAVADIPGVGLLTATAAVATMGDPKSFKSGREFAAWLGLVPGQTGSGGKVQLLGISKRGDTYVRTLLIHGARSVLAHAKQPSKWIEQLQMRRPSNVVAVALANKMARMIWAILAHRTSYQREHVSIKPA

SEQ ID NO: 293046 - protein, 339 aa, unidentified
MELKRVSIDTSKSVFTLHGIDRQDQPVLRRDLSRGAMERFLAKLPPTEIALEACGGSHHWGRRFTAMGHQVRLLPPQYVKPFVKRSKNDRKDAEAISEAAGRPGMPSVPVKSAERQAAAMVIGTRDLLVRQRTQTINALRGHAAEFGVVAAKGTAQVAGLLARVLAPEAMVPQAAQRMLTILASQVEHLDGQIAALDAQLREALKADEAAVRLVQVPGIGPVGAMTLSLTVEASQFRSGRHFASWLGLVPQQRSSGGKPRLSGISRAGNERLRQLLVVGAMAVIRHVKPGSKNASGWLIGLLERRPRKLVAVALANKMARVVWAMLARGEGYRLRPVAA

SEQ ID NO: 293047 - protein, 352 aa, unidentified
MAQSTGREVVLGVDTHLDAHMGVVIDGVGKVLGTLIAPAGIHGYQQLLQWSRSFGACTRAGVEGTGTYGAGLARVLRDAGIEVLEVNRADRSKRRLKGKSDPTDAENAARAVLSGEATAIPKLQSGVVEAMRAITVARRSAVKAKTQAINQLRSLLVTAPDPIRSKLMKSKPEHCVQACMRMRALGTTPLLEALSRTLRILAKRWTVLAAELRELDAMLEALARRAAHRMLERFGVGPYTAATLMVVAGDNPERLRNDAALAALCGASPLPASSGKTQRHRLNRGGSREANNALWTIAMVRMRSDARTRAYVARRTAEGRSPKEIQRCLKRYIVRELYPLILADLRDSAATS

SEQ ID NO: 293048 - protein, 407 aa, unidentified
MFAGIDWASEEHAVCVHDDAGRNTAAWAIAHSADGFEDLVRRLARFGDPADLPVAIERPDGRLVDRLLEAGHPVVPVSPNAIKAWREAEVTSGAKSDAGDAETICEYLRLRFHRLRALRPYSDHTRGLRALVRARGDLVTQRVAANNQLEATLDAFWPGAKAVFADVTSKIALAFLERYPTPASAARLGEKRMGAFCSKHGYSGRRSAAELIQRLRGAPAGIADGAESTARKEVVLASVRVLRGLNQAIADLDRAVIARLGEHPDAAVFTSLPRSGQINAAQMLAEWGDCREAYESPDSVAALAGVSPVTKTSGKYHSVEFRWACNKRFRNAITTFADNSRHASPWAAGVYQAAIQRGHDHPHAVRILARAWIRVIFRCWLDRVPYDPALHGSLTRRRPAQAEELAA

SEQ ID NO: 293049 - protein, 348 aa, unidentified
MEQFVGLDVSQKLTHVCVVDQTGSVVWRGTCLSTPEEIAATVRAKAPHVERIGLETGPLSTWHWHALKAMGLRVICIDARHAKAALSMPINKTDRNDAQGLAQIMRTGWYREVGVKSLDNHKIRAVLGARAQLVGMQTELKNQIRGLLKVFGTVLQRGCSQSFEQQVITALPGNDLLDASVRSLLATLKSVSEQVAQLDRLVIKQAKENAMCRHLMSIPGVGVLTALAFMSAIEDPARFRKSRNVGAFLGLTPTRHQSGETDWDGRISKCGDALVRAYLYEAANALLTNCKKWSALKAWGMQLAKRRGLGKAKVAVARKLAVIMHQMWTTGEAFRWSSEAAKGKPTAA

SEQ ID NO: 293050 - protein, 346 aa, unidentified
MTRVNASEPSPPDAADAAADAAGDAAADDGIFVGVDVSKAKLDVARSDAGNAVQAFANDPAGIAELVRRLLVAGRPVRLVLLEATGGLERPLVAALLEAGLPAASVNPTRARYFAIGAGVLAKTDPVDARVLVECARRGEHRLLRKRDERRAELEALVTCRRQLLHVRTEQSNRRDGTTSRPALRAIDAVLKTLDRQVLGLDRQIEKLIESDDDLRRDGGILGGVPGVGAVLTATLLAELAELGAVGRRAVTALVGVAPYPDDSGPRTGRRRIRGGRASVRNALYMATLSAIRFNPVIRPFAQRLRDRGKAAKVVIVACMRKLLCILNAMLRDRLTWAELDLVKNA

SEQ ID NO: 293051 - protein, 366 aa, unidentified
MLQKAELSCEADSENYLGGSSETMYFIGLDVHKRTISYCVKDAAGKVHQEGKIGSTRRELDAWVKTVPQPRTIAMEATIFTGWIYDHLLPHAEKVKVAHPLMLRAIAAAKRKNDKIDASKIADCLRCDFLPECHMASTEIRDRRRTLRYRGLLVKQMVQMKNRVSGLLLEKGVTHTRQRLHKVGYFAELMSSSEEIDQSIRPLLKLSREHIVRAQKLDYALVSSLERDPMLAERLKRLRTVPGVGPITALTLALEIGDVSRFRSIKQAISYCGLCGAERSSADKVARMPISKQRNKHIQHVLVEAAKLAPRQCHELALLYEKEMQRGNRNRATLAVARKLVCWILAVERRKQDFVPAEKFGGTAAA

SEQ ID NO: 293052 - protein, 346 aa, unidentified
MNNMNFIGLDIHKKSISCCVRQADGTIIQESTIAATRHTLDEWMRQLPQPWMAGMEATLFTGWIYDHLVAGGGMVKVAHPAMLQAIAAGKKKNDRVDARKIADLLRCDYFPECHMAPREIRDRRRVLRYRNLLVRQAVQMKNKVSGLLMEAGVPYNQQKVHQKKYFAELLQKQKKEMPPSMPELLRLSRSTVEALTGMQRQLIRALESDPLLAARVERLASIPGVGRVVALTWALEMGDISRFGSVKKAVSYCGLCGAEKSSGGKTERTPISKQRNKHLQTILVEAAKLAPRWSTELALVYEREKQRGNRNRATLAVARKLVAYLMAVDREQRPFDTQLRVAGNAT

SEQ ID NO: 293053 - protein, 342 aa, unidentified
MDTHRDTHTAAAIDGQGRLLGRQQFLATGAGYAALLAWLRSFGQLTVVGVEGTGSYGAELAFALQQAGVRVVEVDRPERATRRRAGKSDSLDAVAAARAALSGRAHGQPKQRGGPVHALAALRVARRSAINQRADVQRRIKALIVTAPEPLRAQLRGLTDAELVRTCATRRPDRTRAHDPHTATVLALRSLARRHQQLTQEIAELDELIDPLVAQINPILVNLFGVGTDTAGQLLVTAGNNPHRLHSEAAFAMLCAAAPLPASSGRTRRHRLNRGGDRQANAALYRIVLTRMRHDPATRAYVKRRTTEGLTKKDIIRCLKRYVAREIYTALQHTRTELDLAA

SEQ ID NO: 293054 - protein, 355 aa, unidentified
MDSKKYIGMDVHKESISIAVRNGAGKIVMECVIETKASMILQFFDGLRGDLQVTFEEGTSAAWLYDLLKPRVTKLLVCDPRKNASMREGNQNDQIDARRLAELLRLNHLHPVYHGEHGLRSLKELVRSYLTITKDLGRVMTRVKAIYRSWAIPCSGKQVYSPRHRAEWLGKIGEPGVRRRAEFYYQQLDALRTVRQEVRRELLAEGKKHQAWKRLCQIPSIGPIRSAVLLGILQTPHRFRTKRQLWAYSGFGIETQSSADHRRVNGQLQRVKKQSSIRGLNRNCNHDLKNLFKGAAIVASSKPGPFQEFYAALVTKGLRPEMARLTLARKIATIALIVWKRGACFDAQHLKPQTA

SEQ ID NO: 293055 - protein, 344 aa, unidentified
MSKHAVAAGDIAGLIERLTQLKQKARARTGKDFPVVVIQEAGLDGFWIHRVLQGEGIESHVVDPASILVSRRRRRAKTDKIDGETLVRTLLAYKRGEPRVCALVKALTPEEEDRRRLCRERKVLTAERVQHVNRIKGLLFAQGIFDYEPLKRNRRTRLDELRTGDGRCLSPQLKAQVVRELDRLELVLTQLRAVETERDALLEQVSQAAAAPAAMLMQLKGIGPEFAAILWSEGLFRSFANRRQVAAYAGLAPTPWQSGSVAHEQGVSKAGNPRLRTTMIELAWLWLRHQSTSALSLWFHQRLKRNGGRWRKTTIVALARKLLIALWKYTSAGIVIEGAVMKAA

SEQ ID NO: 293056 - protein, 355 aa, unidentified
MNDRKYIGLDVHQATISVAVLDSAGKLVMEAILETKAETILQFIHGLRGSLHATFEEGTCAAWLHDLLKPHVAHVLVCDPRKNALIKVGNKSDRIDARKLADLLYLDKLHPVFHREAGNRALKELARSYLTLTRDTTRVMNRLKALYRSWAIPCAGQRVYAQRYRSEWLAKITPAGVHRRAEIYYQQLDALRSLREQVRRDLLAEGRKHKAMNLLRRIPSIGPIRAVLLIALMQTPHRFRTKRQLWAYCGLALKTSTSGEYQIVEGRLRRSRKFLAIRGLNTNHNHDLKNIFKGAATRAAAVPGPFQDFHAGLVARGMKPTMARLTLARKIAAITLIVWKKGVDFDAEHLKQQAA

SEQ ID NO: 293057 - protein, 347 aa, unidentified
MRFYNGQHRYYCGIDLHAKTMYVCILDASGNVLVHRNLRSEPKAFLELVAPYRDDLVVAAECTFTWYWLADLCAKESIPFVLGHALAMKAIHGGKAKSDKIDSEKIAVLLRGGMLPQAYVYPAEMRATRDLLRRRLHLVRKRGQLLAHIQNTIHQYNLPAFEKRIASPANREGLVEHFPDPAVQESIAVNVALLERYDELLGKLELSIVRQAKRHDADAFHRLRSVPGIGKILALTILYEIHDVNRFSRVQEFASYARLVKCAHESAGKKLGTGGAKQGNVHLKWAFSEAAVLFLRHGGEHQKLLARLQRKHGKGKALSILAHKIGRAVFYMLSRGTVFSTEKFLAT

SEQ ID NO: 293058 - protein, 363 aa, unidentified
MKIMVGIDLHSNNALCGLMDENGRRLLHQKLPCDLGGILALLNPHREHIVTIGIESTFNWYWLVDGLQDHGYHVVLANPAAMQPYSGKKHTDDVSDAYFIAELLRLNLLPTGHIPDRHIRPVRDLLRRRLLLVRQRTTLILSFKSLNERTLGQRVPLSRVKTMKAAEAQARFTAPADQLLGGEQITLMSHLSDSITKLEEHILGVTGKTTAYQRLQELPGIGKILGLTIALETGDAKRFAAAGNFASYCRCVCSLRQSNTKKKGENNRKCGNKYLAWAFVEAAHFACRYDDQCRRFYDRKKQQTNPVIATKALACKLAKAAWHVMAQDVAYDAERVFGPGKQRDLGETGREPAKGSGPLSQQN

SEQ ID NO: 293059 - protein, 339 aa, unidentified
MQLYAAIDLHSNNCVPAVMDEQGKVVFTKRIPNRPASAIVEALLPFRDDLLAVAVESTPNWYWLERELRQANFKVELVNTAAIEQYGGLKYGDDFSDAAHLADLMRMNRLPTAWICPEGDRALRDLARKRAQLVRQRTLQLLSAHNLVARDLGDHLTGNSLKRLTAWDVNAMPLLPEQKTALKATLAVARCLESHVERLERDILAQMRERDVFKWLKTISGIGDVLGLTVALETGDITRFASAGHYVSYARLVDSKRVSNGKKKGEGNVKCGNRYLAWAFMEAAHFAVRYDPVIKSWYQRKAAKAKAVVAIKAVAHKLARAAFHVMKNGTEFGARRAFS

SEQ ID NO: 293060 - protein, 391 aa, unidentified
MIYIGIDVAKDKHDCFITNSDSEVLFKAFTIFNNLDGFNDLYQKIESVMDDVTKVKVGLEATGHYSYNLLGYLIDKGLPTYVINPLHTNLYRKSLSLRQTKTDKVDARTIASMLMSDVNLKSYSDTSYHNEELKSLTRYRFDKVKERAKLKTSVSRLVCILFPELEKLVPTLHMASVYALLSKFPSTKHVATAHLTRLTNLLSESSKGRYCKDTAITFRDAARASIGSNMPAKSLELKHTIKLIQELDSEIDEIENEIKIIMDGINSPILSIPGINYRMGAMIIAEICDFNRFDSPDKILAYAGFSPSTYQSGQLDGAYAHMEKRGSRYLRYALYNATKYVCHWDPTFAAYLAKKRAEGKHYNVAISHAVKKLVRVIYHLEKTKQQYIKAT

SEQ ID NO: 293061 - protein, 337 aa, unidentified
MFMIGIDPHKGSHTAAAVDHTEAVLACVRVDANRHQRARLLEWAVRFEPRTWAVEGATGMGAMVAQQLVAAGERVLDVPPKLSSRVRLLDTGRIDKTDPNDARSAAIVAWRTPGLNVVSGEDEHRVVLRLLADRYHQLTAQRTRSVCRLHALLCLLIEGGTGRSLNTGRAVKLLAGVAIGDPIIAERVATCRQFVTELEALDQALVYIRARTVTAVAASKTTVIDVYGVGPIGAAIILGHSGDIRRFPTAGHYARHNATAPIEASSGPKARHRLNPRGDRQINHAIHTAALTQIAHDHPGRVYYARKLAEGKTKKEAMRALKRRISDVIYRQLLADT

SEQ ID NO: 293062 - protein, 409 aa, unidentified
MTNNASSSVFAGLDWAVHTHAVCVIDASGAVRDRFEIAHDREGLAELMRRLARFGASVRVAIERPSGLVVDALVEAGHRVFPIHPNAVKASRPRYRSHGGKSDTSDAYLLADLLRTDGHRWTALSPQSDSIRALRALVRSRDDLVATRVALGNQLHSTLEAFWPGAACIFADITSPIGLAFLRRYPSPASAARLSQAGLLRFCHAQHYSGRRSPAELLARLHAAAQGLVAPLTADSMAQVVRSLVAVLDPLVAQISALSRRIERFVESLPDGQIIMSFPRAGRVCAAQILAELGDVRERFPTLERLVAEAGAAPVTYQSGKTRSVSFRWACNHRLRQAITCLADNSRHANAWARSIYAAARARGCDHPHATRILARAWLGVIWRAWTDRKPYDPALHNAALKLASGGRG

SEQ ID NO: 293063 - protein, 331 aa, unidentified
MSNCIGLDISKKLIAVHIPKNSLDIEINNNVTGMKKLISKLKKLYKSEYKDLVFIYEPTGNYSCILTKFCHTQKIRCFIINPSQFSNHAKALGQRVKSDKLDAQVLSKALHLARDKEVRIPPYDTVVEEIKELMGYYKFTTKQRVQNSNHLEALSAKDGSSYAVSDLKKNIKKLKEQEKEIIRKVKDIIDADEKLSQGFDNITSITGIAEVGGIALLHLFIKYPDANQREITSLAGLDPIDRSSGTSIQSKARISKAGSTLYRGSLFLGVLSATRYDENFKRFLDRLIANGKHTTVAQIAVMRKMIIIAHSLYKNNKKYDKDVYKKATGGD

SEQ ID NO: 293064 - protein, 326 aa, unidentified
MKAVTWIGVDIAKDSCVVAQRCPEGFQTEEFPITPQGLKALGNWLPQQPRLQIVLEATGPYWRAFTSGFNSVAPEIPIAVVNPRRVRDFAKASPHASKTDRLDAQVLVHFAETFQPGLMEASANRPDRQLRALTRHALQLTQRRDQVRDQMEKAQADPDTPKFVLRSLKRHLQHLEKALKLYWSQARVNLDQDPQLTQCSRLLLSIPGIGEKTALTLISEYGAGLRQVGPKQLTRYAGLDVVFFQSGSSVYRLPRISKQGNWRIRRALYMAALSAIRHNPIVRSYYLKLVANGRPKKSALVAAMRKLLHQCYGVLKNQSPFDPAYA

SEQ ID NO: 293065 - protein, 371 aa, unidentified
MTSVTDLRELVEVVIGVDTHVHEHAAAAVDARTGAVLGQVRVSADVHGFARLVVFADRYSPARFWAVEGTSSHGAGLCRYLLGDDLVENVIELDRPERMKRRHGAKSDEIDAVRAAREALARPQLGVPRSGARRDRLAALLAVRASAVQGAADGARQLFGLTVSAPQVLRDRVRVESSTAAMVDRAAVLRISKSWDADTAAMARVLRRLAKRVKSLEAEAAELEKQIKAVVKSWKPALLDVHGVGPIVAATVLCAWSHPGRIRSRGAFAMLAGAAPIPASSGEVTRYRLNRSGDRRLNWALHHIVLVRMQHDPRSKRYVQKWQSESNGRKKKSKREIRRCLKTYVARELYGLLEYGDNTPSNGGETPAHAA

SEQ ID NO: 293066 - protein, 376 aa, unidentified
MPRQPDGVPVSKTVAKPGAPRRRPNLQNPNSWQSTSSNRTTRTDASKRPSETTNEQKGMAVHVGIDVSKHHLDAHVHESGQAFRVSNDDAGIEELLRRLSEVEPARIVMEATGGYENASFAAMSVRGLPVALVNPRVTRHFAKATNRLAKTDQVDAACLAEFAATLQPKITPLPDEDATELDFLITRRRQLVDQLVAEKNRRSGPQLQRLDGDSRVKQSVDRHITWLEKEIAKFDDQIQQRIQSSPAWKQKDELLQSVPGVGPTTSANLLGHLPELGQLDRKQIAALAGLAPYNADSGQRSMPRHIRGGRAAARTALYMATVAAVTHNATLRTFHRRLLASGKAGQVALTACMRKLLTILNAILRDNRPWNPALNP

SEQ ID NO: 293067 - protein, 358 aa, unidentified
MAGKVTETAVVGGVDTHKDLHVAAVVDQNNKVLGTQYFSTTRQGYRQMLAWMTSFGALKRIGVECTGTYGSGLLRYLQNAGLEVLEVTAPDRMERRKRGKSDTIDAECAAHAAFSGIRTVTPKTRNGMIESLRVLKTCRKTAISARRVALQIIHSNIISAPDELREQLRNMTRMQLIRTLGSWRPDASEYRNVTNVYRISLKSLARRYLELHDEIADLDVMIAAIVDELAPELIKRNAIGYESASQLLITAGDNPQRLRSESGFAALCGVSPVPVSSGKTNRYRLNRGGDRAANSALHIIAIGRLRTDDKTKEYVARRVAEGHTKMEAIRCLKRYISREVYTLLRNQNRQINSIPITA

SEQ ID NO: 293068 - protein, 424 aa, unidentified
MVQDEDSRLRLFRQMKQEIRGSEDYVLVGIDVAKERHDAFFGSARGTTFLRKLVVETSREGFEKLCRHAEAIKVQHGLKKIAFGLEPTADYHKPLGEYLIHHGYHVVLIAGSAVKKNRELLDGRWDKHDAKDAANVADLTGQGKCLFYEFPSPDLQELRSLLSLKRRLKKSEQSCKVRIRNHLIAQYFPEMDSYFTCGEGPAVVRWCLDPKEVAGMPFEAFVRMVSSRTGGEQQRHRLREIHQKAASSIGCRVHPSVAFEATILLESLKQLHTMILETDKRIADVCERFSEYRFLLTIPGFGPDVSAKVLGAIGNPHRFENGRQVLKTAGLDLSADRSGKRTDVAPVISKRGKADLRYGLYQAALIASTKNPRFMPYFAHKLKGREKEKGIRMKMRIKLAAKLLIIAWTLMKKREPFNPDCLEV

SEQ ID NO: 293069 - protein, 424 aa, unidentified
MQIVYRRCGGMDVHKKSVVVCLLLINESTGEERKERRTFGTTTRALLELAAWLKLWGVETVAMEATGVYWKPVWNVLEEELGADCKLMLVNARHFKQVPGRKTDQKDAEWLAELLQHGLMRASFVPPRATRQARDLTRARASLMEDHTAVANRLQKLLEEANIKLSSVASNVLGVSGRRMLQELAKGNRNAAELADLALQRLREKIPQLREALEGRMSLHQQQMLGDYLKQLEFLEQQVEQLDGRTEEHLKATEQLAAVELLDTIPGVNSVVAGVMVAELGVDMQQYPTSDHVSSWAGMCPGNHVSAGKRYSGRTNKGNVWLRRALCQAAWAASKSKNTYLAEQYRRWRVRRGKKRAIVALGHQMLVIAYTMLKTGTPYRELKPEEWKSQDSRPRNAEADVRRNVRRLNALGYQVTLTSATPAS

SEQ ID NO: 293070 - protein, 359 aa, unidentified
MKYYTSTTEFNCGIDLHARQMYVCVMDRQGKKLVHSNIKDNDFQFFLKLIEPYKHDLTVCCECMFGWYWLADACQEAGLTFVLAHALYLKAIHGGKNKNDRIDSEKIAHLLRSNLIPPAYVYPAEKRPMRALLRQRVCYVWRRTELLNRIQSHQLAHNRRPLKCTTRYNRDPWEEKILATEDHPLRQLALQTDMAMVRHYDEQIRALEAKLISLAKKHSPREFTLLLSVPGIGENLGLTILHEVGDIERFPTVKDFLSYSRLVKGTVASAGKIKGLRGSRLGNPYLRWAFGEAAVIAKRDHAVIGPLSQRLEAQMGGNKFKANTVVAIKLARAVYFMLKNKTVFDADRLVAALTHDKRN

SEQ ID NO: 293071 - protein, 364 aa, unidentified
MHELTHIGLDVHKDTIAVAVLRSGTTTCDERVIPNTPEAVRKLLSRHADPSLLRTCYEAGPTGYDTHRLVTSLGIACDVIAPSLIPKRSGVRVKTDRADARNLARLHRAGELVAVRVPTPAEEAVRDLVRAREEIKADRRIARQRIRSFLLRYGKRYPKPTDRWSFRFEVWMRALRFEEPLSQATFEHLLGAYFVRDSQLAAIDRQIEELALLDPLAEPVARLRAFRGIYTLSAVTIASETCDFRRFGTAASYMAFTGLVPSEHSSGASTRHGGITKTGNQHIRRVLVEAAWAYRYAPAVRGKFKKRLEGQPPEVVAYSWAAQCRLSGTYRKLAAKKGANKAVVAVTRELSGFVWGAMTGNMGT

SEQ ID NO: 293072 - protein, 322 aa, unidentified
MQFYTQQRQFYCGIDLHATCMFVCVLDDRGNILLHKNFLCKDANLFLQAIEPYKQGLVVGCESTFNWYWLADLLEEKNVEFILGHALYMKSIYIAKVKSDSIDSEKIARLIRGGTFPLAHAYPKEYRASRDLLRRRAYLVRRRAEALTHIQQIHHQHAKLMVSIDLEMIDAYTIQIKRIEDELVRSVKLTHFQSYYRLTTIPGVGAMISLTMIHEIETIQRFAGVGKFLSYCRLVKGSHSSAGKKLGAPGGKIGNPYLRWAFGEAIQLLKRESKEVLEYARRLEKKHGKARATNILAVKLGRSVYYMLRDDRAFDLNKFLQH

SEQ ID NO: 293073 - protein, 357 aa, unidentified
MGKSIKNLSSVTTVGLDIAKNVFQVHGVDAEGALVIVKAVRRGQLLRFFTSLPPCVVGIEACSSAHHWGRSLIALGHQVKLIPPAYVKPYVRRNKNDAVDAAAICEAVGRPNMRFVPVRSVENQAQLMRHRTRELLVGHRTRMLNALRGHLGEIGVVAAQGAQNAYALKHLLASGCDDNGEVIVPDCVCRALAPLVHQIEAIDAEIAAIDEEIKTLVKADETARRLMTIPGVGPITAQAIVATVQETSAFASGREFAASLGLTPRQSSSGGKERLGRITKMGDRYLRKLLVVGACATLCHRKGHNDALRVWADRLLARKTVKHKFKLTAVALANKVARIVFALMTQGGEYNELPIAA

SEQ ID NO: 293074 - protein, 340 aa, unidentified
MRLIGCDLHASQQSIAMLDRDTGEIVAKTLAHEGGAVREFYASIPRPVVVGIEATGSMGWFLRLMEELAIECRVGHPTAIRKAETRRRKHDRRDAALLLQLLAEDRFPAIWMPSTEYRDLRSLLLHRHQWVRMRTRVQNALHAIVLAHGVRRGHTLWNREGQALLASLPLPPHTADRRSELQALYQHFEAHIDRLDEQVKHVADERPRSTLLMTHPGVGPVTALATEVFVGDPARFSDGKALASYVGMIPREYSSGKRQRLGALSKQGNPFLRFLWCEAAAHAVRRDPNLQRFYRRKVAQKGFAKARVAAARKLGIRLWIMLRDQIDYAEFCRRGLARQS

SEQ ID NO: 293075 - protein, 416 aa, unidentified
MNELKCWFVGVDWASENHRVRVTDGCGKRLGERDFAHGGAGLAEMAAWLTSVTGAEPSAIYIAIEIPHGPIVETLIERGFNVYSINPKQLDRFRDRFSPAGAKDDSRDAEVLADALRTDMRAFRRLALAEPLVVELREWSRMTDDLNGERNRLCNRLREQLWRYFPAMLELEQDLGAEWFLDLWELVPTPDKAMRIRDTSIARILKSRRIRRLTAAEVSAVLRKPPVTVAPGTIEAASAHIRVLTERLRVVNRQLKDAHRQLDRLCGLLAEPTESEPGQANEQRDAAILASLPGNGRIVLATLLAEGWEALQRRDYHALRTLCGAAPVTKRSGKTCIVTRRLACNPRLRNALYHWARVAVQHDPRSRAKYAALRLRGHGHARALRSVGDRLLNVACAMLRNGTQFNPSLESQKNPC

SEQ ID NO: 293076 - protein, 311 aa, unidentified
MVERFGGIDVSMDRLDVMVLPDQWGFSVENNAAGWTELIKRLQGSSLAAIGIEPSGGYERGIIRALLTAGLSVRRINPNKLRQFARARGVLAKNDRLDARLIAEYVAIMPTRIVQRDAGAERLAEVVTMRRQLCDERVTVENQATHVEDAVLRRLNKRRLTRLESDIRLLDKRMAELVTAELALAQRYQLLISMPGVGPVLAFTLIALLPELGQMSRKQIAALVGLAPYDFDSGKLRGHRSIYGGRMPVRNVLYMAALSACRYNPALKTFHKRLAGADKKSKVVIVAVMRKMITTLNAMRRDNAAWQIKTA

SEQ ID NO: 293077 - protein, 343 aa, unidentified
MKLFVGLDVSLAKTSVCVISEHGKIIKEAETESEPEVLARWIEEQSGSIAAVGLEAGPLSQWLHRGLSAAGLDVVLMETRQVKGALKAMPIKTDRRDAEGIARLLHLGWFRPVHCKSVSAQEIRSLLSARKAVQQGMIALEMSLRGLLRNFGLKVGAISRGRFEHRIRELTTGNAMLEATSAPMLRARAALRQELAGLERHVRGLAQEDEVCQRLMSMPGIGAVVALTFRSAVDDPSRFSSSKKVGPWVGLTPSRNQSGERDVSGRITKAGDANLRRAVCQAATVMMNRGPSTWLRTWAERVARRRGRKCAMVALARRIAVVLHRMWRDDTAFQAGAPINQAA

SEQ ID NO: 293078 - protein, 306 aa, unidentified
MCIVTVGIDLAKNVFAVHGVNAAGQVQLLKPEVKRDKLLALMASLPPCLIGMEACSGAHYWAREFQKFGHTVRLIAAQFVTPYRKSSRIKNDAADAAAICEAVARPNMRFVPIKSVEQQSQLFIHRARQGYVEHRTALINRIRGLLSELGIVLPLAHAQFCKGVHAVLEDLPGYSNRVIGDLMSELDQTEQRMAQYDQLIVQIARQDAQAKRLMQIQGVGATTATAIVASIGNGLDFKNGRQFCAWLGLVPKQHSSGGKAKLGRITKAGLRPRAGGHCGQERPHVLGSTAAWRQLQAARLRQTRSN

SEQ ID NO: 293079 - protein, 334 aa, unidentified
MLYAAIDIHKHAFQAAVLDPEGGEVVEARFSADRESLARWAEEWQGRVAAVAIEATTGWRWVWRELSARGFDVRLAEPVQARALLGRRRSAKTDRLDARWLARLLAKEMLPESWIPPEEIQRLRDRTRLRKTLAEDQRRWGQRLHAFLLHEGWPCAKSRLLTPEGMRWVAALRLDAHARLQVDSLLAIIAALEVQLETVDGELRRFARTDARCQALQSIYGVGPILACHLLAEIGEACRFRRAKQITRLAGLDPVVDESGETRRRGHLAKAGSPQLRWALVEAAVHANRANAPDLELYQAVRDRRDTTVARLSVARKIGKRAYHVLRELEQTAA

SEQ ID NO: 293080 - protein, 345 aa, unidentified
MTMLSETVDVVIGVDTHKHTHTAAAVTAQTGVFLEERTVPTDPGGFQALVELADAHGARRAWAIEGTGSYGSGLTRWLTERGERVIELDRPWRAKRRGGGKSDSIDALRAAREALARTKLAEPRSRGERAALAVLLVARRSAVQGSTDAQRQLQNLVMTAPEALAVRFRGLSTTQMLNRAARLRVDPRCDAETSATTVVLRSLARRAMTLRAEAKMHADAITAVVRSLRPELLDVVGVGPIVAAVVLCAWSHPGRCRSEAAFAKLGGVAPLEASSGLTARHRLNRYGDRQLNQALHTVVLVRLRCHEPSRAYALRRRAEGKSTREIRRCLKRYVARELYRLLERA

SEQ ID NO: 293081 - protein, 316 aa, unidentified
MDVASKSLEVRVGQQGAAGSFANNPEGIAALGAFCQVHQVDLVAMEATGGYEQQAFAQLSEQGLPVAILNPRAVRQFAQSMGSLEKTDAIDAGMIAWYAEVKKSQPACLAPENQQHLRALVTRLRQLTEMRVVQLNQQRLVTDRAVQASFKKLLGMLARQIRELEQRIAGLLEKDPLWRQLNASFRTIKGVADRTVARLMAEMPEIGTLSNKTISKLAGVAPLANDSGKHQGKRVVRGGRATVREILFIVASVVGRYEPDFIVFQQRLRAAGKAPKVVRIALAHKLLVRLNAKAREVRQQLATLRPDGTALIAESR

SEQ ID NO: 293082 - protein, 399 aa, unidentified
MKTTDRTAAAIGLDVHRRFSTVTARNAEGKIAWRQRLEHEDRDDLRKRLATWPRGIPVILESSFGWEWVCEELEQAGLEPQLASSRKVAAWGNARGMAKSNRTDADLLSELGRQTDRWWQVWLPPPEVRDRREWMRYRMSLVRLQTGLKNRVHAILHRHGILHDLADLFGTQGRRMLTRLANDAKNPRLRESGRATLKGYLQLLDHLRRQIAAVTRTIHRQLRATPEAKRLQGLPGVGAILAHTILAEVGDFGRFRSAKHLASYSLLAPRAFDSGEETDEAPKGRHVGHMGRRTLKWAWIEAAHSAVRPGGRFREVFDRYTDGGKRNRNRGYILVGHELCRTAYAISKKETEYRDDPPARPGSSKKGAASRQRDRCRGAKSQNSRPGTGQPDHGLVAVG

SEQ ID NO: 293083 - protein, 436 aa, unidentified
MRGCRCSMIMGFTKPIEHSNLITKEGDFMNPLYVGIDVSSKSNVVYFMLPNGDKHSNFSVANSHDGSTQLVKRICSVLSSESLDTVSIGLEATSVYGDNLVYFLREDASLASFNRKIHVLNPKQVNKFKESYNDLPKNDWVDSFVIADCLRFGRINKEVYIGDYHYKALQNLTRARYFAVCNLTKEKQRFMNVLFKKYSTMTQEKVFSDTFSTTALAVYDEFESAEALAYMDLQELTAFIIEKGKNRFPDPDAVAKAIQKAARSSYRLPKTVNDSVNQVLSISITSMKALESQIKEFDKAIAAQMELLPNVLISIPGIGPVYSAGIMAEIGDINRFDNQASLAKYAGLAWTQHQSGNFEAQNTRLIHSGNRFLKYYLCEAAFSLVRCDKEYKAFYHQKYKEVNRYQHKRALALTARKFVRLVFTLLKDNHLYRPAE

SEQ ID NO: 293084 - protein, 452 aa, unidentified
MEQDVISMEIINPQAAGIDVGSRSHWVAVGQSEQDVREYGVFNEDLFAMADWLDQHKIKTIAMESTGTYWQNLYAVLLSRGFQVILCNGKFTKNIKGKKTDIKDCQWIQKLHSLGLLTGSFLPDGQTEQLRTYCRQRANLIHSSASTSKKMQKNLCLLNLRLDVVVKDVCGLTGLAIIRAICEDEKNPQKLACLRHGNCRKSEEEIAKALHSNNREDYLFALKQELDTYEYLQKKIVECDMEIEKKLNEIIGGDDNKRQHYIDPKTHKRINKNTPKNIDLNLKSYQMFEGTDLLAIEGMSYSTVLALMSEVGIEGIRKFSTAKHFASWLRLAPNNKVSGGKVLSSRVPKGSNRLKIALRNAANAIGNLKESTPLRDFFHRINFRKGRVSAISATARKLAVIIWNMVVKGTPYINPEGYLFLDQKRKLGLVKRIKKQIDKFALTDEDLGFANS

SEQ ID NO: 293085 - protein, 368 aa, unidentified
MKEVTTRYVGLDVHKATISIAVADDGVAPVLFGTIANEATAVHKAVSQLKRGGKLVSAYEAGPTGYGLHRQLTQLGVDCVVVAPALIPRRAGDRVKTDKRDAIALARLLRSGDLTPVWVPGQQDEALRDLVRSRFDAKDDLRRAMHRLAKFLLRQSIQAPPGINPWSARHLQWLETLRLDHPTSQLVFEDYRVAVHAARERVRRLEADLERCAEQSPRLGTILALQVLRGVAFLSAVTIVAEVGDFRRFPNAPRFMSFTGLTVSEHSSGQSRRQGRITRAGNRYLRHILVQAAHNARFAPSLEGELKRRLKDVPADLVALSVTAQNRLHRRYRHLDRRIGRHKAVTAVGRELAGFVWAIGQRMEASTA

SEQ ID NO: 293086 - protein, 364 aa, unidentified
MKRKIYVGMDVHKETIRIACLTNNTKEIVKEQQIKHNEVQIKKFVNKLKSEWNEIHSCYEAGVTGYPLYRYLKSLGVNCILVAPGKIPRQSSDKIKTDKRDAIKLAKLLRSGELESIHVPSEEDEAVRDYLRSRDSLRLDLGRNRQRLMKFLLRKGITYSATKYWTVSHNKWLNNLQFNNEILQETFNDYYSRVRVQEENLKAMDKRIQEIAESEPYREKVGILRCFRGVDYLTAMFLLCEVCDFKRFKTAGSFMSFLGLVPGEYSSGSKRKQTGITKTGSPRLRRILTEAAWQHRFPGTGNKIVTARRSGQPALVVALAEKASLRLHKKFRNLQQRGKTPQVMITAVSRELSGFLWAAMNLVA

SEQ ID NO: 293087 - protein, 318 aa, unidentified
MPESIVVGIDIAKLSFDAALGVTTDVRTFPNDDAGHEALITALAGQTVELIVMEATGGLERDLACALQAAGFAVAVVNPRQARDFARAMGYLAKTDRIDAHALAVLAQVLARHPERDKFVKALPTAEQQALQALVARRRQLVTMLVAERQRLATSHKAARASIEALMKAIRQQLDTVEAQLAIHIDAHHAALAHQLASVRGIGPATIATLIADVPELGALSRREIAALIGLAPFNRDSGQMRGKRTIFGGRADVRRALYMATLAAIRFNRVIRQFYDRLVAAGKPKKVAIVACMRKLLTILNAMVRSGASWNDSIHLA

SEQ ID NO: 293088 - protein, 348 aa, unidentified
MNLKRIGLDTSKAVFTLHGVGQDEKAVLRRNMRRAEMEAFFAKLPPTHVALEACGGSHHWGRRLAAMGHTVQLIPPQYVKPFVRRGKNDRNDAEAISEAAARPDMPGVPVRSAEQQAEAIVLSARELLVRQRTQLVNAVRGHAAEFGVIAAKTISQLPGLLETVAAAETVPATAKEMVAFLGAQVAQLDSQIAELERRMKQQHKANPVSQLLAEVPGIGPVSALSLALTIDPGRFTSGRHFAAWLGLVPKEHSTGGRQRLGGISRAGNERLRQLLVVGAMAVIRYAKPGSKTASAWLLALLERKPRKVAAVALANKMARIVWAMMATGEAYRGSRKVAAPAAGAAAAA

SEQ ID NO: 293089 - protein, 350 aa, unidentified
MIYMEQMNLFAGLDMHTESITATIKDDQGNPVRVLQVETNKEGVKKLFDRLQKKHISAVFEASRNWPRYAELIQPYCNKVIMAHPLKVRAIASARIKTDVIDSNTLSDLLRANLIPESYMPPLDIVELREVLRYRAGLSRMRGQLKTKAKNILSREGKKCDFDEVTGKRARLWLNHLELNVLNRKELDYTVALIDNLSLEIVKFDKEIEQLQYKYPEVEILKSVIGINTFSGMMILAEMADVSRFPSPNKLACYAGLVPSTYQSSQTQYSGKITKQGNAYLRWILTQCTHASIKSRYSHKLKSFYLRIERKKGKQKAIVATARKMLTTIWHLLNKNEYYAYRDIPSKNGL

SEQ ID NO: 293090 - protein, 389 aa, unidentified
MKYVGIDLHKKTISGCVVVKERGKKKIAARKRLECRDEAGIKSWFGELGRFEVVVEATASYEWFVKLVEPLARRVVLAHPKKLRIIAESKRKSDKLDAQVLAEFLASDEIPLAYRPCPRVREHRALVRWRGYIQRRLTSVKNKLRHILAAYNADVPNLFTAEGLAHLGTVPLTASDRFVSEQLVTEWEQHQERLRAANRQLREFAATAPLAEREARAILGSIPQVGAITADVILAELGDWRRFGSQAEVASYAGLVPGFRESAGKAKHLGITKEGSSLLRWVMIEFAWRMVGASRKWGGHYHRLEARVGAKKAIVAMARRLLGMVFALLRTGQKYSLALELPPPASCRSKSPRDTNPSDPSCLRGQPRQASSLGAGAYYGGPLSVPGKE

SEQ ID NO: 293091 - protein, 345 aa, unidentified
MVIIGCDYHPSMQQIAWLDTATGEGGERRLEHSGGEAERFYRELKQRGVQVRVGIEATGHTRWFERLLAELGMELWIGNPAKIATQRVRKQKTDRQDAQLLLQLLVEGRFPRLWVPSAENRDLRQLLWHRHRLVQMRTRVKNQLHAIALNEGVQRRSRLWSKSGRAQLESFALDRWTARRRHDLLRLLDQLTPQIAELSQAVEQEAERRPEVQRLMAHPGVGPITALAFVLVLGTPERFRCGKQVGSYLGLIPCEDSSAGKQRLGRLSKQGNVLLRYLLVEAAQAAVRCDAQWRRRFVRLAMRRQRSIAVAAMARKLAVSLYWMWRKAEGPPAAAQFGSHVGQLD

SEQ ID NO: 293092 - protein, 379 aa, unidentified
MENHIAAFVAFDTSKLRNAVAIAEEGRTGEVRFFGEIDNTAEATAKLVKKLAAKYERVAYCYEAGPTGYGLYRQITSLGHECMVAAPSLVPKKPGDRVKTNRRDALGLAKSLRAGELTAVWVPDGRHEAMRDLTRARGAAVQDVRQKGQQVSAFLLRLGRHYTGRTWTKAHLGWLASQKFEHPEQRIAFEELLLAVHQAKERVGRLEEAIRLAVPDWSLAEVVVALMAMRGIDMVTATAFLAEIGDLSRFRTPRQLMAYLGLVPSEQSTGDTVVRGPITKAGNRRARRLLIESAWAYRHPPRVGKDKQAKVAAAPPAVREIAWKAQHRLYARYRALTRKGKAKTVAITAIARELAAFIWAVSREVANGGGVAAQLGIRG

SEQ ID NO: 293093 - protein, 378 aa, unidentified
MATSSTQDCYVALELSRSKWLVGALLPGRSKITSTLVPGGDTAALLNVLTRFAARAALDTGSPVALKVCYEAGYDGFWLARVLIGHGIETHVLDPASFLVSRRGRRVRTDRIDVEAMVLTLKAFLLGDHSVCRNVIIPSPEQEDARRLSRERTQLAAERTRHINRIRGLLALHGIREVKGLWGGDWSQVLAELRTGDGRELGGYLRAEISREFERLHLVLQHIRALDAERQVALAEEVSPFPQRQKAGALIKLAGIGPVTATTLVAEVFHRRFQSRRHLASYLGLAPTPYASGDSKRDQGISKAGNQPARSILVELAWGWLRYQPGSPLTIWYQQTFAGRGQRGRKVGIVALARKLAIALWRYVETGVVPEGAVLSSR

SEQ ID NO: 293094 - protein, 411 aa, unidentified
MNPVIGLDVAKGESQIQAYLDKKKPYKKSFKVQHNLEGLASLLDFIKELEDVTGERPPIILESTGHYHKPVVQYFEDRGYLIIIVNPLVSYKAKNSTLRKVKTDIIDANHLCELYYKEDLEPYKKRGIQLLNLRNLTRQHDNITGIVVQTKLQFQAVLDQVFPEYSKVFGNLYSDVSLLTLQAFPTSEEVLKADCETLAIKIKEFCNTRSLQWANKQAEKLIAAAAQNPFQKTLYSSLILSLDMYIKMLLEYKKHLSMLEDEIDALAKSIEEYEIIRSIPGIGEKIAATIISEIGEIQRYNHPKKLVAFAGIDPTVFESGTFKGTQNRITKRGSSRLRQTLYMAVKCAIRDCRKQKTTDEIIPRNKRLRAFYDRKREEGKPYKVALIACANKLLHWIYALLKNKTTFQDLA

SEQ ID NO: 293095 - protein, 346 aa, unidentified
MRFYNKQHKYYCGIDLHTKTMYVCILNQAGEIVLHQNIPADADQLLKTILPYMPDIVIAVECIFTWYWIADFCEQYQIPFVLGHVLYMKAIHGSKTKNDRIDSHKIAILLRGGMIPMAYVYPAKMRSTRDLLRRRMFFMRKRAELLAHIQNTNSQYNLPSFEKSIARKRNRKGVKEHFPDKSVRKNIELDLELLNHYDTLLNDIELYLTNHAKEHQPNNLYLLQTIPGIGKILALVLLYEIEDISRFERVQNFTSYARLIKPQKESAGKIKGSGNKKIGNSYLKWAFGEAVLLLIREQPQVKQYHLKLKNRHGKAKALAILSHKFGRTVYYMLKNQQAFDMKKFLN

SEQ ID NO: 293096 - protein, 391 aa, unidentified
MIYVGIDVAKDKHDCFITNSDGEVLFKAFTITNNLDGFNDLYQKIETVMKDITKVKVGLEATEHYSYNLLGYLIDKGLPTYVINPLHTNLYRKSLSLRQTKTDKVDARTIASILMSDVNLKSYSDISYHNEELKSLTRYRFDKVKERAKLKSSVSRLICILFPELEKLVPTLHMASVYALLSEFPGAKQVANAHLTRLTNLLSESSHGRYGKDTAVMFREAARNSIGSNMPAKSLELKHTIKLIQELTSEIDEIETEIKSIMDEVNSPILSIPGINYRMGAMIIAEIGDFSRFDSPDKILAYAGLSPSTYQSGQLDGCYSHMEKRGSRYLRYALFNATKFVCIWDNQFSAYLAKKRSEGKHYNVAISHAAKKLVRVIYQLEKSGQLYHRAA

SEQ ID NO: 293097 - protein, 420 aa, unidentified
MKDWKEIAHYAGFDWARDHHAVVIVNTEGHIVADFEFDHSLEGWKGFGEKTAPWPDLAVAIETNQGAAVDQLLQRGYTVYPVNPVASESYRKRKAPSGTKTDHVDGWGLADALRVDGHGWKPLEPMDPLTQKLRLLCHDEVSLIEQRTMLANKLQQALMEYYPAALQAFDDWTASFSWDFILEFSTPQGLVKSGKRRWEKFLHSHKLWRPETAERRLAIFAQADQFKASDPIVAAKSQLAVSLCKLLRTLDQQLAQYRQQIEALFKDHPDHDLFGSLPGAKKVLAPRLLAAIGSDPNRYGSHQVLQSFAGTAPVQYQSGKVNKTHMRWACDKFMRHTVHLWADCFRKASAWGQTYYKTKREQGMSHACALRCLGQRLLKILFRMLTDKKPYDAERHALNQTKHGSWVLTLMAKSADPAGE

SEQ ID NO: 293098 - protein, 424 aa, unidentified
MMAQRESPKAQGNFIKEVKNLAKYHVGVDISKRKHKACIRDLTQDSYSGVFSFNVDCQGFRKFLNTLEKLSSNKDDFLIGIEATGNYGVTLAYFFLSHEYKVVEINPYRASQFRKAEGKKAKTDRIDARSLAAILSLDNHKPLSIPDPILDNLKEFTRFRADLVKERASMLNQLHETLTTLFPEFNRVFRQLNSASSLALLTDFPGPEYIIRGGEEKVARCLSNASPGRMGKGMARTIIEAAQNTIGVLQKQLSLGIKLSILGERFLNLQAAIDKVDKEIATLFRKLPYKPEDFPLGHVPSLATIVSEIGDIRRFPTLKQFLSHLGWCPQSFQTGNYQMEHPRMSHAGNKYIRRLIWMLSIVAIRILPQYRAYFERRVKEGKPKMHILVAVGRKLLSVFYAILKTGIPYDPNWEENRHLALARH

SEQ ID NO: 293099 - protein, 312 aa, unidentified
MDECIFVGIDVAKDQIDVCLQPADIYRTFPNEKKGFDELQKLLAHQRITLAVMESTGGLEIPVAVSLGCAGIPIAIVNPRQVRDFAKASGRLAKTDRLDASTLAQFGAAIRPAAQPLRGDEHRALAAIMTRRVQIIDMIFSEKTRLSSVPNSEMAKDIKSHIGWLEKRLRKIDQDLGNRVKRTPLWRERDALFQSVPGVGSVVSHTILAHLPELGTLDRRKIAALVGVAPLNWDSGRMRGRRVIWGGRAAVRKALYMAAVASMKWNPIIAAFYKRLRVAGKKPKVAIVACMRKLLTILNSIARSGEAWRSCA

SEQ ID NO: 293100 - protein, 349 aa, unidentified
MPIVADSYRFVTGVDTHARTHTLAILDTALKGQVDAATVPATAAGCARAAAWLTRRTNDSSGVLVAMEGTNSYGAKLRQHLTTSGYRVVEAPAPSRSRRRLKGRSDRLDALHAAQATLPLASDRLNEPKAGEVVTALRILSAAREAMTRQRTAAINALTALLRSVELGIDARKPLTQKRIQEVASWRARQEGIAARVSRNEAVRLARLIIALRTLLAENAEQSTELVTDLAPQILDLPGVGGVNAAIILSSWSHPGRIRNEAAFAALAGTCPIPASSGNTVRHRLNRSGDRRLNRAIHSVAIVRMRCDSRTKAYVARRTQEGRTKKEITRCLKRYITREIYKTLNRPQA

SEQ ID NO: 293101 - protein, 370 aa, unidentified
MNKSNQTISSSGGNRASVRQHGNRVLKLGLDMHYRQVTVAMQEEGGRIKGAGKMSHQAFGNWVNKKLAEGWQIESCYEAGASGYWLDRQLVALGVKNLVVAPKAMGQGGKQQKTDRRDSAELVDSLDRYLRGQDKALSVVAVPSVEQEEKRALIRYHRQIMADRGRYEARGKGLLCAQGLEVGGRWWQGKGWRELNSDPRLKEWIKEQLEAWRQKVLGAEAEQKGLRGRIEALAPAILPKGVGAYSAAVLEYEMKGWGRFNNRRQVASYTGLCPGIHQSDGRGKEGSINRCGNRIVRWSLVEMVWRLMVWQPHYGPVRQLAAGLVRSKRAKRRLVVKAARRLAIDLWRLSSGQTTAEKLGLVLQSNGQSK

SEQ ID NO: 293102 - protein, 319 aa, unidentified
MNNKQSQFTTVIGIDVSKNKIDVADNQNSAVKTVGNNKKELTQWIKSIADRTMTIVVMEATGGYESLLVELLHQNEIALAVVNPRRVCNFAIGIGRDAKTDPIDAGVIVRFGEVVQPVPQLAQSDEQIKLGVLVERRRQILDLINQEQNRSQQTRDKEIRDSIDTVLETLKKQLKTLDERIAKAVVADEANVRKVEILNSVKGIGPVTISTIVAELPELGKLNRQKIAKLAGVAPLNNDSGQSIGKRKTAGGRSGVRRTLYMATLVATRFNPRIKAYYQRLLAKGKLKKVALTAAMRKLITILNTLVRTDQLWIDPVAG

SEQ ID NO: 293103 - protein, 317 aa, unidentified
MQPSPTPITYLGIDIAKLTLELSSHPALSKRRSYPNNPAGHRRLITALHLLQVPVQIICEATGGYERHLIAALHQADVSVTLLNPRQARDFARARGLLAKTDALDAAVLADYGRTLQPAPTTPRSQALQRLAALVARRQELLALITQEHNRTEHHDDAFVRRQALRLITALKRHLQDLEEQIKTLQRADELIDKHVARLCSVQGIGTRTAWLLLAALPELGSLRRGQAAALAGLAPFNHDSGPWRGQRHIAHGRALARSALYMAALVAARFNPVLRPFYQRLRANGKPPKLALTALMRKLAELANTLLANHSFTLQQ

SEQ ID NO: 293104 - protein, 412 aa, unidentified
MRIEYERCCGLDVHKKTVVACLLLPDGPGGRQKQTRTFSTMTADLLALGDWLQQAGCTHVAMESTGVYWQPIFNLLEGQFEVLVVNAQHIKAVPGRKTDVLDAEWIAELLQHGLLRGSFIPSAAQRAVRELTRYRATLVAERVRQVGRLHKVLEGTNIKLAAVATDIVGVSGRRILQALLEGVTDPAQLAELAKGRLRAKRAELEQALRGRIQAHQAFLITELLEHVDYLDEAIARVSQEVGERLRPFEEELARLDTIPGVNRRVAENLLAEVGTDMSRFASARHLASWAGRCPGNNESGGKRKSGQTRHGSPWLRKTLIEAAPAAARCKQGYLTAQYHRLAARRGKKKAMVAVGHTLLVIVYHILTRQEEYQELGGNYFDERDKQAVTRRLVQRLQKLGYDVSLQPAAIAA

SEQ ID NO: 293105 - protein, 438 aa, unidentified
MLTYAFVGLDVSQADARVCFLLADGAEPVPRWTIPNTLPRAGALAATLAGLCQGYQIDQLRIGVEATGLLWWHLARALTDAPILASFAPQIYALNPQLVHTFRANFGALPKSDHADAFLIAERIRYGRQLPAPYQLDARYAPLQRLTRFRCHLVQHLVREKSSFLSFLFLSFSTYGQVEPFGDPFGATSCAVLEDFTTDELAQQAVDALAAYLHTKGRGRFSDPDALAATLPRAARDSYRLDKVLQEPVRLVLGTTLATIRTLQHQMGALDKTIALELAPIPQPLASAPGLGPVWTAGLVAELGDIRRFDDEAAIAQYAGLTWESYQSGGFQAEDTALTKRGNSYLRYYLVEAANSVRQHCPEYAQYYAAKVAETTRHAHKRALVLTARKLVRLIDVLLREGRIYQTPAERQQRPDVTTPHAARPAAQRRRKRAQALG

SEQ ID NO: 293106 - protein, 346 aa, unidentified
MLYAGMDVHKEFCQGIVLTKDGEVEREGRFGTEKEDIERFFEGLEGVRVAYEASGNYEYFYEVLSGLGHEVKLAHPLKTRLIAEAKVKTDKIDARALADLLRADLLPTSYVPPEDIRELRHLVRRRIHLGRHRARLKNQIYAELRRKNLKYPGTEMFTKKGLAWLHGLRMAEIDSYLVVYDAVVGQLSLAEREIEREGMKLKEVRLLVTVPGIGPYSATIIHSEIGDIWRFGSEEKLFSHAGLVPSVYQSGESCHRGRLTGGGSKLLRWILVEVVQTHMRYAPDSKVTLFYERMRKKKSANVAKIAAARKLLQAIYHMLRDGKEFRQGQPHRPRGEACGVSPPVDD

SEQ ID NO: 293107 - protein, 365 aa, unidentified
MSTITLGVDLAKSVFSVCEMDGSGHVLRRLDLKRDAFAVWLAQVPAGTVVAMEACSGAHHWARRCLEYGLQPRLMAAQFVTPFRKSRTNKNDRNDAEAIATAARQGNMRFVPVKDVDQQARLAWHRVREGYKTESLAIGNRLRGLLAEFGIVVAKSDAALRGVLEALDQHAALPGEFKELLRDLCAHWAQLRAAIDACSARIDAHARQDARCVRIGAIIGVGPITVDAMVASVGNAREFRNGRQLAAWLGVVPTQHSSGGHTRLGTISCRGDAYLRTLLIQGARSSLQRAKAVSVEKSTPEQIWIRQLACRLPFGKVLVAIANKHARQLWAMLAHDLDYDPDAHVKHPMAKPPVSEHATTATAMA

SEQ ID NO: 293108 - protein, 410 aa, unidentified
MNAVGIDVAQGKSMITVRQPLGKVIVKPYEILHTAIELEKLADSLKSLNGETRVIMENTGVYHLPIADYLHEAGIFVSVVNAKEIHGYDKDPLRKVKTDKADAKKISEYGLSKWEKIRRYSPEEDIRRQLQVYNRQYCHYAKIKTMHKNNLCALLEQIFPQVKTVFSKRVRDDGHEKWIDFADTFWHIECISRLSESKFHEKYKKWCNKFGYHYRKVQAAKIYGIAKKYTAVLPKDGFTKQFIKSAVAQLNSIAETQAVILCKMKEIAQSMPEWKVVIEMSGVGETLAAQLIAEIGDINRFGSKKSLTGFAGVDSPTYQSGTVNRQGEPVTKSGSPHLRRTLFLIMRCLILTKPDDEVHRFIMKKKSENKKYLIYMVAGFTKFLRVYYGKVKEYLSNSHAMNSDEALACQ

SEQ ID NO: 293109 - protein, 326 aa, unidentified
MLIIGCDYHPAFQQIALVDTDTGELQERRLQHREEAERFYRDLAAERMKVRVGMEASGHARWFERLLSELQFELWIGDAAEIRTKRVRKQKTDRQDAQLILKLMLEDRFPEIWVPSWENRDLRQLLWHRHRLVQARTRMMNQLQAVALNEGLRCKKKLFREAGREQLEGFRLAPWASRRRHDLLELLDRLTPTIAELTQAIEQEVEKCPAARRLRTHPGVGPLTALAFVLIIGKADRFQCGKQIASYLGLVPLEKSSGDQRRLGHITKQGSTLLRFLLVEAGQVTARSLPEWRSQYYHLTMWRGRKIAKVAIGSYAGKPENRDGVN

SEQ ID NO: 293110 - protein, 337 aa, unidentified
MEYFAGLDVSMAETHVCVVTRNGAVFHQAKVPSTPADIAAELAQVPTCRRVLFETGRMAPMLYHGLSQLGLPVVCVESRQAYQALKSLATHKTDRNDARGLAHLARTGFFKPVHVKSLSAHAVRSLIIARKKLVGQRVTLENQIRGLAVIFGVRLPRALSPAFIRQALQASEGIPGLSAAMRGLVAARAAVLAAVVAIDGDIRRMVRASDACRRLMSIPGVGQLTALAFTAAVDDPKRFRRSRDIGAYLGLVPRRYQSGEIDYTGSISKCGDRRIRTLLYEAANVMLTRYKGPLKLKDWAFAIAKRSTMRKARIALARRLAIIMHAMLRHGTEFKPA

SEQ ID NO: 293111 - protein, 438 aa, unidentified
MKKISQIPVINPRAAGIDISDTEMMVAYPINQSQLEIKAFGCYTVDLHSIASCLKGNGVTSVAMESTGVYWVALFLLLQEYGFEVILVNARHVKNVTGRKDDESDAEWIQKLHSCGLLQPSFQPDNITRTLRSLVRHRKNLVRTSCTYLNRMQKALELMNIKLHTIISDIDGKTGLLIIEAILAGERNPEVLADMRDKRIKASREDIIKSLEGHWTVEHLFELDQCYQLYCMHRKMIEQCDREIEKQLIVQIASKDEGIIPEIPKTRRKVSSKNKIPFNLTEYLRRILGVDMTEVYGLGELSVLTIMSEVGTDMSKWKTEHHFTSWLGLAPNTKKSGGKVISSKIMKKKHHAGQAFRIAANSLYHNKGPLGDYYRRIKSKAGAGKAVVATARKLAIIYYKMVTNKEAFNPNALLEYQQKYKEKKINQLKKKIALLEAA

SEQ ID NO: 293112 - protein, 370 aa, unidentified
MAEPTTLFVGLDVHKETIAVAHASPDRSSDVVYVGQIGTKEADIDKLLRRLHSHASTLVVAYEAGPCGYGLYRTLTDKGVSCMVVAPSLIPKKPGERVKTDRRDAAQLARLLRSGDLTAIYVLSIADEAVRDLSRAREASIGVLKDAKLRLKSFLLRHGLHDSGRATWNEAHLRYLAKVVCPTPAQQIVFQESLRAVSAQTERVRRFEDELVEIAATWRLRPIVDAFQSMRGVQSHTAVTIAAELGDLTRFDNPRQLAAFVGLIPSEYSSGESRRLGPITKAGNGHARRALVEAAWAYRYPAKVSAHLQQRIERCPKPIQPISWKAQVRLCKRYRRMVARGKNPNIVVTAIAREILAFLGAIAREVPIGH

SEQ ID NO: 293113 - protein, 369 aa, unidentified
MNERTRFVGLDVHKATIAVAVAEAFGDPEEHGQIANDPSAVRRLMQRLGGQDLHLEVAYEAGPTGYALHRQLTAMGIACVVVAPSLIPVRPGDRVKTDQRDAAKLARLLRSGDLTPVWVPDEAHEALRDLVRARDDAKADLLRAKHRLGKFLLRRAVHPPVGVRAWGRAHDAWLAGLALGHAADGVVLEHYHAVVREAAERVRGLEVALAQCAATSPHAELLAALQAIRGIGFLTAVTIVAEAGDLRRFPTARQFMAYVGLVPSEHSSGDSRHRGRITRTGNRLIRHVLGRAAHNARYRPSVSASLRARQRGVSPAVVELDRRAQARLHARYRHLAGRIGTNKAVIAVARELAGFVWATGQLVPMAQAA

SEQ ID NO: 293114 - protein, 348 aa, unidentified
MEHVAIDLGRPNSVLCELSQEGMKVLRRFRLDRPTLTRLFSGRTCCRVLIESSTESEWVARHLESLGHEAVVADPNYAAMYGERNRRVKTDGRDADALFEANRLGVFRRAHRRSDPQRRVIAQHGVRGALVRTRTRWINVSRALLRREGYQVPSGSAESFGDRVEGLNLPRELRDLIAPLQALMDPLNDQIAKLDRETAALGKEDLRVRLLQTAPMIGIQTATAFVALIDDVARFPKAHKVESYLGLVPSEWSSSERRIKEGITKRGDSRVRWLLVEAGWSILNRPRVDTAGLRDWALQIAARRGKKIAVVALARRLGGILYAMLRDNKPYDPIRLAAANPRLCKAAA

SEQ ID NO: 293115 - protein, 428 aa, unidentified
MDEVNRNRLKEFRQLRQEIRHSEEYLIIGIDIAKDRHHAFFGTATGKTLLRRLVFSNDHEGFRKLLDQAEALRVAHGLKKVVYGMEPTANYHKPLGEYLINLGRTVVLVSGVTVKRNRESLDGRWDKHDVKDSANVADLISQGKCLYYEYPSAELRGFRGLLSLKRRLKKQEHGYKVRIRNHLIAQYFPEMDRDYERLGAAGLSIVRWCFPASQITELDVAPFIERVTSRRIRMETRRRLEGVWEKAGASIGCNAGPGLDHEAKVMVEGLRQIREVIKETEDKIQELCEQFLEYHCVLTIPGFGPDVSAKVLGAIGDPDRFQNGKQVLKMGGLDLSADRSGENSDKAIPEISKRGKADLRYALYQAALIASTKNHDFMRYYASRLEGRQKEKGIQTKMLVKLSAKMLLIAWTLMKKKEAFDPAYLTAK

SEQ ID NO: 293116 - protein, 387 aa, unidentified
MSQVDDLSRSLAAFDQNTTLTVVVELSEASWLVAGLVPAVDRQPLKKQEPDPRALLRLLERWRAEAAKTGRMIERIVLAFEAGRDGFWLARWLRARGIEVYVIHSTSVAVSREHRRAKTDRLDTGMLMRVFLGWLRGERGHCRMVAIPTLEEEDAKRPSRERESLVGERTRIINRMKSALARLGIRGFKPALRKAPQRLEALRTPEDTPIPPNMLDEVRRDMIRLAVVREQIDAIERARLVRLEQAPARGSHPMVRLLARVIGVGIETADMLVQEVLSRKLRDRRAVARYVGLTGSPDESGKRRREKGLAKAGNARVRRGLIQLAWRFLRFQKDSALAQWYRARTEGPKGVRKTTMIVALAWKLLIALWRLVMTGEIPVGVVLRAAA

SEQ ID NO: 293117 - protein, 330 aa, unidentified
MSGFVGIDVAAKTFDVVVRSDGKANKVEQFSQTPDGHAAVVRQLQKLAPELVVMEATGIYYLDLAVALAKANLPVSVINPKSFHHFAAMKLNGNKTDAVDAALLAEFAQCMSPRLWNAPQDELLGLRDIGRQLNRLTASRTQAKNRLHALTSKSMTLPMLIEDEQEGIEQLERRIKRLTQAALALIAGNATLAAHFSHITAAKGIGETSAIAILAELCVLPSTMKAPQISRYAGLDVRHTQSGSSVNKPARLSKAGNVYLRAALYMPAMSAVRHDVRAKAFYEALTGRGKKKIQAQCAVMRKYLTGIWACMQTQTAFDSTLLFSEIHIKN

SEQ ID NO: 293118 - protein, 371 aa, unidentified
MDRLSVGMDVHKEKVVMIGLAERGDTPVMRETFRGDNISGIVKRLRTLSRAWAVESCYEAGPSGYGLARVLTEAGISCRVVAPSLMPRRPGNMVKTDIRDAKELAAALRAQTLEFVRIPSCEEEEVRGLVRCREDIARQLRSFKQIVSHWLLSHGHRPPAKVNRWSPVFWTWVRGLPLPPLERMVLDHYLDVLLMLEDRRKQVESQICELADREEYRERVCRLGSLRGFSKLAAMRLIAEVMDFNRFPKASAFMKFTGLVPSEHSSSDRIRRGKITKGGNSHIRHVLVEAVQRAHVSARPGRSLLKRQEGAAGEFRQIALKCLLRLYRKFWAYTKRGVPVGKVRVAMARELAGFVWALMVHPAVPVLTAAA

SEQ ID NO: 293119 - protein, 410 aa, unidentified
MELLHRRCCGLDVHKETVVACLRLVSDGKVTTEVRTFQTTTADLLRLSVWLAENDCTHVAMEATGVYWKPVWHILDDGEFVLVLANAAHVKNVPGRKTDVNDAMWLAELLAHGLLRASFVPDTQTQEMRSLMRTRKQLVREQTSHVLRVQKTLEDANIKLDSVLSDLMGKSGRAMLEALIAGETDPAKLASLASRRMKASPEELREALRGRVTKHHRFLLRLHLNQIDALDAAMATLDAQVEADLGPFRTAVELITSIPGVKNLGAHVIVSEVGIDMHRFPSAAHLISWTGICPRNDESAGKRRSNRLRKGAPWLKTMLVQCAWAAVRTKDSYLQAQFYRIKARRGPKKAIVAVAASILTAIYHMLKDGTMYKDLGRDHFDRRSTDRQKRRLVKRLADLGYSVVIKPLAA

SEQ ID NO: 293120 - protein, 350 aa, unidentified
MIIIGCDYHPGFQQIAFVDTETGDYGEQRLEHSEGAEKFYRDLAAQGKKVRVGMEASGHARWFERLLAELTFELWIGDASEIRAKRVRKQKTDRQDAQHILQLLMENRFPKIWVPNGENRDLRQLLWHRHRMVQMRTRIMNQLQAVALNEGLRCKKRLWRQHGREQLESFRLAPWASRRREDLLQLLDRLNPTIADLTQVIEQEVEKCPEARRLRTHPGVGALTALAFVLIIGRAERFQCGKQIANYLGLVPLEDSSGNRRRLGHITKQGSSMLRFLLVEAAQVTARNIPEWRSKYFHLAMRRGRKIAKVAMARRLAIALYWMWRKGWNYEQSRKFGSHTGQLGTGDGVQ

SEQ ID NO: 293121 - protein, 347 aa, unidentified
MRFYTNQHKYYCGIDLHTRKMYICILDEKGEIREHRNLKTDRDAFLKAVAPYREDIVVAVECIFTWYWVADLCHKEGIPFVLGHALYIKAIHGGKAKNDKIDSQKIAVLLRGGMMPMAYVYPAKMRATRDLMRRRNHLMRKRSELYAHIQNTNSQYNLPDPFGPIARHKNRDGIAAQFEQPSVQKSIAVDIEMIRSYDGILLQLEKSIIKLANKHDPVSYALLQTIPGVGRIIALIILYEIENIRRFASEQDFASYSRLVKCAKESNGKKCGSGGSKIGNAHLKWAFSEAAVRFLKGNDPAKKYLDRLTRKHGKSKALSILAHKLGRAVYFMLKNKEAFDQKELLNI

SEQ ID NO: 293122 - protein, 337 aa, unidentified
MTIIRVGLDTAKHVFQLHGVDESEQPVLRRRLGRKEVERFFAKLPPTAIGLEACGASHYWARVLRGLGHEIVLLPPQYIKPYVKRGKNDAIDAAAICEAMSRPGMRFVAVKSAEQQAALMLLKVRDLLVKQRTMLINAIRGHAAEFGLIAATGPVKVAELLQQAHSEAAGVPALARALLGVLSGQLDALDVKLKALEAWLMAWHKADPVSQCLATQPGIGPIGAVSFALKVTDPKGFRSGRHFAAWLGITPKEDSTGGRCRPGRISRQGDESLRRLLVLGATARIRFAKPGSASTWLVNLLARKPKKLAAVALANKMARILWAMMVRGETYRHPKEA

SEQ ID NO: 293123 - protein, 389 aa, unidentified
MDRRRYNVCCGADIHKKFLIATILLLDGTKLTKRFSMDLRSLFEFRDWVIANGCEVVAVESTGSYWVPIYRVLEGHVELIVANAYKIKNVPGRKTDTIDSEWIAELCRNGQIKPSRIFPKDARDLRSLTRARERYVDDKTRVKNRIHHVLDSNCIKLSSVLSNIFGKVGRYILNCLLEGVDIEEIIDGIPVKRMKKKGDQIREALAIQLSCTDVILIRGCLEQIDAIQKNIDELESEIHKRIAPLRKNMAIVMSVPGIGFISAAVILAEIGNYNDFDKAEQLAAWCGLVPSVYNSADKNYTGSITKQGSGHIRRILVEVAHVVARTKGRSKLKNFFLRIKAKKGTNIAAVALARKVLCIVHHLLTEQEMYQEEERDRYDEVEYDRFQSR

SEQ ID NO: 293124 - protein, 332 aa, unidentified
MNINFGGKHQHMDQEVKFTQIVRCGCGIDVHQKQVTATVRRSDQEFETREFDTFTSSLTELREWCKTEGVTHVAMESTGIYWKPVFNILEEDFEIILVNARHVKNVPGHKTDKKDSRWLSKLLLSGLLKGSFIPPRDIRELRDLVRYKKKLTNQASSEKNRLIKVLEDCNIKLSSVVTEVNDGVSATKIINDIIEGKTDVDQLMLHLHGRIKASREDIRKALEGKVTEHHRNMMRFMKHRIRDTEELIALVDEEINNAAQQYRVEVELLETIPGVGRGSAISIISEIGTDMSRFPDEQHLSSWAGLSPGSNESAGKKKAPEPPTGINISVQP

SEQ ID NO: 293125 - protein, 408 aa, unidentified
METVYSVCCGLDVHQASVSACLRRVATDGTIGTESHQFATTVQGLTQLSQWLTEAGCPIVAMESTGVYWKPVFHILSATVEVWVVNARDVKQRRGKKTDRADAQWIAELLAYGLIEPSFIPPPQIVALRDLIRMRTALVETRTQVKNRVLAILEDTNVKLASVVSDPFGVSGREIMDALVRGHRDPEVLSQLARGVLRRKIRELSIALEGAFTDHHALLVRLNLELIDQTNAQICQLDERIEQLTEPLQKEIQQAKSIPGVHHTAARIIISEIGTDMSRFGSGPRLCSWARMCPGNNESAGKRKSGKTRKGNRYLRRVLTECAWAAGKTDSFLGRTFRRLQARIGGKKAAVAVGHKILLIVYHLFNEGTVYDDGRYNRLNRKQENRQLKRALSALKQLGYQVQLSPAA

SEQ ID NO: 293126 - protein, 342 aa, unidentified
MKDTMIGVDLAKNVFQLHGTSLSGQVKFRKKLPRQKLLEFLSGQPPAIVVMEACGSAHYWARELIKLGHKVKLIAPQYVKPFVKRQKNDAADAEAITIAAQRPEMRFVAPKSEQQQARAVLFRGRERLIHQRTELVNALRAVMYEFGYTVPQGFSHIKRIKAILDEPDADIPVLVVEECRDLLEQIGEKSTRINLKTEKVKQLALKTDKARLLQTMPGVGPITALAVEAFAPEMESFKRGRDFAAWLGLVPRQNSSGGKERLGRISKAGQSDIRRLLIIGAMSRLSWLGRKSIPEGSWLSRMAARKPKMLVAIALANKMARGIWAMLTKNEDYRDPALAETV

SEQ ID NO: 293127 - protein, 343 aa, unidentified
MQAVKTIGLDIAKSGFQVHGVDADGQVVFRRQLKRRNVLAFFQKVPSCLVGMEACATSHHWSRELQALGHTVRLMPPAYVKPYVKRQKNDATDAEAICEAVTRANMRFVATKTPEQQSGLMLHRTRHLFIRQQTAVINAIRAHLAEFGIVAAVGRNGLEQLLNVVADAGDKRLPEVARTCLMALGTQLRALKAKLLELDRMITAWHRSNETSKRLDAIPGVGHVLATALVASIADPKVFRSGRDFSAWIGLVPKQHSSGGKDRLGSISKQGDRYLRSLFTAGALAVIRYAKIYGTKHRPWLTALLARRPTKVAAIALANKLARMAWAMMSRGERYKEPVALAA

SEQ ID NO: 293128 - protein, 338 aa, unidentified
MIHVGVDLHQRFCYMTALETRGKLLQSGAVNNERLALKRYFRQFRGQAVEVAVEACGFWPAFREVVEPEVKRLVLVHPQRVKAIASAKLKNDRVDSATLAHLLRCDLLPESWKADRDTQARRQQVRLRATPVRQRTRLKNQVHAVLHQQGQHSPVTDGFGKRGRQWLGQVKLPEKARQTLAVCLRMIDYYTQEIEEQNRQLSVEALKDARARWLMTIPGIGVYSAMLLLAEIGNIEHFADKAGLCSYAGLVPRVRESAGKAARGGITRQGSPYLRWIMVEAAQVATRCSPAAKAYFERLRKKKHAHVARVALARKLLSAVHALLRDGVGFEESEFAAV

SEQ ID NO: 293129 - protein, 430 aa, unidentified
MDQVNRNRLEEFRQLRKEVRQSEEYLIVGMDIAKDRHYAFFGTATGKTLLRRIVFSNDHEGFRKLLDQAEALRVQHGLKKVVYGMEPTANYHKPLGEYLIKLGKTVVLVSGVTVARNRESLDGRWDKHDGKDSANVADLISQGKCLYYEHPLAELRGLRGLLSLKRRLKKQEHGYRVRIRNHLIAQYYPEMDRDYEGLGAEGLSIVRWCLGASEIAQLDVDPFIERVTSRRITMEKRRRLEAVWEKAGMSIGCDGVPGVDHEAKIMVEGLRQIREMIKETGQKIEELCKAFPEYPYLLTIPGFGPDVSAKVLGAVGDPDRFQNGKQVLKMGGLDLSADRSGKNSDRATPVISKRGKADLRYALYQAALIASYKNRDVMLYYTSKIRGREKEKGIHTKMRVKLAAKLLVIAWTLMKKKEPFNPVYLKAELN

SEQ ID NO: 293130 - protein, 437 aa, unidentified
MSKVTVFETVHENAAGIDIGAAKIFVSPDGIEVKSFDTFTSGYYECIEYLQEKGKTEAAMEATGVYWMALYTMLESCGIKVSLINPKETRQVKGRKTDVRDCRWIQKLFSAGILRSSFIPEGKYMEIRHLVRERLDIIDMGSVYVNKMQKCLELMNIKIKEVISQIHGVSGIKMIKAIIEGNRDKDYLLSLCDEKIRKNKSELILKALEANYNDTYLFILEENMNAWDYHQKKIQVIDTRIEQLLQDLCQEKQDVEVTSLPKPIRHHAPKITDLHQMMVKLHGVNISSISGINDYTLLRLIGETGVDMSRFPTVKHFTSWCGLTPKNHQTGKTSKRVKGASCNKAGQIFKECAQGLLNSKHIAIGSFMRKLKGRKDAAIAIKAGGRKLAEAYYNAITKGLDYVEQGIKKYEQLQERKEVSMLNRLAKKHKMQLVELQ

SEQ ID NO: 293131 - protein, 413 aa, unidentified
MKYYTSTTQYNCGIDLHARQMYVCVMDREGKKLVHCNVKDNDFKFFLKLVEPYKHDLTVCCECMFGWYWLADACQDAGLKFVLAHALYVKAIHGGKNKNDRVDSEKLTHLLRSNLIPPSYVYPTQQRPLRALLRQRIYYVWRRAELLARIYSHQLAHNRTPAKQTRRTRDAWEERLLAAENHPQRQFALRNDLAMIRSFDRQISVIEVELQHLTKHLPLSRDYTLLQSVPGIGESLGLTILYEVGDINRFPTVKDFVSYCRLVKGTVASAGKIKGLRGAKLGNPYLRWAFGEAAVIAKRDHYLVGPLSQRLEVQMGGNKFKANTVVAIKLARAVYFMLKNQTVFDPERLVGSLQKCFRPGRSQPAGLTGGAKKAMPPSVAESVSCASSTPPCVGQASIPAPSIGSCGQVPVAN

SEQ ID NO: 293132 - protein, 393 aa, unidentified
MICVGIDVAKDKHDCFILSSEGEVLADVFTIQNNAEGFDMLLQTIRRCARPEDKIKVGLEATGHYSYNILGFLLDKGLDTYVINPLHTNLYRKSLSLRKTKTDRVDARTIAAMLMSDVDLKPYTDTAYHNEELKSLTRYRFDKVRERAKLKQSVSRLVTILFPELEKLVPSLHLASVYALLIEFPGAKQVAGAHLTHLKATLSDASKGRYGRDMAVTLRDAARCSVGSVMPAKSLELQHTIRLIRELDAEIEDIETAIQSMMDEMQSPITTIPGIGVRMGAMILAEIGDLSRFNSPDKILAYAGMSPSTYQSGQLSLSGPYSHMEKRGSRYLRYALYNATKYVCLWDPAFAAYLAKKRGEGKHYNVALSHAAKKLVRLICALEKSQQSYRNAA

SEQ ID NO: 293133 - protein, 344 aa, unidentified
MSKLDTCGTEVSAKELVVALRHEEALQPLKTFPNTAEGHQALSCYLRRAGCEVRVCLEATGLYGLDLALALSAQAGIEVMVANPRAVRHFATALMQRSKNDQLDAGVLEQFAARMPFRAWQRPSPAALALHALARRLGQLVEMQTAEKNRQHAAELSPEIPAAIRRDLARSLRAQERAIERLTREARKVIAPEPDLAERFALLDSVPGIAETSALQILAELAVLAPDLEARQWVAYAGLDPRQYSSGSSVQKKTRISKAGNKHLRRALYMPALVAVQHDPHLRAFYQHLLERGKFKMQALVAVMRKLLHAFHGMFKTHQPYDGAKLFQLKPTSAPEVPLATTAA

SEQ ID NO: 293134 - protein, 387 aa, unidentified
MSQASDLTRCFAPYDQATTLIAVIELSLSSWLIAGMVPGLERQPLKKMAPDEAGLLQLLERWREEAVKAGSVINRMSVAFEAGRDGFWLARWLRTRGIDAHVIHSSSVAVSREHRRAKTDRLDTALLMRVFIGWLRGERGHCSMVAVPSIEEEDAKRPNRERENLVGERTRIINRMKSALARLGIRGFKPELRKAPQRLDTLSTPEGMPIPINTLDEFRRDLVRLALVREQIDAIERTRIAQLEAAPKTGPHAMVRLLAKILGLGIETADMLVNEVLSRNLRDRRAVARYAGLTGSPDESGKKRRERGLAKAGNARVRRGLVQLAWRFLLFQKESALVLWFRARTESAAGVRKTKMIVALARKLLIALWRMVTTGEVPAGVVLRPSP

SEQ ID NO: 293135 - protein, 439 aa, unidentified
MAVLPFIRPVLGGSPLFWRSLMDLDEVVYQIACGLDVHFTFVTACLVTTGPKGKPKVEERRFPTNQKGLSSLREWLVKASCEAVGMEATGVYWMPVYAALEGACTLVVGNPQHMKNARGHKTDRLDARWIAGQVRHGRIRSSFVPPPEFREARRLARCRRQLVEARTSIRNEIQRLLAEVGITLAGVVSDVFGTSGTSILNALAEGRCVRDELSIHLYSSLRKKDKMASIAAALEAPLPEVSRQLLAIHLRRIEALEGNIGEVETLLFRQLAPHAAKLDLLQKIPGISKLSAHIILAEIGVDMDVWPTDKKFSAWAGVAPGCNQTGGRSKRAAVRKGNPYLCTILMECAGGAVKKQDSHLRIKHRKLCAQLGSKKKARMAIAHKLALIIYKVLGENVEYVDPKPEQPSEKTKRRMVHTRIKDLERLGYRVVLEPLEDVP

SEQ ID NO: 293136 - protein, 370 aa, unidentified
MKPITSYVGLDVHKSTISVAVAEEGRRGEVRHHGVVENRADVMIKLVERLGRRGERLQFCYEAGPCGYGLHRLLSGRGHDCVVVAPSLIPKKPGDRVKTNRRDAAMLARMHRAGELTAVWVPDAAHEAMRDLVRARATAARVLTKARQHLTGFLLRHGKVYAGPRAWTVAYRRWLTTVRFDHPAQQIVLQDYIHAMEDAEKRIARLVEQIEQLLEHWSMAPVVKAIQAMRGVAFINAVTIVAEIGDFARFSNPRQLMAYVGLVPSEHSSGDSVRRGGITKAGNSQARRALIEGAWTYRMQARISRKLHDRIEELPQGIRDTAWKAQVRLCARYRRLVAKGKPTVVVTTAIAREMIGFIWAIARQVQVQTA

SEQ ID NO: 293137 - protein, 366 aa, unidentified
MKIIHWIGIDDHADKWTIAHLRGNEDKPAREFELVPGGEGYRKLIKYAKELDGEVRIVYEAGPCGYELYRRLTKAGLKIDVAAPSLTPRKPGDRVKTNRRDAAKLARYLRAGDMLTLIVVPDQGRESLRDLVRARHAVQKDLLSVRHRITKLVLRYGHRYREGSAWTNRFWTWLSTIKLEGEHSQFVLDELIVAHGHRLEQRGRYDDAIEAAAKTPQYAPFVAALTVLRGIDRLSAMTILSELGDLRRFATAPQVMAAIGLVPGEASTGDDTNRLPITKTGNAHVRHIAVEAAWQYERRISNGPVIRRRRKDQPKALLDIAEKCDLRLNRKFHRMTSRGKRSTIAAVAVARELMGFIWAIGQIVHP

SEQ ID NO: 293138 - protein, 358 aa, unidentified
MKITTTGIDLAKNVFQVHGVDERGKAVLKKQLKRGQVMAFFANLPPCLIGMEACGSAHHWARQLQTLGHTVKLMAPQYVKPYVKTNKHDAADAEAICEAVGRPNMRFVPIKTVEQQAILTVHRARQGFVKARTAQANQIRGLLAEFGLVLPLGISHIAKRLPEMLEDGDNGLPGSVRQLLARLHEHWQQLDRQVAALEREIQRWHKDSEASQRLAVLPGLGALSASALVATIGDGRSFANGRQVAAWMGLVPKQASTGGKPMLLGMSKRGDSYLRTLLIHGARSVLQQVARHPERADPWLKQLLARRPKNVVAVALANKNARIAWALLAHGREYQRGFRPTPPRHGAAIVTTVATAVS

SEQ ID NO: 293139 - protein, 328 aa, unidentified
MSKDVFYVGIDVGSREVWGSVAGLKARRFAHSAKGIASLRGWTSKHAAGAQLHFCLEGTGVYGVSVASLLLQDPDTRVSIVNPAQIKAFANSQLRRCKTDRLDAEVIRQFAEAHQPSLWQPPSKEQRQLSELVLLRDQLQAELRQWQNRRHSREYLNDVPPLVKQTHQSLIRSLKRQQQKIEAAIAALVAENAQIAQQVALLSTIPGIAQQSAVQLLAYGQNWLTHRSAKALVAHSGLAPHPKQSGSSLNRGGAIDKRGNWRIRKALYMPTLVAAKHNPSIRDFYNRLCAAGKPKMVALIAAMKKLLFIARAILIHKKPFNPKLYPLT

SEQ ID NO: 293140 - protein, 423 aa, unidentified
MGKYKTKSENTDRTQNSIAFEQVIERGCGLDVHTDTVVATIQGKGIQTVTKTYSTFTSELKDLKIWLKGNNITHVAMESTGVYWKPVINILGEDFTLLLVNARPIKNVPGHKTDKKDSKWIAKLLLSGLLKGSFIPNKTIAALRELTRYRVRLNGMLASEKNRFLKILEGTNIKLSRVLTDVFCHTGRKIIKHILEKQSYEPSELLVLIHGRVKARQEDLIKAMEGQIEPAQRYLLKAIMDHIEDLEARIEEHTKEIEKMSGPYREELNLLKTIPGVGENIAVGIISEIGVDMEQFPSHKHLSSWAGISPGNNESAGKNRSGRVTKGNKWLKTKLIEGAWSATRSKDTYLRSKYRSLVGRKGPKKAIIAIGHKMLIAAYYIIKEKKSYKDLGGSYLANFSKDKLINFYKHQLAKLEATSLACI

SEQ ID NO: 293141 - protein, 458 aa, unidentified
MSRARKKRSPGTSNKNRKVLEQINHHAAGADMGSEAVVVCVGEGVGEEGIRTFGTTTAQLRQAGEWMIRCGVDTVAIEATGVYWVPAYEIWQEQGLRPVLVESNSIHSLNGRKKSDFIDAHWLQLLHTFGLLRPCQRAEREMIELRGYMRRRREVTEASSACIQHMHAALTLMNIRLDQAVTDITGLTGMRIIREILKGERDPLVLAGMRNERCVKTEQQIAEALTGHYRDEQLFVLDQAVQAWDFHQQQLRHCDQQIETVLQRLPNKARRENAPVPRRNTGRPRKNELRIEEGRTLLFERLGVDLTLIDGVQVTTILTVISECGIDLSRFPTYKHFCSWLGVCAGTRRSGKRILSSRSRRTTNRAATALRLAAQSLHRSQSALGAFYRRIKARLGPQKATTATANKLAKLIYLSLTTGIVYIDPGPDYLEPANQANALKHLRRRASKLGYQLTPIAA

SEQ ID NO: 293142 - protein, 403 aa, unidentified
MKHVIAFDVSMGKSYMVIYNAQKQCVFESEIKHSKPDFKKLQEKIHKLTDETGESPEIVFEATGIYSRQLERFMQNNQYTYCLLNPLEAKIQCDSLRIHKTDRSDAHRLALTHFTVTRRVSTGTDNLFYQLKSLSRLYSELDDELSIIRGHMHKVIQLTFPELERIFTSKSDLFLNFVQLFPHPDCVLGLSKTIIKNRIRANTNKKISNITAEKKAIQILEIAKICYPAVSQNDVLCDQLKLYARRYQELLHQKESCISKMVYVAEQRAEYDIIRSLPGIGPNTAVRLMAEIGDITRFNNNKQLNAFAGIDIRRFQSGKTFFKDKINKRGNKHLRKLLFLIIQNMIKQRRYGQNHIVEYYDKLKTQPYNKCHKVASIACVNKLLKLLFYLITHNMHYDYRLAA

SEQ ID NO: 293143 - protein, 445 aa, unidentified
MSEPSPAPGTPVTDGAIASADRGPGDDRFARLTHFGGFDWASTEHQFVAVDPRGQIALSLRFANDAQGWAVFREKVAVLPCLGVAIETCCGPAVERLVDAGLAVYPMNPKAAERYRDRKAPSGAKDDALDAWSFADALRTDGHGWRPLLAQDPLTTELRLLCRDEVKLIEQRTALVNQLRAALCEYYPAALDAFDDWTSEGPWRFVLAFPDPQALAAAGKRKWEKFLHAHKLYRPQTADKRMAAFAGALTFASPNPAVTRAKSLLAVTLAKQLCLLESQLEEYRRRVVRLFTDHPDHDCFGSLPGAGAKIAPRLLAELGANRAVFGTAEALQNYAGTSPVTRQSGRSRVVVLRRACNKALRATVHLWADHSRRACVWAEAYYQKKRADGMNHTAALRCLGQRWVKILWKMWQTRKPYDEALHTRNQTAHGSWVIRLLPNAPAPTA

SEQ ID NO: 293144 - protein, 355 aa, unidentified
MAQVNDLSRSVTAFDPISTLVVVVEMSKARWLVSGAVPGVERQPLKKLEPDATALLRLIERWRSEAMRAGRPINRIGLAYEAGRDGFWLARWLIARGIEAHVIHSASVAVSRERKRAKTDRLDAAMLMRVFLGWLRGERGHCGMVVVPTMEEEAERRPSRERENLVNERSRITNRMKSALARLGIRGFKPHLRKAPERLTGLRTAEGTGLPANVIEEFRRDMARLALVREQISSIEKTRAERLARVPDTGPHAMVRLLARVIGIGIETADMLVREILSRKLRDRRAVARYAGLTGSPDESGLKSREKGLAKAGNARVRRGLIQLAWRFLMFQKDSALARWIAHVPRGRAARERRQ

SEQ ID NO: 293145 - protein, 408 aa, unidentified
MNRYYGGVDWADEFHQVWVSDAEGKKVAEMKVEQSPKGLSEFGRWLHERQAEQIELWAAIEKPQGRIVDFLLDHGVVVYPVNPKALDRARDRFRMSQSKSDSFDAYVLAEFLRTDHVHLRALEPDSEQAQELKMLTRDHHRLGRHKTRLLNQIEVTLKEYYPRPLEVFSDLESKIALDFLEHYPTPRALSELTRRQWNRFAKREHHLGKERCKELWEKLSQPQLKIPEHVVRAKAQLLLVLVIQLKSLAEAVKNYSEEVERFFASMPAAELVKTLPGGKSGTTVPMLWAELGDAKSRWQSFRHLQAEAGGVPVTKASGKSRVVQFRFACNKLLRYASYWFSFNSLNRCEWANKYYRDQRRKGHGHPQALRALGAKWLKIIFVMWRDHKPYDENYHLANIARQQMRQAA

SEQ ID NO: 293146 - protein, 348 aa, unidentified
MEHIGIDVHKNQSQICILTSEGELIEKRIVTDRKRFARVFESRSRDRILIEASTESEWVARCLEELGHEVIVADPNYLPMYGHRSRRIKTDRRDARALAEACRHGIYRLAHRTSDERRHLRGRLAVRESLVRTRARYISLIRALLRREGLRVRRGSAERFVERVGVVEVPALIGQEIEPLLAVMDHLDTQIALADRQLTTLASQEGEIRRLCTVPGIGPVTATSVVATLDTAERFRGAHQVEAYLGLVPRERSSGEKQHKGRITKSGNNRTRYLLVEAAWVLLSRVKQAQAQPLQAWAKRIAARRGKRVAVVALARRLAGILYAMMRDGTEFDAGHFATATDRKRMTA

SEQ ID NO: 293147 - protein, 431 aa, unidentified
MQEVTGEPLYRDRVCGIDIGKAELYATIRVPSDKNPARRASETRRFATTRRGVLADWLRCWQVPAVVMEATSTYWMGPFFRLEAEGFECVLADAKQVKNLPGRPKRDPSDSGWLAQCFERGAVRPCFVATAQFRVIRLHTRYRRDLIEDRTREKNRAEKLLESAAIKLSSVVTDLHGVTGRDIMNQLIGGHRDPKALAQLARGRARRKISELEHALEGAEFFTDHHARLLKTMLERIDRIDAEITRLSEVIETLLTPYEEQLQQAESMPGWGRRSAEDAVAETGPDMSRFPTPAHLASWAGRTPLDHQSGKRVGRARHKKGNRYLGGVLGETAVCAGRTQTREGARYRKLARSRGKNKACVAVGNTQLKVYHKLLSTPGMRYADLGPDYYQRRAQTRRTIDYHVRELQALGLEVTLCRLPEPGQAATTPAA

SEQ ID NO: 293148 - protein, 335 aa, unidentified
MKNYSHYVGIDISKNTLDIVLLNSNEKLIYKHFKIENSKEAIAEFINILKKEELHISNVIFCCENTGIYTYILSDYLSLKKIDLWVVSAIEIKRSKGISRGKNDKTDARDIAFYSLRNIDKLQLYKTSDRSIQELKVLNSEREKIVKSIKLFSMTSENENFIPAKILKSTKKINEKIIKNLKKSLQDIEKQMKTIIFSNEELNNQYQLIKSIPGIGGKTAIYIIIVTKGFDSFKNWRQLACYSGIAPFEYSSGSSIKGRTKVSHLADKKMKSLLHMCALTAIKYDPQLKEYYNKKKAEGKNSMLVLNNIRCKLISRVFAVINRETSYINTYKFAS

SEQ ID NO: 293149 - protein, 312 aa, unidentified
MNKTICGVDVSKEWLDAHVVPSGASCRCGNDATGIAELGAFCRSHDVELVVMEASGGFEQLAFLLLWEAALPCAIVNARNVRRFAEAMGFLEKTDTIDAAVIARFAQVKRISPTPLPSAGQRRLKALVCRLSQVTGDLIVQKQRRNAAKDAGSVASLSEVIALLTRQEDALAGEIGSLIDQDPLWACLDTALRSLKGVADRTVARLMAELPEIGQLSNKAIAKLAGLAPIANDSGKRQGKRPVRGGRAGPRSILFLVALGVARHDPHIGAFYQRLKQAGKQKMVIRIALARKLLVILNAKARDARREFANAT

SEQ ID NO: 293150 - protein, 404 aa, unidentified
MEGPVITVDVSKGNCHYQPFIENGHPMRKPKVLDDTIDGFSRISRLMEDLEKKTGATELPVVFEATGVYHRPLQKYLQDKKIPYYIISPMLSAAYRKTTLNGNKTDSLDCTHIAKAYYSEELRPYYEQSPEYLRLMRLNRYYEGELVHLRKRKVALRSCLDIIYPRIDKKFSGNQNIYDPLPMEVLKQYPHPSLLLKHREDVIVKRISGPSGHKQGYAEKIVHKIYETAKECYSGCDPDGIEVIKLPEMIRKMQEQEQLCKHILSDITALAKEAPYYACVASIPGIGDNLASRIIAELGDINRFHNRSALVAYAGLNPKILQSGDIDGTHLKISKKGNKHLRCLLYIAASCNYRLKKYDSFYEFNKKKRQQFGSHKSKAATVATAHKLLVVIYAMCKNGSLYSF

SEQ ID NO: 293151 - protein, 350 aa, unidentified
MIIGCDFHPRFQQISFLLEETGECGQRRLMHTAEAEQYYRSLSGPRVRVGIEATGSYGWFRRLLSELGHELLVGDATQIRASNPRRQKTDKRDAEHILGLLVQDRFPAIWQPPAENEQLRQLLQHRSRLVRLRTRVTNQLDGMAKNEGLLVPGGWSGKRRKAIETLPLQGWYGERRKDLLGLLDRLEERIAPLDKAVSQAAASNAEACLLMTHPGVGPVISLAYVLTIGNWQRFARGKQVGSYLGLIPSEDSSSDKRRLGHISKQGNTLVRWLLVEAASTAQRYDVSWHRQYVRLSMTKHHGVAKVAIAHKLAVRLYWMLRSGEDYQHARERGSTARQSECPGGRCKAAD

SEQ ID NO: 293152 - protein, 322 aa, unidentified
MRYIGIDVSKATFVVAYSSDKGGEIRTFNNTTAGIRQFIGTLPKDGSIHCVMEATGNYSALLLYMLNVAGITVSMENPLKVKNFAKAMLSTIKTDKSDARLITLYGEKMNPRPFKVQGEAILRLRQKRTVIRQLTKQITAMSNLRGSLACLPVPDKGATHTVDETIKFLEKKRDRLQAELTDLVEVEFSRQLALLTTIKGIGITLATALIITTGGFTYFQNAKQVSRYLGICPTYEQSGTSVNIKGHINRNGDAYTRGLLYIAAWPASRFNAQCKETYTRLRQNGKSGKLAMIAVANKLIRQAFAVVAHDKEYIDGFVSNRP

SEQ ID NO: 293153 - protein, 368 aa, unidentified
METRHMIKNNIEISKSKFEAIEVVDKKNNTRHIIVGVDLAKAKYDVMFNKKHRVYSNDAKGCRQFCKTIKEIGENVVVVYEATGSISLYFAEMLDRNGIAHCQVTPRRVRHHAKAGEAEAKTDKIDSAVIQSYALKYWDNLHINTPMHTNHTALMELQRIKRIYGQTVAKMKQVLSTCQLESPRQILENEITRLKAEHKQIGAKITALIKQDEAMKHQMQLYMQQIGIGKETAETLVLMLPELGTISRREIAALVGVAPFNYDSGTHLGKRITRFGRREVRSLLYMCVRAALNAKTPNVYQKRFHHLSSNGKRSYQQVMVACMRMMIVRLNAITRDWINAGRPAPEKVNKEAAEQKTGLAIENKAENK

SEQ ID NO: 293154 - protein, 434 aa, unidentified
MTLINFVAANQKYYAFNLLSVFIMVFWSVQYLLQHLLVQTQLSAQLLQPLILILQLPQPPQFRYARPGKFFLPVNGMDYLLPLRLTVRNVLTRRITMNIVFLGIDLAKNVFQLCGLNQAGKPVYTKRTGRKELLQTLANIPACLIGIEASTGAFYWQREFEKLGHKVKVISPQYVKPFVRGQKNDGNDAQAIAVALMQPTMQFVPPKSPEQQDIQALHRARRRIVNHRTATVCQIRGLLLDRGIPIGSAVSRARRAIPLILEDAENGLSSRMRRTIAELYDLFNDLGRRIHFFDKEIETVFRQSEACQRIAKVKGIGPETATAVVAAIGKGTEFKNGRHFAAWQGLVPRQHSSGDRQVLMNMTKKGDKHLRTLFIHGARAVVRVATNNNDGHMNQWVNQLKERRGFNKTTVAVANKNARIIWSMLRNETEYQVV

SEQ ID NO: 293155 - protein, 424 aa, unidentified
MNCTQNERINQVSEQTLVIGVDIASELNYARAFNWRGIEKGKVFKFFNNLEGFQAFNEWAHQVMSANKLTNIMVAAEPTGHYWFGLADYLKDEKLKLVLVNPFHVNRAKELDDNHPSKTDAKDPKTIAKLVIEGRYMEPYIPEGVYADLRIMYNCRQKVTKAMISLENQLKRWFRIYFPEYLSVFGNLSGQGSMAVLEKAVLPEDIISLGVDGINKLWRERKLRAVGMKMAESLYEAAVKSIGRREGSVGGRAEFRMLWEDYCHKMEQMEKLNIELESLLHKVPQAEEVLKMKGIGVVSVAGFFAEVGDLRRFESPKQIQKLAGLAIRENSSGKHKGQTTISKRGRARLRAVLFNASIALVGRNGAFKSIHEYYIGRKANPLKKKQSIVAVSCKLIRIIYAICRHKEAYDEAKMLRDIRREQLA

SEQ ID NO: 293156 - protein, 313 aa, unidentified
MNDKKVAGIDVSKSTLDVALLPSGEMLQFGNEVAGIGELVKQLKSSGLDLVVMEATGGYETAVASALVAAGLRVAVVNPRQVRDFAKATGRLAKTDRIDAQVIAAFGVAVEPHILQLPDEQARELDALLVRRAQLVAMRVQEVNRLGLSQGAARKQIKLHIAWLDNAIDKLDVDITAGLRSSPAWRAKDDLYRSFKGVGPVTSSNMIIALPELGRIDRRAITALVGLAPFNRDSGTMRGRRCIYGGRGRIRNLLYMAATSAIQHNPVIKAFYERLKSRGKPHKVAMVACMRKMLIILNAMARDGTPWTPEKAG

SEQ ID NO: 293157 - protein, 364 aa, unidentified
MKRKLYVGMDVHKETIRIAYLTSNSKEILKEQQIKHEEVQIKKFINRLKLEWDEIDCCYEAGVTGYPLYRYLKSLGVNCILVAPGKIPRQSSDKIKTDKRDAIKLARLMRSGELESIHVPSEEDEAVRDYLRSRDSLRLDLGRNRQRLMKFLLRKDIKYSTTKYWTVSHYKWLNNLHFNNEILQETFNDYYSRVRVQEENLKAMDKKIQEVAESESYREKVGILRCFRGVDYLTAMFLLCEVNDFKRFKTAGSFMSFLGLVPGEYSSGSKRKQTGITKTGSPRLRRILTEAAWQHRFPGTGSKIVTARRSGQPALVVALAEKASLRLHKKFRNLQLRGKTPQVMITAASRELSGFLWAAMNLVA

SEQ ID NO: 293158 - protein, 435 aa, unidentified
MSSLHITNPHCAGIDIGSEKIFIGIADHEVISFGTFTDEYIKAIAFLKEHHITSVAMEATGVYWIALFDMIEASGISVCLVNGRQVKNLPGRKSDVADCQWLQQLHTYGLLRPCFIPDDTIRQFRIYTRLRNDHISMASSHIQHMQKAFDLMNIKLHNVISELHGVSGMRIVSAILDGERNPETLAALCEASILKHKHALVIASLKGHYKAEHLFALKQAKHAYEFYQQQITECDLQTQLLLEEMTDTLPTPTNILKPKPIRHNPPQIDDLHIKLMKLTEGKDPSRITGLTDKTLMEIISETGLDLAAHWKTEKHFTSWLALAPNMHQTGKSNKKRKVKKNSTAGQIFRQAALSIANGKYSALSAFYKRIKAKKGFKVALKATARKIAVLYYNLMTKGHDFVEQGIIKYQQRFKEQQLVRLHKQAKSFGFQLTPV

SEQ ID NO: 293159 - protein, 404 aa, unidentified
MVPVRSMVWVGIDVGKTSHYACAVDESGKVAWSQKVANEQRAIEQLIARARKGAEQVRWAIDLTSPMALMLMTLLLGAGQSVVYVPGRVVNTMTSALRGEGKTDAKDARVIAETARMRSDLSQVGMPDELVVELTQLTGYRADLMADWVRGINRLRGLLGSIFPALEAAFDYSTRTPLILVAGLCTPAEIRAASVEGVTAHLVENQAWPAGVAKTAATAVAVATEQQLALPGESGTAALVKRLARKLLDLDREIKDIDKTITERFRDHPYARIIESLPGFGPNLGAEFLVATCGNLTSFATPGRLASYAGLVPVPRDSGRVSGNMHRPKRYNRRLRRVFYLAALSSIRTSGPSRQFYDRKRAERLIHSQALLALARRLVDVLWALLRDGREFSPHSPTAVPAKA

SEQ ID NO: 293160 - protein, 343 aa, unidentified
MQTITTIGLDIAKSVFQVHGIDAGGQVVIRRQLKRRYVLAFFQKLPPCLVGIEACASSHHWSRELKALGHTVRLMPPAYVKPYTKRQKNDAADAEAICEAVTRANMRFVDTKTPEQQSGMVLHRTRHLCMRQQISVINAIRAHLAEFGIVAPVGRNGVEELLDIVSNPSDKRVSEIARMCLAALGTQLRRLKEQVLEFDRMIRTWHRSNEMSMRLDECPGVGPVLATALVASVADPRTFRSGRNFSAWIGLVPKQHSSGGKNKLGSISKQGDRYLRGLFVVGALAVIRYAKINGTKHRPWLTALLARRPAKVAAIALANKIARMVWAMMARGERYKEPIALAV

SEQ ID NO: 293161 - protein, 435 aa, unidentified
MKKIRENAGGIDIGAKKIFIGLEDKEVRSFDTFTSDLEQAVSYLVENNITSVAMEATGVYWVILYDILKARGIDVWLVDGRSTKQVPGRKTDVKDCQWIQQLHSYGLLNRCFVADELVHELRSYQRLREDHIRSAAMHINHMQKALTLMNIRLKEVLDQVHGVSGLKIIRAILKGERDPGVLVKLCHGSVLKTKKELILKSLKGHYNEAGLFALDQAVVCYDFYQQQIAGCDLKMEEVLKKMGANQPKVSNKGTSRKNVRHHKPNIEGMDRYLLQIFEGKDATVLPGITDYNWMQLLSEIGTDLHKWKTEKHFTSWLGLAPKQHHSGKMKKNYKAKGQPKAGLIFKQAATSLLNSKKIALGAFGRKIRAKKGASPAIKAVARKLAELYWKLFVKGLSYVEKGIKDYEEKILFNKQKNIMKMARELGMSIGYKTAV

SEQ ID NO: 293162 - protein, 392 aa, unidentified
MVISVGIDVSKDKHDCFIVSSEGEVLADVFTIPNTLGGFNCLLQRIQDSATPQDKIRVGLEATGHYSYNLLGFLLDNGLATYVLNPLRTNLYRKSLSLRKTKTDRVDARTIASMLLSDAGLKPYTDTAYHNEELKSLTRYRFDKVKERAKLKSSVSRLVCILFPELEKLVPTLHMASVYALLEKFPGAKQVAAAHLTRLKSLLETASKGRYKQDMALEIRDAARNSIGSRISAKSLELQHTIRLIRELDAKIEEIEEQIQSLMEKLHSPITTIPGLGFRMAAMILAEVGDFTRFDSPDKLLAYAGMSPSTYQSGQLKNCYPHMEKRGSRYLRYALYNATKYVCHWDPTFAAYLAKKRAEGKHYNVALSHAAKKLVRLIFAMEKSRAPYHLAA

SEQ ID NO: 293163 - protein, 342 aa, unidentified
MQITTVGLDLAKSTFHLVGLEVSGREGVKKKLSRTQVLRYFANLPRCTVGMEACAGAHYFARELARHGHEARLIPPQYVKAYLRGQKNDYNDARAIAEAVRSPSMRFVAVKTTAQQDLQALSRLREGVLRSRTALVNRLRGLLGEYGIVAAQGVSRLRRALPELLEDADNGLSARFRRLLRQGQQELLELDTHVEMLTNELKQVANEDDRAKRLQTIPGYGPIVASAYAATMGDGAQYRRGRDASAAVGLVPRQHSSGGKERLLGISKRGDRYLRSLLVHGARAVVVAAKAKDDPFSRWINHLREKRGINKATVATANKLARIGWAVLRHGGVYQTPVASAA

SEQ ID NO: 293164 - protein, 342 aa, unidentified
MNRVYVGLDLGSSNFHQVAISENGAVTRNCVFATSEANLVKACSGMRGEIHVHLEAGELAPWASEIIRPLVKRVVCSHPQTNAWIARDRDKSDRKDAYKLASLLRLNEFKEVHYPHEQQRRDFKAVVQHYDELTTQQARLKTKIKARLRMQGVITRGEQVFSVHGRKAVLAEVKSQVVRTAIQQLYALLDQSLVSQAEARLLMLRAAQALPEIRILRTAPGMGPIGACRFSAYVHAPQRFNSTRKLWKYCRLSVSHRSSNGKPLRRPRIDRSGCGRLKDVSRKAFEAALRRKDNNGFQRAYYRPLEQTHDPVHARLTVQRKIVSTLRAMWINQTPYGDRLMH

SEQ ID NO: 293165 - protein, 364 aa, unidentified
MIVIGADTHKSSHTFAAVQERTGRILSTRTVRADADGLLEAWQWAHSLGAERVWALEDCRHVSGRLERMLVGQGERVLRVAPKLTGELRRGERRPGKSDEIDAVAAARAAIREGIENLPVACLDEEALAIRLLHDHRAQLVAERTRHQNRLRWHLVDLDPELEHRVPERALARERWVERINRRLARLPQTVRVRIARDHLRRIRELTRSERALERELIELIQALRPDLLAEPGIGPISAAVLIGRTAGANRFPTDGHYARQAGAAPIPRLLGQHPTRALQPRRGPTTQLRAAPHRVHPRPHLPPHPRLPGPENRRRQNPRRGLPLPKAIHRPPRLAPPLPNARSHPPPTLSIHCNTPTGPLALT

SEQ ID NO: 293166 - protein, 345 aa, unidentified
MFYVGVDLHKSFTQVYGFNDATGEVVERRVSNDKGSIREVMSQFGENAKVVLEATRNWYWFVDLLQEMGIDVVLSNPLQTKAIAYAKVKTDKVDARMLSHLLRADLIPFAWIPSMEERGIREMLRTRLTLVRIRARFKNLVRSILAKLNIVLSHGDIWRGKGRKELEQLNLPSPYNEILPHYLSIIDNLDKYIEEWNRKIERIAKETPEVFLLKSVPGIGTISALTILYETGPIDRFPSAKRYSSYAGLVPRVKGSGGKFKTGHLSRQANMYLKWIYVEIATGIVRIGKGYLYEYYKKQMYKKGKNVAKIALARKISRMVYHLLKQHITYDTFVERNVNKMRRTG

SEQ ID NO: 293167 - protein, 350 aa, unidentified
MMIIGCDLHTRYQQIAMVDTETGEFVERRLEHESGEARTFYAGLRGAVRVGIEATGHTAWFEAMLAEFGHELWMGDAAKIRAAVVRKQKTDARDAAHLLDMLCTNRFPTIWRPSLAERDLRQLLWHRQKLVWMWGAVKNQMHALAMGEGVCRKKKLFTAKGRTELEGLKLGRWASYRRQELLRLFDELQSSVKKLDQAVEFAAQSNPLAARLMTHPGVGPITSLAFVLIIGPVERFDRSKQVVSYLGLNPQEHSSGGRQRLGSISKQGNPMMRSLLVEAGHTAARLDPQLQRVYQRLKFRRGASVAKVAIARKLAVRLYWMLRSTADYAQLVRMRGSSWATLVEDSPSLG

SEQ ID NO: 293168 - protein, 391 aa, unidentified
MNTNKSKTDKTRAPKQVTTEPESIVKAKHIKLGVDVHLDRYVVVRILDGGTPQPPQRFGPAEFLLWVAKQISLAEKLFTCYEAGPFGYGLHRKLEKMGATNYVVRPRDWDEYGQKVKTDKRDAKQLALHLDRYVNGNQDAFCVVRVPSPEQEQMRSVSRQRESFQRERQRLAAQGRSHALYYGEHLQGEWWQEAAWKNSAAQLPAIVVNLLEPLRRLIAALELELHSRTQEVEAAAPEQLPVGLGKLTSQILEREVADWNRFKNRRQVASYTGLCPREDSSSTRRFQGSINKHGNRRLRPALVECLWRLCVFQPEYRVVKKWRPELLNPKTSRPRRKKIIVAMARTFAVDWWRVRTNRCKAEDLGLKLQPAKIPPASAKTKRAPATDLKTK

SEQ ID NO: 293169 - protein, 408 aa, unidentified
MTTAEYDLYVGIDWATQEHRVVVLDAARRPLHDRVVRQDGAALEAFATWLVALVAGRSDAIAVALEVPRGALIDSLLARGCHVFAINPKQLDRFRDRYTVAGAKDDRRDAHVLAAALATDRPAFRPLAPEDARIIELRELSRLDEDLGQEVRRLTNRLREQLSRFYPQILQRSPAADEPWIWALLQRAPTPTAAGSVPRAVLQRLLTRYRIRRVSADDVRATLRAPALPVAAGTVPAAQLQVGMLVARLQLVQDQRATCGARLEALLEALAESQEHRDVPILRSLPGVGSRVSATMLAEASRLLAGRDYHALRAHSGLAPVTKQSGKRALVMMRYACNRRLRDAAHYWGQSAVRHDPHSAAHYQRLRARGHSHGRALRGVVDRLLRVLMAMLKTQTLYDATRRPALSA

SEQ ID NO: 293170 - protein, 303 aa, unidentified
MSSSTLDARIGRDGVEKSFKNNLNGAEEMISFCREHKVELVVMEATGGYEKAAFCQLWQAGIPAAIVNPRSVRWFAEAMGCFEKTDRIDAGLIAWYAESKRIVAQEPAKETQEQLAALVTRLRQVTEVRAMQLNQKRLVREPEVLASFQELISLLTCQIRALEQKVAKLIEQDPLWAKMDEAFRTIKGVADRTVARLMAEMPEIGTISHKAISKLSGVAPMARDSGNLKGRRAIRGGRANVRSILYVVADIVRRYDADFAEFHKRMLAAGKKKKVIRIALAHKLLVRLNAKARDVRRNFLPVA

SEQ ID NO: 293171 - protein, 384 aa, unidentified
MNLDRANTPAGEEYATVYVAFELSKAKWRLGIILPGAKKMSRYTIDGGDTAGLSVRLSQARAKAASYGKPVRILSCYEAGFDGHWLHRWLVDQGVIGYEVDPSSIEVNRRARRAKTDRIDLDKLMRTFLAYIRGEPRVCSMLHVPTVEDEDRKRLTRERERLLQERTAHSNRIKGLLHAHGIRDAMPMKRGFIESLATVRTGDGRPLSRWLKEEITREHERLCLVEKHICALEKTNTAELRAAVPGSAEAKVIQLADLKGIGLTSGQKLVNEVFYRSFDNRRQVGSCFGLTDTPYHSGTSRHDQGISKAGNRRARALAVELAWLWTIHQPDSELTRWFRERVGKIKGRIRRIAIVALARKLMVALWRYLTTGVVPAGAALHRAC

SEQ ID NO: 293172 - protein, 348 aa, unidentified
MATYCGVDFHARQQTVAYFNTEDGEIKVIELNHQSDEVQRFYEGLPKPVRVGLEATGYIPWFEKLLTELEHEVWVGNATEIRRRARSRQKNDRRDAELILDLMIKNEFPRIHRLSQESLDVLRQLRYRHKLVRMRTMTKNSLHAISLSSGLSLQAKLLTKDGKAKLEALDLSPALTEQRREWLDLIEQIDTRIKRTETELEKIAGKDPRVELLRTHPGIGLLTSLALVHTLEPVSRFANSRKVTAFAGLEPCEDSSADRVRWNGISKAGSRLLRFLLIEAAQRSLGKDEELKRFYLHLSGRRGRPKAKIAIARKLLSRAWIMLRDKIDYAEFLQRGVAVRSARTVHRP

SEQ ID NO: 293173 - protein, 315 aa, unidentified
MKVSVEKSVVYYVGIDVAKATLDVATTQFHGVFTRDPVGLDRLVAWLRELGPGAHVVLEASGGYEREVVAWLLAHDFAVSVVNAAWVRNFARSQGRLAKTDRIDARVLVDFAAANAPRLCAPLSAQQQKLTDLVRARQQLVAVRTLLQNQLEHTREALARRSQEELVELTATRIRRLEKALAALIAQTPQLNAKVQKLSCVRGIGATTAALLLAELPELGTLSKAEAAALAGLAPRNHDSGTFRGQRHIAGGRPAVRTGLWMPTLVATQHNPILKAFYQRLRAKGKPAKVALTATARKLLIHLNSLLKSPTLPSC

SEQ ID NO: 293174 - protein, 345 aa, unidentified
MFYAGLDLSRKRVDVCVVDRDGAAVAETAVAPDADGLAGLAARLAPLGRVQAAIESMTGARFVHDRLEELGWEVEIADAQKVKGLAPLACKTDRIDAWVLAELCRRELVPAIWLPNPRVRAERERARWRLHLVRHRVALKNRVHSTLMCFGKPCPVSDLFGERGRRLLERLEVPDPWRSDVLAAVALIDELEREITEAERELHRLGADHRYVSLLTTVPGIAWVLGYTIAAEIGSIERFASPKKLCGYTGLCPRVYQSGELDRRGSLAKNGPKFLRWALIEAATHAARHPAYRARYQQTATRLGKQRGKKIARVELARRLAEAIWHMLTRNQPFAPAGPPECLAA

SEQ ID NO: 293175 - protein, 360 aa, unidentified
MVVVGSDVHKRTHTFVAVDEVGRKLAEITVKADHTGHDRAIRWARDRFGEAVQRWAVEDCRHLSARLEIDLLEAGEQVVRVPPKLMAEQRRLARTRGKSDPIDALAVARAALREPDLPVATHDEASRELRLLVDRREDLVAERTRMVNRLRWHLHRIAPGEAAADPAPASLNVAKTRRALAAWLGEELAARPSIDARLAGDVLADIDRVCAQVTALEKEITALVAAHQAASRLTRLSGCAALTAAKIVGETAGIERFCDEARYAMHAGVAPIPVWSGRTHGRVRVSRAGNRQLNAALHRIAITQLRCHEPAKAYYAKRLAAGDTRTEAIRRLKRRLARTVFNTLKNNPSTATGTPTPAAA

SEQ ID NO: 293176 - protein, 438 aa, unidentified
MSNKVIFNLDELFISVGIDVGADFSWMSIALPNQQFVGKPFKILHNSIDSLTTAVSKIKEAEELYSLESRIFLESTGIYHYPLFCYLRDKGFNCSVINPIITKNSTNINIRKVHNDRFDSKKAALVGLKPDLKVSLMPSDLALNCRNLCREYYDLIDNRSAYMNKLQGELRMAFPQYLGIFSKVTINTSLTLLETYTSPSAFLKADKQEIIDIIKSTARFGLTYAQNKYNAIIQAATDANQFGYIIDSNIKRIRLYISFIRKYDEEINSILESLHELVDANEDSDFVKQIHLIETFKGAGFLSAVSIMGEIGDFSAFSKPKQLFAYFGLDPSVKQSGKFEGTKVQMSKRGSAIARRVIHTLTLQSISISRNREAKNPVLREYYLKKCDSKPKLVAMGAVSHKVCNMIFAILRDNKPFKIIAPQEHIKQYNAAKCDMTA

SEQ ID NO: 293177 - protein, 313 aa, unidentified
MDLFVGIDVSKRMLEIAVVPTGEKWSVSNSAEGMQLLVQRLKELSPRLVVLEASGGLERRAVAALAAAGIPVVAVNPRQVREFAKATGRLAKTDAIDAAMLGLFAERIRPELRPLRDADAQELEALVVRRRQVVDMITAEKNRLSAAPPSKRVRTAIGKTIKWLEAQLDEIDSDLDKTVRNSPAWREKEDLMRTVPGVGKVLSRTLLSLVPELGALGRKQLAALVGVAPMNQDSGAHRGRRRIWGGRAHVRAVLYMSALVAARYNPSIRAFHQRLVAAGKLPKVALVACMHKLLSILNAMIRSKSPWAPEAIA

SEQ ID NO: 293178 - protein, 408 aa, unidentified
MNAVGIDVSKGKSMVAALRPMGEVALLPQEFLHTEVGLEQMAYAIIALGENTRVIMEATGRYHEPVAAALHEYGIYVCVLNPLFIKQSGGGSIRKVKTDKADAMKIAKYGLDNWADLREYTPMDTVRQQLKLCSRQYNLYMKTVVSLQNNLISLTDKTFPGVNELFSSPERADGHQKWVDFVMTFYHCDCICRVSEKAFTERYQKWCKRKGYHFSAEKALDVYAGSCGHITTLPKNDNTKLLIATAAQQLLSGKMTLAALRAEMTRLAKQLPEYDTVRAMYGVGETTAAQLMAEIGDVRRFPRRSSIVGFAGVDPAVDQSGKHSAKSVPTTKRGSPHLRKTLYQIICTYLRKAPADEPVYQFLDKKRAEGKPYFVYMTAAQNKFLRIYYARVKECLEAFDAQQDTSQR

SEQ ID NO: 293179 - protein, 414 aa, unidentified
MESSYKVAGIDVHKKMLAVVITDAAEVGEFRFERRKFGTGDAELHALAGWLAEVGVKEAVMESTAQYWKPVWQALEGQVKLHLAQAHSNRAPKGRKRDFADAERLVRRHIAGELILSFVPDPQQRLWRTMTRTKQQLTRDRVRLQNQLEGFLEETRIKLSSHLSDLLGLSGRRMLQALAEGETDPARIAVLAAPGLRATQQELCDALSAAATMSEMHRQILKLFLERLTLLESQMDTLEKSVGQALREYEDSVHRLAEVPGLGADSAQQIIAEVGPHAATFPSPGQMASWVGCCPGREESAEVSRSDRSPKGNRHMRRILNQAANAAIHTKGSSYERLYRRLAGRIGHFKAVWAVAHRLCRIAWKILHQGVRYEVRGQRPDPQAVRQRTSKLIRALRNLGYQVQLTPATSGGVV

SEQ ID NO: 293180 - protein, 381 aa, unidentified
MDDFAAYIGIDWSDSKHDLCLVEHALGRREFTVLEHSPEALEEWAARLRARCPGRKIAVGLEQSRGPLIFALLKYDFLVLYPIHPSTLANYREAFSPSRAKDDPTDAEYQAELLIHHRDRLKAWRPDDAKTRSLQLLFEHRRRLVGDRTRISNRLTALLKGYFPHVLAWFPDLRTDLVCDFLKRWPTLDSLKGVRTATLEQFFRAHHSARADVNRERIAAIKRGVPLTTDPAVIQASALMAQALAAQMKATLAALKGFEAEIEALCRSHQDYPLFASLPGSGTVYSSRLLAAFGTDRGRFGSADEMARLAGIAPVLERSGKSTWVRWRYFCPKFLRQTFHEYAGRVGQALGLGAGLLHRPSGPRGSLIRRRSGPWLSSGSG

SEQ ID NO: 293181 - protein, 359 aa, unidentified
MAIVAHIYPFIVGVDTHARNHVLSILDCSTRAQVLCHSFTNTPKGHARAQAWIARHASTEAGKVLVSMEGTASYGARFRVFLEQAGYRVVEAPRLLAHGRKKLAKNDALDAFQIAARTLGKDETELTIPRQGNHREALRILVTARKQLTRTTTVHINSLTALTRCADLGVDARKALSVTQIHQLATLEAHPDEAIDVLVAKQEARRLAKAIIDARAQLAENQTQLAILVQLVAPALLELSGVGPVTAAQMIISYSHAGRVKSEAAFAALAGTSPIPASSGNKIRYRLNRGGDRALNNALHTIALVRLRNDEQTREYMKKRLAEGKTKRETIRLIKRYLARKIYRLLTKELTKKQIALAA

SEQ ID NO: 293182 - protein, 407 aa, unidentified
MNPRALGWDIHRKFSMVSLMEISAAGEIRAVERARLEHANQEAMRAWLSRLDPEIPVAVEAAFGWPWVADMLEALGHPVHLGHPPTLKVLAQHEAKTDRRDSDRLGKFQLRGILPESYLAPPEVRQIRERTRYRMALSRLRSGVKSRLQAILHRLGVLHPFSDLFGKRGRGFLRSLELAEASRRALDGYLDLLDAIQTRIDEVEEWMVTNLAVDEIVRLLMTIPGVGLILAHVIRAEIGEIGRFPSRRHLAAYTGLAPLSNQSNTRDGPRHCSLACNHIFRWALIEAAGNLLHTKRQAFRLKRLYARLTHGGLSNKNQAKVAVARELLEVVHVVWRRQVPYSESPPPRPGSVAAKRNRPQECPKSNTTLRPDQPRFPMARRRPSARPVCNWAVRCRIPILCRATSAD

SEQ ID NO: 293183 - protein, 313 aa, unidentified
MSEFIGIDVSKSALDVVAHVSGARLQVENTEQGLESLCKQLAALAPELVVMEASGGYERLCAAALAHAGLPVAVVNARQVRAFALATGVLAKTDAVDARILAHFAAAVRPPVRPLPDEQHQALDELMGRRRQLVGMLVMEKNRLPQARDARVRRDIQSLVAILKKRIKGCDGELQGLIQASPIWRAQEDVLRSFNGIGPVSACTLLADLPELGRLNRKQIASLTGLAPIARDSGSKHGRRAIFGGRGQVRAVLYMATVTAIRANNYIRAFYQRLRAAGKPPKVALVACMRKVLTILNAMVRTQTRWQEPLPTS

SEQ ID NO: 293184 - protein, 396 aa, unidentified
MPATTRHARVPALPESTTGQARLLYLALDLGERHWTLAFTVGRGQRPRVRTIPAGDLERLTTELAAARRRFGLPPEARVVSCYEAGRDGFWLHRAFLASGVTNVVVDAASIEVPRRARRAKTDRLDARKLVTMLVRYTEGERPVWHVVHVPSEADEDRRHLERERETLVADQTGLVNRIQGLLATQGVRLALRGDVPAQLAAVRRWDGTPLPPELRARLEREWMRVEAVRTALRALTTARHRRVTTPTPPAVDAAAVHLTRRLAALGAVGETTAWLLATEMFSWREFRNRRQVGGFVGLTGTPDQSGDRIREQGLTRNGSVELRARVIELAWGWLRYQPASALSQWYRQRYGGGNARLRRIGIVALARRLLIALWRYAMGGPPPAGAHLKDDAMVA

SEQ ID NO: 293185 - protein, 416 aa, unidentified
MLRVLLFIGDDWAEDHHDLEVEDETGRRLAKARLPEGLEGISRLHALVAEHAPAEWAELPSEEVASRVYIGIETDRGPWVTALQAAGYQVLAINPLSSARYRERYSTSGAKSDAGDAHVLAEIVRLDRDHHRQIAGDTDLVDAVKLVARAHQTAIWERTRQVLRLRSTLREYFPAAIEAFEDLAAKDTLLLLARAPSPARVARLTRSQVVSALRAARRHHVEAKADAVLAVLRAPGLRQPATTEAAYAAVVVGQIGIIGALNEQITQLQEVVAEHFGRHPDADIYLSQPGFGVVLAARALGEFGDDKKRFHDARARKNYSGQSPITRASGKKTVVLARYATNRRLGAALHAQAFSALAASPGARAYYDALRARKIGHHAALRQLANRLVGILHGCLKTGTKYDENTAWHHQITAAA

SEQ ID NO: 293186 - protein, 391 aa, unidentified
MDESGKVLAKNRIPEGIGGVTAFHSLVAHHASDPQEVVVCIETDRGLWVQSLLAAGYQVYAVNPFAAAHYRQRHVVSGAKSDPGDAEILANLVRTDRHHHRQVAGDSETAQAVRALARAHQRLIWDRQAQVNRLRSILKDFYPAALNAFGTDLAHPDAIGVLGRAPTPGAGARLSVSALSATLRRAGRQRNIEDRAKQIQAALRAPQVRAPLRVENAYGAQVAATIGIIAEMTRQAAALEAQLTEDFGSHPDAEIVRSLPGLGTVLGARVLGEFGDDPNRYTDGKARRNYAGTSPITRASGKKRVVLARFVRNRHLADATYRWAFAALQGSPGARAFYDEHRAKGDTHNQALRVLSNRLVGILDGCMRTRSVYNETRAWSHRQASSDAVAA

SEQ ID NO: 293187 - protein, 370 aa, unidentified
MSNATTFVGLDVHARPVKACAFVPETGETIRKSFGYEPGEIASWVSSLPQPARCVYESGVTGFHLCRELNAMGAACVIGAVSKMHKPAADRGRKTDRRDAQFLAVQLALGVVTEVHVPDAECEGARDLARALADARDDAVRAKQRLSKFLLRHGLVYDERNAAGQRRNRWTGDFWAWVGRIDLGDAAAMATLDHYCERVREADAAKAALEAKVKSLAQQPRWKPTCDALKCLKGIDAVTEASIACEADGFARFATASGFAAWVGLVPSEHSSGESRFRGGITKAGNKHLRKLLVEAAWHYKGASRSPKDLAKGQVVDAATRRHANAGVRRLVDRRRSMDDAGKQGSVANVAVARELACWCWAVGRMAEGA

SEQ ID NO: 293188 - protein, 344 aa, unidentified
MDHFAGLDVSVKETSICIVDDAGKIVREVKVASEPEALLAVLKNPAYHFKRIGLEAGPLSQWLVSALAEAGLPVICVETRHMQAVLKAQINKTDRNDARGIAQMMRAGLYRPVHVKTLRSQKLRMLLTHRKLLQSKAIAIENDLRGTLRNFGLKVGMVGKVMFEARIKELVENLPDLAELVEPLLIVRRVLREQIVILHRRLLAIVRDDEVCRRLMTTPGVGPVVALTYRATVDVPARFRKSKAVGAVFGLTCAKYQSGEVDRNGRISRCGDEMMRVMLYEAAQSILRSKKWSWLKAWAMQIARRRGMKKAIVALARRLAVIMHRIWVDGTEFRWTREQATAAA

SEQ ID NO: 293189 - protein, 392 aa, unidentified
MIYIGIDVAKDKHDCFITHSDGEALFNSFTISNNREGFETLFQRIESVSDDLTKVKAGLEATGHYSYNLLGFLPDKGLTTFVINPLHTNLYRKSLSLRKTKTDKVDSRTIATMMMSDMNLKSYSDTSYHNEELKSLTRYRFDKVKERAKLKSSVSRLVCILFPELEKLVPTLHMASVYDLLSEFPGADAVAAAHLTRLSNLLSESSKGRYGKDTAVMFREAAKSSIGSLMPAKSPELKHTIKLIHELTIEIDEIETAIKRIMDEEIQSPILTIPGISYRMGAMIIAEIGDFSRFDSADKILAYAGMSPSTYQSGQLDNCHSHMEKRGSRYLRYALYNATKYVCHWDESFGTYLEKKRSEGKHYNVALSHATKKLVRLIFAMEKSRRAYIPVP

SEQ ID NO: 293190 - protein, 480 aa, unidentified
MAKTQKSASQKSTSQKFRAKRSTSRSRSKHQNRAPLKPQDWTLGLQVVHPKAAGIDVGNAEHWVAVPPHMDPEPVRQFGCFTAELMALADWLQALGIETVAMQSTGVYHIPLADILAERGIRVFVVNPRETKNLPGRKTDIQECQWLLKLHVYGLLHNSFRPEEEILRMRTYWRQRQQHIGDAARCIQHMQKALTQMNMQLANVISDISGWTGQAIIGAILEGERDPQQLAKLRDPGVKASEEEVAQSLVGNWREELLFVLRQEYDSYQVFQRKIEACDEQLHKHYQTMPEKADPQQLPPCRREKRPHGNVPKGFDLRSELYRATGVDLTAIDGINVLTAQTVISEVGYNMDRFETEAQFVSFLNLSPNNKISGGKIIGRDKRKVRNRAGQALRFAAGTLLRSETYLGAQYRRLRTKLGAPKAQKAMGNKLARIAYRMLKYKEDYVDKGREFYEQKYRQQQIRMLQKKAKDLGLQLVAVA

SEQ ID NO: 293191 - protein, 376 aa, unidentified
MKPITWVGLDVHTAAPIQVARMGSSEVIEEWELPFERKAIERLAQRLARDAGGGEVHCCYEAGPAGFTVKRWMEGAAEGVFCDVVAPSLIPRKPGDQVKTDRRDARKLARLHRIRELTAVYPPSPDEEAVRGVVRQRDQTREDLHRARQRLKSFLQLRGMVFAGHAWTKRFEAWLSKLSFEAALDKDSFVELRTEVHHHQSRLDRLDSRIDEISKTGFYAERVQQMRCFRGIDTLTAMGIVTTLHNPERFRTPEAMMSYVGLTPSESSSGTRERRGPITRQGDKLLRRLLIEAANNQASKPRNNPRLIACRKNQPPEIVDLAEKAALRLHKRYWHLKLTGRLHNVAVVAIARELVGFLWAMLQLETTRPPSAGAAH

SEQ ID NO: 293192 - protein, 375 aa, unidentified
MKKKLRFLGLDVHAATIAVAVAEADGEVRSLGVIPNRAESVRKLVKKLGTAEQLRACYEAGPTGYVLYWQLTELGVDCAVVAPTLVPTKSGDRVKTDRRDAAKLARCHRAGDLTEVWVPGAETEALRDLVRAREAAKQDQLRARHRLSKFLLRTGRRPPFAGKAWTLPYMAWVRQLRYEQAAQEWTRLDLLHEVEHMAERVKRLEEAIREAVKLAPARMREVIRGLQCLRGVAEISAVTIAAELGQISRFESPRQLMGYSGAVPSEESTGQRQRRGSITKTGNAHLRRIAIEAAWSYRLRPAVGPGLRRRQQGAPEDIKEMAWKAQLRLHKRYARLAAAGKDQRKIVTAVGRELLGFIWAIGVKAETAASQARTA

SEQ ID NO: 293193 - protein, 339 aa, unidentified
MDLHCGMDLHGDNVYCTVMDREYRPVFERRLPNDLAVVTACLAPYRERLAGIAVESTYNWYWLVDGLQAQAYTVRLANPARMQENIGLKNANDKTDARFLAKQMVMGVLPEGYIYPKEERSVRDLLRRRMRLVQARTAEWLSLEGLVARHSGKDLGIQALNGLEAGELSALLGNDPLVLQAAQISYRHIAFLGDEIQQIEKAVEGRVKLCDGYERLLGVPGIGRILAMTIRLETGPITRFPGPGNYASYCRAVKAEHTSNDRKKGEGNGKSGNRYLAWAYIEAANFAVRYSSELRAWYQRKAARTKRVVALKALANKLAKACYFILRDGVDFEVKKLVG

SEQ ID NO: 293194 - protein, 340 aa, unidentified
MITVIGLDIAKNVFQVHGIDDAGQPVLKRRLRRNEVLRAFALLEPALVGIEACHTAHYWAREIAALGHQVRLMPPQFVKPYVKSQKNDAADAEAICEAVQRPTMRFVPIKSADQQAVLLLHRTRDLLIRQRSSLISAIRAHFAEFGIVVGQRMRNIDRLLELLADEGTGLPELARRMLGVLADQLRDVAARVTAVEVELLAWHRASELSQRLATIPGVGPITASAIVATVGDASQFRSGRQFAAWLGLVPQQRSSGGKERLGRISKRGDGYIRRLMIHGARAVVGWRKRRPVASDPWLSGLLARRPVNVATVAFANKSARIAWALMIRGRIYDTALARAV

SEQ ID NO: 293195 - protein, 345 aa, unidentified
MKNIIVGVDLSKNHIQVCIVKQNKVISNREMSSTQFASWLANMKSATVIFEACSTSNYWKQTAANLGHDARLISAKLVAEIRQNQKTDRNDALAVVQASQLVNTRFINGKSFSQQELQSLMRIRELAIKQKVALKNQIQALLLEFNIRVYAQRGGLNAVVQQVLEDAENGFCLQFRQGLQRAWGAYLSTVEAIRDYDKLLGSTMEEHADCEKLTALEGVSVINAVNLYIHLGCGEAGSFRTGQDASACIGLTPIQHSTGGKVKLGSIGKKVKNSSLRSYLVSGAMSVVNQVSRREPKTVKEQWLKQLIERRGKRCAAVALANKTVRTAFSMLTHGTEYRPQPLKG

SEQ ID NO: 293196 - protein, 388 aa, unidentified
MNRILKIGMDVHSTNYTLCAMEPTIGAEDRVFGNIQIAPDYREVICFIESLKMKLGLYDDYSIECGYEAGCLGYSLYHQLINAGIKCVILAPSTMLTQQGKRVKTDKRDAHLIAQCLCYGGYHPVYIPTGEDDAVKEYLRMRDDHKLALKKLKQQINAFTLRHGHQYTGTKWTLKHIAWLNRVELDPMYRETLNEYMASYEQQAANIERYNKRIEEIAAEARYKANAEKLGCFLGIRTHTALSLIVETGDFNRFAKGNTYAAFLGLAPGERSSADHINRLCITKAGNTHLRCLLIEAAKGICKGAIGHKSKELRSRQSGQSAEIITYADKANIRLRSKYYKMIRHGKKKNVAVAAVARELACFVWGMMTGNISVSSVAGTSVSVVSQG

SEQ ID NO: 293197 - protein, 350 aa, unidentified
MEKRIKQCVGIDCGSKDLVVAYGVMDAGFDIQVLSNTQFKNTPAGFKKLLAWAKKLSGNGLELSVVVEATGVYHEQVANFLYENGTRISVVLPNKAHAFNRTLSIKTVTDKVSAQVLAQMGLEKKLLPWSAPDKVFNGLRQLTRERDQLVSESTQVKNQLHAEKSGAWPNKQSIKRAQQRIAYISRQISDIETEIQEMIETNQELKRKVKNVCTIKGVGFLTAVTVIAETNGFNLIRNKKQLVSYAGLDVIVKDSGTSVKSKPRISKKGNRYLRKCLHYPALAAIRSTPAMKAHFIRLVGKHGIKMKAAVAIQRKLLILIYTLWKKNEVFDENYSIKKEEFASANPYELA

SEQ ID NO: 293198 - protein, 351 aa, unidentified
MMIIGCDFHTRYQEIAWLDLETGETGERRLEHAGEQVREFYGALRGQVRVGIEATGYSQWFERMLHQMGHEVWIGDAAAIRASVVRKQKTDRRDAAQVLELLHTNRFPKIWVPTPEQRDLRQLVLHRVKLVQMRTKVQNQLQAMAMGQGICRKKKLWTVQGRAELERLPLDRWAQRRRQELLQLLDQMNESIRELTGEVERQARQHPDAALLMTHPGVGPNTSLAFVLTIGPVERFARGKKIASYLGLNPSEHSSGGRQRLGSISKQGNATMRWLLVEAGQMAVRGDADLQRVYQRLKFRKGSAVAKVAVARKLAVRLYWMLRDRCDYATLVRMPGSSSSAVVPEESESGR

SEQ ID NO: 293199 - protein, 358 aa, unidentified
MKEETAGHPGIVGGVDTHKDLHMAAVVDEHDRVLGSECFATTRHGYRQMLIWMRSFGELLRVGVECTGTYGAGLLRYLQHAEVTVLEVTAPDRSDRRKRGKDDTLDAENAAHAAFAGVRTVTPRTRDGMIESLRVLKVCRKTAVAARRVALQLIHNTVVCAPDELRESLRTMTRMQLIRTLAAWRPDLSDYRNLTSAYRITLKSLGRRYLELHDEIADLDVMIAALVNELAPDLISRNSIGYESAAQLLMTAGDNSERLQSEAGFAALCGVSPVPASSGKVTRHRLNRGGDRAANSALHIIAIGRLRTDPRTKAYVERRVSEGHSKLEAIRCLKRYIAREVYYVIRKRNHQIGQVQVA

SEQ ID NO: 293200 - protein, 420 aa, unidentified
MSYWIAGIDVHKKMLAVVVADVEVEGEYQFERRLFGSNPDHLRLLANGLIEQQVEEVVMESTAQYWKPVWGALEQYWKPTGQGTAPMSGTLHLAQAQSNRGPRGRKKDFPDAERLVKRLVANELILSFVPDAEQRLWRTVMRRKYQLTRNRVQLQNRLEALLEEAHIKLSSLVSDLLGASARRMLKALAEGATDPAALASLADKNLRATPAQLCDALGACTELNPVYRRLLKMFLEELPLIDQQTAQLDKEMATLLSQDQAAVERLAEVPGLGVDSAQQIIAEVGAKAATFASAKNLSSWVGACPGEDESAGVSKSHRSPKGNRHMRRILNQCANAAAKSKGTIFQIIYGRLVSRLGHNQTIGAIAHRLCRLIWIILHRGVRYEERGPAVNANSRRRRTTRMIRELRSLGYRVEAMGSPA

SEQ ID NO: 293201 - protein, 371 aa, unidentified
MRRYYVGLDVHSKDSVYAIQDELGALIGEGSVPTTPEGLLGLRQRYVLPEGTTVGLETGTVAFYVARALQRIGLAPLVIDAHEVRIKAHRPTQKSDRRDAREICEGVRRGQYRSIVHVPPENITTLRDTLARRRHFVRLQTAEVNAVKRLLRAAGLGTLTRRSLRSEVAWDRLHAALSCDASMQGHVALHHVVWSSAGAQITTLESWLDTQRAPFVEAVERLQSVPGVGPIVALTAIAVFSDVDRFASAKHAASYAGLIPSTDQSGDRDAHGRITRRGSTELRAMLCEAAHHAGRPDHPLYPYFRSLCIRRGYKMAVVAVAHQLCRILWAMLRHQTSFDLHKLGVERGPFEKTTTHLYRLKKNPTVIAAPA

SEQ ID NO: 293202 - protein, 470 aa, unidentified
MVDKQRKNKASRAKRVREASSELGPTLVHRDAAGIDIGARSHFVAVPNDRDEEAVREFQSFTGDLQRLADWLAKCGVKTVAMESTGVYWIPVYELLEERGFEVLLVCASHLRNVPGRKSDVLDCRWIQRLHSFGLLRASFRPAKDFVELRAYMRQRSRLVTDAARDLQHMQKSLMEMNLQLHHVLSDISGDTGMRIVRKIVAGEHDGRQLARLRDRRCKQPVEVIAAALQGTYKNEHLFTLTQALAAHDFHVKQLADCDARIVEKLAALEAAQRDSAEPRAALPPARPRCARGHQPRFEARSPLHRICNDVDLTQIPGIAPATALNLVAEIGTDMSKWPTEKHFTSWANLAPGTKITGSKSMSGKRGPAKNRAGLVLRQAAVSVGKTQTALGGFFRRIASHRGAIIAVVATARKLGALVFRALKYGQAFVEQGLADYEKQQEARKLRYLQKQAAQRGYALTPMPTAAEVT

SEQ ID NO: 293203 - protein, 353 aa, unidentified
MTLYIGVDFHPHQQTVAWCDTETGDTETLDLRHDLEQVRKFYTSLPEPAIVGIEASARAIWFENMLFESKHELLVGNPVLIRKRATSRHKNDRRDAELILELLMRDEFPALWQRPSVSNQVLEILRLRLSLVRQRTQVYNRLQALAHNAGLPKGRMRTAAFQMVIKEVGMDEASSLSRSHYFSLLGSFNERISQLEDWLKEKAGPDEKVQLLQTQKGVGYLTALTTVHTLGDVSRFTKPTKQVVSFAGFDPLERSSAGKTKFGSVSKAGSPLLRFQLGQAANMAARLDPKLKSFYKRLAKKKPKAVAKTATARKLLVKLAIMLRDEITADEFDRRGRTVGNARFSAGSEMTAI

SEQ ID NO: 293204 - protein, 388 aa, unidentified
MDDDTDQNALKTCAGSDGRSEKRVTERMKKHTQDLIAEVPRGCSQVGITIGIDLGDVWSHYCTLNEDGEVVDRGRFRTNPSSVDKWFTDLPRVRIAMEAGTHSIWISEQLQELGHEVIVANVRELRAISHSDRKSDQVDAEKLARFARLDPKILRPIAHRTVAQQEALTLIRARNLIVRLRTAAVNAVRGLAKPCGYRLPASSTLCFAKRCMAVLPPGLVQALGPVLEQIADMTLKIKAYDRAIKKLTETEYPETMALTKVYGVGQLTALTYVLTLGSKERFQRSRDVGCYLGLRPRRSQSGERDPQLGITKAGNVYLRSLLVECANHVLGRHGKDSSLRDWGLHLASRGGKQSRNRAIVAVARKLAVLLHRIWVTQEPYVPFYAAAA

SEQ ID NO: 293205 - protein, 421 aa, unidentified
MEQYICVGADVHDRSLVLKLALGLRSPETLRFGNTPAGRERMIREFRKRSEAAGGAEVVLAYEASGLGFGLYDQLTEAGVRCHVLAPTRIARSPRQKRDKTDERDAELLLQLVRGHVWAHNDLPTVWIPDSQTRDDREVVRMRLDTMAKLTRIKTQIRCLLKRNQVRCPEEIRGRWSQEYRAWLKSLSEAQATIMVPGPGGRSALASLLRQLAALEAEIVELNQAVTALSRTPRYARTAPTLAALLGVGVLTAMVFLTEMGDLSRFRNRRQVASYLGLVPSKAESGETDDRKGHITRQGPGRVRKVLCQASWARVSHDPQAAARYRRIVAKNPKHKKIALVADMRHLAVVMWHRGQEAQQEAPPSVPARRRKAPVPHGPAPSGRSTGPHRSAAAASSDELLGPILGRRRSERRGPALVSPR

SEQ ID NO: 293206 - protein, 421 aa, unidentified
MNGKGNDYALLVGLDWADETHDLACLSEAGGKRSQLRIGSDPESIRQWMGEVGSRFPNGRVAVCVEQSRGAVAYALGAYAAVDLYPVNPVTLSNYRKAFKPSGTKDDPGDAALCLDLLVNHREALSRLEPDTELTRMLQLFCELRRKAVNRRAQVTNELISTLKQYYPQALTLIGDNRHSKMACALLMRWPRFESIAGADAQSVRKFYYVHHSRSERCIRKRLELIASGCPLTTDPAIVEPLMMHAKQLVSEIRALNKSVERYDDRIRKLFAAHPEAMLFRSFPGAGEQLAPRLLVAFGTNRERYGAADEIAAYAGVAPVIERSGKSEWVHWRWHCPKFMRQSFVEFAAKSVGQCEWAASHYHKQLQRGKEHNAAVRSLAFKWLRIIFRCWQERKPYDERRHLDALARHGSWIAGDLARPG

SEQ ID NO: 293207 - protein, 391 aa, unidentified
MIFVGIDVAKDKHDCFILNSEGTVLADVFTIANNRIGFETLLSRIQSCSQGESKIKVGLEATGHYSYNLLGFLLDSGLATYVINPLHTNLYRKSLSLRRTKTDRIDARTIAMMLMSDVDLKSYSNTAYHNEELKSLTRYRFDKVKERAKLKSSVARLVNILFPELEKLVSSLHIAVVYALLSNYPGASYIANANTEELAETLCTASKGRYTKSKTAEIQVAAGVSIGSKMPAKSMELKHTIALIRELDKEISEVESAIDKITSQMDSPIFTIPGIGRHMGAMILAEVGDFSNFASADKLLAYAGLSPSTYQSGQLQNCYAHMEKRGSRYLRYALFNAAKYVCLWCPTFSAYLEKKRSEGKHYNVAISHAAKKLVRLIFAMQRSGKAFLADY

SEQ ID NO: 293208 - protein, 367 aa, unidentified
MMGWMAPVRHLGARMVVVETHHRGEPSMDEIKTIGLDLAKHVFQLHGVDASGATVLRKRLRRSQVVAFFAGLPRCVVGLEACATAHYWARELQAVGHEVRLMPAQYVKAYVKRNKNDAADAEAICEAVRRPTMRFVAIKTAEQQAALLLHRGRERLVRQRTALVNALRAHLAEFGVIAPQGLRNVARLVAIVRDEGDARLPALARQVLGVLATQLEQLEAAVAAIEKQLMAWHRSNPVSQRLASIPGIGPIIATALAATVVEPIGFASGREFAAWLGLVPRQHSTGGKARLGGISKRGNRYLRGLLINGASANLLRSKATNADPWIIGLRRRRPSLVVAVALANKTARIAWAVMRREENYRPMAAAT

SEQ ID NO: 293209 - protein, 366 aa, unidentified
MGQFIIVGCDLHARNMLVKYAVDREKPLKRSLRNTRRGRQTLVRMLRRLSEDAGGAQVVFAYEASSLGFTLYDELTAAGITCHVLAPTKIPRSWKHRLSKTDERDAQLIFEMLRAHLLAGNELPTVWVPDRQTRDDREVTRARIDVGQKLTRVKCQIQSLLKRNGVSRPTLVPKPWSKRFLAWLDALVGGPELGPYASVWLSSLLGQLRALETEKAYLDEHVAALARRERYAAQVEAMTQWRGVGEFVAVAFAAELGDPERFSNRREVASFFGLVPQSDESGEGSDRKGHITRQGSGRVRRLLCQAAHAWIRWNPLVRSRYERLVARNPKKKKIAVVAMMRRLCIRLWHAACDARRAAAACREGEE

SEQ ID NO: 293210 - protein, 329 aa, unidentified
MNFKNVIGIDISKNTIDVCNHLDQKNAQFSNSKKGLQNFYLWVKSSKNEIEDVLFVYEHTGMYSHLITEFLTDKECHYHIAPALDIKRSMGITRGKDDVIDSKRIALYGYRLKDEITPTKSYSKSITQLKSLMSLKAKLIKQRAAYKGTLSEQKNIYKTKDFKIIFEVQEKMIRYITKQIKTLEYQILEVIKSQEALKQSLKLILSIKGVGMQMVTTMIIATENFTKFKNWRKFASYCGVAPFPYQSGTSVKGRNKVSQLANKKIKVLIHMCSMVAIQHNPEMKKYYERRIEIGKNKMSTINIIRNKLIARIFAVIDRQTPYVDTMKFA

SEQ ID NO: 293211 - protein, 370 aa, unidentified
MGEYSQAFVAFDTSKTKHAVAIAESGRRGEVRFLGDIASSPARVERLIRKLAERYDKLYFCYEAGPTGYGLYRQIRELGHDCTVVAPSLIPKRPGERIKTNRRDAVSLARLLRAGELTAVWVPDATHEAVRDLVRARAAAAQDLRRKRQQLLSFLLRHGRIYDGRQHWTLAHRRWLADQKFAHPAQQIVFQDGVDAIADAVARLQRLEAQLLTIVPNWSMAPVVEAYQAMRGASFLVAVTVAAELGDLRRFDNPRQLMAFLGLVPRERSTGDVVRRAGLTLAGNRHARRLLVEAAWSYRHPARVSEALRARLEGLPKPVRDIAWKAQIRLCTRYRRLSATGKKLPIVIAAIAREMAAFLWAIARQIAPAA

SEQ ID NO: 293212 - protein, 403 aa, unidentified
MNSVGIDISKGRSTVAVMRPFGEVVISPFEVRHTDSELSELARQLKSLDGETRVVMEATGNYHTPVAKLLHDAGLYVSVVNAKLVHGYGNNDLRRVKTDKKDAVKLANYGLDRWLTLPRYIPEEDTRLLLKNCYRQYRQYSKVQTVLKNNLISLLDTVFPNANRLFSSPIRGDGSEKWVDFVAEFWHCRCVSEKSERTFTSKYLRWCRKHGYSFREAKAHTIYAEASGHIGVMPKSETTKLLVEQAVAQLRATSTALAALKHEMQALTSMLPEYPVVMDMFGVGPTLGPQLIAEIGDVRRFYSKKALVAYAGLDAPPNDSGDVTGRHKSMSKIGASSLRRTLFLVMSVYLQTAPLDEPVYQFMDRKRAEGKPYRVYMMASANKFLRIYYATVKAYLESLEHTA

SEQ ID NO: 293213 - protein, 344 aa, unidentified
MTYYAGLDVSLRSTNICVVDEQGELIAEGKTDAEVADIVAFLDEFDVEISEVGLEAGTLTQYLTYGLQFAGYKVVCMEARQVKSALSAMRNKTDKHDARGIAQLLRSGWYSRVHIKSMQSHRVRALLTSRRAVLAKCIDLENEVRGIFKVFGIKLPPRLGHGSFDPKVRPLIEADDMLSQSLLPMLDARLVLYRTFLELNNRTRHLANDDPICQRLMTAPGVGFITALTFKAGVDDPTRFKRSRTVAAHFGLTPRRFQSGELDLEGHISRCGDADVRSTLYTAANSMLTRSSKWSPLKAWGMRLAKTRGHRRAVIAVARKLAVILHRMWIDDTRFRWSTEAARS

SEQ ID NO: 293214 - protein, 349 aa, unidentified
MLADELDYVVGVDTHRDEHVLAVLAAATGAVVARKVLRASASGYREALGFAEQQAPGARAWAIEGAGHYGAGLARFLADRSETVLECSRAPRAERRLAGKDDALDAARTARAALASETLALPRSGQRREALRLLLITRRSAVDVRREALVQLRSVIVTAPDRLREELRGLPVGRLLERCRRLRRSSSASADELATRLVLRSLARRIEAATLEAADLEQEILAHVRALAPQLLDEPGVGPIIAAQLIVAWSHRGRVRSEAAFARLAGVAPVPASSGQTQRHRLSRGGDRQLNRALHTVVLHRRQHDPATKAYIARRIADGKSRRDATRLLKRYLARHLYRLLQNQEPLMT

SEQ ID NO: 293215 - protein, 320 aa, unidentified
MQTPSAVLNIGADVGKDEIVVACAEESFSPRKITNRRAEIMAWLKTLPPGSRLGMESTGSYHELLAETAHQLDFVVYVLNPKDTRHYAKAMGLRGKTDRVDARLIARLIDREHEKLHPWIMPTAEQRQIERMIKRRAKLSAIRASLSQSLKGLAGFATELKALRRRLDKLIARIDVRIKALIEANADRKQDYARLRKIPGVGSVVGGSLVNTLERVPFKKGDAFVAFTGLDPRPDESGHHIGRRRLSKRGPAELRRLLYLGAMAAAKTKTWKPLYERQRAKGLSTTEALVILARHIARTAWSIYTHKTDFDPQRLTPGLT

SEQ ID NO: 293216 - protein, 351 aa, unidentified
MDHYAGIDVSLEYSSVCVVDASGKIIREGKIVSEPEALIAWFAAFGHALTRIGLEAGPLSQWLYARLKEAGLAVELLETRHVRDAFKSMPVKSDRNDARGIAQLMRLGWFRPVHCKSLAAQEVRALLTARKQVQSKLLDIENSLRGMLRGFGLKVGKTTPSGFAKRIRELVAGHPTLQTIATTLLSVRQVLSQEFNALDKLVRATACASGKAKLLMSTPSVGPIIALTYAAAVDDPTRFKSSKRVGAHFGLTPKKYQSGETDRSGRISKIGDAAVREALYQAAHIMLTKPLAGCSQLKGWAMRIARRAGMRKAKVALARKLAVIMHRMLADGKVFNNAKAEVKTMAKALAA

SEQ ID NO: 293217 - protein, 336 aa, unidentified
MFQLGIDVSKKTLDLCLLREGVKGRVKTRKLKNDVDAACSVIDWLRRQRCEPADVHIIMEATGVYHESLAYGLHTAGARVSLANPHRSREFARGMGIMTKNDSVDAWVLACYGALKEPAPWEPPPENVRYLSALLRHRDALVTDCTREKNRLEKCRATDTPDAIIESIGNVLQSLSAETDHLDNLIREHLEQYPELKKDFDLLTSIKSVGFQLGLNMLVILRGHRFDTAEQAAAFLGVVPVEKFSDTSVRGKPRMSKIGPPEIRAKLYLAALCGLRFNPVMKAMYERLCLSGKAKMCAIGALMRKLVHWCYGVLKTQKPFDAEYLSSDARSACQAA

SEQ ID NO: 293218 - protein, 351 aa, unidentified
MERYLGADVHAASVTFCVLDASGKQVRRDVVETNGKALVGYLQQLSGTLHLCLEEGEWSQWLYEILSPHVAELVVYRGEWKPGQKSDAIDAHGLAEKLRTGRIDRPVYKDGRLFTALRDRARTYTMVTRDVARVKSRLKSFFRSRGLACTGEAVFQPEARAKRARVLPPATREAVELLGRELAQLAALKAEAEAGMLRESHRHRIARILETAPGLGPIRVAQLLPIVVTPHRFRTKRQFWAYCGFAVVMRSSSDWVRDQDRWVRTRVAQTRGLNFNHNHLLKAIFKGAATTVIAHSGANPLREGYDRQLENGTKPNLAKLTVARNISAITLAMWKKEAPYDPRRVHGPARG

SEQ ID NO: 293219 - protein, 502 aa, unidentified
MSSQSKIPDRGNESVQERLQHLESHHADRVLAFRQRLAQVGYDRVLILLLDIGKNVHWATALTAAGQELVQPFKLPTTRTGLDRFLALADPLIGSSRFDLVLLGHEPTGVYHEPWARALMDHYAAHLAAQAAPQMDYIFFNPYQVKLARQQTHLRHRKNDPRDLAAMFDLMTRGLGNPAFLPTGVEMLIRNEVGFVRAQSRLLDRLERQLLQQFDRLWPGAVVNVAKFSRAHPGVDKPTPIIQTHPFQRQRIRVLLQHCPNPYHLRALSDQEILDLYRRHAGRAGPALLSMLRTWADNTVLLPEDVCAALAEQVQRLFAQYAYTETMIEDAHGRLESLVPLTPARHISAMPGLSDNDAARYLAILGSASRFLRAAEVWSLSGFDPLTDGSGDTPDRIGHISKRGDPASRNTLYQMGYRAALHYAPVSLTFLDAYDRGKSEIEATIHAAHRVNRICFHLVHNDEPFQSRSTPQMEAEKKRRWQAFKAAKKRRGNRRKRGKRRH

SEQ ID NO: 293220 - protein, 347 aa, unidentified
MGIVVALDVHRNQITYKLLDRDTGEVRRGRVAPAARVDVRTWLAQFAGHEVEFALEGTTGWRFVVEEIERAGYRAHLADPAETAAKRGRKRRAKTDNADCDLQLRLLLAGELPESWIPPAHILELRARVRMRKTLIDQRTAWLQRVQAQLFQQGVPAGLRLRSEVGRQALAAADLSPAGRELVELGLRMIDALDQELVPLTRELGVFARRQAGCRALIASLYGVGPVSATAILAELGDARRFSSSDDAVRHAGLDVTVHQSDSKRAPGHLSHQGPEVLRWALFEAALSGARVGSPDHGYYLQVAERIDHTRACLSLARKLCRRAYHVLRELGDEALAPVEEAIAAAA

SEQ ID NO: 293221 - protein, 279 aa, unidentified
MDHYAGIDVSLEQSSVCVVDAGGKINREAKVASEPQAMIEWFSSLGFGVARIGLEAGPLSQWLFAAMKEAGLAVELLETRHVRNAFKTMPVKTDRKDARGIAELIRLGWFRPVHCKSMAAQETRAMLTTRSLVKSKLRDIEMSLRGILRGFGLKVGEVTAVRFGARINELVAGHPTLETIAAALLAVHEVLLRQLKGIEKRVLIMGRNDARTRLLMSTPGVGAVISLTYVSAIDDPARFKSSKDVGAHYGMTPKKYQSGETDITGRISKIGDKSVRTAL

SEQ ID NO: 293222 - protein, 320 aa, unidentified
MSVTSVVVGIDVAKAHVDVSVLGVKLDVQRFVNDADGHSALVAALQPFAVSLVVMEATGGYEAAIACALQAAGLSVAVVNPRQARDFAKSMGQLAKTDAVDARLLAEFASVLVRREDLASFIRPLPDDKQQTLAALVTRRRQLLTMLGAERQRLQLAIAKVRPSIEAMIKAIRAQLDDVEAQMVGHVKEHYEELDRLLRSASGIGPVASATLIAELPELGRLNRREIAALVGVAPMANDSGKTRGRRRIQGGRFEIRRVLYMAALVAAKHNPPIKAFYQRLLAAGKLPKVALVACMRKLLTTLNAMVKTNTPWDAEFDHA

SEQ ID NO: 293223 - protein, 406 aa, unidentified
MIFVGDDWSETHHDVHVMDGAGTRLASRRFPEGLDGIRGFHQLVAEYAEDPAEVVVGIETDRGLWVHALTAADYEVYAINPLAVSRYRDRHNLAGAKSDPGDAKVLADLVRTDRHNHRPIAGDSPEVEGVKVLARAHQNLIWARARHTNQLRNALREYYPSALAAFDDLSDRDTLALLERAPSPEVGARLSVTQVRAALKRGGRQRNLDRRAQQIQAALRSDMLTAPDPVAAAFAVATKATVGVLIELNRQIAELEATLADRFEQHPDAVIYLSMPGLGDVLGARALGEFGDDPNRYADAKSRKNYAGTSPITVASGNKKAVLARHVRNQRLYDAIDQWAFCSLTQSPGCRQFYDQRRNLGDLHHQALRALGNRLVGILHGYLKHHTLYNEHTAWAHRQPRNEQAA

SEQ ID NO: 293224 - protein, 342 aa, unidentified
MSAKFNSEIAVIGIDIGKNSFHVVGLDRRGAIVLRQKWSRGQVEVRLSNLPPCLIGMEACVGAHHLSRKLTSLGHDARLMPAKYVRPYSRGQKNDFRDAEAIAEAVQRPTMKFVATKTAEQLDLQALHRVRERLVSQRTAIINQIRAFLLERGVAVRQGLRFLRAELPRILARPCDVLSPRMVRVLEDLAADWRRLDERIERLSSEIEALARRDAGCERLMSVPGVGPIISSAMVAAIGAGEAFSKGRDFAAWLGLVPKQISTGDRTILGKISKRGNRYLRPASTENCLSSASKSARPRLEDGCRGGPGSLPDLAELPAQPPARHCGDRARPCDAIGPRLPA

SEQ ID NO: 293225 - protein, 428 aa, unidentified
MSKAAKPRRSAGRKSSTRVRLDDLTDVHDRCAGIDVHKQSVTVCISTGDGQGELREYQTTTGALRELKEWFQQMGVTHVVMESTGIYWQPVWQILEDDSYQLLLANARQVRNMPGRKTDGEDAIWLATLLRKGLIRGSFIPPAEVRALRDLCRTRANLVGDRASVSQRIEKILEQANIKLDTVVTDIMGVSSRRMIEELLDGETDRARIAELALGAMRAKIPQLQEALDGYFLPHQRTMLRVQLSQFDALSGAIAEIEAAIETYARPFAPQMEQLDQIPGIDRIAAATIIGEIGVDMNCFPTPEQFCRWATMAPGNNESAGKKKSGSIGKGNTWLRRIMTQTAWAATRTKNCYFAAQFKRLLRRGPQRALVAVAHSLLGVIWHMLTRHTAYRELGGDYFQRRNQQHLVRSHVRKLENLGFRVQLQPVG

SEQ ID NO: 293226 - protein, 346 aa, unidentified
MQIASIGIDLGKTNFHLVALGERSKVLVRKKFSRTQLLAYTANLPGSLIGLEACAGSHFVGAALREQGHQVRLIPAQFVKPYRKSNKNDFLDAEAIAEAVTKQNMRFAQLKTQEQLDWQALHRVGDRLVQRRTALINEIRGFLLERGITFAAQPIHLRKSLPRVIEDAEQNLSPRLRWLLDRMWQEWKQIETEVEAISEEIERISKDDARCRQLRQIPGFGPMVSTATVAAIGNGSAFRRGRDFAAWVGVVPRQHSTGGKQKLYGISKRGNVYLRRMLIHGARSVLFRVKYDTGGFGQWIRRLAQRAPRNKVVVAIANKLARIARAVLSSGRDYRHQPLQPLATAA

SEQ ID NO: 293227 - protein, 350 aa, unidentified
MNVRSNTKTLTLGVDTHLEKHVAVLVNNIGQVVDTKEVAVTTLGYSALYKWCSSFGTLKQAGIEGTGTYGAGLCKYLQNKGVDVYEVNRPNRARRRLRGKSDPTDAENAARSVLAKESTAIPKSHDGVVEALRFLVVARKSSVKSKTQTINQIRALLVTAPEEIRQKCYVPRAYQCIVGCEELEAQPDNLLESSLISMLQLLALRWRGLAAELRTIDKQLKKLISSRAPTLIEQYGVGTYVAATLLVAAGDNPERLKKESSFAALCGVSPMEASSGKTQRHRLNRGGVRDANNALWTVTLIRMRNDARTKIYVEKRVTEGKSNKEIQRCLKRYIARELFPIIVSDLSCLT

SEQ ID NO: 293228 - protein, 322 aa, unidentified
MAQLSFGGIDVSKDRLDVMILPEERCSSVPNDAAGWADLVERLSGSSIAAIGIEASGGYERGVMRALLAAGMPVRQVNPFKLRQFARASGVLAKNDPLDARMIASFVTIMPTRPAQRQTPAAERLAEMLAIRRQLSTEKVAAENASRLLEDAMLQRLSRRRIVRLAADIDLLDKRMVEIVATDDALVHRYRLLTSMPGVGAVLACTLIALLPELGRMSRKQVAALVGVAPYAFESGTLKGRRCIWGGRAHVRQVLYMAAMSASNWNPVLKAFHDRLTAAGKLPKVVIVAVMRKMITMLNAMVRDDVVWADRLSGRHVLPTAR

SEQ ID NO: 293229 - protein, 410 aa, unidentified
MEVLHAHCAGLDVHKDSVVACVRHMADSKVTTVVKTFKTTTQELMSLSEWLSAEGATYIAMEATGVYWKPVWHILSDGEFELVLANAAHVKNVPGRKTDVNDATWLADLMAHGLIRASFVPDEPTQQMRDLLRTRKQMVRERSSHIQRIQKTLEDANIKLDSVVTDILGLSGRRIIEALIAGQTMPQALASLAHRRIHASVDELEASLRGRVTKHHRFLLKLHLDQIDAFDAAITCIDEEVSANVEPFRAAIELLSSIPGIGSLAAQVLVSEIGIDMSRFETAGHLLSWAGLCPRNDESAGKRRSAKMKKGAPWLKTTLIQCAWAASRKKNSYLQAQYLRLRSRRGSKKAICAVAASMLTAAYHMLKNGTFYEDIGADHFDRRAQGKQVLRLVNRLQNLGYNVEITPKAA

SEQ ID NO: 293230 - protein, 370 aa, unidentified
MKKRITFVGLDTHKNSIEVALADEGANSEVRLYGSIGGDLDSLDKMIRKLRQPGAELRFVYEAGPCGYEIYRHLRAQGLHCDVVAPSMVPRRSGDRIKTDRRDACNLTRLYRAGELTAVYVPHEDDEAMRDLVRGRQDAINAQRKARQQLGGFLLRHGVRYPGKCLWGLAHGRWLAGIKMPHPAQQIMMQEYIHTVEECTQRVLRLNEQIQQLLPDWRMHPLVAALQALRGVAPVVAATVVVEIGPMGRFKNPRQLMAYLGLVPSERSSGGSVRRGAITKTGNGHARRALIEAAHSYRHPARISRTILKRQETLAEPIRQIAWKAQLRLCARFRRLIARGKSRNRAVTAIARELSGFMWAIAKQVPVPQG

SEQ ID NO: 293231 - protein, 320 aa, unidentified
MEANLGIDVAKAKFVVALLTADGKVRHKSCANTPAGFADLAAWLQRQRVSPVHACLEATGTYGDALATWLHDQGHVVSVVNPAIIHAYARTQLARSKTDRIDAELIARFTATQHPPAWTPPAPEIRALQALVRRLDALHGMRTQELNRLAAGVTVAEVRASIDVVVTQLDAQIAHVQQLIRDHLDRHPGLRAQRELLTTIPGIGEATAAVLIAELFDKPYTSARQAAAFAGLVPRIVESGTLRGRSRLSKIGPGRLRKALYFPAVAALRWNPTIRAVRTRLHAAGKPPMVIIGAAMRKLIHLAYGVLKSGRAYEARCAHP

SEQ ID NO: 293232 - protein, 427 aa, unidentified
MIHTTTTFAATIGLDWADQKHDLWIRPADGSKAQHLHLEQTPDALHEWVAKLRERFGNRPVALGIETSRGPVISAFLAYDFLVIFPVNPKALKDYRAAFSVSGAKDDRTDAQLLEQFIRLHRDKLQALEPDTELTRQLAGLVQSRRHLVDERTRFVNQLHSTLKTYYPLAETLLDGQMNKPMAADFLARWPDLESLQKAEVQTLRAFFYKHHSRSAKKMEERLSAVQKAKALTTDPAIIVPAGRLVGALAAMLRPLHRAVAQLDQEIEQAMDQHPDAALFRSFPGAGPALAPRLLVAFGTNRDRFQSAQEVAQFYGLAPVVIQSGNSKTTHMRHRCPKFGRQTFHENAGCAFKQEPWARVYYDQQKKRHDDKHHQACRALAYKLIRIYFACWKHRKTYEPDRYLRALEKHGSPLHAKLQTQTVLRCE

SEQ ID NO: 293233 - protein, 519 aa, unidentified
MHQTKYRGIITEAGLLTTPPWEPAFRLAKPLRKSVSPFGGDLCFGWLGGLRLYLYEPLGCVSAFWNWMPAGKDKTMHYQKVLRMLQSIPYLSVGLDVGADFTWMSIMLPNGTLTGKPFKILHSDPHSRDLGVAKIKEAQETYSLESRCFLESTGIYHIPLLCFLRDKGFDCSVINPIITKNSTNMNIRKLHNDKFDSKKAAKVGLDASLKTSIVPDDAVIDLRNLVRDYYYFKDLQSAVVLKLHAELKVSFPAYLNVFSKITTQTSLKLLEAYPLAADMLAAPKDELVESIRQTARFGEKYAVSKYEAICAAAKDAAVFGRALPSNALRIRLYIKTYREYQEHLGSILKELHKAVEKLEGTPVYDRILLLQSLRGVGFLSSVVLIAEMGSFDLFPSPKKLYAYFGLDPAVKQSGKFNADKVHMSKRGSSLARRILHMVALNNLKVDKGTKTPVNPVIHSYYADKCKNKKKNVAVGAVMHKICNIIFAMLRDNKPFEIITPQEHCERYLAAHPDKVRNAA

SEQ ID NO: 293234 - protein, 394 aa, unidentified
MIYAGVDIAKTDHVIGAVDERGAEMRPPMPFENTGAGLERAVAWLEGLAGSPSDVVVGMEATGHYWMARYSFLVARGHSVAVISPMQVKAARKLKGLDKVKNDRVDAGLIAEALRIGQCDETRLATDEVASPRSLSRCLQSLRGMVAELKTQCVCPMDAHFPEYAGVFSDMFGAGSRAVLSKSPPPFELARRRADSLARDIAEASRRGGKSSGYAAKIKAAAKSSIGVRLGQEAASFRVKSLIRQIEFADSECAGVEARLRSLLDEVEPLVLTMPGVSYATGAQMVSEIGDVSRFRNAPALVSYAGLNSSVSQSGQFDSGGGPITKHGSPYLRRALWLAANRARRHDPGLRAFYDGKRAEGKPHRVAVTAVARKLCHIVFAVMRDRVPYDPGRE

SEQ ID NO: 293235 - protein, 400 aa, unidentified
MKIIGIDVSQGESHATLITEEAEKVAFKFKHNKSGFQILNSYIKSNTIIIFETTGVYSAQLTAYLKSKKVKFYELNPLEARLRMASLRRNKTDKNDSFKLALLGATQLTEIKNHCNKQSALPYDSLRILSLRYKQLIKCRTRILNFLRSSLELTFPELNQIFKKAYAVLALQIFRMYCHPDFLAGLTLKEMTNRVYQFVSRRIHKDVIQSYCAQVWLAAKDSYPAVPADSLEIEIISEYCDEIESYNKEIAYIQSKLIKTAVGLDDFKVISSIPGAGQLNSALLLGFTGDIARFDNYKQLNAFLGLDLNRYQSGKYGKGDTINRRGSSQGRAVETDMIRSMLRNQGKIQNHLVDYYYKLKKPPFNKHDKVALIACANHLNRTIINLVHTHQLYNYSKAIH

SEQ ID NO: 293236 - protein, 330 aa, unidentified
MTMTPTQQTYNHVVAFEVSKEALVVHTLPTDEQCTIANKPQSVRRLLKSQLKHNRKQKLGPILIVCEATGGYERHVLDAAIDLGLPVHRAHGARVRFFARYCGLIAKTDPIDARVLAHYGVKTDKLRLYVPPPPETAALRALHGRRTEIQQMMIAETSRLDQAHHKSIVKSLKAHIAQLKSALEAIEDEIAQLVRDNASLKKKVELMRTVIGIGPVSAMILLAYLPDIGSLTKGEVARLSGLAPINNDSGKKRGARHVEAGRTAIRRALYMAAVVAMRTNPVIKRFADRLRGKGYPFKYVAVAVMRKLVVILNAVLRDGQPWKGAQAACA

SEQ ID NO: 293237 - protein, 377 aa, unidentified
MDQVVASTSRVDNLFCALELSKNTWLLGIQFPDREQPSVYPIKGGDSEGLMAKLRMASDRCAKLSGKKPTIQLCYEAGYDAFWLARFLKAHGIECLVIDSASMQVNRRSRRAKTDRIDLGKLLRALLAWCRGERHVWSVVRIPSIDEEDLRRSHRERSRLISERTAHVNRIKGLLFTQGIRGINVKTDYKTLRVDKLLTGEGRALPPRLAQEIAREIERLALVQQQIAAAEEERDKDVTCKETEKKRLQLLALKGIGPTGSAVMAREVYYRQFSNRRQVAGFLGLASSPYASGELERCQGISRAGSGPVRATIIQISWLWLKHQPKSAITQWFVQRTEGQSARIKRIMIVAVARKLAIALWRYIELGLVPHGAILTR

SEQ ID NO: 293238 - protein, 340 aa, unidentified
MEITTIGLDLAKSVFQLHAVDADGAVVWRKKVRRGALLETLAQVPACLVGMEACATAHHWAREISALGHEVRLMPPVYVKAYLRRQKNDAADAEAICEAVRRPTMRFVPAKGAERQAVLVLHRSRELLARQRTMLINAIRGHCAEFGLVAAQGVSGSRDLVERIRQADSAVLPDMAKDAMVLLVEQLHALVRQIQALNRRLLVWHRQDQASQRLATIPGVGVISATALAASVTDPSQFRSGREFSASLGLVPRQNSSGGKDRLGRISKMGDRYLRKLLVVGATAVVRRARTADTTAANWVRSLLERKPTRLVTVAMANKNARIVWAVLARGETYRSPAAV

SEQ ID NO: 293239 - protein, 341 aa, unidentified
MEIDILGIDLAKQVFQLHGADHRGRPVHRAKVSRGSLLEAVRTLKPGMVVMEACSTAHHWARRFQSLGIEVRLISPQYVSPFVKTNKNDRNDAEAIVEAASRPAMRFVTVKSVEQQDIQAAHRMRAILLRHRTAMINQMRGLLGERGLTISRSPEAFKRAIPELLSKSADELTSFCQTLLTEMLQHLQAIEARVHLIEASIQSFMKRSALCKKIAEVPGIGPITATAMVAAVGDAKQFRNGRHLAAWLGLVPRQYSSGGKPRLHGISRRGDTYLRTLLIHGARAVLRYATRKADPQSVWLQQLIARRGHNCAAVALANKNARVIQALLSGDSNYMTRRAAA

SEQ ID NO: 293240 - protein, 429 aa, unidentified
MKNSVANKLKQVPVGYLVIGIDPHKKKHAAVIMTQDFTTHSKFKFNNSKEGFEMALERIRMEMVRTVSRGAIFAIETGGHYWRNLAYFLDERGIPFRFINQFTLKRRREGKDLNRRKNDYRDSEVAAQLLCTGEFTDTKLSYGVYAELRAAHNAYRRLVKERTRIINLVKGLLDGLFPEFTQVFKDPCGLTALSVLSICPAPEGIAAMTEDEFVNTIRTGHRGLLMRKKLRALHYAAQTSIGVKADAQSVSYELSFLVEKLQLIKRHICRIDETLVRLVNETEEGKYLLSIIGLNYISVAGILAELGSFRSYKSAKQLIKMAGSNPTESESAGKRSSHTPMSKKGRPVLRYCAWIAVIPMLRFNPDFRAWAKKLRERPVHANPLSGREIVGAALNRLLRLAFVLVKNQTFYQVPEIESMPEPELLPVAN

SEQ ID NO: 293241 - protein, 350 aa, unidentified
MRKHTKNAEKYPIETIGIDLGDKMSRYCIVNRDGEVVEEGSFRNQVSSIEAHFGCDPRRIALEAGAQSAWISRELKRLGHEVIVANARELKWITSSDNKTDSVDARKLALLARADVHLLAPVEHRTAEQQAELAVIRARDAMMRARTLLINSARGIAKGFGLRLPKSITTTFGHRALADLPNGLRPALGGLLEQIDTLSRQLGNSDQQIGELAKRHPEVDRLISVPGVGKLTAVTFVLTLGRPERFAHSRDVAGFLGLRPKQRQSGARDPQLGISKSGDPYLRKLFVQCAHHVLGHWGPDSALRRWGLAKTDGGKKATLRAIVAVARKLSVLLHHLWVTGEFYKPFPEMV

SEQ ID NO: 293242 - protein, 334 aa, unidentified
MDNIKAIGIDVSKDTLDVCITKGIEKSDICKTYKIDNNARGISELGNKLKRLGIDNNIPIALESTGICHILACMLLSKKGYKVGVINPLNTKYFTSANIRKQKTDKVDAKALADMAILKPEILKTFVPDHAQVMLKKKISTLNKMLKGYQSIRASIKTYQDLERQLQVKESVAIYNLKKSAKVMKKIMDDLEQEILEEGRECTGFEKISSIKGISDKTTVKILAQIEGKKFDRKESLVAFAGIDISVRESGTSVRGKGRITKRGNPNLRNSLYQAAWGLMMHNTEFKQIYEYHRKNGKHYYTCLTILARKLLHIIYGMLKTNTTYKPELVHIPV

SEQ ID NO: 293243 - protein, 419 aa, unidentified
MAFKILRKNCCGLDVHKTWIFACIGITDANGRTEYKQARFSSFSNGLRELADWLAKYACSDVCMESTGKYWIPVFNVLEKTCWVTLAHPKYTKPQKGNKTDRKDAKWICDLYMCGMVKPSFIPPPDIRQLRDLMRYRTKLTNMLTGEKNRAQNCLTVSNLKLDDVFSDVFGKSSRSIIQHILDHPGERFDVTPFIDRRCKHSVEAVQAAVDGAVSREQAAKLKECLQHIDQLNEHRRNIETEILRLAGPYPYQLELLRTVPGFSAAPLTAVALISEIGVDMSVFPSAKHLVSWAGCCPRNDQSNKKVKSTRISRAGCYLKPLLVQVANAVIKSDKYPECRERYRRIKARRGHKKAIIAVCRMLLTAIWNVLSKLEPYSSKGYLEDKLTEHSVVISKAQGLELLRKRGYIFKDELVTESG

SEQ ID NO: 293244 - protein, 406 aa, unidentified
MRVFVGIDRGGGSHAVCVLDAEGTVLDRFAAAHDREGLRALVARLAKRGAPGETPVAIERPSGLVVDALVRAGFVVAPVHPNVAKACRPRHRAVSAKSDPGDAYILADILRTDGHRLRPLEPRSDATRALRALVRGRDDLVAARVALANQLAALLESFWPGAAAIFADVASPIALAFLDRYPTPEAAARLGPKRLAGFLAQHRYCGRRSPEALLGRLRAAPDGCAGEAESEAKGELVRALARTLRTLVAEIAELTGRIEPQVADLPDGAIVVPLPRAGKVCAAQILAELGDVRERFQTQAQLAAGAGVAPVTYESGKTRGVGWRWACNKRLRAAIACLADNSRHASPWAADVYARARARGCDHPHAVRVLARAWVRVLWRAWTDRQPYDPAKHRGARPFLAPTPTG

SEQ ID NO: 293245 - protein, 339 aa, unidentified
MNRIVVGVDIAKRVFQLHWVEPETGEIVALQLKREKFLEHFANRSTCLIGMEACGGSQHWARSLQKLGHEVKLLSGRMVKPFVVGNKNDAADARGIWTAVQQPKIKAVAIKSEEQQAVLALHRMREQLVKFRTAQINGLRGLLTEYGEVMPQGRAGINRDIPGALGRLSDRLPAMVIETLREQYARLGELDEQISQIERRLRQWQREDSATQRIAAIPGVGLLSATAAVATMGDAKAFKSGREFAAWLGLVPRQTGTGGRVRLLGISKRGDKYLRTLLIHGARAVLTHSKSPPEWVTELVKRRPKNVAVVAMANKMARTIWALTAHERAYQSGYVSRSI

SEQ ID NO: 293246 - protein, 348 aa, unidentified
MNQRYEKSRQYVGIDLHRRRSVIVRLDGEGEVLECVQIENSVPALIEEVGKAGVGAPVAIEATYGWYWAVDALRAAGFAVTLAHPRGVASMQGRRAKTDKLDAKELADLLRLDRLATAWIAPPEIRELRELVRYRHRLVGERSATKASIHAVLGKCGVIPEIADIFGPVGTKMLDALVLPEPYGSRVASQRRIMAVLSAEIAGVEVETARRLKDNAEYRALLTIGGVGPVMAAIFVAEIGDVHRFATADQLACWAGLTTRVDSSDRHTRYGHVSKQGSRLLRWAAVEGCQRAREPYLAGKRREIIERRGRRAQHIATVATARHMIKVVYYTMRDGHARCLDAPTPVAS

SEQ ID NO: 293247 - protein, 370 aa, unidentified
MKQRLLYVGLDVHKKTTDVAIASGRSNGKVRSYGKIPSTLDALNKLLKKLQDGDKELRFVYEAGPCGYQIYRYLDAKGIYCSVVAPSMIPRRSGDRIKTDRRDAINLVRLFRAGELTSIYVPTVEDEAIRDLVRCRDDMKRFERKARQRLLSFLLRHGYQYNGKRNWTKGFYTWLATVRFSYPAQQVTLQEYIDVTNECSERIKRITQQIQVHVEEWSRAPFVKAYQALRGVSIIVAATVVAEIGDMNRFQNPKHLMAYLGLIPSEHSSGKTVRRGPITKTGNSHVRRVLIEAAWTYKMQARVSNILLNRQKGLPKSVCDISWKAQTRLCARYRRLYARGKTKQTVVTAIARELSAFIWAIDKEIQLVVL

SEQ ID NO: 293248 - protein, 455 aa, unidentified
MPKRTTGGGPDLKPVNLGAAAIDIGSKMHMAAVNPACTDTPVRAFGTFTQDLHELADWFKACGVTSVAMESTGVYWIPVYEILEQRGFAVILVNARYAKNVPGRKTDVSDAAWLRQLHSNGLLRGSFRPDAEIATLRAYLRQRERLVEYAAAHIQHMQKALMEMNLQLHHVVSDITGATGMRIIRAIVAGERNPDVLATYRDVRCHSSIETIRAALVGNDRHEHVFALTQSLELYDAYQAKMLDCDRKLEVLISALNTKGAGPVGKLAKPRVKTKQVNTPTFDVRTALYGVLGVDLTEIHGLGPSLALKLIGECGTDLRAWPSAKHFTSWLCLAPGNKISGGKVLSSRTRRSSSRAAALLRLAATTVGRSETALGAFYRRLSSRAGKSKAVTATARKIAVLFYNTLRHGISYRDPGADQYEQQYRSRVLANLQRRAKSLGFVLQAIPGDANPAVS

SEQ ID NO: 293249 - protein, 402 aa, unidentified
MAVKAGIDVVKEFHWVAIVAAETGKVLLSRRVDNDPDSIDALIAQLRQAEAEHGELTAAIDLMGGVASLLTAMLLEAGVRLVHVPGLVVNRARRASKGGEAKSDPRDAATIADQLRLRDDWRIVTAEDDITLDLRMLVSRRRELVIDQTRRLNRLRETLAGFFPGLERVVDVTNLSDLRLLVRFVTPEEVREAGRDGLIDHMLAAGVRRSYAEPLAGKAIAAAQAQHVIVPGQKRMAEFAREFATDAIAARHRIGELENQIADGLDRHPDAALVRSLPGMGATLTAEFLAEAGNLDRFASADQLASAAGLAPVLQQSGKMNYLRRATAGSKHLKFIFYQSAFCAIRTDPLSKAFYQRKRAEGKRHHQALIALARRRINVLYALLRTRQPYQADYRHTTATAA

SEQ ID NO: 293250 - protein, 336 aa, unidentified
MSNVTTVGIDLAKNVFSVHGVDANGREVLRRTVRRDQLAALVAQWPRCLIGMEACSGAHEWARRFSALGHTVRLMAPKFVAPYRKSGKNDGNDAEAICEAVSRPSMRFVPVKSVEQQSVLALHRVRQGFVEERTATLNRIRGLLAEFGHIIPQRAIEVRRRVPSLLEQLPAPAARAITDLLQHVGRLEQHIIDYERELVRMGRGDDRAERVQALYGVGPLSASAIIASVGNAHEFANGRQFAAWLGLVPRQYSTGGKTRLGHITRRGDPYLRTLLILGARAVLQAAERRQDRLSRWALAVRERRGYHRACVAVAAKNARIVWALLANNAELRLADA

SEQ ID NO: 293251 - protein, 463 aa, unidentified
MDLMTLGIDVACRAAHQASLADSGGRFAWSGRRFRTTAADLERLWESIPAGAVLTVVMEPTRNAWVPLAAWFRRHGATVIMVPPEQSADLRDYYSKHAKSDRLDSRMLARLPLLHPDGLRPAEGLGPADPLRRATKLRASLVKRRSVIVARLDSYLELLGPQWHAAFGGDLALNTPLRFLAAGYADPHALRRLGKARLTRFIWRYSHGAWGEEHATRLLAAATETLQLWDGELSYPDLAEDIATEARLALALCTEIRDLDTKLAALLHQADPAAIMTSVPGVGIINGAQILARLGDPARFQSLAGARSFSGLVPSLNASGVNGRHGPPTKAGDAPLREALFMAADQARRIDPALAARYHRLMVTCGKHHNSALCHISTALLTRIIACWRAGAPYQIRDTDGTPLTTAQGRAIVAQRYRVSDELRAQRRTSHTKTGTSRRHQESPGAPTPARPHTTLRPPARNP

SEQ ID NO: 293252 - protein, 331 aa, unidentified
METDQYIGVDLHKASLQVCAITPRGERLWEARFARTAEGMAALVTRCTPGSAVAVEATTPTWHFVDQITAHVATVCVVDTRKTKLKAGYAAKTDRLDARRLADALRRESVVSIYVPPPAIREQRELARHRLMLTQMRTRVLQRMRALLLRQGLGDPPTKRLRSAAGQAWLDRLVLPPQAHRALATLRQIERDLCAQLRPVEADIAREAIADPIVRQLQTVHGIGPVLGLMLRAEIGDIRRFPTPAHLASYAGVVPQVDSSASRTHYGRITRDGSPWLRWALVEVGVQTLRRQDPLGRWGRKLAVRKGAMKAHVALAREMCREIMDVWQRAA

SEQ ID NO: 293253 - protein, 424 aa, unidentified
MKYSQNEKIAQVTEKTLIVGVDIASMTHFARAFDFRGIELGKIIRISNDAQGFRLFKLWVNELKGKYNRDTVMVGMEPTGHYWFNFAQFLKDSGIRIVLVNPFHVKRSKELDDNNPTKNDRKDPKTIAMLVKDGRYQVPYVPEGLYSELRTAMETRWHIVQGLNAIGNRVKRWLSIYFPEFSKVFSAWEGKGALIVLKEFPTPEKVLQKGVDGIAARWRKDKLRPLGLKRAMRLVEAAKNSVGVREGLRAAETSLRMLLAEYEMKKQQLEEIMVLVEELIYQIPGIKEVLKIKGIGLVTAAGFMAEVGDLSRFDHPKQIQKLAGLNIRENSSGKHKGKTTISKRGRRRLRALLFQGIMPVVAKNPEFRRLHQYYTTRAQNPLKKKQSLILLCCKLIRIIFALMKKQVAYDPQKMMNDIQRPVAA

SEQ ID NO: 293254 - protein, 321 aa, unidentified
MYKYNQIFGVDISKDVFDVMSSQGKHLQFENSSKGFNQLTKHLTKKDLIVMEATGYYHYCLAQYLYDLGYIVSVVNPLAVKRFVQMKLSKIKTDKSDALAICQYASLNEVPIFTSRDSNQAECLQLMSLIEIYLKQSTALKNKLHGEKTLGIPSKTVYHSINRSLKLIQKEVQLLENKLLELVKEHQHKQLTLLKSIPGMGTKTSIILIVLTDGFTKFDNAKQLCSYAGTTPTIRLSGTSVRGKSRISKMGNQKLRNLLFLCAFSACKYNKACRELYERIVTKGKSKKLALIAVINKLLKQAFAVAKSGLPYDENYVSNLS

SEQ ID NO: 293255 - protein, 371 aa, unidentified
MRILALDLGKSKSVAYTVDTATGECGFKTVRTEPAVLGRLFAEGRPDRLVFEIGPLAGWVHDAAREAGVRQIEVANVAHEAWRWRHTRRKTDRVDAVRLADLSAAGQLPTVHVPQAATRQWRGLIAYRARLVARRTAVKNRIRAILASVGEPGLPRGAGGWTRQAVASLAALARPLAEVGSEDLWRGELALELEALAHLEAQVATVEAKLDTLAEADERVARLRTIPGVGPRLAELLVALFDDPHRFGSGRQVGSYLGLVPRQFQSGAMDRHGRITRHGNPLARALLVEVAWLGLRWNGRPRVAARRVRAIYQRVHRGSRARRKVAIVAVARRLAVFAWAMLRDGTTWRPERPTETTAQPRRAGVEAGVLA

SEQ ID NO: 293256 - protein, 411 aa, unidentified
METIVERPGALDVHKAQVTACVRTPAPGGKREPHFAEFSTTVAGLLTLRDWLSAHGVTQVTMEATGVYWKPVWAILEDEFELLLVNARHVKQVPGRKTDVSDAAWLCQLAEAGLLRASFVPPKPIRALRNLTRYRKTQIQERAREANRLHKALEDTGIKLDCVATDILGKSGRLMLDALVHGTTDPEILAELAKGRLRAKIPALKEALEGRFDRIHALWIGSILAHIDFLDGQIASLTEVIAEQIAPFEKAVELLCTITGVQRRTAECIIAEIGVDMSIFPTAKELASWAGQCPGNHQSAGKRRSGKTRNGSKWLDWALEEAALAATRSKDTYLAAQYARLRPRRGHKKALGAVKHSIIVACWHMLTTGELYNDLGGDYFARRDPAKTTQRLVAQLQRLGHTVTLNDAIAA

SEQ ID NO: 293257 - protein, 376 aa, unidentified
MLILGVGVDGPRRHRLCQNEVVVDLKQRGPSVEQISRIGMDTSKRFFQLHGVNAAEKVVLRKKLRRKEMVAFFKALAPTVIGIEACGASHHWARILRSFGHEVKLIAPQLVKPYVKRGKNDTADAEALCEAMSRPTMRFVPVKTAEQQAALMMVGLRDRLIRNRTQLSNAIRGYAAEFGFTAARGMAHIDPLLDRIQADESVPVLARELFAAQAEEYAQLQAQIAEVDAKLMAWHKADECSRRLAKIPGVGPIGAALLMMKTPAPEMFRSGRQFAAWIGLTPKDHSTAGKVRLGVITRAGDEALRSVLVVGATAVVQQVRRGRRGSPWIVDLLKRKPPKLAAVALANKMARIAWKLMVTGNSYAAKSAPATLMGAA

SEQ ID NO: 293258 - protein, 364 aa, unidentified
MEGLQPLHRRVAGIDVHRMLHVVTVLIEQPDGSVEQTSREFGGFRRDCRALAAWLAELRVQLVVMESTGIYWKSVHAHLENAGIAAWVVNAHFIKHVPGRKTDMSDSQWLAVLARFGLVRPSFIPPKDLRELRLVSRYRRKLTHVHSAEINRLHKVLDDAGIKLGGVVSDLNGVSATAMVKGLIQGQGIDSLLGLARGALKLKRDELQAALDGDLSARHLFVLEHIHAHIESLQRELADIDAYLLGAMQPYALAHGLLQTIPGIDRIAAALILIEIGEDMARFGSPERLASWAALCPGNNESAGKRKSGRTRHGNGVIRYILCECANAARWTKSTLTAKYKSLMGKRSGKSSSVPIAEVTSLRR

SEQ ID NO: 293259 - protein, 389 aa, unidentified
MISVVEQSLAIRVKPYYVCHTERELNALVDMLYAIDGKIRVVIEATGHYHGPIAKALYDAGFFVSIVNPYLVKCFSNNTLRKVKTDKADSVRIARYGMHYWHELRRYTPAEEIRARLKGFNRELLFYTDKKVAQQNHLITLLDRTFPGADKLFHARPKADGRMKWVEFAQEFWHCNLVSQMSLDDFTDIYRAWCHNNDYDFSAKKAAEVYEKSSGSITTMPQDEYTKALVVAATRQLTAITKESESLRSEMCSLAERLPEFSVVTSLYGVGKSIGAQLMAEIGDVRNFKNGKALVAYAGIDPGRIQSGDYRSRSVAITKNGSSYLRRILTYTMDIYILQKPPDEPVYDFYSKKYAEGKHFFVCRTAAINKFLRIYYARVKEYLDGLDDT

SEQ ID NO: 293260 - protein, 347 aa, unidentified
MRFYTGQHRYYCGIDLHARTMYLCILDHESGKILLHRNLRSGPELFLRTIEPYRDDLVVGVECIFCWYWLADLCAREGIPFVLGHALYMKAIHGGKAKNDKIDAHKITVLLRGGAFPMAYVYPRGMRATRDLLRRRLLFVRRRSELFTHIRMTFHQLNLPAPSGPFRQPRNRIGLAEAIPDPVVRVTVDADLALADRLDEVIRSLEHTICQRAKIDDPETFERLQTIPGVGRILALTMLYELHDVTRFPRVQDFLSYARLVKSQKSSAGKVTGTSGAKIGNAHLKWAYSEAAVLFLQKNPRGQRLINRLRSKHGRGKALSILAARLGRASYYMLRRSTTFDMDRFMN

SEQ ID NO: 293261 - protein, 341 aa, unidentified
MQATRHIGIDLHRNQFTCCVRLENGRNYLSEWKLEDLPRFVKKLRPSDQIAVEVTGNTRLFHDAVAPYVKRVVAVDPNQFKVISHSVKKTDPNDARNLALYLEKDLLPEVRMKDKTQAQLASLTQTRDTLVKLRTSLKNKVNNILSAHGINLEKEALSSEKKLNEILAMRFDAMVRLELEVIIEEIRSLNQRIAKLEKTIADEGSKLEGHKNLTSIKGIGPLTGSILLSVIGDINDFADEGKLAAYFGIVPRVSNSNETERTGRITKRGSKLGRTALVQCALIAQRYSPYLKRYYEKIKARRGTGKAIIALARKLLGIIYRTLKNKWVFEDFPNFVLAEAA

SEQ ID NO: 293262 - protein, 356 aa, unidentified
MKDGSTVPKRVVGIDLGDRSSQLCVLDAQTGEVLEESRVRTTRLGLEQRFAGVERMRVALEVGAHSRWVSQCLEALGHEVIVANPRKVRLISQNRAKDDRVDARVLAQLARVDPTLLYPVRHRGEAAQKDLAVLRARDVLVRSRTGLISHCRGAAKAAGHRFPPCSAHSFAGKAMPKLPPGLDLALGPVVETIGALTRRIRHIDREIERIARDRYPEVARLTRVRGVGTLTALAFVLTLEDPHRFRRSREVGPYLGLVPARAESGQSRPELRITKQGDRFLRRLLVQCGHYILGPFGEDCDLRRYGEAIYHRGGRRAKKTAAVAVARKLAVLLHSLWIHPAPYEPFYRPQQRHLAA

SEQ ID NO: 293263 - protein, 359 aa, unidentified
MQTQVKELDFTGHNIYAGIDVHKKSWQVSVYSEELFHKTFNQPPKPEILHGYLTKHFPNGTYFSVYEAGFSGFWAHDELQSLGINNIVVNPADVPTTNKEKKRKTDKIDSHKLARQLRSGDLEAIYTHNRKVLEDRNLLRMRRTLVKDLTRNKNRVKADLYFFGIEFPEQFTKNPSYWSKRFIKWLEEQEEHQRWTGTASFRILIDQVKSLRKQLLEVNKKVRALSREDCYQKRVALLGSIYGIGLVTSMTILTEIDDIHRFANLEKLRSYVGITPTSHSSGDKDLHGEMINRGNKFVKAAIFESAWIAARRDPVLHMHYVKFCKRMKPNKAIVRIACKLLDRVHYVLKNEVPYVSGIR

SEQ ID NO: 293264 - protein, 362 aa, unidentified
MKQALASALVSSPQAQPAGVIGIDLGDLWSRFCVLDQAGAVIDEDRIRTTAEAFTSKFGVLPPTRVVIEAGAHSPWVSRLLESLGHQVIVANARKVRLIYESDRKNDKLDARMLARLGRLDVNLLCPIHHRSADVQVDLAVVRSRNALVTARTQLVNSVRGMAKAVGGRLPRSTTAAFGHQALPQIPEALKPAVAPLLTSICALSEQIRRYDEQIERLAERKYPETRLLRQVKGVGPLIALTYVLTIDDPTRFRRSRDVGSFLGPRPKQCESGDSSPQLGISKSGNSHLRWLLVQAAQYTLSRLAPDSRLRRWGLTLTVRGGKNAKKRAVVAVARKLAVLLHRLWVTGEVYEPLYGIEPQAA

SEQ ID NO: 293265 - protein, 390 aa, unidentified
MDVLYQSCAGIDIHQANIVVCILHGPLTSTRPKREMATFDTTTKGLRARHDFLSQFHVEAVGMESTGVYWRPVWHALCDDFELILAQPAHMKAIPGQKTDKKDAHWIAKLTRIGLLPRSFVPDETIQELRELTRQRKHYVESRNRETNRIHKILQSGGIKLTTYIEDIMGLSGRNLLQLLVDGTPITPRIVHQSVYTSLKKKVPQLMEALDGYFSDHHRFMLKQSLEIYDFYQKQIELLEERINIYLSQYEKHVEILDSIPGIDVITASVIISEVGVDMSQFPTAGHLASWAGLCPGNNESAGKKRSTKIRHGNSYLKKCLCQAAFAVKKQKGSPLADRFYQIQSRRGSQKATIALAHQLLKIAYILLKEQITYPEFLAQKKTTRDELVA

SEQ ID NO: 293266 - protein, 342 aa, unidentified
MSTIQTIGIDLAKNVFSIHGVDPYGKCVLRKTVKRNKLLETFANLPSCLVGMEACSGAHHWARELSKLGHTPRIMASKFVIPYRQNEKNDANDAEAICEAVSRPKTRFVAIKSAEQQAVLTLHRIRHGLIKSRTSTINQLRGLLSEFGIIVPQGRYPLQNTISSILEDAENGLPMLARELLYDLVNRIHDINTEVLRYDRKIYALSHQMKDAQKLMTIPGVGEHTATAIVATVSEGKQFQTSRQFSAWIGLVPRQYTTGGHVQLGRISKRGDKHIRTLLIHGARAVIARCKDKTDRNSLWLQQLVERRGYKRATVALAAKNARIIWALLTSGNEYKVNYING

SEQ ID NO: 293267 - protein, 430 aa, unidentified
MKSNTQNAKIEAIIEKTLVLGIDVGSETHYARAFDYRGVEYSKKPFKFSNTEAGFVTFKAWVLDIKEKHGKDKVIPGMEPTGHYWFNLGKFLQDNEMKPVLVNPHHVKKSKELDDNHPTKNDRKDPKVIAGLVREGRYMIPYLPDGVYADLRTASNIRFQLQAELTRIQNRINRWFNIYFPEYKTVYGKPDAKSGILILKEAPLPEDILTLGIDGVNQIWRDAKLRAVGKARAKTLIEAAEHSVGSKEGAVSARMEIRMLLEDYESRNIRLQEVMALIEELVNQIPMAEKLLEIKGVGIKTVSGFLAEAGDIRRFNDPKELQKLAGLALVENSSGKHKGKTTISRRGRKRLRYLLFEVAMSLVAKNPEFRELHNYYTTRRLNPLKKMQSLMVIAAKLLRVFYAILTKGVGYDPKKMVNDIRRPAAYAQAA

SEQ ID NO: 293268 - protein, 385 aa, unidentified
MKNTYSNVACGGMDVHYKFSNVTFRDKAGRVVRRERLAHPQRSELRERLSRWPKGIPIVLEASFGWGWLSDLLSEAGLEPQLSNCYKLEQMRKARGWVKTNKKDADMVSLLPFETTGWWQVWRAPAQVRNSREQMRFRGDLVALQTTVKNRIHAIFHRHGIFHEFSDLFGGQGRRFLAELCIGGSEYLSPQALQAFRGQIRLLDHIRKQLADVERILHRQLGKTPLIRRLITIDGIGLILSHVLVAEIGRIERFRNHKALASYSLLAPRSDDTGQDDPRHSPLGRHLGVRGNRTLKWAFIEAAHGAVRSGGKWRAMFDRVTSGGKKDRNRGYIKVARELVKVVYVVWKKDVAYCDAPPQRPGANRKKSRSGTGQLFHPMVHASTA

SEQ ID NO: 293269 - protein, 349 aa, unidentified
MNDTVIAIDIAKGVFELAVSTQPGRVDKRKRLVRAQLVPYLANVRPCIVVMEACGSAHHWAREFEKLGHVVVLIPPHLVRPYVRRNKTDRTDTKGILEAYRNKDIEPVPVKTLGQQAVGALHRMRSGWIKERTGRLNTLRGLCREIGLVIPLGAEKVVPSVRDFIGDADRDLARSFRLVLSEACDEVREIERRIAVVDHELCALPRELPAVKAWMSIPGIGEITATALFAFIGDMRRFPTARHFASFVGLTPRESSSGLRRHLGRISKRGDVYLRTLFIHGARAALNAAKRSTAHEPDRLRAWALDLDRRLGHNKAAVALANKLARLAWVVASRNDSFRSVPRSATSAA

SEQ ID NO: 293270 - protein, 461 aa, unidentified
MARPRAPKRPPQPPRPGALPQLNANAAGIDVGATSHFVAVPADRDAESVREFGPFTGDLYRLAEWLTACGIETVALESTGVYWIPLFQVLEARGFEVKLVDARQLKRVPGRKSDVLDCQWLQQLHTFGLLAGAFRPDDQICVLRSYLRQRAMLVTYAGQHVQHLQKALVQMNLQLPVVLDDVTGATGMKIIRAVRAGERDPQRLAALRHGKCKHDEATIAAALQGDWREEHLFALEQAVELVDAYQAKIAACDARIQAHLARCADRGTGAPPPPGTPPRADRHDLSFDATAELYRVTGVDLTALPGRGAHTALKVLSEIGLAMTRWPSAKHFGAWLGLAPNNRVSGGKILSRRTTPTANRAATALRVAAQSLHRSQSALGAFLRRKAAHLGMPTAITATAYKLARLLYAMLSTGTEYVELGQDHYERAYTERVVRSLSRRANDLGYHLVKHEPSHSLATSG

SEQ ID NO: 293271 - protein, 338 aa, unidentified
MDHYAGIDVSLEYSSVCVVDATGKIVREAKVLSEPAALIAWFGSLGLNLVRIGLEAGPLSQWLYAGLRGAALAVELLETRHVRNALKTMPVKTDRKDARGIAELMRLGWHRPVHCKSMAAQETRAMLTTRNLVRSKLHDVEMSLRGTLRGFGLKVGKTTPRRFEARILELVAGHPSLEVIAKALLAARTVLLREFKAFEKQVRTMARSDTRARLLMSVPGVGPIVALTFASAIDDPARFKSSKSVGAHFGLTPKKYQSGETDITGRISKIGDKGVRTASYQAAHVMLTRPVKGCSALKSWAMKLAKRAGMKKAKVALARKLAVIMHRMLADGTTFANA

SEQ ID NO: 293272 - protein, 415 aa, unidentified
MKKHNYRTKKVNDINWLQLREQFAGQTLVFAVDVAKEQQFALLSNTELSESVLMQWNHLVQTAELINELKQLNTPITVVMESTSTYGDAMRYQFRQAGFTIHQASAKRVHDAKEIFDGVPSLHDAKAAWLIARLYKDGLTKPWHELDDKERELNAYRREYELHQSQHERNQNRLEAFLSRHWPEVLPLLALDSVTLESLLIDYGSPEQIAANAEQAAKDMRRWGKSCLSAEKIELVIHSAVTTLGQPCIEAERRYLQALAEELRHSRKQAKNAKQALEAVVKAEPGLKEMGLTIGMVTTAILIGLHLDPRHFGCARSYLKALGLNLKEKSSGQDHGKLKLTKRGSALARKYLYFAALRLIKSDPVVSAWYKSKVDPRAKSKTVIAFMRKLAMALWHVARGQRFDARKLVMTAVVN

SEQ ID NO: 293273 - protein, 331 aa, unidentified
MNYSHFVGLDVGKKTFDVSLMSAAEKELSHKSFDNTPEGIQSLLDWIAGYHLSLSKLLFCAENMGSYVTELSVSSVSMGFSLALVCPLTIKKSIGLQRGKNDRIDAKRIANYAVLHYRKLELYKLPDKDLVRLRGWIIIRDNLVKQKVSSIKLLETFSQMAKLADVTESISFLEEQLKSIKEKILEVEEDMEQLIAASTSLYTNYLLLRSIKGIGIINAIVLLCVTDNFQRFDNPRKFACYCGVAPFEHTSGISIRGKTQTSSLANKEVKVYLTRAAITAISWDPQMKAYYKRKIAEGKHKASVINAVRAKIIARSFAVIRRQTPFVTLAV

SEQ ID NO: 293274 - protein, 313 aa, unidentified
MTEFTIGVDISKSTLDVFRLEDGALNQFANSPVGFKALIKWLGDLPIKRIVFEPTGSYHRAFEKTFGGTFPMVKVNPLQARRFAQASGTRAKTDAVDARGLAEMGAALNLRPQNPISENERILKDFHVARVSLIKERSRLRNRLQTQTIPLLKRQSRARLIQVERQIIELDAEIAAIIGQEEGMARQRDILCSIPGLGPVTSAALLTLLPELGTLDRKKVASLAGLAPFSRQSGRWQGKAFIGGGRKPLRDALYMPALVAARFNPDLKSKYEQLRAAGKPAKVAIVAVMRKLLETANALIKADRFWAKKTDCA

SEQ ID NO: 293275 - protein, 315 aa, unidentified
MAMTVSVEKPIVGVDVAKNELVIYQAELDLLETISNDKAAIKKWLKALPAPVDLAIESTNIYHLAFADLAYDAGCTIYMVGGYELSHYRKGVNIRAKTDALDAKLLARYLKNEYEELHPWVPPSPLYRRLLSLFRRRAALVQARVGLVQSWANEPLLKSAFADQVASMQRLETLVEKMINDHLKEAGLLSQLKRCMKVEGVGFLTGARLIAAFQRGDFRNADAFIAFLGMDLRVSRSGQKDGRRSLTKRGDPEARRLLHNAAMSASRTPTWRGFYEEQRARGFSTTQALVILARKLARVVFALLKGQSEYQPKAG

SEQ ID NO: 293276 - protein, 403 aa, unidentified
MNAVGIDVAKGKSVVSILRPFGEVISSPFELCHTSSAIDDFIHSLSNLEGEVRIVLEYTGRYHEPIARWLSDADFYVSVVNPKLIKDFGNNSLRKVKSDKKDALKIARYALDNWNDLRQYCFMDKTRDQLKTMNRQFDFYMKHKTALKNNLIALLDQTFPGANTFFTSPVRKDGSQKWVDFVASFWHVDCVRKVSLSVFTERYRKFCVRKGYDFHPDKPAQIFEASKELIALLPKDKMTKNLIMQAIEQLNTLSRTIEQLRLQMDQTATQLPEYPVVMAMKGVGPSLGPQIMAEIGDVRRFSRRGALTAFAGVDPGVNQSSTYNQKSVRTSKRGSAQLRKSLFQVMDVLVKTSPENDPVYAFLSKKRAEGKPYYVYMTAGANKFLRIYYGRVKEYLASLSEEE

SEQ ID NO: 293277 - protein, 330 aa, unidentified
MQAPCNIFIGIDVSKDELVIAYGLNNHWKKGKIPNTLEHISEWLKGFPCGNNHFILEATGPYSERLTSELAAVGASFSVVNPLQSRAMSKALLKTNKTDDQDAQTLSLLGQKFELIDYKMPDNAQKKRKEAFSALGSLQKQERQLKNQLHAFEYRVNPNPVAVKALQDVLLSTQEAIQVLEKELNPEQDEEEARQLIDRIASIKGVGKNTAKVFVTLFGNFQHFDDAKAFAKFVGLSPSEYTSGATIRGRSCITKRGSSKVRALLFNCARSAMRYNENCKELYQRLLEKGKNGKVALTAVMHKLARLIFGVVRSGIDYNPQFASLKIKNP

SEQ ID NO: 293278 - protein, 347 aa, unidentified
MRKVAYLAMDVHARNCVLGDMDGNGKFRGNRSFITCENNIIKALKAIKARRKHLIMEAGPLSNWAAQVASDHVTRVIICDPRENALIYKSSKKRDKVDTKKMCRLLRLGEFKEVYRPENDQRAIFKAAVQHYLDLRDQLIALKNKIKAMYRQWGVIDVFTDSVYSTSGRDKFLNQLNQRPIYLQLKRLYDLMDHTAAIKQAAQKSMTSLARNYLEIKEFKKIPGMGTIGAHTFDAYIQTPHRFAKRSRLWRYCRLGVTDCTSDGKPLGYKRLDKSGINELKALSYRAFLSAIKGDNEVKRFYLNSLQRTHDRKHARLNTQRKILSVMLSIWKKGKPYRSELFLDPSI

SEQ ID NO: 293279 - protein, 376 aa, unidentified
MSPSILYLGLDVHKESVTIAVLPAAAPAPTRVEQLPYDLKKLQRCFARLAQDGTTLRACYEASGAGYVLQRAMTSWGYACEIVASALIPQKPGDRRKFDKKDAAHLARLYRAGELTPIRIPTAAEERVREIVRCRETLQREILRSRHYLLKLLLRRGLIYHAGCHWTGRHRAWLDDQRRSGVLTEGDAVAFDEYLALLDYKLGRRAELDRQIEALALTPLYRPMVARLTCFRGISTLGAMVLATELGDWQRFAKPTQLMAYLGLVPTEHSSGSREWRGAITKAGNSRCRHILVQAAWNARRPPSRSRLLTRRQHGQPPALVAQAWKAQRRLYTLFHRIAARRPAQIAAVAVARELGGFLWAAMREVEAVGHSSMVA

SEQ ID NO: 293280 - protein, 400 aa, unidentified
MLSIGIDVSKGKSTVCGMKPGGEIVYAPFEVQHTREGMSELVSLLRSSGEEVRAVLESTGSYHCPVVAALLENGIFVSVVNSLRMKRFCSQSIRKVKTDRIDAMQIALYGLAYWQELQPTRLPEDTYRELQLLARQYYQMTSLLIKAKVDFNAICDQVLPGMQELMSDHAGRHKLSDFVLRYCHTTHILEMGETRFRKDYCKWAEKKGYRNCERMAALIFATAQNGIPVLPNAPSTQIVITEAIRVLHTVEASRDAILTQMQALAKTLPEYSLVREMPCIGDTLAPRLIAEIGDVRRFHSKRALIAYAGIDAPPYQSGKFCANNRHISKRGNRYLRKTGYEVMQSYVMHKPANDPIFTFIEKKRGEGKSGKLAMVAGLNKFLRVYYGKVTELYRSLPAIE

SEQ ID NO: 293281 - protein, 378 aa, unidentified
MGKNTRFVGLDVHAETIAVAVAEGRNQARSLGTIANRPEAVRRLLGKLGKASDLRVCYEAGPTGYALYWQVTQLGVQCEVIAPSLVPMKSGDRIKTDRRDAERLAGSYRAGELTAVWVPDAQHEALRDLVRAREAAKQDQLRAKHRLGKYLLRYGLRPADDSRAWTSAWWQWMRGLQLAHHEQNTTLLELILEVDHQGHRIERFDGAIDRAVEVAPGQLRAIVDALQALRGVAKVTAVTLATEFGCFSRFEKATQVMSYTGLVPSEHSSGPKTHRGAITKTGNSHLRRVLIESAWHYRHRPRICQRQKQLQRSLPPKIATIAWTAQERLHRRYWALSNKSKPTAKIVTALARELAGFVWAIGVESERALNAAKEGVAA

SEQ ID NO: 293282 - protein, 333 aa, unidentified
MCKFKHFLGIDVSKDYFDAVVIIDGNKEKPNHNQFINDYKGIKSLCKWLKEQGATNENTLVCLEHTGMYGKLIINHLFTFKFDIWVEMSLKIIRSIGVQRGKNDKVDAERIAYYAMKNHEDAQIYEPPRKIISQLKKLISLREHLVTTRAMLLRNSKELKGFEPELAKIHAKFCKSTVKGLETDLKNIEKELDNIIKSDENIKNVFEKATSVTGVGKVTALNLICYTNEFKMYETPRQLACYCGVVPFEYTSGKSVKGRPRVHFMANKKLKKQLHMCAISSIRAKGDLKDYFDRKVAEGKNKMLVINNVRNKLVHRICACVKNNKNYEPTLAS

SEQ ID NO: 293283 - protein, 386 aa, unidentified
MVDDIALYVGLDVSKEKIAIGLAEAGRKGEVRYYGEIANRADAVRKFVDKLAGRHGRLCFCYEAGPTGYGLYRQLSALGYDCLVVAPSLVPTRPGLQIKTDRRDAVALAALLRAGELSSIWVPDETHEAMRDLCRAREAAVSDLRRARQHLLSFLLRHGRVFEGRSHWTRAHRNWLATQRFDHRAQQIAMEEYIRAIEQIEERRERLTRQMLALLPDWSLNPVVEAIQALRGVAQISAVTLVSEIGDFRRFNNPRQFMAWLGLVPKEHSTGASVSRGSITKAGNTRARRMLVEGAWTYRLPARVSQEILKRMEGLPEAIRATAWKAQVRLCQRYRRMQASGHLSPTSSPSPSRANSLLLSGRLRQQSPFPPQRQPDEGAPNTEEKI

SEQ ID NO: 293284 - protein, 411 aa, unidentified
MEPLYRWVAGIDVHKKMLAVVVRAPQGEYVQRKFGTTKTEIGHLAAWLQDHQVSEVVMESTAQYWRPVWYGLEAHFKLHLTHPLKTRAPRGRKADFRDARRLADRWHSGDLEDSFIPGAEQRSWRWLTRSRVHLKRMLGVIRNQVEGLLEQGGIKLSAVASDIFGVSGWAILERIAAGESDVDKLVDEARGVLKRKKSKLREALQGKLDPIYHLLLKQHLAQAQLLCQQVEELNQALAEALKEHVAVLCRLTKVPGINLYAAQELLAEIGPGAVAFPSPEQFASWVGVCPGSQETAGVNYSRRSAKGNRYLRRLLCQNAWGAIHTKNTFFAGLFARLKPKIKGKGAAWAVAHRIAKLVWLILHEGVEYVEKGTAPLNPRTLVRKFRRLLREFDRHGIDAKSLLEQELVATS

SEQ ID NO: 293285 - protein, 514 aa, unidentified
MAASYGPKPTLVLCKPVVKRGSEAADSSVMTPAEVAAISMRRLEGNAPQAAFSGYKEATMGKRGEKRERRTAILEPDAAGIDIGAEEIYVAVPLDRDEQATRRFSSFTYDLHAMADWLESCRVRTVAMESTGVYWIPLFQILEERGFKVYLVNAHSLKTVPGRKSDVSDCEWIQYLHSVGLLKASFRPSEDICAVRTLWRHRGSLLQMAAEHTQHMQKSLILMNLQIHHVLSDITGASGLAILDAILAGDRDPLRLAQLCNIRVKSPRETVAQALVGDYRPEHLFTLKQSLDGYRYYQKLIAELDDEIARLMHTLPNATEHPLPMPTRTKRGPYQRMGNDPSFDLRSELYRIAGVDLTDIPGVSAIAAQVILTEVGPDVSRFRNASAFASWLGLCPDKRISGGKVLSTKTRKVKNRVAIVLRLGAKSLSRAKDYFGSFFRRMRARLGTAQAITATAHKLARVIYHVLHSKEPYTETVFHRCDEQEQQRAEMRLRKHAAQLGFQLIPVSTDPTTS

SEQ ID NO: 293286 - protein, 307 aa, unidentified
MTAVGIDVGKAALDVAVAGQPDVARFANTRAGIGQLVRRLRRLPAPRIVMEATGGYEEPLLDACCDAGFWVARVNPRQARDFARATGELAKTDAIDARLLALMARLFADRLRPHVAAPAWQRELRDWLRRRGQVVTVLQMQKQQAAMAPATVRVLARRTIAALTRELAAIDRAMQALLKQHATPALRSSKGLGPVFQATALALLPELGHLDRRQITKLAGVAPMNRDSGQGQGKRRIRGGRAPVRVALYMATLSAVRWDPTMRAHYQQLRARGKLGKVALVACMRKLLGIVNARRRDELREEGLLTA

SEQ ID NO: 293287 - protein, 339 aa, unidentified
MVYIGIDVHRKQSHLAALGEDGQVVLSRRVRTRPEEFLRVFGELEPEPFEVVFESTFGWGWLADLLADAGIPAHMAHPLATKAIAAGRVKNDAVDAQTLAHLLRGNLLPEAWMAPLEAREARRLVRMRASLMRVSSRLKCQVHAVLAEHGVTPAQSDAFGKQGRVQLSKVVLPEISQHRVEANLRLIDSIASEVKLAERELTSLFADDPRVRRLLPIPGIGFITAAMVVAEVWDVSRFRSADQLSSWAGLTPKERSSAEHTRRGHISKQGSRWLRWIMVESAAQHALRDPELRTFFNRVCRRSPDRRKIAHVAVAHRLLTLCFYALRDADGCRAYPVAS

SEQ ID NO: 293288 - protein, 451 aa, unidentified
MNPKPEVPAEALGLVHPHAAGLDIGAAEIWAAVPPECDQPSVRAFGTFTPDLQALAAWLAACGVTSVAMESTGIYWIPIFELLEARGLEVYLVNARHIKNVPGRKSDVADCQWIQRLHSYGLLSASFRPEAEMVVLRAYLRQRTMLIEHRAAHIQHMQKALHLMNLQLTQVLSDVTGVSGMAIIRAIVGGERRPAKLAALRNARCQRSEAEIVKALTGSYRPEHLFALKQALTLYDAYSTQLAECDREIESHYAAIKPRFDPDDPDTPLGPDPKTNTHSKNAPDFDVRRQLFQLVGVDLTEVHGLHVSSVQQLLAEIGTDMRKFPTVKHFCSWLGLAPHNDITGGKVKRSRTIKNHNRAGQVLRLAAQSVGRGQSALGAYYRAMKGRIGVAQATVATAHKLARIIYFMLRDRQPYQPISPEEYHQRQHTRQIAALKRKAAKLGFTLQPQAV

SEQ ID NO: 293289 - protein, 430 aa, unidentified
MHNKNYISVGIDVGSAFSFMTILAPDETVILKPFKITHNNKDSLERAVSEIKKAEELYSLESRTFLESTGIYHFPLFCYLVDCGFNASIINPIITHSTKNGNIRKVKNDKIDSKGIAKLGLSKDIPVSQFPAKLVLELRSLTRKYYDLTDERSAHINKLKGDLHTVFPQYLDVFCDVTGKTSTMILRQYGTPDKILRGHKKTMIEKISKASRKGLAKASERYEKLCAVANAAKTFGCQIDSIYFNIFLTLDLVEKLDSALDSILNRIRQLITFNKNEKFIQQIKLLNTIPGVGFLTAVTIMCEIGDFSAFRNPKQLFAYFGLDPEVNESGKFVGTQLHMSKRGSRIARRAIFAVALASIRTKRNGEGINPYLRKYYELKSGQKPKMVAIGAVMHKVCNIVFAVLRDEKAFELRSPEEHCKQYQRPALAAA

SEQ ID NO: 293290 - protein, 342 aa, unidentified
MDRLSPVTRICKVGFTMENELHFIGIDVAKAKLDVDILRPDGRHRCKKFDNTLSGHEALVRWLRGHDVNRAHVCMESTSTYMEDAAAHLSDAGYTVSIINPALSKAFAQSEGLRSKTDKVDARMLAHFCREKRPSAWEAPHPTERALKALVLRHQALTEMQTQEKNRRETAPEVQLASIDILLGCLSAELARIEKQIKDLTDNDPDMKRRRKLLNSIPGIGEKTAAVLLAYTGLRLKFGTARQFAAYAGLTPVQHESGSSVMRASRMSKAGPVQLRKALYMPALSALYHTAWGKAFRKRLEESGKRAKVIIGAMMRKLAQVAYGVLKSGKAFDTSQHELLIA

SEQ ID NO: 293291 - protein, 323 aa, unidentified
MQGKVSPERSTMSPVYVGIDVCKERLDVYIHPVGLRRAFANSPEGIKQLKRALNAHEVALVVMEATGKFHRAAHRSLHAGGFAVAIVNPLRARLFAEAAGALAKTDGVDCRMLAILGESLEPDATAPSSELMESLQELTRCRDAAVAARTALLNQLGATTARPAQIEIKRQVRAAETAIENLGAEIKRLIAADPRLARRLAILTSIPGVGTLTAIALIAGLAEIGSLSAKEAAMIVGLAPIACDSGQSSGARHIRGGRAHVRKALYMAAVSAARFNPALKAFYDRLLANGKKPKVAITAVMRKLVVLANTLVREDRPWEPTHA

SEQ ID NO: 293292 - protein, 323 aa, unidentified
MTRTICGVDVSSQSLDARIGNRGAYAQFPNTAAGIDSLASFCHTHRVDLVAMEATGGYEQRALALLSKQGFPVAILNPRAVRQFAQSMGQFEKTDRLDAGMIALFAETKNSQPVCLSSASQQQLRALVTRLRQLTEVRTAQKNQSRLVTDPAVVGLFKQLLDVVNRQIDELEIAIAAIIAADPLWHQFDQAFRTIKGVADRTVTRLMAEMPEIGSLSNKTVSKLAGVAPLASDSGKHQGKRAVRGGRASVREILFIVASVVGRYEPDFIAFQKRLSAAGKPRKVIRIALAHKLLVRLNAKARDVRRQLALAQACEPGKECVAV

SEQ ID NO: 293293 - protein, 342 aa, unidentified
MFYAALDVSLRSVAICIIDQNGKVRLERSVPSDVPALVHCLHEFGEPIHQVGLEAGTLTQHLTYGLKEAGFDVVCMEARQVNAALSAMRNKTDKHDARGIAQILRSGWYSRVHVKSVESHYIRALLTSRKVMQRKCIDLENEIRGLLKVFGVKLPMRLSRGAFDAAVRDTIGNDPALSHALLPMLQARQMLLETFLELDRRVRRAAREDAICMRFMGIPGVGEITALSFKAAVDDPTRFKSSRTVGAHFGLTPRRFQSGEKDNPGRISHAGDADVRATLYAAANAMLMRSIAWNGLKAWGVRLMKTKGRRRAIVAVARKIAVVLHRMWIDGTEFRFGSEASV

SEQ ID NO: 293294 - protein, 331 aa, unidentified
MFPVGIDVSKNTLDLCMLYDGIKGRIKTRNIQNNRHSVENILRWLRLQHCGPEDVHVVMEATGVYHERLATELHDAGFRVSLANPHRSREFARGMGIMTKTDKVDAYMLACYAFLKKPHRWEPPAPEIRYLGALLRRRDVLLGDALREENRLEKYLSTDTLADIISSCRRMAQLLREEVSNIERQIKAHIKASPALRRDYTLLTSIKSVGPQLGMHMLVVLRSHNFVSAEQAAAFLGVVPIEKRSGTSVRSRPRMSKIGPPQLRAKLYMSALCGKIYNKRMRNIYDEMCLRGKPKMVAIGALMRKLVHWCYGVLKTGTVFNDESLQQVLST

SEQ ID NO: 293295 - protein, 409 aa, unidentified
MQVLYPRCAGLDVHKDTIVVCVRCVSAPVHQEVRSFGTTTSQLLALADWLAEHACTHVGMEATGVYWKPVWHILEDEFELVLANAAHIRNVPGRKTDVNDAMWIADLLAHGLIRSSFVPPAAIQELRDLTRTRKQLVREISQHSLRIQKVLEDANLKLGSVLSDVLGRSGRAMLEAIVAGETDPERLAELAVGTARKKSRELREALRGRVTEHHRTLLRLHLDVVNALQRSLAELDVTVGKALTPIKERARLLTTMPGVSDLTARVMVAEIGVDMTRFPDSAHLISWAGLCPRNDESAGKRRSTRVRKSGTWLKTALVTAAWSAIRVKDTYLRAQFLRIKARRGAKKAILAVAASMLTAAYYMLRDGVEYLDLGADHFDRHDRTKTIRRLLKRLEDLGCDTTLLQVHAA

SEQ ID NO: 293296 - protein, 354 aa, unidentified
MSQTLNAAITVVGIDIGKNSFHIVGHDERGAIVLRQKWSRGQVEARFANLPPCLIGMEACVGAHHLSRKLKALGHDARLMPAKYVRPYSKGQKNDFRDAEAIAEAVQRPTMKFVATKTADQLDLQALHRVRERLVSQRTGIINQIRAFLLERSIAVRQGQRFLRAELPRILATPPDVLSPRMVQVIEGLAGDWRRLDERIEGLSGEIEAIARQDAGCERLMSVPGIGPIISSAMVAAIGTGDAFTKGRDFAAWLGLVPRQMSTGDRTILGRISKRGNRYLRVLFVQAAWVVLIKPKSWERHGLKPWIESAKKRLHHNVLAIALANKLARIAWSVLARGRAFEVRKIDEAAAQSA

SEQ ID NO: 293297 - protein, 319 aa, unidentified
MEKDPLYCAIDLSKERLDVAGAVLGLPEQLDNSHAGYRRLIRAAKKYPGVVQFVFEASGPYHLGLALALWEAKLALSVLNPARVRYFAKAQGKAKTDPLDKEVIGAFAQAFRPPPTRAPEPVRGQLMELLQRREGLIQSRAAEQNRLGQSHHGLIERQIRRLLSQLTEHIEQIERQMDKLVSSCAELQAQVERLCQVKGVGQLTALTLLITLPELGSLGRNHISRLVGLAPLNDDSGQQSNKRFIQGGRKRPRAALYMASLSASRHNPVLHDFYQRLLKAGKPKKVALTAVMRKLLICLNALVHRQLAQQTSSRLALSP

SEQ ID NO: 293298 - protein, 413 aa, unidentified
MERLLERCAALDVHQASVSACVRVPGEGDQRREFNERFGATTPDLLALCDWLRGHGVTHVAMEGTGVYWKPVYYALEGEFELLLVKAAHVKQVPGRKTDTKDAAWLCQLLECGLLRASFVPPKPIRELRDLTRYRKTLIAERASEANRLHKVLEDAGVKLSSVASNVLGVSGRLMLEALCQGSSDPVALAELARGRLRSKLPALRRALESRFRDHHAFLVSQILAHLDYLDEAIAACSARIDEQIAPFASALTLLESIPGVGRRNAEVIVAEIGVDMSVFPSSRHLASWAKLAPGNNESAGKRKSGTTGKGSPWLRSALVESALAATRTRGYLRAKYWRIRQRRGHQRAVIAVAHAILEISFQMLTTGELYRDLGDDFFERRDHERARQRHLRALERLGYRVTVDAVPTPEAA

SEQ ID NO: 293299 - protein, 377 aa, unidentified
MFYLGIDQHARQITISLRDEGGDVVQARQVSTQPEKVQAFFQQLTRERLHDGESFVAVLEVCGFNDWLIGLLHEYRCHKVILIQPEERKLRKTDRRDAAALSELLWVNRDRLLQDKPVRGLRQVDIARSTDQENRRLTTLRKDAGQARTRLVNRVRHILRRHNLQWQMPTKKFPSKSGLAWLKQLALPEIDRLEMNHLLADLEQVQGRRQELEQVIAQRCGVSAEAVLLSSMPGVGYFTAVALACRVGRVERFPRAASLSNYWGLTPGCRNSGETNQRLGGITKAGSSMARWLLAEVTIKVLRRDARLRAWFKRLKRRRGASIARVAVMRKLATVIWHMLSKRLTYAACRDAGEAGTKARQEQGAEGSRPGGAVGRV

SEQ ID NO: 293300 - protein, 360 aa, unidentified
MSNVAVFVGIDYHQDSVQVCVLDPDGKQLANRSVNNDAAAVARIITRHGRPARVAIEACCGAADMAEELATEQNLPIEMAHPGYVARLKRSPDKTDLGDAQLLADLARVNYLPTVWLAPERTRQLRRLVRHRTQLVRRRRDVKLRIRGLLRENRLRCGEAAAWRKAWLEWLAQEAQLPESDRWIMEDHLAELAALAGRIAAIEAKIKAATEGDAIVAQLMEQPGVGLVTAVTMRAEIGRFDRFDTGKQLARFCGVTPRNASSGARQADAGLIKAGNPELRVVLIELAHRLIHRVRGRWFDLAAGMLQRGKPKNVVVAAVANRWVRWLHHELRRDALALGSGSTKGGPPLPSSPPHRPQLG

SEQ ID NO: 293301 - protein, 400 aa, unidentified
MISVGIDVSKEKSTVCILKPYGEIVSKPFEVYHVEQELSELATMLLRLNDEVRIIMEATGIYHLPVLSYFKEKGFFVAVINPFEMKEYRCQGLRRVKTDKQDAIAISHYGIDHWYRLKEYKAQENIYTELKLLGRQYCHYMRMRVESVLELTHLLDYTMPGIKTLLQGWNEKNGKDKLGDFAEEYWHYDNITKKSEKQFIDSYLKWAKKKGYHQNQDKAIKIYALAKEGIPTVSSNTPSTKMLVQEAVRVLREVDHTLMTILTQMRSLAKSLPEYPIVRAMGGVGDVLAPKLIAEIGDVRRFHSGKALIAYAGIDAPPYQSGRLVGTERKISKRGSSNLRKIGYEVMRSLKTHKVPEDAAVYEFILKKEREGKSKRAAKIAGLNKFLRIYYARVMEVYRK

SEQ ID NO: 293302 - protein, 420 aa, unidentified
MSFKIFRKNCCGLDVHKTWIYACIGITDTNGRTDYKQTRFSSFSKGLKELSDWLAKYHCTEVCMESTGKYWIPVFNVLEKAYVSVILSHPKYTKPQKGNKTDRKDAKWICDLFMCDMVKPSFIPPADIRHLRDLVRYRFKLICMITGEKNRAQNCLTVSNLKLDDVFSDVFGKSSRSITEYILEHPGDLFDVTPFVDRRCKTPIEEIQAAVDGAISPEQAVKLRQCLNHIDELEKHLEEIEQEILRLSDKYQAAFDLIRTVPGFDKNPMTAIQVLSEIGGDMSVFPSAKHLVSWAGCCPRNDQSNKKIKSTRISRAGSYFKPVLVQVANGLLRSKKHPKITDRYKRIKARRGHKKAIIAICRMLLTAIWHILSDLKPYTAEGFRESRPVNESKVLTTSQALNLLKQRGYIIKDDLTPAMN

SEQ ID NO: 293303 - protein, 411 aa, unidentified
MPKHTPTGSGIKGQCIVLAVDVAKRHHMLMVQGPDGTRERPRRIANSAAGFGALLQHAQAARRRWSGVPLVVALEPTGHYWLPLAYWLQARALPVLTVNPAHTKRAKELEDNSPAKTDEKDVRVIADLAAMGRARPCRLQTGVYATLRALARLRARVAADLTAVTNQLHQLCDQLFPELLPCFGGDLRRTSCRQLLAVAPTPVAVQALGIERLTALLRGASRGRYGAAVATRLLAAAATSIGLREGTAPLVTRLHYLLEEAARLRGYQRTLEQQQAAALHRVPYAAALLQFRGLGVGTVATLLGEAGDLRGFPRARQLLKHAGLNLYELSSGEHQGQRRLTKRGRPGLRRILYMAALRLLKRGAPLHGYYHRLRARLAGTPAVVAVMRKVLRVVHAWVHSGQAYDALRLAA

SEQ ID NO: 293304 - protein, 372 aa, unidentified
MEKDTTFVALDDSKRTIVAGILRPGTDEPELRQIPNEPRHLRRLFTRLKREGSVVACYEAGPSGYDLYRQLTTLGVSCQVIAPALTPRKPGDRIKTDRRDAAKLVRLFRAKALTPIRVPDEAGEAARDLLRCREDVQEDLLRWRHRLGKFLARHGRIYREGRSWTQRHWTWLRSQHFTLPVLQRTYEEYLFAVEQLLPRVADLDREIAALAATEPYRERVGWLRCFRGIDTLAAMILLTEVGDFPRFAHPRPLAAYLGLVPSEASSGERERRGSITKAGNTHARRILVEASWHYRHPPRLGAALTRRSQGQPKSVLAQAWQAQLRLHRRDPAPDRARETAPGRRGRPRARVGRLRLGRPDADGPVGPGRVGP

SEQ ID NO: 293305 - protein, 399 aa, unidentified
MLVTAYRKGDSIETKSFNYDFDGLSELLGMLILNDINQVVIESTGDFYFPLYYFLSKADITVNVMNAFKVKRPEPNKTDKRDAAWLLKVGESGLFDPSYVPDDNILALRKLVRARFKMVDQIADCKRRINSLLWQLGIKLKASILKNKRRRDQFKKLLEGGDPGDLDKGLVSTIRSILGKRSVRAFVSLVLSNIAVIEALEKAVESIDSEIRAIVREYEAIIEILMSVPGVSLTLASAILSEIGDIYRFASPGKLASYAGLAPVAKESAGKTRLVGTSRKSNKYLRRYMFMAAMAAMRSNSPKIRAFSKRLFGRGKHYKVVAVAVARKMLTIIWHLLRRGTPWQEKNYSKHVKLNLKTKAKAMPINEVANVLRKALGKGIVKPKKDEKTESRLKTGNKL

SEQ ID NO: 293306 - protein, 312 aa, unidentified
MTDDLFIGIDVCKARLDLARHDGGRPHSLPNTPDGRADLVELLAGWRPTLVVLEATGGYERDTVLALQEAGIAVAVANPRQVRDFARAGGRLAKTDALDAALLARFGQLMRPPPAPVVPPAERALAALVARRRQLVDMGVQERNRLEQAHGAVRQGIVRHLALLEEELDAVERAIAATVRASAALAARAALLESVKGVGARTAAVLLAELPELGQVDRKQIAALAGVAPMNRDSGSRRGAQHIAGGRLGVRCALYMAALVAVRHNPGLRDYYKRLRAAGKPAKVALVAVMHKLVLILNAIIRDAEPARQSHP

SEQ ID NO: 293307 - protein, 344 aa, unidentified
MERKFRLIFGIDISKSTLDVTYFFESSFKHFQITNDAKGISQLLDTIKKLGVKENEVLICCENTGSYTDKLALVIKSLDVTFWVVHPIIMKSYKIDLQRAKNDKVDSMKIAQFAFAHQHKAINFHHPDQKTKELKALYLLRKQLIGLRQRTLNFIASENDKAIPGVLNTVIYNQVKLFITDLIKDVEKSIQLLIKSEKTISSYYNILLSIPGIGPVIAQHILVVTDGFKKIIDYKAFACYVGIAPFERSSGTSIKYRPRTSKKANQDLKAEMHQGALSVIKHGQVFHNYYKTMIEKGKHHLWIINSIMNMIAKCIFNLITKMVPFNKEIFVNNKKSWTNNLVLS

SEQ ID NO: 293308 - protein, 344 aa, unidentified
MITIGVDPHKSSHTAVALDEAGQVLAELRVPASTAMVKRLKSWAGCWPERTWAIEGASGLGHLLAQQLVTSGEVVVDVPSTLSSRARVLDRGHGRKTDGIDAYSVAVVALRSSELRRVVPEDHSRVLRLLSDRRDELATERRRVVNRLHRMLRDLHPGGAPIDLSAKGAAVLLTKIRPKSIVDAQRKRLARELLADVRRLDKALAESRRRCAEAVVSSGTTLTSIFGISDVLAAKILGHTGDINRFESANRFASYTGTAPIEASSGEVTRHRLSRSGNRSLNTALHQAARVQIMHPGPGRDYYGRKIAEHKSSNEALRALKRQLAKVVYRHLVADQVRRLAAAY

SEQ ID NO: 293309 - protein, 423 aa, unidentified
MMKLKYSICCGLDVHKNVIVATIVITNNDGISEYKQKSFSTINSDIQKFHNWLIENNCFHVCMESTGKYWIPIFNYLENDIDVCLTHPKYVKAIKGKKTDKKDSKWIADLYKFDLVRCSFIPPKDFRQLRELARYRFKLVCMKSSEKNRIQNCMTVSNVGIASVLSDPFGKTATDIMSYLLEHTADSMDEKAVRKLIKKGAKAKSDEIIEAIRGYNIETDQAKKLELARGHLEYLDDMITQTEVELYVRIKPYYEFVEFVSTMPGMTELSSTIVLAETGVDMSIFDDAKHLCSWCGLSPASNESAGKKKSVRIGKAGDYLKPMMIQCALAAVKNKKQPYFAIKYGRIKKRRGHKKAIIAIARMMMVCIYHMVSEKKSFNPTDYEELMDPRNHVERVVLNETNVFAYLESLGYDSSKLVKRNDN

SEQ ID NO: 293310 - protein, 344 aa, unidentified
MTSMQTKYVGLDVHKNFIQGCVLDKEGKVILEHKFKNEPHSMDSFLSNIQQDSKIALESCSCWQYVYDYLSDAGYKDLVLANPLRVRLIAESRKKTDKHDAKVLADLLRMNMLPESYAPPLETRYERQITRHRLSLVRLRADVKRKVNALLLRHGYQHEYSDLFGKAGMDQLYSLDLPMCDRFELDNYLKAIDFFTEKIINTQDRVGDFVKYNPQARLLMSIKGIDYYSALMISAEIGDVRRFNSAKKIISYAGLNPSISQSGDKCYVGHISKQGNSNLRWILIECANIAIMHDSGLALFYHRIKKRKNHKVAIVATARKLLTIIYAMLMNNRNCIPQRKCKAS

SEQ ID NO: 293311 - protein, 397 aa, unidentified
MDTSYAVFCGIDVGKSDHHAVGLDTAGGRLFDKALPNDEARLRAVFADLAVHGPILVVVDQPNTIGALPVTVARACGHDVAYLPGLSMRRVADLYPGQAKTDARDAFIIADTARTMPHTMRRVDVGDETLTELGVLVGFDDDLAGEATRVSNRIRGLLTGIHPALERVLGPRINHLAVLEILSRYGGPVGIRQAGKRRITTLAVKHAPRMGARLAEEIFAALDAQTVTVPGSKAAEIVLPKLADSLKEVLQQRRAIGDDVERILDEHPLSQVLTSMPGIGVRTAARILIEIGDGSDFASAGHLAAYAGIAPVTHRSGTSIRGEHPARSGNRKLKRALFLSAFAALHDPTSRAYYDRKRAEGKRHNAALICLARRRCDVLHAMLKNKTFYQPPTADAA

SEQ ID NO: 293312 - protein, 308 aa, unidentified
MPQAVIGCDLSRALIDICELPSGRTGQIANTPDAIAVWLDTLDLDVRVVFEATSGCDGDLIAALATRGHPFSRVNPRQAREFARATGTLAKTDRVDARVLAQMGAALDLPATIPLSPARSRLADFLRRRRQLVDMRKAEKLHRHSAGQPEIAQAIEAMITLLGQQIAELDRQIAGFIAQDQALSEQAHLLNAVPGIGPTVLATLLGELPELGTLCRRKIASLAGLAPHARESGTWRGARRIWGGRRKVREALYIAALNASRRIPVLTAMRDRMRAKGKAPKTILIAIARQLLVILNAMIRKRQPIALT

SEQ ID NO: 293313 - protein, 369 aa, unidentified
MNSQYPVVIGLDVGKTGHHACALDPDGSKLFDKPLPQHEAKLRELFMGLQKLGDVLMIVDQPNTIGALPIAVARDCGCAVAYVPGLTIRKAADLYPGRSKTDARDAFIIADTARTMPHTLRQVDRDSEVLSAVKVLAGFDEDLAHETTRALNRIRSLLTQIHPALERVFTGGSLSTALVLDLLEKFGGPTRLKTAGRGKVLRFARSHSRRDSEPLVDRIFTALGEQTVIVPATAAVELVIPRVAGQIKELKAQQATVARKVEGMLEDFPLAAVLRSMPGIGLKTAAQILLAIGDGSAFQTPGHLAAYAGITPVTRRSGTSIRSEFPARSGNKRLKTPCSTLPGSPRTTTRSRRPTTTTNAPRASATTPP

SEQ ID NO: 293314 - protein, 326 aa, unidentified
MSRIQEKKTITTATSPFIVMGIDVSKDQLDVYVSPAGNHHSFKNDAGGVAELVNVCRDHDADLVVLEATGRYHRMAHKTLHEAGVRTAVANPARSRNFARSVGRLAKTDRIDAQVLAEYGERVRPPASTPPSKQQAKIAEITVARRQIVDEMKILKQQQTQTLDDLVIAQIAARISLCQCHCKDLEQLLAELIEEDDGIRQKHEILTSIPGIGQTTAATLISELNELGGTNAKQIASLSGVAPMNRDSGSFRGKRKIGGGRKPVRDVMYMAAVVAIRWNKDMAAFYQRLKKAGKPFKVAITAVMRKLLILANTLLSENRLWSETQP

SEQ ID NO: 293315 - protein, 317 aa, unidentified
MEAPLIFVGIDVSKAQLDVAIRPSAQSLSVTNDRAGIKSLIKHLKKLRPQLVVLEATGGLERQVLSALIAGEIPVVMANPRHIRDFAKSIGQLAKTDRIDASVIAHYAEAVRPKPRPLPDEASLELRALSARRRQVVDMIVAEKNRLATASKVVKKRITAHIAYLEQELNDADQDLDRFIEKNAAWKENQQILCSTPSIGPVSSRTLLVELPELGALDRKKISALVGVAPFPRDSATLKGRRTIWGGRASVRSALFMATVVATRFNPVIRDFYKRLKAKGKPSKVCLVACMHKLLTILNAMIKNKIRWSENFTRQTT

SEQ ID NO: 293316 - protein, 319 aa, unidentified
MHCIGVDVGKQELVTYDGEKERIFPNDPKLSQFRRFIKATTDPLIVFEPTSTYSRRLETFCRTEKIACCQLNPRVVPHYRQVGKGRSKTDKTDAELLHRYGIERGPAEAVQLTYDALAQAVATHLACYRVVQKARVAYQGLVEALMQDPATSKSLLRGLLREIQELKKKEALHLTHAQAVVATDEDAARRLEAVLTIPGIGPITALTLQTLFRKTPQADRRQIVALAGLDPIQYRSGTSVHRKTRISKRGNREVRKRLFEATLSAARFNPAIRVMYQRLKEEGKPDKVARVAVARKLLLIAHAIYKTGEPFCSPTLKEA

SEQ ID NO: 293317 - protein, 417 aa, unidentified
MSEQEVRAPGACYVGIAVAQATLDTATLPGELRRRVPNTIDGRAELVAWVTELQPTLVVLEATGGDEAPVAAERAAAGVAVAVAVVKARQVRAFAQALGRTAKTDARDALVLARCADAVRPEPRELPDATAHEWAALVERRRQLVAMHTAEANRLQVMRVDAVRRRIRAHLDWLERQLHDLDEALAQAVEHSPLWRAKEQLLRSVPGIGPTTACILLAALPELGTLTHKQLAALVGVAPPSRDSGTLRGRRGIWGGRAGVRAALYMAALTVTRSNPVIRAFYRRLCERGKPKKVALTACIHKLLTILNALLRHHPHGRCLRRLDVQHSCSLVARRRRHQTGRSAGTGCWHGRGREVAGVGCGSPLLTLLSTCYTARGWPGPRLGGGASARDDRRSGRVRYPIAKARGLWSHSEQAWT

SEQ ID NO: 293318 - protein, 315 aa, unidentified
MMNAPVFVGIDVSQAQLDIALRPAGNFTAPNDDAGIAKVVDQLRAVAPTVVLLEATGGLELPLVGALAAAALPVVVVNPRQVRDFAKAAGQLAKTDALDAQILAHFAEAMRPAPRPLPDEQTHALAALLTRRRQLVEMLTAEKNRLASARKLVRTSLQAHITWLERELTRTDTDLAHAIRESPVWREKDELLRSAPGVGPVLTTTLLANLPELGTLTGKQIAALVGVAPLNRDSGTLRGKRTVWGGRAQIRAVLYMGALVAARYNPVIRAFYHRLCAAGKAKKVALTACMRKLLIILNAMLKHRTPWHANVAACA

SEQ ID NO: 293319 - protein, 346 aa, unidentified
MEIDKVGIDLGKSVFHLAGLSVTGETVVRKKFSRLQLLRFTANLRVRVIGMEACGGAHFLGRALRDQGHDVRLMPAQYVKPYVKTNKNDYIDAEAIAEAVDRPRMRYVPIKSEGQLDIQSLHRVRERWVKSRTALVNQIRGLLLERGITIRKGRRHAEAALPMLIEDAESNLSGPLRLLLTQLTSELRRLECQITEIDETISRGADEQEACKRLMAIPGIGPITATAIVSAVGNGAEFPKARSFSAWLGLVPGQYSTGGKQKLLGISKRGNGYVRKLLVHGARAVLQCRQKQSPGLSAWLGQLLSRAHPNIVTVALANKMARMAWALLIRGETYRPPLLSQQTAVI

SEQ ID NO: 293320 - protein, 344 aa, unidentified
MDRLSPVTRICKVGFTMENELHFIGIDVAKAKLDVDILRPDGRHRCKKFDNTLSGHEALVRWLRGHDVNRAHVCMESTSTYMEDAAAHLSDAGYTVSIINPALSKAFAQSEGLRSKTDKVDARMLAHFCREKRPSAWEAPHPTERALKALVLRHQALTEMQTQEKNRRETAPEVQLASIDILLGCLSAELARIEKQIKDLTDNDPDMKRRRKLLNSIPGIGPKTSAVLLAYVGLKERFREARQFAAYAGLTPRQHESGSSIRRVSRMSKMGHVSLRRALYMPAMVTLYKTEWGREFRERLEKNGKNAKLIIGAMMRKLAQVAYGVLKSGRPFDATLHTKNACMA

SEQ ID NO: 293321 - protein, 341 aa, unidentified
MPVTIVTVGIDLAKMSFAVHGVNEAGKPELVRPDVRRGKLLELIASLPPCLIGMEACSGAHHWAREFQKFGHAVRIMAPKFVAPYRMGGKHGKNDAADAAAICEAVTRPNMRFVPIKTIEQQGKLFVHRAHQGYVAERTALINRIRGLLSEVGIVLPQAFKAFHRGVHEALEDLPGYCNQVIGELMNELSHIQERIAQSERQIQLMARQDEQQAQRLMQLSGVGPATASAIVASIGNGHDFKNGRQFSAWLGLVPRQNSSGGKVKLSSITKAGDNFLRTLLVLGARSVLMNAVGKNDPVSRWALQLKERRGYGRAVVAIAAKNARMCWAALSLQDQFKVPT

SEQ ID NO: 293322 - protein, 339 aa, unidentified
MEQIKFFVGSDVSKEWLDMSIVKEGKVLHHAQIDNKAVAIKRWLRQTQKEFGYQYTGTLFSMEFTGLYNHHLLEVLHDKKAMVWLIPGLQISEGSTNGLKRGKSDKQDAGRIAVYASKNLEQVRLWRKPRKVIQELQTLLMLREKLQKTKHQYETTFKEYKSFSAASVCRLVKETTAVMLKTTKEQLLGVEKEMSRLIQGDEKLQELNEYITSVEAVGLVTAANVLVTTNEFLNISEAKQYACYAGVAPFKDESGKVRKKQKVSHKANKKMKKLFHLLAMSAIRMKGEMKAYYERKLAEGKNKMSVLNAIRNKIILRIFSCVKHKKLYEKNYVYSLAKP

SEQ ID NO: 293323 - protein, 391 aa, unidentified
MIYVGIDVAKDKHDCFITNFDGEVLFKAFTIANNLDGFNDLYQKIVSVTEDITKVKVGLEATGHYSYNLLGYLIDKGLAAYVINPLHTNLYRKSLSLRQTKTDKVDARTIASMLMSDVNLKSYSDISYHNEELKSLTRYRFDKVKERAKLKSSVSRLVCILFPELEKLVPTLHMASVYSMLSEFPGAKHVASAHLTRLTNLLSEASKGRYSKDTAITFREAARASIGSNMPAKSLELKHTIKLIQELDSEIDEIENEIKVIMDEINSPILSIPGINYRMGAMIIAEIGDFSRFDSPDKILAYAGFSPSTYQSGQLDGAYAHMEKRGSRYLRYALYNAAKYVCHWDPTFAGYLAKKRAEGKHYNVAISHAVKKLVRVIYHLEKTKQQYIKVA

SEQ ID NO: 293324 - protein, 343 aa, unidentified
MDYFAGLDVSVKDTSVCIVDDTGKIVREVKVSSEPEALLTVLRNPTYHFKRVGLEAGPLSQWLFSAMAEADLPVICVETRHMRAVLKARINKTDRNDARGIAQMIRVGLYRPVHVKTLRSQKLRMLLTHRKLLQSKAIAVDNDLRGTLRNFGLKVGMVGAVRFEARIRELVEDLPDLAVLIEPLLVVRRVLRDQVGILHRRLLAVVRDDEVCRRLMTVPGVGPVVALTYRATVDVPARFRKSKSVGAVFGLTCSRDQSGERDHPGAISRCGDEMMRTALYEAAQVMLVHSTRWSWLKAWAMQIAKRRGMKRAIVALARRLAVIMHRIWVDGTEFCWTREAAAA

SEQ ID NO: 293325 - protein, 412 aa, unidentified
MFKIFRKNCCGLDVHKTWIYACIGITDAIGLTEYKQARFSSFSKGLGELADWLAKYSCTEVCMESSGKFWIPVFNILEKTCFVTLAHPKYTKPQKGNKTDRKDAKWICDLFMCDMIKPSFIPSPEIRQLRDLVRYRTKLTNMRTGEKNRAQNCLTVSNLKLDDVFSDVFGKSSRSITNYMLDHPGETFDVAPFVDRRCKTPVAEIQAAVDGAISPEQAVKLRQCLTHIDELEAHRNEIEQEILLIAEPFSAVLDLLYTLPGFDKNPMTAIAILSEIGPDMSVFPSSKNLVSWAGCCPRNDQSASKVKSTRISRAGCYLKPLLVQVANALINSKKHPEFKERYHRIKSHRGHKKAIIAVCKMLLTAIWNMLSKLEPYNPDGFLEHRPVNEKKVLTKSQALELLRLRGYTITND

SEQ ID NO: 293326 - protein, 327 aa, unidentified
MNLHTLGIDIAKLKFDVCLITTSGKLKHKVLPNTSAGFAQLSAWLTKHEVARAHACMEATGTYGEALAMHLHAAGHRVSVINPAAVKAFAGSRLSRTKTDKVDAALIARFCLAQQPPQWTPPALEVRDLQALGRRLEALIEMRVAEENRLEAGSVVAVVRTSVEEHVAYLKAEIKRTEQLIGTHLKTHPGLRQQHELLESIPGIGETTAALLLAEIVDITQYRNARQVAAYAGLVPRERRSGSSVRGRTRLSKIGNARLRKALYFPAITALRCSEFFQNWAQGLRERGKCKMSVIGAAMRKLIHLAYGVLKTGKAFDPEWGRKAKTA

SEQ ID NO: 293327 - protein, 399 aa, unidentified
MLIVGIDWSKSKHDVALMDPDGSVLQYLVVQHTLEGLEALAGAIGRYESDRSEVRIAIEQFDGALLAWLRAQGYIVYGINPKSAQRARDRYRPAGAKDDRSDAYILADMLRQDRGSLRPLGRESQTPAELRTLGRLRTQRVQERTAVMLRLRGLLDDWCPELGTLCNDFGNVSWQREFLRRFPLLADLATADGRTVNAFIRRHRMRPAKADRIRELRKCRGLPIPAGREAALRLDVVFLVEQVERATEAIRTIEQDLQRLVDQHPDAEIFLSLPVKGLVGISALLAAFSGQDAPRHRELAARWGVAPVTVASGRSRFVKYRRACDGHMREALMFFAFNTAFRSDCWAQDYYRRKRAAGATHYGALRCLAQRWLKIICRMWTDKTTYDEQFHRRRLSLAS

SEQ ID NO: 293328 - protein, 369 aa, unidentified
MDQDNTVVGLDVHKKEVTVAVLPPGATRPKEVSAIENHDKAITRLVKRLTKTTPAVFVYEAGPCGYEVHRQLHHLGCLAVVIAPALTPTRPGDRVKTNQRDAEKLARLYRAGELTEIRVPTCEEEAARDLVRAREAALADRLRVRHRLSKYLLRQGRLYEGKRAWGTAHYAWLRQQRFALALAQQTFDAYLRAVEEADARLDSLTTQVLELAQLPLYAPLVRALRCLKGVDTVSAITVVVETQDFRRFEHARAYMDFAGLVCAENSSGDRTRRGAITKAGNAHLRRVLVEAAWSYAHRNTTGPTILKRRHGCPTAVVQIARRAQDRLHRRYWRLTQRNKLPQVAVVAVARELAGFVWAIACNVSSTVTA

SEQ ID NO: 293329 - protein, 366 aa, unidentified
MKKLTTKGMCRTEKLQDQQLTIGLDLGDRSSFYCVLNGAGEVIVEQKVTTTPDAMKKCFGKMARSRIALETGTHSPWVSRLLSDLGHEVIVAHARNVRLIGESRRKDDRLDAQTLARLARIDPQLLSPIQHRGAQAQADLLVIRARHALVRARTALVCAARGLTKSFGERIRGCSPKGFKQATGETLSPQLQVALAPLLSALETMNEQIREYNVQIEKVAEEGYPEVAQLKQVKGVGTLIALTYILTLEDPKRFQKSRDAGCYVGLQPGRRNSGQSEPQLHITKEGDSYLRMVLLQGAHHILGPFGEDSDLRRWGLKLAERGGKNAKKRAVVAVARKLAVLLHHLWISGEGYEPLHNTQKRTLAAA

SEQ ID NO: 293330 - protein, 388 aa, unidentified
MSTVLYVGMDVHSTSYSLATFALGDQKVRFELKIEPDCEQVLQYLDTVRRQLADTLGEVEFVCGYEAGCLGDTLYHQLTVKGIKCVIVAPTTILAPTSKRRVKTDRRDAALIARSLAFGTYHAVHVPTDEDKSVKEFIRMRDDHQKKLKQTKQELLAFCLRHGHRFTGTRGYWTNAHMAWLHSLELGGLLQETLGEYLATYESLKERVERLDRRIEDLSQGARYQERVGRLGCFLGIKAHIALALLAEVSDFERFGRAGHFASFLGLTPGESSSGEQRTRQGITKAGNSHLRRLLVEAAQSIARGRIGYKSKDLKARQHGNTAQVIGYADRANERLRRKYYRLIQRGVKRNVAVTAVARELACFVWGMLTDHLGLRCAGGGGVLPQQG

SEQ ID NO: 293331 - protein, 391 aa, unidentified
MNSLATAVSKIKEAEELYSLESRIFLESTGIYHYPLFCYLRDKGFNCSVINPIITKNSTNINIRKVHNDRFDSKKAALVGLKPDLKVSLMPSDLALNCRNLCREYYDLMDNRSAYVNKLQGELRMAFPQYLGIFSKITANTSLTLLETYTSPSAFIEADPQEIIDTIKSTARFGVAYAASKYNAIIQAAHDANEFGYILDSNIKRIRLYISFIRKYDEEIKNILDAMHELIDANEETDFVKQIHLVETFKGAGFLSAVTLMGEIGNFSAFSKPKQLFAYFGLDPAVKQSGKFEGTKIQISKRGSAIARRAIHTLTLQSISTSRTGEAKNPVLRDYYLKKCELKPKLVAMGAVSHKVCNMIFAILRDNKPFEIITPQEHIQQYNAAKCDIAA

SEQ ID NO: 293332 - protein, 310 aa, unidentified
MNQLFVGIDISKDRLDVHIQPTEECYSLAHDEAGVAEVVRRVRDLGPQLVAMEATGGYEIRLAAALGSAGLPVVVVNPRQIRDYARATGQIAKTDRLDARVIAAFAGAVRPAVRPLPDDEAQQLGEVIARRRQLVDMLGAETNRRRMVRDPRLRERLKDHITWLEQAVGEVDDDLRGLVRGSVLWRETDDLLRSAPGIGEVTSFTLIADVPELGRLGRRRIAALIGVAPMNRDSGTLRGRRMVSGGRAPVRAVLYMATLSAIRYNPTIAAFYQRLRAAGRPGKVAVVAAMRKLLTILNAIVRERRPWQPA

SEQ ID NO: 293333 - protein, 481 aa, unidentified
MAKRKMSTFERLRSGRMNRQERKEWQQRLYAEDAGLQVVHPDAAGIDVGNASHFVAVPSDRDEEPVREFGSWTADLRRMAEWLKRCGIRTVAMQSTGVYWVALQEILEREGFVVYLVNARATKNLPGRESDVQECQWLMKLHTYGLLRNSFHPPKQIRAVRTIWRQRDRLVKEAGREVQQMQKALTTMNVQLANAISDVSGVTGQAIIRAILRGQRDPQQLAKLRDYRVAASEAEIAHSLEGNWREDVLFELQQVVDAYDFHQKQIAACDVQLERYMSALPIRSGPGPSEQSTADVLSEKPNKQRRHKLQKNQPTFDLAAELQRTMGVDVTAIDGVDVMTTQVILSELGPDLSASFPSEGHFASWLELAPRRDVSGGKVLRQKSRKSNNRVATALRMAAQSLWRSDSYLGARYRHLRARLGGQKAVKAMARYLACLIYRLLTKGKAYVDRGAAHFQSKRTERELLALRRKAAELGMELVAV

SEQ ID NO: 293334 - protein, 353 aa, unidentified
MSYDYHIGVDYHKAYTHLVVQDGGGKVLRSGKVKNDPRSLGNFLAPYLENSHAVMEASRNWTVMYDWLDELCDDVVLAHPLKVKAIADAKIKTDKIDATILAHLLRADLIPESYVPCEAARALRQALRERIFFVRLRTMVKNRVVTIFDRYPEQTRALREMSDQFGKIGRGQLELLSVSTIDREHIDRALAFIDDINQRIREAEKTIRRFSKDNADVKRLKTIPGVGEFFARLIAAEIDEVSRFRSAKKLAAYAGLVPSTYASGGKCWNGRIIKAGNKWLRWAFVEASIPAMRAEPALKFDYERLKATKGANRAKVVVARKLLTIAYQVLRDQRDYERRDALEERPSNSSRLS

SEQ ID NO: 293335 - protein, 362 aa, unidentified
MNTTSLKTIGVDLHKSSLTATVLDPAGAVLERKDLPTKCRHQIAAYFASHGPDVQVAVESVGFYHWFWDTVKPRVRRLHLADPAGVRAAAGRRTKTDRNDSLLLAELLRDHRLPMAYVPDEPIRALRELCRHRHRLARQLALARRHLRWIALKNNLPGPDTFTSDRAQKWLLAQDAKLNAVHRLSGRQFVDQITALERQLADVERVLQDTVATHADLAPTLALFQSVPGIGFLTALTILCECGDITRFDHIDELSAYAGLCPRVTQSGASAHHGHISKQGPPQLRWALQQAAWVAIRCDPNARRIYARIAKRAGSKKAATALARKLLSYAWSVCRRGQPFVWPNTETKTRNASAVPVWSYDI

SEQ ID NO: 293336 - protein, 366 aa, unidentified
MDTIYIGVDFHARQQTICYLKTETGELVTCELKHQDKEVVRAFYAQFSGQIIVGLEASGYSPWFERMLEELGCQVWLGHATEIRRRARWRQKNDRRDAELILELMLHDEFPRLHRPAVQSREVLRMLRYRQKLIKMRTMSKNSLQAIALQAGLAKGSRLFTKAGQQELGTAEMSPVLHWQREHWLQLMEPLNQQLLETMVWFKSQSKDDDRITRLRTHPGIGLLTSLCIVHTLQPVSRFRNTRKVAAYAGFDPIERSSAERKCFLGISKAGSRLLRYLLVEAAQTAVRKDEDLKRFYQRLADRRGRPKAKVAAARKLLIRAYIMMRDEIDYAEFRHRAVAARLARRSQGPANVPEVLIGQPASPEQ

SEQ ID NO: 293337 - protein, 349 aa, unidentified
MEAYDGPQIVGMDLHRRRSVLVRMGEDGRKLATARISNSPARLTAEIKRAGLHPKVVLEACYGWYWAADTLAAAGAEVHLAHPLGVKGFSHRRVKNDELDARDLADLLRMGRLPEAWIAPAEIRELREITRYRGKLVQLRTSCKDQVHGVLAKLGIEVTCSDIFGAWGTRWLDELPLPQPYCWKVASLRQLISWLTAEITVLEQVTADLLAGHDAYRAVQELPGIGPVLGAVIVAEIGDVTRFRHPARLCSWAGLTPRHYESDTTVIRGRITKQGSPVLRWALVEAVQRTPAGTPIHQARDAIIARRGPQARNIAKVAAARKLLTYVFYAMRDGHVRALAGPAAEHQAR

SEQ ID NO: 293338 - protein, 334 aa, unidentified
MENIALIGIDLGKNSFHIHCQDRRGKAVYRKKFTRPKLIEFLATCPATTIAMEACGGSHFMARKLEELGHFPKLISPQFVRPFVKSNKNDFVDAEAICEAASRPSMRFVQPRTESQQAMRALHRVRESLVQDKVKTTNQMHAFLLEFGISVPRGAAVISRLSTLLEDNSLPLYLSQLLLKLQQHYHYLVEQIKDLESQLKRKLDEDEVGQRLLSIPCVGTLTASTISTEIGDGKQYASSRDFAAATGLVPRQYSTGGRTTLLGISKRGNKKIRTLLVQCARVFIQKLEHQSGKLADWVRELLCRKSNFVVTCALANKLARIAWALTARQQTYEA

SEQ ID NO: 293339 - protein, 325 aa, unidentified
MAYIGIDVSKQKLDCLWVRDLSKSKVKTKVFPNRHQDYPGLLDWLVRQTGEDISNLHVFLEATSIYHEPLAYWLHDMGVTVYVLNPAQVRHHAKGMGVRSKTDRKDSMMLARYGIERNPKPWQPEPTEVRELKRLINRLEAVEDDLQRERNRLEKAEFNTDTQASESISYMLVALEREVQRLQQAIADHFEAYPPLKQDRKLLESIPGIGNVLSARLVATLRSRDFRSARQAAAFLGLVPILKESGTSVKLRTHLSKAGAPSIRRKLYMAAIVSTRCNPDVSEQFARLKARGKPTLSALGAAMRKLVHIAFGVLKSQSEYRPQGA

SEQ ID NO: 293340 - protein, 408 aa, unidentified
MKTLHKRCAGLDVHKAEVVACLRVITNRKVGREVRRFPTTTQGLLALAEWLENAGCTHVAMEATGVYWKPVWHILEGHFVLILANAAHVKNVPGRKSDVNDATWLGDLLAHGLIRSSFVPPPEIQELRDLTRTRRQLTREIVQHVQRIQAVLEEANIKLCSVITDIMGASGRRMLKAMIAGETDAEKLAALGHERLGCTRAELVEVLTGCVREHHRFLLGQHLRTIEQLEDSIAAFDARIEGALSPFHDIVERLKEVPGLGATATETVIAEIGTNMSPFPTAGHLLSWAGFVPRLDESAGKRRSTRIRKGAPWLKPVLVQAAWGAARKKNCYFQAQFLRLKARHGAKKAAIAVAASILTTVYHMLRDGTCYQDLGPEYFTRRNPAKAAARLANRIRNLGYHVEIRAAA

SEQ ID NO: 293341 - protein, 370 aa, unidentified
MKKNSTVAQSSKRTAARQEGPITIGMDLGDKTSRYCVLGRNGERLSEGSVATTRKAMTQKFAGMRRCRVAMEVGTHSPWLSRWLTGLGFEVIVANARQVQLISANSRKNDRMDAHLLARLARVDPQLLRPIRHRSERAQTDLMTIRVRATLVEARTSLVNAARGFAKAQGDRLPACDTDSMGVERMESLPEGMRDRLRPLLEQVESLTEKIHELDANIEQIARTQYPETELLRQVSGVGTLIALTFVLTVEDRDRFQKSRDVGCYVGLRPKQSESGQSQPQLRISKEGDMYLRKLLVQGAHCILSRRGPDTDLKRWGLKLAERGGKNAKKRAIVAVARKLAVLLHRLWVGGEVYEPLRNSQTAQSSNQAA

SEQ ID NO: 293342 - protein, 380 aa, unidentified
MQPTHLFNVTSSLALSLELSSGSWKIAACDGCREKPALHGADAKAPWERLQQVLQCIEQLKAKWQLPADSEIYVVYEAGQDAFWIARALQAAGIKVFVVDPASIPVARHARRAKTDRLDALTLLESLFGWLRGERQRMHVVRIPSQQAEAQRQLIRDRGELQKEIGQHRDRTRKLLRTVGCWEEVQADLPARLDGGTLRCWDGQALPEPLRERLARECERLVLAQQQLAALEEQLRRQLPAPLQQRIEQLARLKGVGWIGAMRLVIELFWRQFHNRRQVGSCIGLVAQPYDSGASRVDQGISKQGNRKVRALLIEMAWMWLRYQSESAIARWFAMRTAGNAANKRGKRIAIVAVARRLAIALWRYIEQGVMPEGAKLKSA

SEQ ID NO: 293343 - protein, 304 aa, unidentified
MAKHFLKVIAGIDTHSDTHHVAVISDTGEHLADKEFLAVGSGYRKIVEFITSFGTVLAIGVEGTGTYGAELARVLPGEGLQVLEVMRPNRQYRRLHGKSDPLDAYQAAEAALAGSGTSLPKARNGAVEAMRVVRAERSTAMRARVAVITQIKSILVSAPDTLRSRYRGMTGTAIIAALEKSRPGGDLNDPLNTTAIVLKRLARRYRALAQELALIDTELDALVTAHAPMLRDLRGVGTDTASQLLVTVGDNPERITTEAKFAALAGVAPIPASSGKTTRHRLSRSGDRQAKQSDPPHRTRPHEL

SEQ ID NO: 293344 - protein, 370 aa, unidentified
MEAIDPGIDVHKKICVACIKYEGGTTLTEIKFSNNKEGFNHLLSVVGETEARAVMESTGNYWLQLYDTLEAQGIEVVLANPRKTRVIAESNLKTDSVDAAMLADLLRADLIASCYVPPPEVRDIRALIRKRMSLKKECTRVKNRIHSLLAKHELPPFPGSDLFGKKGLQWLEDQKEHPSPVDWIIREVELIRLKNLIDLIEKINGDIAVIAQQTEEVSLLMTITGVDYYTALLFTSEIGDIHRFSSSSKLSSWIGLVPRVHQSADTYYHGRITKQKSPLVRWALVQAAQVAVRWDPHWREVYERISSRAGKKKAIVAIARKLAVTMYCMFTRKEPYRYCNEETYRRKVNKLQRIISTTPKNRGETVLLSS

SEQ ID NO: 293345 - protein, 392 aa, unidentified
MIYVGIDVAKDKHDCFITNSDGEVLFKPFTISNNREGFETLFERISSVSDDLNKVKVGLEATGHYSYNLLGFLLDKGLPTYVINPLHTNLYRKSLSLRKTKTDKVDSRTIATMMMSDMNLKSYSNTSYHNEELKSLTRYRFDKVKERAKLKSSVSRLVCILFPELEKLVPTLHMASIYALLSEFPSADAVANAHLTRLSNLLSESSKGRYGKDTAVMFRDAARGSIGSHMPAKSLELKHTIKLIQELTIEINEIEAAIKRIMDEEIHSPILTIPGISYRMGAMIIAEIGDFSRFDSADKILAYAGMFPSTYQSGQLDNCYSHMEKRGSRYLRYALYNATKYVCQWDESFRVYLEKKRSEGKHYNVALSHASKKLVRLIFALEKSGQAYLPTT

SEQ ID NO: 293346 - protein, 424 aa, unidentified
MRAIGIDVHRDFCEVAISEGGQLRSAGRVPSTPDELELLAQSLCADDEVALETTGNALAIARILKPHVSRVVVASAKELHAISGAKAKTDRRDARTLAKLLAGGLLEGTWLPDEEVRALRRQMARRAQLVRQRSRLKNEVHAALYRNLAGAGPTSDLFGAAGRRWLAELELPADERETVEGCLRVLDFLGAEVQRLERSVARYALGSSEIRRLVTIPGVSLITAATLVAVIGDVSRFASARKLVGYLGLDPRVRQSGSSPARMGHISKEGAAAARRVLCEAAHATMRTPGPLHAFGQRVAARRGRQVAIVAVARKLASLAWRLLTSGEDYAYASPSRVALKLRRIELRAGEPQRRGRSAVTLAAQREREREIALAAERAYRRLVADRQATASKRGAGAAGGRASSRVLEGPSSAANASAPASAL

SEQ ID NO: 293347 - protein, 387 aa, unidentified
MYFVGIDISKFKHDCFIVDNNGEVIVSSWSFANDQEGFLLFKDFLDGLEGEIRIGFESTGHYTDNIRLFLERHHFSFMELNPLLISRFNNSKSLRKTKSDTIDAALIAQYLMTVEYKPNPPTLYHIEALKSLTRFRDKLVKLRSRQLVELTNILDKVFPEFKPFFSNRFSATAIYIIANYQTPENIANMNSRSFELLRKKSKGKFTMAKFIQLKELAKNTVGNSSDYLIDELDMVIDIYSQLDSKICEIEALIKEYIADINPPMLTIPGIGPFSAAVILSEYGDINNFDSPAKMLSFAGLEPGYYQSGVSEHTGKMVKHGSGHLRATLMNCCLPLISHDLIFAQYYSKKRAEGKSHRVALSHVAKKLVRVIYTLQTKSISYDSSLIR

SEQ ID NO: 293348 - protein, 360 aa, unidentified
MSSTNEPTRSVVIGGVDTHKDLHVAAVVDHQDRVIGSRSFASTRQGYRQLLAWMRSFGELRRVGVESTGSYGAGLLRFLQQAGVMVLEVTAPDRQDRRKRGKNDDLDAQNAAHAAYSGQRTVTPRSRDGMIEALRVLVACRKTAVTARRIALQMIHNTIVAAPDGLRDQLRVMTRMQLVRTLATWRPDLTAYRDVEAAYRISLKSLGRRYLELHDEIADLDAMIAAIVEDLAPNLITRNSISHVGAAQLLLTAGGNPERMRSEASFAALCGVSPVPASSGKTIRHRLNRGGDRAANSALHIIAIGRLRTDQRTKEFVARRVAEGHSKLDAIRALKRYLAREVFTLIMQRQREINASRIAP

SEQ ID NO: 293349 - protein, 461 aa, unidentified
MKSKSSRKQNPVDPVAEEIPDAEHELVIERVAAIDVAKASGTVCLRLAAKSGRRVSRVWDVQAVTGAVAGLADQLTEAGVQRVTVESTSDYWRIWYYLLEAAGLDVQLVNARDVKNVPGRPKTDKLDSVWLAKLTEKGLLRPSFVPPAPIRQLRDYTRLRVDLTRERTRYWQRLEKLLEDALIKISAVASTLDTLSTRDMVEALIAGERDPRRIADLARGKMKVKRSALINALDGRFDDHHGELARMLLDQIDTLTAQIATLTSRIEQLLAAMPDTCSSGDSTIGGDRDTTARPTDAALLTPVERLDEITGIGEHNAQVILAEIGLDMTRFPTPAHLVSWARLCPRTIQSGPVTRGGKTGKGNPYLKGALGEAAAAAARTDTFLGERYRRLVKRRGRLKALVAVARSILVVIWHLLADPAARFRDLGPDYHTNRLTIEKRLRNHIAQLAAMGYRVTVEPAA

SEQ ID NO: 293350 - protein, 319 aa, unidentified
MSNHTIVCAGIDTGKRKLDAAIGHGAGELQVDNTLEGHAALSAWLQRHQVERVGIEATGGCEHEVVTRLRADGFTVIVFQPAQVRAYARFHLKRAKTDRIDAALIADCAAARKAEDIHAPPDQRIAPFAEQLTMIEQIGEDIARIKTRRATVRDRDIRQAWDDEIKRLTQNKRIRLRQLVAAIRQHPDLAQKLELIASVDSIALPSAVEILVRCPEIGTISREKAAALAGLAPYADDSSDQHGPRHIQGGRERLRKALYNAAFAGAFRWNKQLIAIYKRLTAKGKHHKAALIACARKLLSFVNAVVARQTPWVSQNQSA

SEQ ID NO: 293351 - protein, 372 aa, unidentified
MNTIAYIGMDVHTTNYTLCAISENSNNFYGRVTVPPEFKELERYFKNLHEKKGITHFICGYEAGCLGYSLYYALTEHQWKGFSVECLVIAPTSLPMPKGGRIKTDTRDALMLAQSMFNGTCSYVYIPDQSDEAVKEFIRMRDDTQQQLVQTKLRINAMCLRQGYDYKEPSRWTQKHLEWLKKLQFKEELFRVTLDNYLFMLNQQAENVARYDRQIEELAQTKRYNERVRMLCCLKGIGVHTALSLLVEVGDFNRFPAAKNFSHYLGLVPGENSSSTSTHRLGITKSGNNHLRWLLVEAANCYSRGNGLKTKAMKAKQAGCPKEIIAYADRAALRLRKKYVRIQLRSKACIAKVAIARELACFVWGMMTGHTA

SEQ ID NO: 293352 - protein, 413 aa, unidentified
MDKIYDNCCGIDVHKKLIVACLNHKRKKELREFGATTRELMELAEWLQKNECEIVAMESTGSYWKPLYNIMESYGLHAIVVNPAHMKAVPGRKTDVKDAEWIAELLQHGLLQPSYIPSKDQRELRELVQYRKSLVGERTRELNRLQKMLEGANIKLSGTVTNINGKSARKILEYILSGNEIDEKKYDEMYEEKLIAHNLKASKEQILDDLKGFMSPLQRRMLKELLQHLDELNVHIENLNDEIDNFMKPEEKQASQVIQDVTGIGNTSAQTIIAVIGTDMERFPSDRHISSWAGLCPGDNVSAKKRKSGKIRKGNALLKSTLVLCAHAAVRHKSSYFHAQFKRISTHRGKKRAYVAVAHSILIAIYHILKDGVKYQDLGAEYYNQFNAERKIHAYLKKLKALGWEPPKEAVPA

SEQ ID NO: 293353 - protein, 421 aa, unidentified
MSEDNLSQYSAYIGLDWADTKHDVCVQSAKSEEREFSVVKHNPAALDEWIKELRKRFGGMIAVAVELSKGPIVSVLQRYDFVVIFPINPSTLAKYREAFQPSGAKDDPTDAELALDLLVRHPHRFKPLQPQGAEIRTLATLVEHRRQQVNDKIRVTNRLRATFKEYYPHILEWFDHIDTPLFCAFFRRWPTLLQVKRARAATLRKFFHEQHMYREAVIERRITAIKSSLPLTEDEAIIVPFRLNAEVLVAQLELALEAVDRFDKEIKMVASKHPDYELFKSFPGAGSSLAPRLLVAFGEQRDRFGSAADIQMYAGIAPVTERSGRKHWVHWRWQCPTFLRQTFVEWAAQTINKSYWAGQFYYQQREKGLTYQAACRSLAFKWIRIAYRCWQTGAKYDESKYLKALERRGSPLVAQRSAKIA

SEQ ID NO: 293354 - protein, 268 aa, unidentified
MISPAIGIDVCKAHLDVAIQGVKDKPLHRQFPYTVDGQRQLVKWLHQHGVHGAPVCLEATGRYSVDIAWLLFKAGYPVAVENPARTKHFARSLMTRQKTDKVDAAMLAHYASVMPCRAWSPPSVLYSDLKELKRLIEDLQTDRTRVLNRLEGLRTASPARRHLNEQLRQIEEQLRQVEQELDDLIDNDSTLQAQSQLLTSIKGIGKITAQQLLAEIPDWTQFGSADELVAYAGLNPSHRQSGNKTGYTAVSKQGNAHLRKTLYLYNAI

SEQ ID NO: 293355 - protein, 431 aa, unidentified
MQLKQRARKLALVRGEPTVVVGIDIAKRKHWAWVVDGVTEVPVGSPFHFQNSREGFDRLLGKIARAKEKAGATRVVVGMEPTGHYWKPLAWYLQQAGFTVVIVNPAHVKASKELDDNSPTKNDRKDAWLNAQLVLQGRFSVPYLPDGVYAELRILTQARQQHRRKLNAALNQLQALLDEYFPEYTEVFADPLGQASLYVLQYRPFPQDVLAVPVTQLAAELRAASNRRVGLRRAQDLQEAARRSIGVPYGLDAARLQLRQILQEVIFWKERLAETEAAMAEALEKTGLAQYLLSVPGVGVVTAAAFLGEVGDLRRYADWRQLRKLAGYNLTENTSGQRDRSRTPISKRGRPGLRHVLYQMAMTAAAKNREFRALYKHFRTRQQNPLKGKQALVALACKLLRVLFTLVRKQCSYDPARALGAWRAEQLGLAA

SEQ ID NO: 293356 - protein, 335 aa, unidentified
METVYILGIDIAKKTFRAALTIEGANFFEQEVENNSKSIKAYLQGLRKKFGVSFSQLMVCMEHTGIYSYPLLEFLVKHHIKVCVEPALQIKQSQGMTRGKTDQVDARRIAQYAFKNRQGLKLWKAQRPLLQKLKALLTLRDRLVKTRVQLEVPIQEANEFIEESIRKGMIKNCKDTLKSLRKDILKIEGEIDSLIKEDQPLAQQVKWASSVPGVGKFTALNVIISSGEFDRISDVKKFACYVGVAPFEHSSGSSIRGKTRVSKMANMTLKKLLHLAAMSAIQCCEELKLFYQRKVAEGKNKMSVINAVRNKLISRIFACIKNKRLYQKDFKHVLA

SEQ ID NO: 293357 - protein, 429 aa, unidentified
MNCTQNKKIEQVKETTMIVGIDVGSEKHYFRAFNWRGIELTRKPVAFSNSMEGFNSFYNTIVELMQKSELEEALVGIEPTGHYWFDLGQFMGAKDIKFVMVNPHHVHKTKELDDNSPSKNDRKDPRVIAGLVRDGRYFYSYMPTGAYAELRNASNRRFVLVEEQTRAKNRLQKWIAVYFPEYKGIYTHIDAKGGMLVLKKAPTPEEIVRLGVEGIIKIWKDAKLRGNGHKKAMLILAAAMRSIGLKAGLTEARMEIQDLIEDYELQTKRLERVNDLIKGLCQQVRYADKLLEIKGIGITTVAGFIAEVGDITRFDSTKELQKLAGLELVADSSGKHNGKTKISKRGRKRLRYLLFEAAISVVGKNEEFKEIHRYYTTREKNPLKKMQSLIAVACKLIRVFHAILTKGIRYDASKMLKDIRHPGEQLKAA

SEQ ID NO: 293358 - protein, 348 aa, unidentified
MYVREDIVLAVDYHDENLVIRWFNCHTGEERLLKCPTTKLNIRRLIAKSVSEAAEVGGRVIWIMESTTGWARVKNTIGSMGKLVVANVLQMPLPPKAYRRKTDKIDTGRILREFLNGSLPTAFQPSGKLRQIRRLVATRESLVSRRTALRNWINRYLAHETWRTRQGMWSAKGIRSLKRFAASAEGPDKVVLSVKLRELEHLDHLQSSVEAEMLALYKHWPEAQWVDEIPGIAEISAVSILARIGPIERFGSPEELISFAGLAPGIQQSDGTKREGRIGGGGTDKHLRHYLIEATFWARRVPRYRPTYERMLQKRGPKIARVVIARMLLRSIYKMLTDRMRFDRLHVA

SEQ ID NO: 293359 - protein, 370 aa, unidentified
MLDTTTFVGLDVHARSIKAVSLDVMTGEVRCATFGYDAGAVAEWVRSVDPRARCVYESGVTGFDLQKRLSGLGVDCVVGAVSKMIKPSADRRRKNDRNDAEFLARMLSVGNVVEVWVPDDECEAARDLTRALEDARDDLSRSKQRLSKFLLRHGLVFDERTPTGRRKGNWTRAHWSWIESIRFAEGADNDVLAYYVDAVRRAAEDKARLEGLVEAETRKPRWRKRVDSLRCLKGVDTATAADLVFEAGEFSRFRNARSFAAWVGLTPSEHSSGESDRRGAITKAGNKHLRKALVEAAWHYLTCSARPKEPARGQAPDPGARRHAAKGVRRLVERRGALLARGVHNNKANVATARELACWVWAVGLMAEEA

SEQ ID NO: 293360 - protein, 403 aa, unidentified
MYNAVGIDISKNKGTIAILQPGGTIIRKPFNVSHTSQNLIELADYLGSLEGSTKIVMECTVRCHEPMLKALYEAGLFVSVVNPHLIKNFGNNSLRRVKSDPADARRIARYTLDNWAELRQHTPMDTIRMQLKTLNRQQSLYTKTKTMMKNNLIALLDQTYPGVNALFDSPVREDGSQKWVDFATTFWHVDCVRNMSLTAFAERYRKWCKRHGYNFSQSKAVEVHAGAQDLIAMLPRDALTKTMVRQAIDALNAISASMERLKAEMQALAAQLPEYPVVMAMHGVGDSLGPQLVAELGDVTRFTHRNAITAFAGVDPGADQSGTHEAKSTRVSKSGAPELRRALFLVMDCLLKTQPQDDPVYRFMDKKRAEGKPYLVYMTAGANKFLRIYYGRVKEYLASLEGN

SEQ ID NO: 293361 - protein, 329 aa, unidentified
MSNLLKKVIGVDVGAKFLTVSFNDHCDKDQVHNIENNQRSILVFLKKISTEDYCFVIEATGNYSSRLLHLSLEKGFESSLINCMSVKHFSRMKNIITKTDAEDAKLIRLYGEMFRPDIYVPKSIQVEHLDQEIKLLNDLEEEKRRYAVKLKAIRYNPHLNPNTEKHYEKRLKQLGKEIQEVEMRLPQLQDEEFKEIKDLLQSVSGIGEKTSLQLMTATSGFKNFHSAKSLVKYFGLAPRIYQSGKKSYSPGKCRTSKTHIRGMLYVCSRTAMKHNAPCKELYLRLLAKGKPKKVALIAVCNKLLRICFGVVKNKIAYQQDYQKNLKILT

SEQ ID NO: 293362 - protein, 292 aa, unidentified
MIIIGVDYHPSFQQIAFMDQETGECGERELNHSDGEAERFYRELKERGVSVRAGMEATGHARWFERLLAELGFELWIGDPAEIKTKRVRKQKTDREDARLMLKLLLENRFPRIWVPSPENRDLRQLLWHRHRLVQMRTRIMNQLQAVAMNEGYRWKKKLFGQQGRALLEKLPLAPWASRRRKELLELLDQLDPKIAELTAAVEREANKRPEVVRLMTHPGVGPITGLVYVLVIGAPERFPCGKQIGSYTGLIPCEDSSAGRQRLGHISKQGNTLLRFLLVEASQAAARCNPD

SEQ ID NO: 293363 - protein, 424 aa, unidentified
MNCNQNFKISQVTEGTLVLGIDVGSNTHYARAFDWRGLELSKVFKFKNSFEGFQSFVLWVNDLCCKYNKSKVIAGLEPTGHYWFSLGELLKENNITIAIVNPYHVKQSKELDDNLQTKNDSKDPKVIAKLVIDGRYSFPYIPEGIYGELRVADKLKNDITQQIISIKNKIHRWLSIYFSEYEKIYSSIDSKSGFLLLKETPLPKDIVELGSEGIVERWKQTKLRAVGLDKAKKLEEAAKKSIGCKNITSSARFEIKLLIEDYEYKQNQLNSITEELNKLCEKIPMIKEIAEIKGIGIATAISFVAEVGDIRRFKSAKQVQKYAGLALKENSSGKHKGLTRISKRGRKKLRTILFRATIPLIGFNKEFSSIYNYYIERKDNPLKKKQALTAICCKMIRIFFTILSKGIKYDETKMLHDIKRPVAA

SEQ ID NO: 293364 - protein, 397 aa, unidentified
MSRPKKKRVVGLDCHPDTFVAGVIVGFTSNSAQIEKVTGSLPIQSLQDWFLARKDEIDVVVLEASGNSFAIYEQLTDIGLDVLILESESVSRLQKELNETDRSSAVKIARVYLSGLTDEVWVPDAKTQERRHVYTAYKQAVTDRTRAINRIKALLNQKTIRLHRSQKLHQESTRTFIQASRDWSMTESLLLSEAFQDFDRAAEKAKTLKRIMANEIINDPNLFSLVRIYGLAHITIYGLMSVIGSVKRFPSAKKLVSYLGVAPGRKISGKTINKAKKGRHGRNDMRPLLVQAAQAILNHRSKSNPCHSWGHKIAFRRGRSRAIIAVARKIVTSVWYVLNGKAIPIQNHETRATMTEKLRRLVTHVGIAAVRSMGYRTYAEYIASRMQFFDDSTCKVT

SEQ ID NO: 293365 - protein, 357 aa, unidentified
MKEYIAFDCHKRYTLMEREQIKTGQRKQVRVEHCPGAIRQCLRGREPGTPVAVEATGNWYWIAEEIEQAGLEPKLVHPRKAKLMMGMINKTDKLDVHGLNRLQRNGTLPTVWIPPRELRDQREITRARMVMTAHRTRLKNRILATLSKYGWAGTEASDAFGKKARKQLNEAVKQLPAETARVTEALLQQLDFVQDQIEDFEQRMRELVRDTPEMNQLKTLPGIGRILSAVIGLEIGVIGRFASAERYASYSGTTPRVHASGDKIRYGRLRPDVNHYLKWAYVEAAHSVCMHRRTYPERHVSQLYERICKKKGHPKAIGAVARHLAEASFHVLTRKEPYRDPGLKQGQSREVSARTTS

SEQ ID NO: 293366 - protein, 405 aa, unidentified
MGSIERYDEVAVIIGLDVGKSEHHAVALNRDGQKLYDKPLPNTEVGITDVLRRLTEHGPALVVVDQPATIGALPVAVAQAAGVLVGYLPGLTMRRVADLHPGEAKTDARDAFIIAETARTMPATLRSIKVADEQIAELSMLCGFDDDLAAQITQTSNRVRGLLTQIHPTLERVLGPRLDHPAILDLIERYPSPAALRQAGQKRVATRLLKRAPRKGGVWAQEIFDALDQQTVTVIGTNAATIVLPRLARQLVELRQQRTDIATEVEQIVEAHPLHPVLTSMPGVGVRTCARLLTEIVGKHFPTAGHLAAYAGLAPVTRRSGTSIRGESPSRRGNKVLKRAMFLSAFAALRDPESRAYYDRKIGQGKRHNQALIALARRRCDVIYAMLKTGSLYQPRAQSGAALAA

SEQ ID NO: 293367 - protein, 340 aa, unidentified
MFTNFVGIDVSKSKFDLALIKGQDKEHVIQGVFDNTHKGIKSMSKFLEKEHHVQLSETIFCMEFTGVYCRPLTSFFVEQDCHVWIEMPVNIIRSLGLQRGKNDRVDAYRIALYAYKNRDDIKLWKPQRDIILQLRDLLALRERLITSQKALTNPIEELIAMGAKSAASRVRKNCQKTLSSIEKEIQQIDQELDDTIKGDPQLKELFQLATSVPGVGKLTALFMICFTNEFSMYTNPKQLACYCGVAPFEHSSGTSVRGRTRVSHMANKGLKRMLHMGAMSVIVRDPEMRTYYQRKVAQGKNKMLVINAVRNKIIHRLCAVIKRGYGYQSEIIFKERLVLS

SEQ ID NO: 293368 - protein, 400 aa, unidentified
MKHVIAFDISMGKSYMVIYNAQKQCVFESEIKHSKPEFKKLQEKIHELTDKTGELPKIVFEATGIYSRQLERFMQDNQYTYCLLNPLEAKLQCDSLRIHKTDRSDAHRLALTHFTATRRVFTGTDNLFYQLKSLSRLYSELDSELSIIRGRMHKVIQLTFPELERMFTSKSDLFLNFVQLFPHPDCILGLSKTIIKNRIRANTNKKISNITAEKKAIQILEIAKTSYPAVSQNDVLCDQLKLYARRYQELLHQKECCINKMVYIAEQRAEYDIILSLPGIGPNTAVRLMAEIGDITRFNNNKQLNAFAGIDIRRFQSGKTFFKDKINKRGNKHLRKLLFLIIQNMIKQRRYGQNHIVEYYDKLKTQPYNKCHKVASIACVNKFLKLLFHLITHDITMIIG

SEQ ID NO: 293369 - protein, 347 aa, unidentified
MDHIGIDVHKRESQICILAEGGELIERRIRTEAERFAAVLGDRPRARIVIEASTDSEWVARCLEALGHEVVVADPNFAPMYATRTRKVKPDRRDARALAEAGLLGAYRRAHRLSDVQRHVRGRLLVRDAVVRTRTRYISLIRALLRQQGYRVPSGSAEAFVTRVRALALPGPLLSLIAPLLAVMRHLNRQLAYSDETIERVAAHDERVQRLRSVPSVGPVTAAAFVATLDDVPRFRHAHQVEAYLGLVPRECRSGDTQRRGPITKAGSGRTRWLLMQAAVSILRRQPSDAEALRTWALHIAARRGKHVAVVALARRLAGILYALLRDGTVFTPRRSPQPVTAAPLPI

SEQ ID NO: 293370 - protein, 339 aa, unidentified
MYYGAIDLHMNNSVLGIINADGQRLYMRKIPNDLDLIKKALGPFAENLEGIVVESTYNWYWLVDGLQNAGYRMHLANPTAIQQYSGIKHTDDVTDAWWLAELLRTRQLKEGFVYPRAERAVRDLLRKRAHLVKQRTQNILSIQNLTCRNTGGRLNANQAKQLSEEAVKKFYDKEEERALAINCSLRVIQTLKREITIIEKHVKSKLKLSQPYQVLQSVPGIGELLAMVIMLEAGDMSRFPSVGDFSSYCRCVDSVRLSNGKKKGSGNRKNGNKYLSWAFMEAAHYAIRYYPVIRKFYQRKSAQKGIFVACMAVAHKLARASYYVLRDQVPFEETKCFVN

SEQ ID NO: 293371 - protein, 413 aa, unidentified
MSEPIYDVFCGIDVGKTSHYAVALAPDGQQLCGTDLPQDESRIRCLFKDLARYGRVLVVVDQPRNIGALPVAVARECGVDIAYLPGLRMRRIADLYPGRSKTDARDAFVIADAARTLPDTLLRIDEQNAAVEGLRLLAGFDADLASEENRLVNRIRSVLLSVHPALERTIGRQMHRPVGPGLLAEFGGPEGFTAVTRQVLDESARAFAPRLWKKITDEIVDALGQQSVIVPGTDKADFVIRTLARHLLEVRRARAELAEQFETELGKHPDGPILMSLPGVGCRTAVTMLVEISGIDRFANAGHLAVYAGVAPRTHRSGTSIKGEHHRHGGNSRLKRAMYLSAFAALRDPLSRTYYDRKRAEGKNHRSALICLARRRSNVLYAMLSNGSTYTPTAQQAIPSDVSTTRDAVRNAA

SEQ ID NO: 293372 - protein, 353 aa, unidentified
MKYDKYMGLDVHQAMTVAVVIDAEGKVVLETMVATEAAAVLRLVKSLSGPMRVTFEESTQAEWLYELLRSHVTQVVVCDPRRNKLLSEGSKADKVDARKLADLLRSGLLRSVYHGHQATRKLKELVRAYETFSLDTQRTMNRIKAIYRGRGIATPGRGVYQARTRDQWLAKLAEPGLRQRAAWLYQQLDQLKPLRKQAKQVMLAESRAHRAVSLLRTIPQLGPIRAAFIVATVDTPHRFRTKRQFWSYVGLAVVTHMSAEYEMKAGKVVRRRKPVATRGLNRCCNHRLKEVFVSAATGGTRDESYKLYLERLINNGMRADMARITLARKIAAVALILWKKGKEFDPRELNRTT

SEQ ID NO: 293373 - protein, 420 aa, unidentified
MTRKEDSRIIGIVHPICCGLDVHKESISACVIFPDKDGVDQHDVKVFGTFTDELMRLRLWLLDRACPVVAMESTGIYWRPVHNVLEGALRVVLVNARDIKNVPGRKTDIGDSKWLAGLLRHGLLKSSFIPSQDVRQWRDLTRLRKKYVHSVGDYRKRTHKLFESANIKIDSVVSDLFGVTGRNLMHLLVTDRDRLTLSDIQSCVRGKLRGKEAELFRSIQGFFTDHHRFILKMLLSTVATLEAQIEALDHEICCAMKEHEPLLNRMKKAAGIADVSSREILAEIGPTLDTFPKDTSLASWSGLCPGNNESAGKRKSGRSPVRKHYLKTIMIEVAWAAIKKKGSYFKDKYYRLKARRGAKKAIVAIAHRILLGIYHVIKDGVDFRDLGEGYLTLRNKSQKVFHLRKQALTLGFELVPQATS

SEQ ID NO: 293374 - protein, 351 aa, unidentified
MEYIAFDSHKRYTLASVEKLSGGQLCELRVAHERGSIRQFLSRWAVGSPVAVETVGNWYWIVDEIEEAGMVPRLVHARKAKLMLAMVNKTDKLDARGLNRLQRSGTLPTVWIPSRHLRDQRELPRTRMVFSRMRTRLKNRIHATLAKYALSVEQVSDLFGKKGRELLQQVLAQLPPQTRFATERLLEQLDTVDRHIQLFEGRIHEVFEPAPELALIMSLPGVGFILGIVILLEIGDVQRFASAEHLASYAGAAPRVNASGGKVHYGQVRQDVNRYLKWAFMEAANVICLNHRRFPQRHVHRLYERVALRKGYQKAIGAVARHLAEATYWILKKGESYREPGTQKKVSSTKG

SEQ ID NO: 293375 - protein, 433 aa, unidentified
MVRKINENAAGIDIGSRSHFVAIQTGEVREYSSYTSSLEEMALWLKESGVETIAMESTGVYWIPAFELLESKGFDVNLVDAKQAKNMPGRKTDVSDCQWIQELHSFGLLTSAFRPNDQIAALRSLVRQKDNLIKQSSTEILHMQKALEQMNIKLTNVLRFITGQTGMKIIRAIVKGERDSLKLAEHRHKSCKRSKEEIAEALKGNFREEHLFSLKQSLAAYDFYQKLIKECEAKISNALKKLSKLKKKIVKNKKDISIKEHLVGITGVDLTAVNGIGDISALIIVSEIGDVSKFKSEKHFASWLGLCPGSKKSGGKVLSGKTKNVTNRITQTLKMAANSLYRSQSALGAYFRRMKFRKGAAKAITATAHKIAKIIYNMLKFKKPYTDPGIDKYEKNIKILKIKKFNKLALELGVVLSEKARDSLNNQFLSVIQ

SEQ ID NO: 293376 - protein, 421 aa, unidentified
MKFKSQDKQNQLIENISSLHLVVGVDIAQESHVARAVSFRGIALGSPLEFGSYDEGFQLFCRWIQDLLKSYKLSKIIVGMEPTGHYWLSLARWLSGQGIETVLVNPHLVKKNKENRDNTLSKSDRKDALVIADMVKNGYYSPVRFNPETYEELRILMANRDTVTKRLNSAVNQIHRWVDIVFPELRHVFKILTCTSAIATLRLFPFPKEISQLTTEQVIAGWKQYVKRHAGLRRAEQLIALAKRSVGATKALHAYKLHLGQLLEEYDLAQRQLEQIEHEVHLVLERIPYAQKLLSIRGINVTSLAGVLGEAGDLSGYAHGNALLRHAGLNLAEASSGKWRGKMVLSKRGRPRLRRFLYLMTMCMVMTNPDVRALHHYNVDVKKLKKMKSIMKLCGKVARMLVGLAKSSEAYSSVKIFPQVA

SEQ ID NO: 293377 - protein, 346 aa, unidentified
MLHAGLDLSRRKVDVCLLSSRGEIVDEWASPPDADGLRGLAARAAMWAPAVRGVIESMNGARFVHDQLEEHGWDVLIADATKVKGLAPLACKTDKIDARVLATLSARDLVPEIWLPDPSIRRERELARFRLHLVRHRTTLKNRIHAALIAFGHPCPVSDLFGHAGRELLDRLAIPDPWRRNIDVSLQLIDDLELQIARLTVELKRQGADHRYIPLLVSAPGFGWINAFTVASEIGDINRFASPAKLCGYTGLCPRVNQSGASDRRGPISKHGPKYLRWALFEAALNACKHPLYKERYQHTKRRLGHQRGPKVAQIELSRRLTEAIWHMLTRNQPFAPAGAPFRLAA

SEQ ID NO: 293378 - protein, 462 aa, unidentified
MPRPSRTPATYRIDGLPTIFANAAGMDSGADEIVVAVPPDRDSQPVRACRTFTPDLEALVIWLLACGIDTVAMESTGVYWIPIYELLEQHGIVPYLVNGRHVKNVPGRKSDWNDAQWLQKLHALGLLRASFRPDTKISALRTLVRYRAELIAHRAPHILHMQRALQQMNVQLERVLSDIMGTTGQAIIRAMVAGERDPVALAQLRNPACKSSEEMIAKALRGSWKDELLFVLRQALAIYDVYTAQIAACDGELEQYLQRMQARSGEPEAPLPDLPPAKRDSHSKNAPNFNARAHYARLLGVDLVAVMGLSASSVQTIISEIGTDMERFATVKHFCAWLGLAPRNDISGGKVLRSRTQKVNNRATQAFRQAAQSVSRSDSAVGAYYRAMRARKGPEQATVATAHKIARIVYHLLKYGEAYEAESADTYEQKRQERELRALTRRAAKLGYTLAPVQEPAPDPSP

SEQ ID NO: 293379 - protein, 334 aa, unidentified
MQNITLIGIDLGKHSFHIHCQDKSGKVLLRKKFTRTKLIEFLAGCASSTVVMEACAGAHFMARRIADLGHEAKLISPQFVRPFVKSNKNDFVDAEAICEAASRPSMRFVQPRTEAQQAMRALHRDRESLVSDKVKTTNQMHAFLLEFGISMPTGVAVVKRLSTVLAENELPPYLAQLLMRLHAHYIYLVGQITELEIALEQELSRDEVGQRLQTIPGIGPITASVLSSQLGDGKQYSCSRDFAASTGLVPRQYSTGGKNTLLGISKRGDKNLRRLLVQCARSFIQRIENQSGRLADWVRALLARKHSSVVCCALANKLARIAWAITTQQTVFER

SEQ ID NO: 293380 - protein, 440 aa, unidentified
MAKLINFEQIHAHGAGIDVGAKNIFVSIDGEQVVNFETFTEDYRRCCRYLKENGITSVAMESTGVYWMSLYSILEDAGIKVCLVHPRETQQVKGRKTDVKDSQWIQKLFSAGLLRESIVAEGALKELRMLVRERLDLIEMGSTYVNKMQKYLELMNIKLKNVISQIHGFSGLQIIRAILNGERDVDKLLSLCDIRIRREKAEEVKKSLTGNYTPQYLLLLKENLRLWEEHQKSIASIEKEIEKLLDRMCADKLDIKVESLPQPSRHHNPDIKNLHEKVVRLYGGVNLTTIAGINDVTMLRLLGETGSDMSRFPSVKHFVSWLGLSPKNKQSGRMKRRVKSQSNNAGEIFRQSAQSLSVSKHNAIGAFIRRLKGRKGSPVAIKAGARKIAEAYYNALTKGMEYVEQGAIKYTEQLKQREICALKKLALKHNFIIVENQNVA

SEQ ID NO: 293381 - protein, 445 aa, unidentified
MIQIINPNAAAGDVGSECIYVSIAGKPAEAFGTVTAELGRLRDYLLANQVDAFAMEFTGVYWMPLYELLEKTPIKVCLVNGGHVKSLPGRKTDVADCMWLATLHAHGLLRPGFVPGPQIRRLRDYVRLRDNHVRQAGSHLQQVQKAMELMNIKVHDVISDMAGVSGQRIIRAIVGGERNTEVLIGLCDEAIRNKKRQRLCDALQGTWAAQHLFALRQAWKAWEFCQAQMAECDGEIEIVLREMAQGAQPGDPPEDTEDRKAKRPSKNAPKILDLHETLRKVLGGRNPTRIPGLGDGTVLSLISEVGTDLSLFPSEKHFTSWLGLAPGSRSSGQRKRSYSRKGGRAGQLFRMVAQTVGRTVNSGLGAAYRRIRSHRGGLVASKALGRKLAELYYRVMTRGMKYVEEGLEQAEKRYREQQSKRLNRLAQQMGFVLIPRDLNPQPTDS

SEQ ID NO: 293382 - protein, 341 aa, unidentified
MEKITTIGLDIAKHVFQVHGVNGAGATVSRRKLRRDDVVGFFKALPSCLIGIEACATGHHWARVLRALGHEVRLMPASYVKPYVKRQKNDATDAEAICEAVTRPTMRFVPVKSEEQQSVLMLHRVRELLIRQRTMLVNALRGHLAEFGIVTQQGIAGVGMLIALIEDGDHDLIPSPARSALLPLIGQLREVHEKVSEMDRQIHAWHRSNELSRRLETIPGIGPITASALAATVIDASLFKSGRQLAAWIGLVPRQNSSGGKDRLGRISKQGDPYLRRLLVVGAHAVLRFSRKAKTAPTRWAAELLVKKPYNVVAVALANKMARIVWALMTTGRRFEATAAL

SEQ ID NO: 293383 - protein, 340 aa, unidentified
MLNLPVFVGIDYHTHILQVCVMDQQRKILANQSVANSVEAVFRIVAPFGSNVHVAIEACNGAADFADELAAKYPWHVELAHPGYVARMKQTPDKSDWTDAKLLADLTRAGYIPRVWLAPKHIRELRDLVRHRHGLVQQRTQVKLRLRALLRQHRITCPYSPWTIKGKAWLLDKTNITAPTLMFLIRDHYDTIAFYDKKISTVLEQMQNEVADDPVVKQLLRQPGVGVITAITMRALIGQFDRFRTGKQLAHFCAVCPRNHSTAGKTTTGGLIKAGDELLRQVLVEAAHRLIRYHPEWKAMATRLKANGKKTCVVVAAVANRWVRRLFYQMTSSESAGNPA

SEQ ID NO: 293384 - protein, 467 aa, unidentified
MTPPKDFCLDPGPPAPTPTCPPSPVLSDALQICHPHAAGIDIGEAEHWVAVPPGCDPQPVRRFGTFTVDLDALADWLIDCGVTTVAMESTGVYWIPLFELLEARGVQVLLIDPRQAKRAPGRPKTDRLDCKWLQRLHAYGLLAGAFRPEDQVCVLRSYLRHRQMLLTSAAHHIQHMQKALQQMNLKLTQVVSDITGVTGMAILKAILAGERDPVILAKLRNPHCQHSEDEIAKALQGTWRTEHLFALQQAVALYDFYHQQLALCDRQIKAHLETFADKSAGQPLPPKARRHKKTNEPRFDARTPLYRLAGVDLTTIEGIEENTALIILSEIGTDMHRWPSVKHFCSWLGLCPQHQISGGKVLSRRVRPGAHRVTVALRLAARTLHHSQSALGAFFRRMKARLGTPKAITATAHKLARLVYSLLQHGSAYVQQGLDAYEAQYRERKVTTMAKQAKALGYTLVPLAAQG

SEQ ID NO: 293385 - protein, 347 aa, unidentified
MLYAGLDLSRHRVDVHLMNQAGETVRVTTAPPDADGLRGLVRQTAGLGQPVLAAIESVNGARFVHDQLERAGWEVQVADAQKLKGLAPLACKTDRIDAWVLAELCRRELVPAIWLPTPEVRAERERARSRLHLVRHRVALKNRVHATLLAFGRPCPTSDLFGAGGRELLGRLGLPEPWAGTTAAAVALIDDLEAQIDGCERELRRLGADHAYVPLLMTAPGIAWVLGYTIAAEIGEITRFATPKKLVGYTGLCPRVYQSGSRDHRGPLSKNGPKYLRWALIEAAVHAARHPVYRDHHQATRQRLGKQRGPAVARVEVARRLAGAIWHMLTTQAPFAPARPHACALAA

SEQ ID NO: 293386 - protein, 325 aa, unidentified
MTYYLGLDVSKDTVDAQLCKDARCIHYKITNDAAGWQQLVDVLRALPEQDVHACCEYTGVYYLGLARAIHAAGYRMSVVNARSIKAFAQLMMVRTKTDKKDAQLIARYCEVNQPCAWSPPSGDAADLKALNRRLHQLNKLRTAEKNRLQVAQEICRASHFAMIEMIDGQIDEVRTKLNEMIAACAERRKRQQRLQTIPGIGPVAAAALQTVLMEVEKFPTAKQFVSYLGLSPVIKESGKSVRGRSKMSKMGDAYIRASLYMPARSACLRSRAFSGWAKAKMAAGKPAKLVYVAMMRKLAIYAYYVVKNDKDFELPMLGGTGQAPG

SEQ ID NO: 293387 - protein, 351 aa, unidentified
MKLEPTAQPKLYIGIDIHKRSWKVHCATDLFGGKSFAMPPKPEVLYEYVAKHFPDHQVTTAYEAGCCGYYAHRSFKTYGWNSLVVNPADIHRKGKERFTKTDRIDAQLISRELKDGRFEGIHVPDVEREQLRSLFRRRNDLVKDYRRIKSLIKMQLLYFGIAIPEEFDNDHWSHKFRNWVDEVAFTYPSARETLDSRMRSFRFIDQELRDVSTKMRAYCRKHYKKDYYLLKSVPGIGGIVACGILCELGDLRRFNSIKHLAGYVGLAPGIHQSGDNQKSTGITMRAHRLMRSYFIEASWQAIRTDPIMQTYYRRHLGKNVKSIIIKVARKLLSRTLAVIKTETPYEIGVIE

SEQ ID NO: 293388 - protein, 364 aa, unidentified
MGWMAPGRHLCAKVGLSMLNLKEAIRMQVTTIGLDLAKSVFQVHGVDAAGEVVITRKLRRAQVLAFFAKLPPCLVGMEACGSAHYWARELAALGHQVRLIPPAYVKPYVRRNKTDAVDAAAICEAVARPGMRFVAVKTPERQAVLSMHKTRALLIGQRTRLMNALRGHLAEYGVVAPTGVKGFAALMEQLAGDDLPVPGFLASALRAMAEPLTGVQRAIRAIEAEILAWHRQDRDSRRLEAAPGFGVIVSSAIAAGLTDPKAFRTGRDFAASLGLTPKVEATGGKPRLGRISKRGDRYLRRLLINGAQALLLSKRAQADPWIARLLATKPRKLAAVAVANKMARVAWAMIAHDQDYRSKTFAAA

SEQ ID NO: 293389 - protein, 477 aa, unidentified
MSRVVEGIEEIEDVLLLSLTGCNPNDSEEDVVSKASGLSRGDKRRNARLVELRGLVSFDNALVSIDLADKKQAVVVCDHDSRVLARKTVRVRAWDLGPALDWAGCIARKHGFAGVTVGCEPTGHRWMILNQLAAQRGMPLMCVNPMLVGRAREAEDYTRDKSDDKDAVLIARLVAGLHCYVPERADETWARLRHLGARRARLITEATACVAQLRDLLECAWPGVLEAAADPFDSTNWCAALAVVLAGCNGHPERLNRRGLARFEAAVIGELARWGGSRRRRAIIEAVFTALVDPRGVMTQRPGAMERARYVLADWRATRSRLAEVEVRMVDVLDELGLTELLTSIPGLSAVGAAAILAETGDPTRFDSPRALVKHAGLAPRDNSSGTYQGRSRISRRGRPGLRLAAWRATWGALHHNPVMAARYRYLTGRHHNRLTDGQARAAIAAALLRWIHVVVTGRVRWDAAIAGAGAELPVAA

SEQ ID NO: 293390 - protein, 410 aa, unidentified
MVKENFIYVGIDLHKETHTAVMIDCYNQKLGEITFPNRPADFPKLVTKVKKCNTDAKEVVYGLENAYGYGRPLAVWLIDKGYFVKDVNTAISHRQAKHRGAMYRKSDSDDAEAIALATLNMLDKLPDACPNDAYWSLGQLVHRRDNIMKQRTRLVNQLHEQLCIAYPSYKSFFNDISRPTALYFWEHYPSRKYLRGKSVEDLRKELVPVSHNRCSTKNCEKILDAVASDKVKNNAYQDARDMVTLSIVSDLQHYDSQLAEVDKMLEQMYKMLGCTLTTIPGVNVITAVKILAEIGDIKRFSNANKLAQFAGIAPLHLSSSGKGKDLATKQGNRRLQATIYFLAIQMVQISSKGTPRNPVVRAYYEKRKAEGKTSQQALICISRRLISVIYGMLKNGTEYRMPVVENAGEK

SEQ ID NO: 293391 - protein, 309 aa, unidentified
MKEQLVYLGVDIAKSYLDAAVGNEKRRFSNDAIGHCELIKWVKQVKAPVQVICEPSGGYERALVRALARARIKVSLVQANRVRQFARAAGILAKTDCIDAEVLCEFGKVMQPQTVTAATLEQEHLRELESQRRHLTHLLVMEQNRAARVSDASVVRLNRSLINQIKKQIEKLDLLIKEHIEQSPGLSAKAQKLISIKGVGLRTAALLLAQMPELGQLNRREVAALVGVAPFNRDSGKMRGKRAIYGGRRFVRHGLYMAALVAARHNPILRNFYLRLRAAGKPAKLALTATMRKLLIVLNSALKPDLPYA

SEQ ID NO: 293392 - protein, 341 aa, unidentified
MTDASPILFVGIDIAAKTLAASWLRPGEAVSRPITLAQSPQGFATLHERLGQTGCVPAEVHVVMEATGSYWIALATTLVHSGYRVSVINPAQAHHFAKALLKRAKTDAIDAQTLAQLAALLQPALWTPPPAVYYEVQQRLAQRDALLDVQRQIMNQLHALLFAPLVIASVKERMEELIETLERQITALDAEVREALAADAAWAASAAHLQSIKGIGLITAAWLLVTTLNFTICPTPEAAVAYAGLAPNPYESGTSVRGRPRIGHTGNGRLRTALYLATLSAAQHNPVIKAFYERLRAAGKPTKVARCAAARKLLHIAWAVVRNEEDFDPAYAQRHVQPLAA

SEQ ID NO: 293393 - protein, 402 aa, unidentified
MNAVGIDVSKGKSMVAIMRPFGEIVSTPFEIKHTSSDINSLVKLIKSIEGESRIVMEHTGRYYEVLAHQLSEANLFVSAINPKLIKDFDNDSLRKVKTDKADSVKIARYALDKWQNLKQYSVMDELRNQLKTMNRQFGFYMKHKTAMKNNLIGILDQTYPGVNTYFDSPARSDGSQKWVDFASTYWHVDCIRKMSINAFIDHYENWCKRKKYNFSKSKAEEIYGKAKELVPVLPKDDITKLIIKQAVDQLNSASITVESLRTLMNETASKLPEYPVVMAMKGVGTSLGPQLMAEIGDVSRFTHKGAITAFAGVDPGVNESGSYEQKSVPTSKRGSSDLRKTLFQVMDVLIKTHQQDDPVYQFLDKKRAQKKPYYVYMTAGANKFLRIYYGRVKEYLASLPES

SEQ ID NO: 293394 - protein, 425 aa, unidentified
MTDLYISVGIDIGADFSFMSIALPNQTFVGKPFKITHSNLDSVETAVKKIKEAEESNSLKARIFLESTGIYHYPLFCYLCDKGFDVSIINPIITNNSTNLNIRKVHNDKFDSKKLALIALKPDLKTSVMPSDFVLNIRNLVREYYRFTDQRSAYVNKLTALLKVSFPEYIGIFSKITVNTSLALLDKYPSPDAVLNAKKSSITGLIRKTSRFGTAYAEEKYEMLISAAKKAKSFGHSLPSHTELIRLYISMIRTFDSAAKQLIRSVKDIVESYPDELFCRQIKLLETIKGCGFLSAVTLMCEIGNFSVFSAPKKLYAYLGLDPSVKQSGKFNGTNVKLSKRGSRLARRVLHMMAINSIGLTKNGKSKNPILRDFYDKKCLSKPKMIALSAVMHKLCNIIFAVLRDNKPFEFISPEQHNLVYRNVS

SEQ ID NO: 293395 - protein, 408 aa, unidentified
MNPLYVGIDVSSKSNVVYFMLPDGSKHCNFSVANSHTGSSQLVKRILSAMTSCSLDTVLIGLEATSVYGDNLVYFLREDAALARFNSKIHVLNPKQVSKFKEAYNDLPKNDLIDSFVIADCLRFGRINKEVYIGDYRYKALQNLTRARYFAVSNLIKEKQRFMNILFKKYSTMTQEKVFSDTFSTTALAVYDEFESAEALADMDLHELTAFIMEKGKNRFPNPNAVAKAIQKAARSSYRLPKTVNDSVNQVLSISITSIKALEAQIKEFDKAIATQMELLPNVLISIPGIGPVFSAGIMAEIGDINRFHNQAQLAKYAGLAWKQHQSGDFEAQTTRLINSGNRFLKYYLYEAAFSLVRCDKEYSDFYHLKYKEVNRYQHKRALALTARKFVRLVFRLLKDNRLYTSAE

SEQ ID NO: 293396 - protein, 315 aa, unidentified
MVEQVVVGIDVSKAKLDVALLPGGEQFTVANDRHGIGELLRRVSPLAPSRVVLEATGKLEQLAVSELAAAGLPVVVINPAQVRHYAKARGKWAKTDPIDARLIAEFARDLEPELRPLPDAETQALAALCQRRNQLLEMEQMEKSRLQRAPRANQKSIKAMLRFVRRQVEQVEKQIEHSIRHSPLWQAKRELLESMPAIGKVNSSTLLARLPELGQFTRQKICALVGVAPYNDDSGQWHGRRHIAGGRAGVRQVLYMATLSAVRCNPALRDYYQRLLGRGVEPKAALIAVLRKMLTILNAMVRDNTPWRPPCPTPA

SEQ ID NO: 293397 - protein, 337 aa, unidentified
MTIIRIGLDTSKHVFQLHGVDASEQPVLRRRLGRKQLEPFFAKLPPTRIGLEACGASHHWARLLCGLGHEVVLLPPQYVKAYVKRGKNDAIDAAAICEAMSRPSMRFVPIKSAESQAALMLLRVRDLMIKQRTMLINAIRGHAAEFGVTAAKGPVRVTELLQQAHSEEAGVPALARELLGLLSGQLDALDQKLKALEAQLLAWHKQNPVSQCLASQPGIGPIGAVTFSLKIADPRAFRSARHFAAWLGLTPKEHSTAGRPRLGKISREGDQGLRRLLVLGATARIRFAKAGRASPWLINLLARRPKKLVAVALANKMARVLWAMMVSGEIYRHPQEA

SEQ ID NO: 293398 - protein, 355 aa, unidentified
MTESSDYESVQVFIGVDVGKDTHHAVAINRSGKRLFDKALPNDENKLRSLISDLKQHGQILLVVDQPATIGALPVAVARSEGVLVGYLPGLAMRRIADLHAGEAKTDARDAAIIAEAARTLPHALRTLKLADEQIAELSMLCGFDDDLAAQTTQASNRIRGLLTQIHPALERVLGPRLDHPAVLDLLQRYPSPEKLASLGEKKLAAQLCKLAPRLGKRLAAGIAQALAEQTVVVPGTNAAAVVLPRLALQLITLRKQRDEVALEVEQRVLAHPLYPVLTSMPGVGVRTAARLLTEVACRAFASAAHLAAYAGLAPVTRRSDSSIRGEHPSRRGNKALKRALFLWILSPGLTTPAK

SEQ ID NO: 293399 - protein, 363 aa, unidentified
MLYLGIDQHRKQLTVNLRNEEGDVILRRQVSTQWDKVKTFFAELQKLAAPEGGYLTIVEVCGFNDWLLKLLPAYGCRETVVVQMEGRSKRKTDRRDANTLCEILWTNRHRLLAGQRCNKLRRVQPASAADAEARQITALRQQLGQQRTRTRNRIQHILLRHNLQQHCPTKSINTKRARRWLEKLELEFIDRLELDCLLKQWELWDQQIERIEERIRQRQAKHDTAAIVASLPGTSAYSSLAIGSRIGDISRFPRPESLANFWGLAPGCGNSGDKTQRIGAITKQGSRQVRFLLGQMVLHVLRVDKQIKNWYREVRKRRGSKIARVAVMRRVATLIWHMVKHRQAYQPGGPPRIRHPQLANQTV

SEQ ID NO: 293400 - protein, 401 aa, unidentified
MFVGHDWAEVHHDIEIRDGDGRRLERARLVEGVSGVARFHVLVAAYADEAGEVVVATETDRGLFVGSLVAAGYEVYAVNPMSVARYRERHCTSGAKSDPGDAAVLAELARTDRHLHRPIAGDSHLAEAIKVLARAHQSLIWTRQRQLNQLRSTLREYYPAALELGDLHGPDALGVLTVAPTPSLGRALSRKRIGSAIARAGRQRRVEERAADIQAVLRTDQLSPPAVIGEAMGASVSALVAVIGELNTQIARLEAELSEGFDQHPDAKIVRSLPGLGTILGARVLAEFGDDPNRYDSAKSRKNYAGTSPITKASGKSKVVLARYARNRRLADACYLWAFAAITASPGARTFYDSRRGAGDTHNRALRALANRLVGLLHGCLRHHTLYDAHAAWDHRQERAA

SEQ ID NO: 293401 - protein, 439 aa, unidentified
MNRKQSTMKTYILRPLDPVERQTPRAKSRPALGPRLGLPAQPTLFTGLDVHSDSIAVGLAPSGSAEVRAYGVIGGSHDDVLKLLKKLCAAHPGWLLKICYEAGPHGYPLCRCLRAHGYDCMIVAPSKVPRKPGDRVKTDRRDALQLARLYRAGELCAIYVPDPQDEAIRDLVRGRFLVCRQQHRARQQLKMFLLRHNIRYTGKTSWNPAHLRYLAQVKMPFPVQQIVFQEMLDVITEASARLERLEQEIARAVPAWRWYPVVQALMSLRGMALLHAATLVAELGDLNRFTHPSRLMSYLGLVPSEDTTGTDRRQGGITKMGNGPARRALIEAAWNYRTAPRVSPHLRKRQEGLPKAVLEISWNAQRRLHHRFVHLTRVGRKKSQVAVTAVARELSGFVWAIARLVQPLPPKDTTDPALTPTSLAAVSSRGSSPRGIRRR

SEQ ID NO: 293402 - protein, 355 aa, unidentified
MDNRKYIGMDVHKEAIAIAVLNAAGKLVMESIIETKANTILEFLKGLRGELHLTFEEGTWASWLYDLLQPHVKRVVVCNPRRNALLKEGSKSDRVDARKLAELLYTKMLRPVYHRDNGMRAVKELARSYVTISKDQARVMTRVKALYRSWGIACSGKQIYTVRHRASWLGKIKEPGVRRRADFYYQQLDGLRSVRRQVRRELLVESEKHKASKLLRQIPSIGPIRAALLLALVQTPHRFRPKRQLWTYSGFGIETHDSAEYRYLAGQLERSKKPQQVRGLNRNYNHDLKNLFKSAATNAVAKSGPLQESYLALVKRGIRPEMARLTVARKIAAITLAIWKKGVSFDAEHLKQQTA

SEQ ID NO: 293403 - protein, 347 aa, unidentified
MKLSAVGIDLAKSVFVIHGVDERGKAVLRRQLKRAEVAKFFANLPPCLIGMEACGGAHHWARKLLGFGHTVKLMAPQFVKPYVKTNKNDARDAEAICEAVQRPNMRFVAIKTPEQQAVLALHRARQGLVKARTAQANQIRGLLAEFGWVIPKGIRHLPKRVPEILEDGENGLPGYARQLFAGLLEHLQELERRVAELEKQIVLWHRSHEHSRKLEKIPGVGPITASALVATIADARSFKSARQAAAWVGLVPRQHSSGGTDRLLGISKRGDVYLRTLLIHGARAVVSHVQRRADRAPGWLTGLLERRHKNVAAVALANKNVRMAWALLANDRDYEPLYARAFNAGRT

SEQ ID NO: 293404 - protein, 389 aa, unidentified
MKIFVGIDIAKLNHFAAAISSDGEILIEPFKFTNDADGFQLLVSKLESFDKNSLIIGLESTAHYGDNLVRYLVTELYQVCVLNPIKTCQMRKNNVRKTKTDKVDTFVIAKTLMMQDDLRFITFFDLDMMDLKALGRFRQKTIKQRTRLKIQLTTYVDQVFPEIQYFFKSGLHQNAVYALLKEAPSPKEIASMHMTHLANLLKVNSHGHFTKEQAKELRVLAQKSVGANDSAISIQITQTIQQIELLDSQLDKIEAEMTDIMKFNDSVIMTIPGIGYINGGMILGEIGDIHRFSNPNKLLAFAGLDPSVYQSGNFQAKTTRMSKRGSRVLRYALVNAAWNVVRNNATFKAYYDAKRAEGRSHYNALGHCAGKLVRVIWKMLTDEVEFNLE

SEQ ID NO: 293405 - protein, 454 aa, unidentified
MSKSTKKTKTGVKKITQFEIIRPHVAGIDVSDNDAMLVAYPMNEHEIKIEAFECYTCDLRRISSTLKSHHIESVAMESTGVYWIPLFLLLQEDGFEVCLVNAKHVKNVTGRKDDEEDAEWIQKLHRCGLLSASFQPDNQTRALRSVVRHRSSLVRTRSVYLNRMQKALEQMNLKIHTVISDIDGKTGLDIIKAILAGERDPGKLADLRDRRIKASREEMIKSLEGIWSEEHLFELSQCYRLYDFHNKIIDDCDKEIEKLLQQTIQSKNNGVMPQLGKLKRKRNYKNDINTDVTNYLYELNRVDIVSTNGITGISEITALTLYSEIGDHLHRFKDEKHFTSWLGLAPNTKISGGKIISSRIPKKKHYAGQVLRMAAMSLCNNKGPLGDYYRRIRSTSGHQKAIVALARKLAVIYFRMMTTKEEYNPQSLIDYREKWRERKIRNLERYLNKLKTAA

SEQ ID NO: 293406 - protein, 423 aa, unidentified
MGYRIAGIDVHKKMLAVVVTDIAIEGEYDFERRQFGARPDELRRLADWLIEQKVQEVVMESTAQYWRPVWQTLERYWKAACRSWEGAGPMSGSLLLAQAQSNRGPRGRKKDFVDAERLVKRLVAQELVLSFVPDSEQRLWRTVVRRRYQLTCDRVRLQNQLESLLEEAHLKLSSLVSDLLGASARRMLHALAHGETSPAALAALADRRLHATQQQLCDALGASTELNGVYRRLIKMALEELQLIEQQMDQLDHEIADLLNQHQDAVQRLAEVPGLGVDSAHQIIAEVGATAATFPSEKHLASWIGVCPGEEESAGISTSNRSPKGNRFMRRLLNQAANAAVKVKGSIFEIVFRRLLPRLGFKQAIWAIAHRLSRLIWKILHQGVRYEERGPAVSQKSRAARTTKMIKELRSLGYRVEPTGNPA

SEQ ID NO: 293407 - protein, 342 aa, unidentified
MEDYIGIDVSMKETALSIRRGGQRVWRGKCVSDPQRIARIIRKRAPSATRIVFETGPLSVWFYHALRAEGLPAICIDARHAKAALDMAANKTDANDADGLAHLAEVGFYREVRVKGFDSMLARTLVAARTKLVRIATDLSNQIRGLMKTFGLVVPAGKGRTFEKNVRNLLPDQGDLARILLPMLDAWHGVRMRAAELTKILRASARQSQACGLLMTIPGVGAITATSFATAIEDPENFKNSRAVGAWLGLTTRRYQSGEVDYSGRISRRGDRHVRGLLYEAAVVILTRSSAQSELRNWGLKLRERLGFKRAAVAVARKLAVTMHAMLRSGTVFNRGLEVKAV

SEQ ID NO: 293408 - protein, 331 aa, unidentified
MSNHTKENTTQRESNGNHFVGIDVAKDELVVHILPTNQQLTVQNSTEGIKELVKQLKEIKPKQIVLEATGGLERELLTNLVAKGFATVVINPRQARDLAKGLGELAKTDAVDARILARFAQLQCLTVRPLPSLETQEMNDLVTRRQQLIAMRTMETNRLHAAKQTAIKKSIEKVIKAFNEQIDAIDARIEKMIESNPDWNAKDKLLQSVPGVGAKTSQVLISALPELGTLNRQEIAALVGVAPFCQDSGKRSGARCIKGGRADVRSALYMATLSAVRHNKTFKEFYERLIANGKKCKVAMVAVMRKMITVLNVMVKTGNAWKEKENITEKN

SEQ ID NO: 293409 - protein, 350 aa, unidentified
MIIIGCDYHPGFQQIALVETDTGEVRELRLEHREPAEKFYRSLAAQRAVVRLGMEGSGHTRWFERLLAELNFELWIGDAAEIRTKRVRKQKTDRQDAQLLLRLMVEDRFPRVWVPSWENRDLRQLLWHRHRMVQARTRIMNQLQAVALNEGLRAKKRLWREAGREQLKSFPLAPWASRRRGDLLELLDQLNPTIAELTQAIEQQVEKYPEARRLMTHPGVGALTALAFMLIVGEAGRFRCGKQIASYLGLVPLEESSGNRRRLGHITKQGNSLLRFLLVEAAQVTARSLPEWRNRYFHLMMRRGRKIAKVALARRLAVRLYWMLRKEWDYEQVKQFGSHAGQPENRHGVQ

SEQ ID NO: 293410 - protein, 351 aa, unidentified
MEMVGGLDLHRRQITFRTVDLRTGELQRGKIYPGAREAVREWLDQFQSGTDAHFALEGTTGWRFVVEEIERRGFTAHLADPAELSERRGPKRRAKTDHADCELMVNLLLEGRLPQSWIPPAHILELRALVRLRKTLVDQRIEWQQRLQAQLFHQGVVPGLHLCRPEDRRRLAEMEMSPAGRQTMQRGLVMLDAFDSQLKPLSAQVVSLAKAQPGCRALEQLYGVGWLTSAAILAELGDCRRFTSADQAVRASGLDVTVYESNGKRPGGHLARQGPQVLRWALFEAAQCAARRSSPDHDYYVTVRDRIDHNRACLSVARKLCRRACHILKDLGEAAMAAPELPSASHEPKAA

SEQ ID NO: 293411 - protein, 336 aa, unidentified
MGSYVGIDLHRQRSVVVVLNEAGERVSWSRIDNTPVNLARELTAVGPGAEVAMEATWGWYWAADVIADCGVRLHLAHPLGIAGYANRRVKNDIADATLLADLLRMGRLPEAWVAPPAIRELREEVRYRAKLSQLRSGLKAQVHQTLGKEGAIPEVKGIWWSGGQRWLDGLTLGDAYTNRIESLRDLIGVYDREIGQADARIHARLRDDEGYRAIQQIAGVGPVFAAIFVAEIGDVHRFANPRRLCSWAGVTPRLRESDAHTHRGHITKQGSRLLRWAAIEAVSGPACERRLVAVKARVGVRRGANIGRVAAARHLLTLVYYGLRDGHIRCLQPDAA

SEQ ID NO: 293412 - protein, 349 aa, unidentified
MRSFQPPPEARFYAGVDLHARSLYLVVLDRDGAVRLARNLPAAPEPFLRAVEPFRAGLLVACECVHPWYWLADTCRDHAIAFALGHAWAMKAVHGQKTKCDRKDAEAIARLLRGGNFPPAYAYPRERRGLRDLLRARLRLVRQRAQLYGHVHTARRQANLPPVSNDVKYKSKRAAITADIADPFVRRRVETDLALLEPLDAAIRRLEAEIEGAAKEHYPAELAVLQSAPGVGAVLSLTILLEIDTVARFDTRQQFCSYARLCGAVQTSDNKRTGAGNRKAGNAWLKWAFSEAAVLSAQKDERIGALLRRLAAKLGKAKALSALAHKLGRAFYHMLRTKQVFDADRFVRH

SEQ ID NO: 293413 - protein, 318 aa, unidentified
MDQPIIGIDVAKATLDAYVHPSGARFPVTNDDEGIKTLLERLKAFPQAAVILEATGGLEFGVAAALTSAGFRVAIVNPRQVRDFARALGRLAKTDPIDAEILALFGDRVRPEPRPIPDSALRSLEAHVARRRQIVDMITAESNRLGQTTDADIKKQIKRHITWLQHELKSVDTDLGDAIRHSPIWRAKDQLIQSAPGVGRVTSFTLLAQFPQLGTLGGKQAASLVGLAPFNVDSGTLRGRRHIWGGRASIRSVLYMATLSAVRYNPVLAEFYQRLLRAGKSKKLAVVACARKLLVILNAMLRDNRPWTPAHLDPQHGC

SEQ ID NO: 293414 - protein, 408 aa, unidentified
MRIIGLDVHRTFAEVAIREHGRVRPAGRISTTTAGLQLFARSLTHRDEVVLEATCNTHAIARLLRAHAGRVVVSNPLRTRAIAEAKIKTDKIDAAVLTQLHASGFLPEVWMPDATTEALRRQVSRRAQIVRHRTRLKNQIHAILHRNLLPRCPASDLFGRKGRAWLTTQSLPADERAAVTSLLRALDHADEDLTELDRDLASSILEDAGVRRLMTIPGVDFAVAVGLVAAIGDVTRFRSPQKLVSYFGLNPRVRQSGLQPAHHGRITKQGRAHARGMLVEAAWVAAKTPGPLRAFFVRVRGRRGHQIAAVATARKLAVLTWHLLTKQQDYAWARPSLTEQKRRALELRAGQPAERGRRGRAHAYNLTTLRTRERAIGEQAERAHQTLVTHWRPRRPKRGTGATNAARR

SEQ ID NO: 293415 - protein, 439 aa, unidentified
MIETILPGVAAIDLGAEKLFVGLAEQPVRSFGSCTRDLHALRDWLRENKIKRVAMEATGVLWIIPHDYLQAEGFEVTLFHGAHARNLPGRKTDVQDCQWHAMLHGHGLLQPCFVPPEPIRELRTYCRLREDHLAMAAQHIQHMQRALDSMNVRLHNVLSQLHGVSGMRVIDAILAGERDARVLAALCEAQVRKAKEAELIASLEGTWAKHHLFALEQAVEAYRFYLQLVEKCDQKIEHQLGVINQGVETVPRPKGRKVKVTRHNRPQIADLYGQLLTACGGRDAQMLPALGPLSWLKLVGEVGTDLGHWKEQDHFTSWAGLAPTHHRSGKSRRRVPRRKTKVAQIFREAAMSLAKSKDCVLGQFYRTVRGRRGAAVAMVATARKLAVLYWQVMTHGIEYVEKGLEQHQKQMAERKERHLRRQAAKLGFSLNPLKPSASV

SEQ ID NO: 293416 - protein, 322 aa, unidentified
MRYIGIDVSKATFVVAYSSDKGGEIRTFNNTTTGIKQFIGALPKDGSIHGVMEATGNYSALLLYMLNVAGLTVSMENPLKVKNFAKAMLSTIKTDKSDARLITLYGEKMNPRPFKVQGEAILRLRQKRTVIRQLTKQITAMSNLRGSLACLPVPDKGATHTVDETIKFLEKKRDRLQSELTDLVEVEFSRQLALLTTIKGIGITLATALIITTGGFTYFQNAKQVSRYLGICPTYEQSGTSVNIRGHINRNGDAYTRGLLYVAAWTASRFNTKCGETYTRLRQNGKPGKLAMIAVANKLVRQAFAVVTHDKEYVDGFVSNRP

SEQ ID NO: 293417 - protein, 346 aa, unidentified
MSYYVGLDVSVKSVSICVVEADGSVIARGEVSSDPDQIAAFLFRHAPDAERVVQESGILSIWLTRELEKRGLPIVCIDARLAHKALSGRLNKSDRGDAEGLAHLARTGWFTQVHIRSETSERIRVLIGTRERLIKMRKDLEGHVRGVLKVFGICMTGVRRANKRQGFRDQLIKAGAVDPAIGVMVDVFSPIHLALCSAADAMDVELRAIARGSDLAARLMTVPGVGPIVALAYIATLDDAARFKKSKDVGAFLGLTPRRYQSGEMDWSGRISKCGDRDLRRLLYSAATTLITQVKKPSPLLTWATRLNERKGFKKAAVAAARKIAVIMHCIWRNDAVFDPSMEGVA

SEQ ID NO: 293418 - protein, 314 aa, unidentified
MERAGVYVGVDVGKEQLEVALRPSGEQFSLANDERAVRTLVKRLLPLGCARIVVEATGGYETLVLAALHAAGLPVALLNPRWVRSFAKAIGQLAKTDRIDARLLALYAERAELKVRTLPDEQTRELRALCARRDDLLEMIVAEENRLEHAPKRLQREIRGHIDYLRKRLKHLDRDIDGAVRGSELWRQKDDLLDSVPGVGPVLRAALLAWLPELGTLNRREAAALIGVAPFNHDSGAMRGRRAIGGGRAPLRRVLYCATSAAIMWNPLLRAYYEHLIANGKLHKVAMVATMRRLLLILNAIIKTKTPWRPPCPA

SEQ ID NO: 293419 - protein, 359 aa, unidentified
MGVVVGIDAHKKEHTMCVVDAVGRKLAEKTVPATSAGHRQAMSFVRSRFVDVVWGVEDCRPLTALLERELLGAGHRVVRVPPHLMARARASSRTPGKSDPIDALSVARAVLREPDLPVAFHDRASMELKMLVDRRDDLVGQRIATINRLIARVHELDPLQGTPANWRVKKSLEALGMWLATQHGLMAELARDELSDTQRLGDDVDALEKRIGGRVAGIAPTLLALPGCGQLTAAKIVSEAARIERFKSEAAFARYVGLAPIPHWSGPTQVAMRPTRRGNRQLSTAIHRIAIVQIRLDCTGRQYFQRRLDQGLSRPRALRALKRHLSRVVFRSLYCDRGLRPQAWPFAVDSQVLVHDLNE

SEQ ID NO: 293420 - protein, 315 aa, unidentified
MSDVPCFIGIDVAKAQLDIALRPAGERWTVPNDTNGVTMLVEQLQPLSPTLIVLEATGGLERLVTSALATAGLPVVVVNPRQARDFARATGQLAKTDALDARALAHFADVIRPTPRPLPDAQTQELRGLLGRRQQLIVMRTAEQNRLAGTSGRLQTDIAAHITWLNERLATLDDDLETVLRGSPLWRENDDLLQSAPGIGPVCARTLLLELPELGTLTRQQIAALVGVAPLNCDSGTLRGRRIIWGGRAHVRTVLYMGTLVATRYNPRIKAFYQRLLAAGKVKKVALTACMHKFLTILNAMLKHRTPWQPQEVQS

SEQ ID NO: 293421 - protein, 387 aa, unidentified
MYYIGIDISKFKHDCAVIDDFGEIVTPSWSFTNDSEGFSQLKLLLDSLDAEARIGLESTGHYGMNLKLFLESNNFSFMEFNPLLINRFVKSKSLRKTKSDSIDCMMIAHYLMTVEYKPYPALLYHTEKLKSLTRFRDSLIRLRTRQLVELTNILDKVFPEFKSFFGGKFSVTALYILSNYSSPEKISNMNSKSYDALRKVSKGKFSTVNFAKLKQLAKNTVGNTEDYLLQEMQIVLELYSQLDSKVDETEYSIEECISTINPPMLSVPGIGIESAAVILAEFGDFSKFKNASQMLSFAGLEPGYFQSGTSETTGRMVKHGSSYLRYALMNCAQTVVNYEPTFAMFYAKKRAEGKPHRVALSHVVKKLLRVIYTLQTKNLAYDSNFVR

SEQ ID NO: 293422 - protein, 475 aa, unidentified
MNVKGTKKKNQAVTANVFEQQELLKKAEVIKASLTASTWRELETNGKFDKNEKLSFISDDMLVLGCDVGSETHYMRAIDTRGRELSKSVYSFNNDYDGFHSAKEWAVKIAAEHDKSQIVLGLEPTGHYWFCLATWMISNGISVVQVNPYAVKQTKEVEDNSQLKDDRKDPKLIANLVKDGNFGMPYLPEKLYAELRRLSMFRDQLNEDRIRTVNRMHREMKIYFPEYKDALGKVDGAFSLELLKQTPFPDDLITLGEDGIRQIWHDAKLRGRGYSRAGEIIEYAKASVGIKDGAVAGKAAVKWFVQKILELDAELAVIENWINQKCQEIPHAGNILEISGIGENILSGILAEMGDITRFDDVKEIQKLSGLGLVACSSGKHKGETRISHRGRKRLRCWLFQAAKSAVVHAEEFKELHMYYTTRADNPLKKMQSLVVIACKLLRIIYTILKKGTVYDPKKMLTDIRRPEKKEAVAA

SEQ ID NO: 293423 - protein, 500 aa, unidentified
MAKRREKRERRSVVLEPDAAGIDIGAEEIYVAVPPDRDEESTRRFSSFTGDLHALADWLGRCRIRSVAMESTGVYWIPLFQILEERGFKVYLVNAHYLKSVPERKSDVSDCQWIQYLHSVGLLRASFRPPEAICALRTLWRHRGSLLEMAAEHILHMQKALSQMNLQLHHVLSDITGTSGQAILDAILSGERDPVALAQLCHRRVQSPRDKVAQALVGDYRPEHLFTLKQSLAGYRYYQKLIQELDQETARLMQALPSATEDPIPPRTKATAYRRKGNDPQFDLRSELYRIAGVDLTDTPGVSAATAQVMLTEVGTDVSRFRHASAFASWLGLCPEKRISGGKVLSCKTRQVKHRAATALRMGANSLCRAKGYFGEFFRRIRAKLGTAQAITATAHKIARILYHVLLTKEPYSETVFHRCDEQAQQRAEMRLRKQSSSTRLPTLADPCNRRITISSSGARFWPIKRLSVLIRRTNGRTDTFRGSRSSAHEQGVMRKTRWA

SEQ ID NO: 293424 - protein, 365 aa, unidentified
MGVPTVVQAKTFVALDVHVSGTVAAMIDRDSGELRRRRLSGRAVEVAEFVAGLEGPVCATYEAGPTGFALARRLEAAGVDCLVCAPGLIPRGPSDRVKTDQRDAERLVRLLVAGELHRVGVPSVEAESLRDLVRAREDLRGDLMSARHRVSKLLLRHDVRFEGRQRNWTQDHLRWLSTVRFDQPGTQAAFDDYRGAVEALVIRRSELERQIAEQLPLSPWAQTARRLRCLRGIDTLTAAGLCAEVGDFHRFRHPEQLMSYLGVVPSEHSSGTRRRQGSITKSGSQHARRLLVEAAWHYRQPPRVSQPLRRRQTGADAAIIALSWKTQRRLHRVWTRMERRGKRRTIIAVAAARELAGFCWAISTA

SEQ ID NO: 293425 - protein, 340 aa, unidentified
MRIIGCDLHVAQQTIAMLDDDTGEVVERTLTHDGEAVREFYASIPGPAVVGIEATGSMGWFLRLLEELAIPCRVGHPAAVRKAETRRQKHDRRDADLLLKLLVEDRFPAIWMPSTEQRDLRALLLHRHQWVRMRTRVQQALQAMALSHGLRRGPTLWSREGQAALAALPLAPHAAHRRSELVALYQHLAAQVAQLGARVEEAVVARSAATRLMTHPGVGPVTALATEVFLGDPGRFADGKALASYVGMIPSEYSSGSRQRLGALSKQGNPLLRFLWGEAAMHAVRREPELQRFYRRKLAQKGLGKARVAAARKLGIRLWIMLRDQIGYEEFCRRSPRRPS

SEQ ID NO: 293426 - protein, 310 aa, unidentified
MDAIYVGIDVSKDRLDVHILPSREAFAVARDGKGLNELIERLLAIKPILVAVEATGGFETIVAAAIAGAHLPLAVVNPAQVRHFAQAIGKRAKTDPIDAAVIAHFAAAVKPEPRELPDAAARLLAEVVDRRKQLVEMLVAEHQREKRADSVRVRKSITRHITTLDKELQKLDSDIDSMVRGSPVWREKEDLLTTFPGVADKIARTVLADLPELGQLDRRKIASLVGIAPFTRRSGKWKGKSMIAGGRSSVRSAIFMAAFSAIRCNPVIRDFYQGLLARGKPKMVALIAAARKVLTILNAMIRDKKQWQAA

SEQ ID NO: 293427 - protein, 338 aa, unidentified
MKTYAGIDLHSSNNYIGIIDEHDKRLYQKRLPNQLTYIKQALEPFKESLQAVVVESTYNWYWMVDGLKEDGYKLHLANPSAIKQYEGLKHTDDKWDSFWLAHMKRLNILPEGYIYPKEERPVRDILRRRLLFVRHRTSHILSLQSAITRNLGYTMSGRDIKKLNESDADKLFDEPFLVLAARNSIATIQFLGKIITDIERPVKSHVKLEPQFEYLLTMPGIGDILGLTIMLEVGDISRFPTVGDYSSYCRCVKSERLSNNKKKGKGNRKNGNKYLSWAYVEAANFAIRFYPECQRFYQRKKAKTNGIVAIKALSNKLARASYYVMRDQMAYDMKQLFR

SEQ ID NO: 293428 - protein, 319 aa, unidentified
MQSKLTIGMDIGKAQVVVACHESAFAVLKMANAVPVLRRWLATLPAGSRLGLEATGGYHEPVAELAHSLGFTVYILNPKDVHHYARALGARGKTDRLDAQVIAAYVAEHNARLHAFVPLSADEKLLRELARQRATLVNAKSMLQQSLRVLPGFEREGRELLRAMGSFADRLERKLAEIAARSSERAALVKRLQTIDGVGTLTSIRCATLFTRVPLHGSDAAVAFFGLDPRPHDSGQHRGRRRLSKRGPSEDRRLLYNAAMSAIRTPTWRPLYQHLRNRGLASTEAIIIIARRMVRIAFAMYQNHSDFNPRLVPRPSCPA

SEQ ID NO: 293429 - protein, 414 aa, unidentified
MKTCLFVGIDTHKDSHTAAIMDNYFNAVDIITFANRYSGFDKFMEKLGAMASGRSITFGLEDSQGLGFFLADYLVQKGFSPIDVNPIYTDRARKATIHRDKSDAGDAVLIAKALIRERDKLSPVKIDKASIEIREMVRYRQMLVEESTKLKNRLHSLLFSQYMGAVNVFSNLFSKVALAFFSKYPDPHLLKGVGEDTLATFLKTHSRGRYGIEKARAILNSLSISVDRNLLDTRAYIIGSHIKRFMDLKNEIDTGNEKIKTLVEKSSYACLTSVPGVEAVTAAKIISQVIDISRFSSASKLAKFAGIAPREKSSGRKKKYEKSKYGKKFLRSTIFFIALNHITRSRNGKDRNPISRAYYLKKIAEGKTKKESLTCLSRRLIDLIFAVMRDRSIYNFSKSKFLAQHTHVLDTVAG

SEQ ID NO: 293430 - protein, 430 aa, unidentified
MGLIVPTAMHPEREDQPMPYEWFVGIDWGSQRHQVCVLDRDRRRVGERAIDHDGASLAQLAAWLWTVSAGQPQRVAVAIEVPRGAIVEGLLARGFHVFALNPKQLDRFRDRHSVAGAKDDRRDAFVLADAVRTDQPSFRRLQLDAPQLLRLRELSRAEETLLEDFRRSANRLQDQLHRLYPQMLKLCSAAEASWLWDLIDLAPPPAHAALLSEENVQGGLKAHRIRRVTAQEVLACLQTPALPVAPGAAEAAPAHCGCLLPCLRVLAEQLQACSQQVSVLLRTLAEEPGEGEGPSHVAMVLSLPGVGRKITAWLFAEAAQPLAERDSQVLRTHGGVAPITKHSGKRRVVVMRRGCNPRLRHALYHMARVAMQRDAHFRRVYAALRAKGQRHGQALRNIGDRLLRILMAMWRHRTCYDASRIRREPVVQMG

SEQ ID NO: 293431 - protein, 356 aa, unidentified
MEPIKTNCVGCDAHRRYSVFVLMDERGHTGKEARVEHSRELYRHFLSTLPPGSPIALESIGNWYWMIEEMERAGHQPILAHAKKAKLMMGLTNKTDKLDARGLALLLRNGTLPSVWIPPAELRDQRELPRMRMVFARIRTMLKNRIQSTLAKYGIQIDEVSDLFGVTGRGLLQNRLNELPQETQRSIQEHLKLLDGVLEQIEGTEKRIKELIKQTPQMQLLMSLPGVGPILAIVIILEIGEIGRFPGAPQLASYAGTVPQVKSSGGKTYYGKIRPDVNRYLKWAFIEAANSIVVNQRRMPNRHVVELYHRIMRRKGHPKAIVAVARHLAEATYWMLTKNEAYREPTSSRWISPTQK

SEQ ID NO: 293432 - protein, 404 aa, unidentified
MWYVGLDWSDTHHDVVVLDEAGHQVGIQRFAHSHQGLHHLKDFLLGIASRPEDLACIVETNHGLLITFLLEAGIPVYPVNPKTANKLRKTAGAKTDRIDAYLLAKTGRFDLPDLRRLSPDSPIIAELKTLTRDQDALIQSQTRLVNQLTACLKEYYPVSLKLFGKLHQPSTLLFLQAYPTPTAAAAASLEEIEALLKSCKYPHARRAALEMVEQLHSQELTANEVIVRAKSRLMLSLVRQLLPLLEDIKSYDKEIATLFLKHPDHDLWQSLPRAAQRLAPRLLAEWGDDRARYRDAQSVQELAGTAPVPFQSGNFSKAHKRFACLKPLRNVLYQFAWQTTRQDAWAREYYQRKRMEGKTHSMAVRCLANVWVRIIYRMWVSKDLYQAATFEAAKLAHAPRQRAA

SEQ ID NO: 293433 - protein, 309 aa, unidentified
MEAFIGIDVSKDRLDVHVEPSGEAFFVSNDLEGLGGLIARLAGLSAEIVALEATGGLETVAAGQMAAAGLPVVVVNPAQVRAFANAVGQRAKSDPIDAAVIARFVQAVRPDVRPLPDEATQVLADLVGRRRQILRMLVAEKQRLGRAVAPALQKSLQRLIRALRKELDQVDGDIDQAVRASPIWRRKEDLLQSVPGVGKVVARTILAELPELGRLDRRQVAALAGLAPYTRQSGQWRGRSFIGQGRAAVRSALFMASLSAARHNPALRAFHQRLLTAGKPKMVALIAVARKLLTILNAILRDKKPWQTA

SEQ ID NO: 293434 - protein, 317 aa, unidentified
MTETITLVAGIDTAKDKLDIAIHGQAAQWQVENTVRGWRRLQAILVEAGVTRVGIEASGGYERGVVRHLRAAGCTMLVLQPAQVRAYARVGLRRAKNDALDAALIAAVAALTDQPEREVDERLADLARHLTFVEQIEEDIARFKTRLAQIDDPRLRRLVTNDIARLKKRRATEMRRIAAELRGHDDLALRLDLVLSVPGIGERTALALVIRMPELGRLSREEAAALAGLAPFDDKSGPREGQRHIAGGRGRLRRSLFAAALPAALHWNKALGALYRRLTAGGKKHKVALTACARKLLIYANTVVARGTPWTQNAPAR

SEQ ID NO: 293435 - protein, 365 aa, unidentified
MSEATITPSTLTIGIDLGDRQSHVCVLDAGGDVVEEGWIPTKPQALRARFEGLALTRIALEVGGHSAWVAELLKELGHEVIVANPRKLRMIFQSDSKSDRLDAEQLARVARLDPRLLSPIEHRERSARADLVVMRSRDALVTTRTRLVNHVHGVLKSFGHRVKKYPAPGFHRQVAGQIPDELRPALQPILDTLEALAERILGFDRELRRLSTTTYPQTALLSQVNGVGPITALCYVLTIEDPRRIERSRNVGAYLGLRPRQRQSGQRDPELGITKAGDRDLRRLMVQCAQYILGPFGRDSDLRRWGLGLAGRGGATAKKKAVIAVARKLSVLLHRLWLTGEVYEPLLNTHRRAAARAHESAALAG

SEQ ID NO: 293436 - protein, 399 aa, unidentified
MLAVGIDISKSKSVAAILNQDGSMHTSPFEFHHTQPELDAFIKYILNSNQSATILMENTGHYHYPVLKAFQEAGLPVCMVNAYQIKKFGDMDLRKAKTDKKDAVRIARYALEKSYSLVPYTSMEQKYEDLRFLARQYNQRMLTLKTNKVFLLNLLDETMPGITNILPLTTRTPETSLSVLFINRFKSYDRIEKMGKSRFLDAFEKIARKSRNRQTKTYGLAIYEAALLNITTRGENEYTLGAQDQCLELVCESQKAADSIILKMQTLAETLPEYAVLRSMAGVGNRLGPLILAEIGDIRRFHSGKALNAYAGNDAPPYQSGTFESHNRHISKRGNAALRKYCFEVMQALKLTQPQDDPVYLFLLKKEQEGKPYNVAKMAGVNKFLRIYYARAMETLKQQ

SEQ ID NO: 293437 - protein, 388 aa, unidentified
MANNAAPARRAVLGLDVGKASHWACILTRDGEVAVSRPVANSEHELDRLFSQVGEGTLVVVDQARNIGALPISRARRAGLDVACLPGIAAHQASRMFAGDAKTDERDAHVIARTAMGLPDAPLPVPERDGNLEAARSLASQCDHMMTCATRDKNRLRSILLESCPAFEALVDPSDPRWLRVHARLGGAWGVADAGRASLSALMQDAGGPARADAWTAIASSTRPPEAMVKAENPQVKMLARHISEAMEEASRLDAEIASLLESDDTYACLLTIPGIGPRTASELTIAINISSFPDHDHLASYCGIAPRTRRSGTSIASVAASRQGNKRLKNLLIFSCNSLTKSANRFGEYYRACRGRGMCHGEALKAVARKRLKVIYAVMRDKAPYAA

SEQ ID NO: 293438 - protein, 282 aa, unidentified
MSDGMLGIDVSKNTLDVSLSSCNKVRARSFPNSSDGWRHLLDWLINPKVRRVHACLESTGRYSLGVACVLYEIGHVVSIVNPAQIRDFARTKLGRNKTDGVDASHIREYCELFKPQPWAPPSEAHRRLGELQTIRAGVVAGLTEWNNRKNSGMVDTAALSLAAATISHFTSQLGAVDEAIAKTIDNDSELRCKRDLLLSISGVGETLAGVVLTELPGPDVLRSSAEVVAYAGLNPRRHQSGTSIDRVTRISKIGNAVLRAALYMPAMSAMRYNPAIVALSYG

SEQ ID NO: 293439 - protein, 343 aa, unidentified
MLRTNVIGIDLAKNVLQVCHISRQGELLSNKAVSRQKLKELLAKSKPSLVALEGCASCHYWGRYAESFGHEVRIINPKKVKAYVDGHKTDANDALAIANAALQIGIKYSKPKSMEQQTLMSLEANRQFLSKTIVSLGLHIRGIINEYGIVKAKGTKGLAALVTSTLYESDVLPASLATTLSMLWHQYLNLKDELSKLQKSMNSTTRQIEPCKRLMALEGVGETTASMLYATLGNGTQFTNGRQASAFVGLTPKQYSSGGKVTMLGIDKFGGVKDLRSMLYLGAMAYIYRLPESPTNQKQAWLIKLVARVGFKRACIALANKTVRTAWAMLHYETEYQPKPLSI

SEQ ID NO: 293440 - protein, 377 aa, unidentified
MKRIKFVGLDVHAETIAVAVAEQEGEVRSLGVIPNREESIRKLVKKLGPVEQLRFCYEAGPTGYVVYWQVTALGAKCEVIAPSLVPVKSGERVKTDRRDALKLARNYRAGELTAVWVPDAAHEALRDLVRAREAAKKDQLRAKHRLSKFLLRHGRRPASGVKPWTLNYMAWVKKEVHFEQAAQEATLLDYLHEVEHAETRITRLDQAIDEAVKSTTPKMRAVIEGLQALRGLAQVAAVTIVAELGEISRFSEPRQLMGYGGIVASEHSSGESTRRGGITKTGNAHLRRVVVEAAWAYRYRPNVGGALRKRQEVVSKEVREIAWKAQHRLHSRYRKLTARGKEKGKVVTAIGRELLGFIWAIGVKVEAAQKETERRAA

SEQ ID NO: 293441 - protein, 331 aa, unidentified
MNTLMMPAAAARFNHVIAFDVAKASLSLHILPSGETLSLQNDGAAIRRLLKREEKRNRKQGLGRMLVICEATGGYEDAVLKAACELGLDCHRAHGSGVRAYAKFRGRHAKSDPIDAALIAEYGRDKLDLELYQPPRPEEAALRALMGRRAELKDMIQAETCRIEHASLKAVRVSLESHLAALKEQLALIEKEIRTLTRRDEAFSHNSRLMQTLAGIGAVASQTILAFLPELGHVPTPTAVALAGLAPYDRDSGKERGKRRICGGRGQIRPCLYMAAVAAIRSHAHFRDFAQRLTRKGKPFKVAVTAVMRKLIVILSAMIRNDQPWKHAQTA

SEQ ID NO: 293442 - protein, 326 aa, unidentified
MSRIQEKKTITTATSPFIVMGIDVSKDQLDVYVSPAGNHHSFKNDAGGVAELVNVCRDHDADLVVLEATGRYHRMAHKMLHEAGVRTAVANPARSRNFARSVGRLAKTDRIDAQVLAEYGERVRPPASTPPSKQQAKIAEITVARRQIVDEMKILKQQQTQTLDDLVIAQIAARISLCQCHCKDLEQLLAELIEEDDGIRRKHEILTSIPGIGLTTAATLISELNELGGANAKQIASLSGVAPMNRDSGSFRGKRKIGGGRKPVRDVMYMAAVVAIRWNKDMAAFYQRLKKAGKPFKVAITAVMRKLLILANTLLSENRLWSETQP

SEQ ID NO: 293443 - protein, 338 aa, unidentified
MSIYAGLDVSDKATHVCVVDIDGKVVRRDVVASDPEVLAKWLSRHCPNLVRVVLETGPLSTFLYHGLAERGVAVECICARHAKGVLSARVNKSDVHDAEGLAQLARTGWFKRVHMKASATHIDRAALRIRVQLITARTAMANQLRGLLKLFGLRMGTARTSGRRTERLAALYAQRPDLAPLFAPLIASMEAIEEQLRASGRLLVERAAADPVCTRLMSVPGVGPITALTFTATIEDPRRFARGEDVGAYAGLVPRRNQSGERDTSGHISKAGDPMLRWSLYEASNVLLSQVKRPFALQQWGRKLAEAKGAKRARVAVARKLAALLHSLWLNETEFRWA

SEQ ID NO: 293444 - protein, 370 aa, unidentified
MLDTTTFIGLDVHARPIKAVSLDVMTGEVRAATFGYDAGAVAEWVRSVDPRARCVYESGVTGFDLQKRLSGLGVDCVVGAVSKMIKPSADRRRKNDRNDAEFLARMLSVGNVVEVWVPDDECEAARDLTRALEDARDDLSRSKQRLSKFLLRHGLVFDERTPTGRRKGNWTAAHWAWIRSIEFPEKADDDVLAYYIDATRQAMEDKKRLEKLVEAEASKPRWKKRVDSLRCLKGVDAMTAADIVFEAGEFSRFKNARSFAAWLGLTPSEHSSGESVRQGGITKAGNKHLRRVLVEAAWHYISASPHPKDLAKGQAPDPAARRHAAKGIRRLVKRREEMLGRGVHKNKANVATARELACWCWAIGRMVENG

SEQ ID NO: 293445 - protein, 462 aa, unidentified
MQEKRESEPGRNRRRQLQGLPLMRADVAGIDIGSERHWVCAPTTDGSGREIADFGATTAELIRMAEWLQARGVRSVAMESTGVYWIPPHEVLEAHGLEVLLVDTRQLAQVPGRDKKTDPTDCEWIQRLHSCGLLRGSFRPAEAICMLRTLVRDKATLVAESGDWMRRMQKSLDQMNVRVHRAVSDIDGTTGMAMMRAIVEGERDARKLAQLRDPHCRKSEAEMAEQLNGHWREDHLFSLSQALKMYEAIQQRMADYDNEILRKLGEMEQEEARGQEAPALKNANKARKIKSRGQEPIRQALFRMSGVDGTQIDAIGVETMEVILSEYGPDLSRFPSEKEFVSHATLAPHVPKSGGRPLKKKKRYSASARVANVLRMAAQSLRRSDTALGAYYRSMAQRKGPDVATFAVARKLATLAYRLLRWGQPYVDEGAEAYEKRYQEQRIRGLKSRAKQLGYQLTPLTT

SEQ ID NO: 293446 - protein, 380 aa, unidentified
MEKACGLDVHKDSVFACILDEQGKKIFEKRFGTLTPDLEKLRDTLVEHGCGRVGMESTSIYWIPIWHILDSDFDLTLANPYFIRQLPGRKSDVKDAQWIAECVQKDLIKKSFVAGEIFQQMRQYTRQLRRLTKSRVRIEQQLDNQLQRCNIRFSNYVSNQGNNVSMRKIIKAIIGGERDHAKLCKLVHGRTLNKHGKDIITNSLSGFIQQVDVDMLIQCMDQINLIEKQQAICLNHLEELANKHFAEEISLLCTIPSIQTYSAMFILAEIGNDMSFFQKATHLIAWAGLKPRNDETAEKIKSRKILHGNKYLRQILVEVSWSVARSNKSFLGKKFNILAKRMKSQKALIAITRKILVVVYNVLKTRQPFDPKKNIQANKA

SEQ ID NO: 293447 - protein, 339 aa, unidentified
MVEGTEGSHHKEGSTKMAKRTMICAGIDTGKHKLDVAIDGSSEQLQVDNTPEGYKMLSDWLRRHRVKRIGIEASGGYEQAVVAELRRKRFVVVVFQPAQVRAYARFKGQRAKNDKIDAVLIAACTAAVRKVHAAPDPRLLPFAEQLTMIDQIGEDIARLKNRLESCRNPHIQQAWKEDLARLEKRKRIELKALVAAIREHRDLAERLDLICSVSGAGLPTAVAILVRMPEIGKITREQAAALAGLAPYDDDSGERVGGRHIAGGRERLRRALYTAALPASMRWNPHLIALYKRLIAAGKEHKRALVACARKLLIFVNTVVARGTPWQSEIPRPAMTATA

SEQ ID NO: 293448 - protein, 338 aa, unidentified
MIVIGVDVHKQSVTAVAVDEAGRMLDERTVLVGSDELIGWASALGAERLWALEDCRQLTRWLERQLLGLGEDLVRVPPKLTVPERRAGRQRGKSDPIDALAIARAALREPDLSRPRPGEQIFRELKLLVEHRDDLVDERRRIQQRLRWHLYQLDPTFAIPLRMLARPSHLERVSRWLGRQERELQVQLARELVTRIRTLTRAITELDQELEQRAAAIAPALLELPGCGAVTAAKLLAEIGPIDRFKTDAQLARHSGVAPLEASSGRIQRHRLDRGGNRQLNAALYRIAITQARYHPDARAYLERKKAEGKSRREAIRCLKRLLVRVVFNTLKASPALT

SEQ ID NO: 293449 - protein, 400 aa, unidentified
MLSIGIDVSKGKSTVCGMKPGGEIVYAPFEVQHTREGMSELVSLLRSSGEEVRAVLESTGSYHCPVVSALLENGIFVSVINSLRMKRFCSQSIRKVKTDRIDAMQIALYGLAYWQELQPTKLPEDTYRELQLLARQYYQMTSLLIKAKVDLNAICDQVLPGMQELMSDHAGRHKLSDFVLRYCHTTHILEMGETRFRKDYCKWAEKKGYRNCERMAALIFATAQNGIPVLPNAPSTQIVITEAIRVLHTVEASRDAILTQMQALAKTLPEYSLVREMPCIGDTLAPRLIAEIGDVRRFHSKRALIAYAGIDAPPYQSGKFCANNRHISKRGNRYLRKTGYEVMQSYVMHKPANDPIFTFIEKKRSEGKCGKLAMMAGLNKFLRIYYGKVTELYRSSSAIE

SEQ ID NO: 293450 - protein, 338 aa, unidentified
MSTAHIIGIDLGKNTFHIAAHDKSGNELFRKKLSRKKLLEFLSCREPSTIAMESCGGAHWLARKCESLGHTAKLIPPQYVKPYVKTNKNDFIDACAIAEAASRPSMRFTSHKTESAQIISTLRKLRNGYIRERTACMNRIGSILLEFGVSFPKGHAAMKRLFQWLADEGHYVPPQIIFELSKLLEHYEILSRKIENQQVKVEKLLAENPQMEQLQSIPGVGPVIASACLSSVGNPTDFKNGRNFAAWIGLVPIQYSTGGKTTMLGISKRGNRELRTLFIHAARSILWRDKSAEKYFGSWLINLKQRKPFNVAVVVFANKLARIAWSVMTTNKPFLIKA

SEQ ID NO: 293451 - protein, 341 aa, unidentified
MDKELYFGVDVSKKTLDLAYYDGETIDWKNAHIQVSNDDAGFKKIGSWVAKVGKDFDTFLFCMEYTGLYNQNFRLWLESKAYIYGMVEPRKMHRFEPDLDDDQRSLDRIKTDELDAFRIAIYCEQNHKKILRNPSKLPSPVYFKLKRLLAERKQNTKQSTLYKQQLHDICAYDTDLSVERKKLLLKSMKENQKAIDREIDSYINEDASISKNYDLLTSIPGIGRIIALETIVLTENFTAISNPRKYACYIGIAPFKKESGTSVRKRTTVSKKGFSEAKADLSIAVLSAIRNNPSIRDYWIRKRKEKCGGIVLNAVKFKLVLRMFAVIKRGTPYVETDAYKN

SEQ ID NO: 293452 - protein, 324 aa, unidentified
MSDSIVGIDVSKETLDAYCERGQRKQGRTFANSPDGWKLMRTWLKAMGSKQAHVCMEATGRHSLGVALALHEAGHVVSVVNPAQIRDFARTKLGRNKTDKVDAALIREYAELFKPEPWTPPSPAMRRLCELQTMRAGIIRSRAEWKNRMGSGLGDSIAIELAAATIDHFTTQLEAIDRAISETIDQDAELHDRRDLLISVIGVGDRLAALLMAKMPEPGVLRRSGEIIAYAGLNPSHHQSGTSIDRPTRISKIGNAELRSALYMPALSAMRFNPAVMALVARLRSAGRLKPKQIVVAAMRKLLVLCFGVLKTRKRFDPAIAMSP

SEQ ID NO: 293453 - protein, 343 aa, unidentified
MSNDTRIAVDVAKAVFEIAISDREGRVSRRERPKRHQFLPFLAQQPPATVVMEACGSAHYWAREIQKLGHQVVLLPPHHVRPYIRRNKTDRTDAKGILEASRNDDIRPVPVKTVNQQVLTSLHRLRAGWMLERTARLNTLRGLLRELGVFIPVGSREVVPAVWAVIEDADSNLPDALRTIFAEACREIREIEARVRLAEQQLASIAEQLPAVEHLQTIPGVGLLTSTALVGFIGDIQRFPSGRHFASYLGLTPREYSSGLKRNLGRISKRGDGYLRTLLIHGARSVLVHARKQQPDRLREWANQLAKTHVHNKAAVAVANKLARIVWAVWKHERPFALMARAA

SEQ ID NO: 293454 - protein, 349 aa, unidentified
MSEKIIPEIAVVGIDIGKTSFHVIGLDRGGAVVLRQRWSRSQVAARFANMPPCLIGMEACVGAHHLSRKLRALGHDARLMPARYVRPYSKSQKNDFRDAEAIAEAVQRPTMKFVATKTAEQLDLQALHRVRERLVSQRTGIINQIRAFLLERGIAVRQGRLFLRGALPHILAAPSEVLSPRMTRIIEELAADWRRLDERIEQLSSEIELLARTDAGCARLMSVPGVGPVISSAMVAAIGTGDAFSKGRDFAAWLGLVPRQMSTGDRTILGSISKRGNRYLRALFVQAAWVVLIRPKNWERHGLKRWIEAARKRLHHNVLAIALANKLARITWSVLARGRGFDPTFALSA

SEQ ID NO: 293455 - protein, 357 aa, unidentified
MKIVGCDLHARQQTIAMVDAESGEFTEKTLHHEGNAVREFYASLKGPVVVGIEATGSMQWFLELLDELGIESRVGDPAKIRAAETRKQKHDRRDAGLILDLLLRDRFPTIWMPSTEQRDLRTLLRDRHQWVQMRSRLQHTLQAIALNHALRKGSGLWSHAGQTVLQALPLPPHTSDRRVALLSLYVQLEKRIRKLDQEVEHQVQQRVQARRLMRHPGVGPVTALATEVFLGDPDRFATGNQVASYIGMIPSEHSSGKRQRLGKMSKQGNSLLRYLWTEAVMHAAQKDPELKRFYRRKLIQKGMGKARIAAARKLGIRLWIMMRDQIDYQEFCRRGKLRQSGEAHAGMPDFNSGPALQ

SEQ ID NO: 293456 - protein, 392 aa, unidentified
MKTNAIKEGTVEEAVQGRKTHQLIKLGVDVHWHEYVVVRQIDGSSPQSAQRFSPEGFVAWAAKQTQQAEQVWCCYEAGPFGFVLHKHLERLGVRNMVVRPRNWDEYGAKVKTDRRDALALCSSLDRYLAGNTQALAVVRVPTDEQEHSRSQTRQREQLVSERKRLGAQGLCAARYYGYDLPDQWWRPRRFAAMQSQTPDFLLELLARWQRLLLAIDEELDSLGGLIESAQQQMLPTGLGALTAQILDREIGEWNRFKNRRQIASYTGLVPSEHSSGQTQVRGPITKHGNPRVRHILIEAGWRLRQFQPEYRAVKQRQAAFDSAKQKGNSPARKRLGVALSRQFIVDWWRIKTGRTTPAQLGLQMSWPTCPHLPSKSKPSSETSAQPPTQPIG

SEQ ID NO: 293457 - protein, 338 aa, unidentified
MEAYAGIDLHSSTNFTAVLGDHDQRLFGKRLPNRMEAVLSALESFKENLKGVVVESTYNWYWLVDGLQAHGYTVHLANPSAIKQYEGLKHTDDKWDSFWLAHMLRLNILPEGYIYPKENRPVRDLLRRRLLFVRHRTSHILSLQSMVSRNHGTRISCNAIKRLDPGDAALMFDHPQLVAGARNSIATIRFLTNRIKDIEREVSSQVTLRDEFKALLTIPGIGEILGLTIMLEVGDINRFPQVGNYSSYCRCVRSERLSNGKKKDENNRKNGNRYLSWAYVEAANFTIRWCPHAHRFYQRKMAKANGIVAIKALSNKLARASYYLMRDQVPYDAGKLFR

SEQ ID NO: 293458 - protein, 338 aa, unidentified
MNKKRDKSFRIGVDVSQETLDVSARTDSGIEQRTAQFPNTPGGHRQLIKWSTKGGRSARVVLEATGVYSLDLALALDAAPRIEVMVVNPRAARKFAEACLQRSSTDTTMALALQEYAARMEFVAWTPPSVAVRELRAIARRIAALTVEKTRELNRRHAAGATEHTPAVVVNDVAVNVRHLERRLTELERHAVTLITDTPELKQAYDCLLSVCGIAQTSAIQLLGELLVLPADMSVRQWVAHSGLDVRHVQSGTSVHKVPRISKQGNAHLRRALYMPALVATQYEPHVRAFYEQLLAAGKKPLQAVVAVMRKLLHAIYGMLKTHTHFDGSKFRRLPQVA

SEQ ID NO: 293459 - protein, 352 aa, unidentified
MFYVGLDIHDKRIAICVLNETGQIVRRAQVRTIDEMMRILEALPDRFGVCYEASCGYGHYHDLLKPIAARVTVAHPGRLRLIFRSKDKNDRKDAERLAKLLYLGEAPAVHVPSAEVRTWRELITCRGRVIAKRTRAKNSVRTLLRGAGVVPPRRPALWTKKGLEWLRRLELATTSQQLRRDLLLEEIESLTNQVRRIEHELNHQAGRSPGVARLRSIPGVGARTAEAVVAFIDNPDRFANAKAVGRYFGVVPSQDQSGDRNRLGHITREGPAVVRQLLAEATWQALRRSPRVRAYFERVRRDDPQRKKIALVATAHYLVRVMLAMLKRGTDWEEGFAPADEPKGVAKAVVRI

SEQ ID NO: 293460 - protein, 459 aa, unidentified
MGNARKGKIPAQLVEDEDYQLRHERVAGIDIAKAKADVCTRLPPSRAGGRRASRVEEVPATAREVLALAGRLLADGVELAVMESTSDYWRIWFYLLEGAGLRVQLVNPRHARQLAGRPKTDRLDAQWIARLAEMGLLRPSFVPPPEIRALRDLTRSRLQLVRDRTREWQRLEKLLEGALVKLSSVVHSLARTKTARVIVEAIASGESDPGTLAGLAAGRVKGGRGAIAGALEGMQVRDHHRTLIRVHLDHIALLDRSVAAVEDEIEAALDAIPAAWGADATGETGPDAGRGPDPAALPAAERLAEIPGVSPALARAIIAETGLDMSIFPTAAHLASWAGLAPVASQSGPRTRKPGKGHGDAYLKGYCTQAATGAAGTGTFLGERIGRLSRRLGGNRARCAVARSILVIIWHLLSDPGARFADLGPGWHDSRADRDRKIRAHVRQLQALGLNVELSEAAA

SEQ ID NO: 293461 - protein, 343 aa, unidentified
MNITTVGIDLAKNVFQVHGVDASGKVVLRKALKRAEVIKVFSGFPACLVGMEACGGAHYWARRLIELGHTVKLMAPQFVKPYVKTNKNDARDAEAICEAVARPNMRFVPVKDVEQQTILALHRARQGFVVERTAQGNQMRGLLHELGIVIPKGIRYIDRHLPEILEDGENGLVEISRELFSRLFDHFKQLGMQVKELENQIKAWHKKCAASLRIEAIPGIGALTASALVASIGDAKTFKSGRQLAAWLGLVPRQDSSGGKEKLLGISKRGDVYLRTLLIHGARAVLFHRMRQVEHQDGWLMRLRARRNPNVAAVALANKNARVVWALLAHDREYSAAPVAAAA

SEQ ID NO: 293462 - protein, 338 aa, unidentified
MSIVMGLDQHRGQITGEWIDTETGEVQRTRVAPADRAAVRKFLSRFRGAELEVALEATTGWRFVVEELRRVGAVVHLAEPAETAGLRGPKKRAKGDRADARHLRELLMVKRLPESWIPPDHILDLRARARLRHTLSEQRREWQQRIQATLYHHGCPRRRELTTGEGREWLATQPLPAAAREQVTVALAMIDALEMQIAPLDKQLRAYARRQAGCQALMAHYGIGPLVAITILAELGDCTRFSSSRHAVRYSGLDITVHQSDQRRAPGHLSRQGPPALRWALFEAAQSACRRGSPDRDYYGQAAERLGHNRACLSVARKLLKRSYHTLRELGEEALTPA

SEQ ID NO: 293463 - protein, 342 aa, unidentified
MEFAVTIGLDLGKSVFQIHGVDAGGAVVIQRRLTRGRLLAFFAKQPACLVGMEACAAAHHWGRELQKLGHRVRLMPPRYVKPYVKRQKNDAADAEAICEAVTRPNMRFVEIKTCEQQGILVLHRVRLMLTRQRVQLSNAIRGHMAEYGLVAPVGRNGLQRLIAVIDDPDDARVPAVARASLAPLVRQLRLVNDQVLENDRLVRASARSTELGHRLMEMPGVGPVLASAMVATVADPTAFKSGRDLAAWIGLVPRQNSSGGKEKLGGITKQGDRYLRQLLVAGALAVIRYAQRHGTRRPWLMHLLARRRPKIAAVALANKMARMIWAMMVTGERYREPKVPAA

SEQ ID NO: 293464 - protein, 350 aa, unidentified
MSEQYAGKQIVGMDLHRRRSVLVRMTETGERLETVRISNDPEYLRAVMTRAGEAPDVVLEACYGWYWAADTLAELGATVHLAHPLGVKMFSLRRVKNDERDAADLADLWRMGRLPEAWIAPPACRELRGWVRHRAKLVGLRSNLKCQVHAVLANAGVQVGMSDLFSAGGQDLLARVALTPESRARVDSALRLISGLDFEVELFGKLVANRLRSDRGYLAIQAIPGVGPVLAAVLVAEIGDIGRFARPEQLASWAGLTPKHHESDTTVHRGPITKQGSRLVRWAAVEAVQRVGGHTRLGQVRDRVGQRRGRNIGVVAAARELTELVFYGLRDGRLRCLTTPSASNTANPAA

SEQ ID NO: 293465 - protein, 354 aa, unidentified
MNNLSFKNNTFFVGIDTHLKSWKVTICNSGLELKTFSMNPSPIELFNYLNKHYPGAIFNIVYEAGFCGFWPQRKFKELGINCIVVNPTDIPSSNKEKVVKTDPTDSRKLARELENNSLKPIYIPDVYAEQLRSLMRLRFQLVQNHTRIKNRIKMLLYNYGIIIPKQHLSNPRWSGLFINWLHSVKLSSNPGQLTLNNLLLQLQQCRQQINLVLRQLREEAKDKSIQPIINSLVSVPGIAFITAMSLYTEIIDINRFKSFDHLASFVGLVPALYSSGITEYSRGISFRHNKFLRPLIIEAAWTAIRKDPAITIIYSQLIHQMAKQKAVVKIAKKLLSRIRHVWIQQEQYQFALVA

SEQ ID NO: 293466 - protein, 324 aa, unidentified
MAKRTTICAGIDTGKRKLDVAIDGSSSQLQVKNTAEGHRVLLEWLRRHKVKRIGIEASGGYELPVVTELRRKRFVVVVFQPAQVRAYAKFHLQLAKNDKIDAALIAACTAAVKKIHDAPDPRLQPFAEHLTLIDQIGEDIQLYKNRLETCRDPRIQKLWEEEISRLAKRARAELKALVAAIRQHRDLARRLDLIYSVSGAGMPTAVAILVRMPEIGKLSREQVAALAGLAPYDDDSGERSGARHIDGGRKRLRRALYTAALPASFRWNPHLIALYQRLRAAGKVHKSALIACARKLLIFVNTVVARGTPWQKEQPVRATNPAAA

SEQ ID NO: 293467 - protein, 426 aa, unidentified
MVENQYQIYVGIDWATEAHQACVLDSRGRILAERSFAHTGDAIAAFAQWLHEVAGDEPGQVAIAIEIPRGAVVETLVERGFHVYAINPKQLDRFRDRHSVAGAKDDRRDAFVLGDSVRTDRACFRRVRLDDPLVIQLRELSRVHDDLGREANQLTNRLREQLHRYYSQALALCPAADEPWLWAVLELAPSPSVARHLRPQRVERLLRQHRIRRLSAHEVVAALRACALQVAPGVVEAASEHIALLLPRLRLLHTQRQGCGVRLEALLDKLGAAEDDDGQQGEHRDVESLRSLPGVGRVVAATVLAEASAALAERDYQALRAYAGIAPVTKQSGKRRMVLMRYACNGRLRNALYHWARVAAMRDPSSKTYYAGLRQRGHSYARALRSVADRLLRVLIAMLKHGSLFDSARTRPSARAAAPEEVVCTS

SEQ ID NO: 293468 - protein, 345 aa, unidentified
MKIVGCDLHTRYQQIAMLDAETGELVERRLEHESGEARAFYAGLSGPVRVGIEATGHTRWFERMLRELGHELWIGDAAQIRASMVRKQKTDARDAAHLLELLLSDRFPRIWRPSLEERDLRQLVWHRQKLVWMRNAVGNQLHALAMGEGVCRKKKLFTKKGRVELEGLKLGRWASHRRQELLTMLDQLDASMKELDQAVAEQAEQNQSATLLMTHPGVGPVTSLAFVLTLGPVQRFERSKQVVSYLGLNPREHSSGGRQRLGTISKQGNPMMRSLLVEAGHTAARLDSELRQDYQRLQMRRGSGVAKVAMARKLAVRMYWMLRSPASYAQLVRMQGSPRGTLVGR

SEQ ID NO: 293469 - protein, 395 aa, unidentified
MRRDTKEVLAELVGKLKEKLDPKKVAATSAGEDHQRGELRPNLDRLTVGVDLGDQWSHYCILGLEGETLAEGQLRTKQEDIAEFFQALNAARVVFEVGTHSPWVQEVICGCGHEVLVANPRLMEGSKRRKRKNDRIDANKLARLGRVDPQSLHPMQHRSREVRQDLVVLRARDALVAARTELINATRGLVKSMGSRLPKCSSPSFAQKVEETVPIELRDALMPLVRMAAALSDCIQGYDEKIEKLGREKYEHTALLRQVKGVGPITSLAYVLTLENPDRFVKSRDVGPYLGLVPKQEDSGESQPQLGISKAGDTMMRRLLVGSAHYILGPFGPDTDLRRYGLRLCERGGKNAKKRAAVAVARKLAVLLHCLWVSGEVYEPLRQGMSATMTPAAAA

SEQ ID NO: 293470 - protein, 429 aa, unidentified
MNYTQNEKIEQVTDSTMVVGVDIGSQIHYARAFDNRGRELTKRIFSFHNDLEGFNSFNLWAETLKTENEKTAVLIGCEPTGHYWFAFAKYVNDHQKRLVMVNPFSVKKIKELDDNSPKKTDSKDPKTIAKLVVDGRYSIPYMPEGIYAEIRDLVYSRDRIMKQHNISANRIQRWLAIHFPEYLGLYTRFDAISGLAVLEKAPLPKDVIALGVNGIRKIWHDKKMRGRGVTEDRAKTLVEAAHNSVGLDGGIGTKSELYMLLEEHRLWTSQLEAVNKVLEEMILKVPHVEKLLAIKGVGSITIAGFIAEVGDIRRFDSPKQIQKYAGLELLENSSGKHKGRTRISKRGRRKLRKILYQVMVPLLARNKEFRGIYDYYVTRVKNPLKRRQAMVAVSCKLIRVFYAVLTKGVEYDRFKMMSDIHRKSDIIAV

SEQ ID NO: 293471 - protein, 414 aa, unidentified
MQVETITKNSNGGRDMISIGVDVSKGKSMVCIINSKGEILYKPYEISHTETELCRFVSRIEDLKEDKKVVMEATSSYHLPVVSYLKEKGIFVSVINPLVMKKYASMTLRKGKTDKLDAIKIANYGIDNWFRLEEYQVADEVYSELRLLGRQYSHYIKMRVESKLCLTNMLDKTMPGIKRLLSNNSENPERDKLNDFIEEYWHYDNITKGSEKQFINRYIRWAKKKGYHQSETKAKQIYALASEGIPTLSSNTPSTKMLVLESVRVLREIDRTLANILSQMRKMARGLKEYEVVREMGGVGETLAPRLIAEIGDVKRFKTGSSLIAYAGIDTPPHESGNFIGSKRRISKRGFSLLRKTGYEVMKCLKVNKPPEDPVYLFMIKKELEGKALKVAKIAALNKFLRIYYARVKEVYTM

SEQ ID NO: 293472 - protein, 343 aa, unidentified
MECYVGLDVSLKQTSICVVSGTGSVVREGVVASDPDAIAAFVRSKAPGAIRIGLETGPTSTWLWTELKRLGLPVICIDARHAKAVLKMQINKSDRNDAAGIARIMQTGWFKEVRVKDLDSHTLKALLVSRALLVKIKRDLENQIRGLLKNVGLVIGRAKFNVFAVRAAELIEDRPELIAVVGPLLKARKAIEQQTDDLDRKVVKLARYDAQVRRFMTVPGVGPITALCFKATIDDPTRFKRSRSVGAYVGLTTRRHASGEIDWTGRISKCGDAMLRSYLFEAAGVLLTRVPKWSALKAWGMRLAKRNGLRKATVAVARKLAVILHRMWIDRTEFNWSKQEVAA

SEQ ID NO: 293473 - protein, 347 aa, unidentified
MNHIGMDGHITTLEFAVVNEAGRLVKADRVATSVNGFMEFVRTVPRPRTIYMEEGTLAAWALETCVRFGEKLVITDAKRNHWIGSSGQQKDDPIDALKLAQLGRGGYIKEIHHPVGQRRRFRELMIAYHDTVRSTTRIKNKIKSKFRHNGVQCTGTTVYSEAYREEWKGKLPRETTLLLILEGLWRQLEQFEQTEKDLLAAARALAKHYPEIKYFESIPGIGFIHAATISAMLETPYRFADKKKVWMYAGLGIMTRSSGGKVYSEKLSTDYNRLLKYTMKQAAGAAIETKDNPFRRKYLDMTLLHGIAPHRAKLTVARDMLATMWAMWKKGEKYNPEIREKAAYKQG

SEQ ID NO: 293474 - protein, 400 aa, unidentified
MLSIGIDVSKGKSTVCGMKPGGEIVYTPFEVQHTREGMSELVSLLRGSGEEVRAVLESTGSYHCPVVAALLENGIFVSVVNSLRMKRFCSQSIRKVKTDRIDAMQIALYGLAYWQELQPTKLPEDTYRELQLLARQYYQMTSMLIKAKVDFNALCDQVLPGMQELMNDHAGRHKLSDFVLRYHHTTHILEMGETRFRKDYCKWAEKKGYRNCERMAVLIFATAQNGIPVLPNAPSTQIVITEAIRVLHTVEASRDAILTQMQALAKTLLEYSLVREMPCIGDTLAPRLIAEIGDVRRFHSKRALIAYAGIDAPPYQSGKFCANNRHISKRGNRYLRKTGYEVMQSYVMHKPANDPIFTFIEKKRGEGKSGKLAMVAGLNKFLRVYYGKVTELYRSLPTIE

SEQ ID NO: 293475 - protein, 342 aa, unidentified
MQITTIGFDLAKNVFQVHGIDVKEKVVARKQLRRGQVIAFFKALPPCLVGMEACATAHYWARELTKLGHEVRLMPAKDVKAYVKRNKNDAADAEAICEAVRRPTMRFVRIKSAEQQGQLMQHRTRDVLIRQRTQIINALRAHLAELGIVAAQGDAGVNELREIVADDRDERLPIDARASVIVLAAQLEALQTLIGSIEKRIKMQHRSNETSQRVETIPGIGVLGATAIVATVPDPKIFRSGRDFAAWIGLVPRQDSTGGKQKLGPISKQGDQYLRRILIVGAISVLRRALQNPGKYPWLTQLLARRPFKVVAVALANKMARVAWALLAHGGTYRAPELAEAA

SEQ ID NO: 293476 - protein, 356 aa, unidentified
MTKQVMAGIDLPSNNAMIGIVDQSGKRLKHQKVDCQLLEVVKVLAPYKSRLKRVAVESTFNWYWLVDGLRALSYPVVLANPAKIDQYSGIKHADDKNDAYFLAELQRLNILPTGHIYDPQVRPVRDLLRRRVGLVHQRTALMLSFKSLYSRTTGQTMSLSQLKAMEVGQAKTLYEHPANQLIATVQKEHIDQLDQSIGRIEEVVLACARELPLYGKLLTIPGIGRILGMTITMEVGEISRFAGPGNFASYCRAVDSQRTSNDKKKGQNNGKCGNKYLGWAFVEAANFAKRYDEPSRKWFDRKAAKTSAVLATKALACKLAKAAWYVMARQMDYEAERVFGRAAGSQVKGLAKSPED

SEQ ID NO: 293477 - protein, 432 aa, unidentified
MKFTQSNKQNQRISRISETTLVIGTDIAKHNHVARAFNYRGIELGKRCLFQNDENGLLNLLAWAESIKQEYGLTDVLLGVEPTGHYWFPLFHFLKQRGIEVVLVNPHHVKKSKELDDNSPTKNDIKDAKVVAKLVIDGRYTQPQLPEGVYADLRVLMNQRDRLCGDLNRVKGRIHNWLDRYFPEYRQVFKDWEGKASLITLTNFPLPQDVIAAGETTVVAIWKRNGVKRAVGPKRAELLYRKARKSIGLTQGATTAKHELAMYLEQYAMLCRQSEQLMELVAGLVEQIPGATHMMSIPCIGLITVAGFLAEVGDLSGYDHSRQIVRHAGLSLRENRSGLHKGETTISKRGRCRLRALLFRAALTMVAKNPEFRALHLYFTTRRENPLKKKQSMIAICGKLIRVLFELGRKQKNYDASKVLGPHREAQLQAAA

SEQ ID NO: 293478 - protein, 348 aa, unidentified
MLADQLDYVVGVDPHRDSHALAVVHVASGAVVFEATVAASSDGYARALKLVDQHAPGRRAFAVEGTGSFGAGLTRFLTVRGERVLEVGRLRRERRSGGKTDALDAVRAARSVLTSERPGTPRAGGERQALQALVAAREGAVNAKRAGLCQLRDLLITTPEPLRSELRPLTRARLLQRLAATRPDGRRDAELRGSMLALRSIARRVLQLTAEERELAREIETLTRRLAPQLLDQPGVGPHAAAQLVLSWSHQGRITSEAAFARLAGAAPIPASSGQTIRYRLDRSGDRKLNRALHMILVTRKRTHPATIAYIERRLQEGKTRREANRCLKRYLARNLYRLLEHGPPIAT

SEQ ID NO: 293479 - protein, 356 aa, unidentified
MNVYTKQHLYYCGIDLHARTMYVCILDNTGEKVYHKNIRCNPEQFLKAIEPFREDIVVGVECIFCWYWLADLCEQEGIDFVLGHALYMKAIHGVKTKNDRIDSLKIARLIRGGNFPVAYVYPPQMRATRDLMRRRNHFVRKRAELISHIQNTTMQYNLEPLGTISRPHHRRKKDMIGHFPDPVVQLIVETDLQLINHYDPIIKNLDKQILALAKSHDPTSLNLLRSIHGVGEVLALTMLYEIHTIERFPSRGEFCSYARLVKGQKQSAGKNYGTTGGRIGNAHLRWAFSEATVLFLRKNTDTERYYNRLINRHGKSKALSIIAKRLGIAVYYMLKRGKSFNTKMFLQGKNMTKEET

SEQ ID NO: 293480 - protein, 382 aa, unidentified
MQTIDTIKPTILLAIELSASTWLVAARVPGWEKPHLHRIDGGDTAALLALISSLQARAARGLDATIGVVCCFEAGRDGFWLHRLLTTHGVVCHVLEPTSILVNRRARRAKTDRLDAEGMLRVLAAYLRGDHQACSMVRVPTPEEEDAKRTHREREKLVQERQRIENRIEALLFTQGIRKRPSLRSWERDLAVLRTGDGREIPRHLRAELDRLRRRLVMTLELIREVEAERDQAAKTKPQDRACHKIAALSRIRGIGENFAAVLTREVFYRSFDNRRQIASYVGITPMPYQSGGMDRDRRISRAGNPRARTTMIQLAWLWLRYQPGSELAEWFRERVGTLAGRTRRIAIVAMARKLLIALWRYAETGVIPAGAEIRAEITVAA

SEQ ID NO: 293481 - protein, 451 aa, unidentified
MNPKPEVPAEALGLVHPHAAGLDIGAAEIWAAVPPERDQPSVRPFGTFTPDLQALAAWLAACGVTSVAMESTGIYWIPIFELLEARGLEVYLVNARHIKNVPGRKSDVADCQWIQRLHSYGLLSASFRPEAEMVVLRAYLRQRTMLIEHRAAHIQHMQKALHLMNLQLTQVLSDVTGVSGMAIIRAIVGGERRPAKLAALRNARCQRSEAEIVKALTGSYRPEHLFALKQALTLYDAYSTQLAECDREIESHYAAIKPRFDPDDPDTPLGPDPKTNTHSKNAPDFDVRRQLFQLVGVDLTEVHGLHVSSVQQLLAEIGTDMRKFPTVKHFCSWLGLAPHNDITGGRVVRSRTIKNHNRAGQVLRLAAQSVGRGQSALGAYYRAMKGRIGVAQATVATAHKLARIIYFMLRDRQPYQPISPEDYAQQQRARQIAALNRKAAKLGFMLQPQPT

SEQ ID NO: 293482 - protein, 302 aa, unidentified
MSEVHVLAVDLAKRSFQVCAVDRGGAVLYNRMISRSKLEQMLTSHPSCIVAMEACATSHFWGRIAEQLGHEVRLIPPIYVKPFVKRQKNDAADAAAIAEAAVCPNLHYVAVKSAEHQARAVAFRTHQCFVGQRTQLINALRGHLAEFGVIVAQGPTGLRSIPTLLKDETFDLPEGVKEIATLYQDQIKALTEKIDALTLKLQEATRINDEMRRLCTVPGVGPVTAGAIMAFAPDLRTFSSGRNFAAWLGLVPRQRSTGGKTRLGGVSKMGQSDIRKLLIVGAMSRIRWIVRKGVLPDTGWAI

SEQ ID NO: 293483 - protein, 414 aa, unidentified
MDVLHDRCAGLDIGKKDLKACLRTPSSTRRARRQEIRTFGTTTNALLELRDWLVDQQVTLVVLEATGDYWRGAYYLLEDTLNVILVNAAHAKGLPGRKTDVLDSAWLAQLGECGLLKASFVPPEPVRHLRDLTRYRTTLTVERSREAQRLEKELEDAGIKISAVASNILGVSGRAMLAALIEGEDDAQVMAEMARGRMRSKIPALVQALTGNFGEHHSFLCRMHLTRIDELSATIEELSARIDQEMRPFAPQIEHLVTIPGVKKRTAEVIIAETGADMTRFRTPANLASWAGVCPGHHESAGRQSSGKRRHGNRWLGGALGTAAMAVGRTREHTYLGARYARLVPRLGKQKTIVAVQHSILIAVWYMLSDNVDYQDLGGDYFTKQDPARAMRRIIRQANALGLTVRSDPIPDVA

SEQ ID NO: 293484 - protein, 421 aa, unidentified
MSKGRYRVQDCQAVDWTQLCERARGAQVVFAVDVAKEDFVAAVMLDSGELLERIKWRHPGQTRLVLDALVALQACAELAVVMESSGSYGDALRWQLHERGIAVYRVSSKHVHDSAEVYDGVPSVHDAKAADLIALLHVHGRSRRWVQLDEQRRVLNAQVQRLDQLKGRQQRQRNRLEALLSRHWPELSALIDLNSVTAAALIATVGSPAYLCAFAHKGPAILRAASRGKLDAPRIEAILESARTTLGMPCLAEENAQLRALGNDLLAVHKELQQLINALQVQVAEDDTLQPMAAVIGAPSTAVLYAHLGAPSAYPSAQSYLKALGLNLKEHSSGKHQGRLTITKRGPPEVRYYLYFAALRLIAQEPLVARWFRAKSQRPGACKGKLIVELMRRLAKGLWHQGQGEVFAVDKLFAPPPSCGA

SEQ ID NO: 293485 - protein, 367 aa, unidentified
MKKLSTMQTISNELLKEQKLTIGMDLGDSWSFYCVLDEAGKIILEQKVATTQEAMKQTFEKIPRSLIALETGTHSPWVSRLLTELGYEVIVAHAQKVELITKSNRKDDRHDARTLARLVRFDPELLGPVRHRSAKAQIHLTVIRARAELVSARTALVNAARGLVKSFGERLPKCGTYQVNEKLAEGLSAELRDVLVPLLRQIESLNEPIKEYDERMEKIAKEVYPETSLLQQQVKGVGTQIALTYVLTIEDPHRFLKSREVGCFLGLKPGRRNSGKSEPQKKISKEGDRYLRTMMVQGAHYILGPFGEDSDLRRWGLKLAERGGKNAKKRAVVAVARKLAVLLHRLWVSGEVYEPLRNSQKAMRAVA

SEQ ID NO: 293486 - protein, 431 aa, unidentified
MLGGNQEKLMSQNQPEIQYAAFVSIDWADQKHVWSLQEANSRTREHGEVGHMPEAIEAWIAQMSQRFAGRPIAVAVEQSRGALVFMLSKYEQLHIFPVPPAMTANLRKAFYSSGAKTDPADTDLLQDVLQMHREKLRRLSPDTEATRLIQNLVEERRKLVDEKTAQSNRLEAHLKIYFPQIPQWFGDVDSPLVCALLVRWSALEALQKARPDTLRSFFRKHHCRKEELIESRIKAIGEAMPALKDRAVVEAQLAVVKVLVQVIQVLHQGIEDFNRQIQEAAEAHPDFFIFESLPGAGAVMAPRLLAAFGSQRERYRNAAEVQTLSGIAPVTESSGKSSWIHFRFACSKFVRQSFHEWAALSITQSQWARAYYELQCRRGKRHHAAVRALAFKWIRIIFRCWKERVAYDEKVYLAALAQHNSPLLAATKIAL

SEQ ID NO: 293487 - protein, 405 aa, unidentified
MLFVGDDWAEDHHDVYLMHDSGARLASRRLPEGLAGMRVFHELVAAHAQDPAEVVIGIETDRGLWVDALTAAGYRVFAVNPLAAARYRDRHHVSGAKSDASDAKLLADLVRTDRHNHRLIAGDSGQAEAVKVLARAHQSLIWARTRHTNGLRSALREYYPAALVAFEDLADRDALAILGRAPTPLDAQRLSVSKIRAALKAAGRQRNLDTRALQIQEMLRTEQLASPAAVTAAFGASTRAAVGIIAELNRQITDLEAELATHFEAHPDADIYRSLPGLGVILGARVLGEFGDDPNRYTTAKCRKNYAGTSPLTVASGKKRAVLARHVRNRRLYDAVDQWAFCALQTSTGARAFYDQHRAAGDLHHQALRALGNRLVGILHGCLRHHTHYSEHTAWAHRAQTPAAA

SEQ ID NO: 293488 - protein, 396 aa, unidentified
MIYVGIDVAKDKHDCFAMSSDGEIIFENLTIKNTFDGFNVLLNSILSFEKNLDNIKVGLEATGHYSNNIVNFLTNKGFHLYLINPLQTNLYRKGQSLRKTKTDKLDARFITTMLITGNLKSYSKQSYHISELKSLVRHRFRLVKERSKCKVSFSRLLTILFPELESIVWSTSQKSALYLLLELPSANAIANCNLKHLTSILQKYSNSKYDKNKAIEIRELARNSIGTVSQSQSFELKQVIQTILFYQSQIDEIDKELKNMITELNTPILSIPGISYVSAAFILAEIGDINNFDSPAKLQAFAGLDPSTYQSGKYTATQSRMVKRGSKYLRWALLNATRLVCMRDDTFNDFKNKKLEEGKHYFVALSHTTKKLIRVIFYLLKTGKTYQSQSDISKVA

SEQ ID NO: 293489 - protein, 341 aa, unidentified
MSKRSVPSCAVLYCGIDVSAATLAVAVQPEGCDHFEQCTLPNTVAGHRKLIAWLGRWKAPVRVSLESTGIYSLDVAMALDAAAGIAVAVLNPRRFHQFAESLRRSKTDAADAVALAEYSRRMRFEAWSRPSPEVLALRGISRHLATLSEEHARLKNRLHAACGSASMPHCVREDLRRALARVEKSLQRMHREAVAAIRKDDGLQQKFQHLLGIKGIGEVSAVQLLGELAGLDPAMTVRQWVAQSGLDPVHQISGTSVHKQSRISRRGNPRLRRALYMPALSASRFDPHFKAFYTLLLARNKTKLQALTAVARKLLHAIFGIFKTGTKFSGAKLFPHLIPTS

SEQ ID NO: 293490 - protein, 415 aa, unidentified
MRAAELRPRSDDIIVGIDLAAREHQAVIVGADGRRLTRFRVPHSRDGIAELLRRSRAKSWQATGRVLAFEATGHVWQALAAILEERGERYVVVNPLAVFRLREARRMDRTKTDLTDAEQIAELARTGMVTSTRPLHGPYLALRRSWGEYVRVRFEAARLKSLLRQQLFGLFPELLEVWSRVDRPRLLAVLRLGLTPAQIAALPQSEFLTRVCAERGGRRLWRAKVRAAHEKAARSVAPDERLEAAALEARRIVARYDLLEAQLAEVQGEVEALLGEIEEARWLATIPGLGFASVAGIIAHTGPIGRYRHGRQLVKLAGTNPTRNETGERTGGYQAMSHRGRAGLRQVAYMATISCLAHNVRLRAHYDRLVSRPERPLAKMTALGACMNKLLLWAFAVMSKRRAFELDHEWKECAA

SEQ ID NO: 293491 - protein, 346 aa, unidentified
MDHYAGIDVSLECSSVCVVDAKGKIVREAKVASEPEALIDWFHLLGFDLARIGLEAGPLSQWLYAAMKKAGLAVELLETRHVSDAFKAMPVKSDRNDARNIAQLMRLGWFRPVHCKSMSAQETRAMLTARKLIQTKLQDIENSLRGILRGFGLKVGKTTKRSFATRISELVAGHPALETIAAAMLAVHMVLLREFNSFEKRVRAISLLDAKARLLMSTPAVGPIISLTYACAIDDPARFASSKRAGPLFGLTPKKHQSGETDYSGRISKNGDASVREALYEAAHIILTKPIKGCAQLKSWAMRIAKRAGMSKAKVALARKLAVIMLRMLKDNVPFNSTAKATAAAV

SEQ ID NO: 293492 - protein, 421 aa, unidentified
MKGLRAKRVRTVKEGTLIATVDIGVASNTGYCTTLDGRSTKSFRFDNTKEGFEKFWCMTVASKSRFGCEEVLVGYESTGPYAEPLVHYLANKQVNIVQVNPMHTKKMKEVNDNSPLKTDEKDPRVIADIIRLGRALSIVVPEGDAASLRRLNNARERHVGEQTALLNQLQQLVFLIFPEFKTVLKNMKGKTAQHLLKRYTIPERIGTLSKEALGEEMRKRSMGKFGIKEAESLIGLARETVGIKEGLAGIFMDIRHILMQLEAEVRFISEIEAEMGVTLERIPCSVKLLSIKGLGTVSVAGLIGEVGDFSKFTTQSEIMKLAGLDLYEISSGKRKGQRRISKRGRSLLRKILFYAAIQMIRKNGIMYDYYARLTGRGMERMRALIAVSRKLLRIIHAIVRDNRDYVGEYQAPERMVIKKAA

SEQ ID NO: 293493 - protein, 400 aa, unidentified
MRTVFGIDVSKASSEVAIVINGEKIHGYTMPNDAIGFTRLLDDLKTVQKPEIIFEATGVYSHRLQAFLEENGYTYTRLNPLEAKKQLDSLRVRKTDKIDAETLAISQFVLNRKPTYIQEEVYQELRDLSRFYQNLTEDIVRTKNRLHKVLQVTFPEMENILSTPTREQYWNLVMTFPYKDFVLELSKDELLEGIRQSTSKRISDKRVAYLAQKLAALANQSYCAVKKNSPILEEVRYYAKELLRLSEQRQAVLEQMVELAQPLPEYEILLSIPGIAETTATSMIGELEDIRRFQSANQINAFIGIDLRHYESGNFLVKEHITKRGNPYARKILFKCIHNIAAASHTNHCHIEDFYEKRKRQSQTTSTKPHTIASIHRLIRTMYYLITHNKLYDYTSTQNR

SEQ ID NO: 293494 - protein, 362 aa, unidentified
MHTITIGVDLAKQVFSLCSVDAVGRVQERRELRRDAFIQWLPSVPAGTTVAMEACSGAHHWARRCQEHGLQPRLMAAQFVAPFRKSRTAKNDRNDAEAIATAARQGNMRFVSIKTVDQQVRLSWHRVREGYKAEALATSNRLRGLLAEFGVTMAQSDGALRRTLADLDALSLPSSLVELVRDVDAHWLQLRERIAQSDRRIQAHAKGDEACTRLRAIIGVGPITADAVVATIGSAQSFANGRQFAAWLGLVPMQHSSGGRSRLGRISCRGDGYLRTLLIQGARSSLQRAKAVAWEKATPEQRWIQDIERRLPFGKVLVAIANKHARQLWAMLARGEQYDADAWLKHPMVQRPASRRAPSATN

SEQ ID NO: 293495 - protein, 341 aa, unidentified
MTEVSTIGLDLAKNVFQAHGASASGAVLFRKRLRRDQVLAFFAAQPRCLVAMEACASAHYWAREIAKLGHEVRLIAPAYVKPFVKRQKNNAADAEAICEAAQRPTMRFVAVKSEAKQASAVVFRTRDLLVGQRTQIINAIRGHLAEYGLIAPQGPSHVDQLIAQIEDPSSGIPDPARSCLAVLVETLRALQGKIAALDTEIAARAKRDDGARRLMSIPGIGPLIATAIEALAPPVETFRSGRDFAAWVGLTPLQRSTGAQERLGKISRMGERTLRRLLIIGASGVVRWARRKGAPAGSWLARMLARKPPMLVMVALANKMARIAWALIAKGGSYRAPAVAA

SEQ ID NO: 293496 - protein, 342 aa, unidentified
MTIVVLGIDLGKNSCSLVGLDAAGRVVLRRRMQREGVIAFGAKLPGCVVAMEACCGAHHMGRALAKQGHTIRLMSPEYVRPYVKAQKNDDRDAEAIAEAATRPTMRFVALKSESQLDVQTLHRVRDQLVGERTALTNQIRSVLLERGHVVAQGRAKLTACLAALLDTDAGASLTPRMRTLMAEVRERWQDLDRRIAALDAEFAEQARINEDARRLTTIPGIGALNATALVAAIGDVASFARGRDLAAWLGLVPRQVTTGGKPRLVGITKRGSKYLRKTLVQGARAAMPTLRQGDTRLGQWLRGLLARSHVNTAVVALAAKMARIVWALLRHGRVYEPAAVTA

SEQ ID NO: 293497 - protein, 360 aa, unidentified
MEQITPAAVAGQVVLVGADLAKRVIQVHAVDAAGRVVCRRALPRDRFVAWCARLPAGCVVAMEISSGAHHWARRLSALGLLPRLMSAQLVEPYRSQGATGKNDANDAAAICEAASRPAMRFVPVKSVEQQSMLCVHRLRQGLKADRTACINRIRGLLAEFGLAFAQGPEALRRVLADVLEDASNEMNTLARLVIQSAQAQWRELEEHIAWCDTRIAQHARDNPAVRAAAQLMGIGPVGASAAVATVDDFRQFKNGAQFGAWCGIVPRQHSSGGKTQLGRITRRGDSYLRSLLVQGAKSAVFTAHKRSDPISRWALALRERSGWQVAAVALANKNARILWAVMTKAERYNPHHVSVKPPAA

SEQ ID NO: 293498 - protein, 352 aa, unidentified
MDRYIGIDAHLGSCTIAVMNHRGRRLNSHLVETNGEALRACIKQIPGRRHICLEEGGFSEWLFELLEPLTERTVVVQPRRHQGSKSDFIDAWARADELRRGDIPQTVFKSPGTFSRLRSATRTYYAMREDLKRAKHRLKATFRLRAIPVSSDVYDCERRGVWMARLPDDLRQQATYYADEVDRLTEQRDTVLAWLKTELKKVPDAKYLLSVPGLAEVRVATLLSVVISPSRFRSKRQFWNYCGLGVVTRSSSDWVRDPRAGTWNKRRVTQTRGLNRNFHPRLKDAFKGAAYVVSHNCREDHPWRLSFQIHLDQGMKPNIAEVSLARRIAATTLALWKRKEFFDPTQVKLKTT

SEQ ID NO: 293499 - protein, 315 aa, unidentified
MATVQFTQIISRGCGIDVHKDSITATIRGDGIRTETRQFTTFTSSLIELKQWLHENKITHVAMESTGIYWKPLFNILEETFEIMIVNARHVRNIPGRKTDKRDSRWLSKLLIAGFLRASFIPPKQIRELRDLSRYKTKLIGDRTREKNRILKFLEDSNIKLSSVLSDVFGASDRAILKALTEGQTDPKKLCELGRGSVKLKKEALFLATDNRINEHQIFMLKMILEDLERIQTMIDKVEQEIDKKVKVFEPEIKLLDTIPGVDRDGAIGIISEIGADMNHFPAAKNLASWAGMSPGNNESAGKKKVAKPLMAINI

SEQ ID NO: 293500 - protein, 337 aa, unidentified
MDYFAGLDISMDETHICVLDREGEVVYESKTASTAQAIADELAKAPSCRRIVFETGRMAPILFHGLRELGFPVVCIESRQAYQALKSLATHKTDRNDARGLAHLARTGFFKPVHVKSLSAHAVRSLIIARKKLVGQRVTLENQIRGLAIVFGVRLPRALTAAFIDQALKASEGVAGLSAAMRGLIAARTAVMTAVAAIDADIRRMTRASEACRRLMTIPGVGQLTALAFVAAIDDPSRIRRSRDVGAYLGLVPKRYQSGEIDYVGGISKCGDRRVRTLLYEAANVMLTRYKGQLKLKNWAFGVAKRSSMRKARVALARRLAIIMHAMLRDGTEFVAA

SEQ ID NO: 293501 - protein, 411 aa, unidentified
MEKVYDKCCGIDVHKKLIVACFRKDNKQEVRNFGATTRELLALADWLKEGGCEMVAMESTGSYWKPLYNILESSDLKAMVVNARHMKAVPGRKTDVKDAEWIADLLQHGLLQPSYIPAKDQRELRELVRYRKSLVGERGRELNRLQKMLEGANIKLSGTVSDINGKSARSILEYLITGASIDSEKYDEMYEQKVIAHNLKASKDQIIDDLNGVMTPLQRRMMKELLVHLDELNAHIKNLDDEIDNFMKPEEKQAADAIGDITGIGHTSAQAIISVIGTDMSRFPTDAHIASWAGLCPGNNESAGKRKSGKTRKGNALLRSTLVTCAHAATRNKGSYFYAQFTRISAHRGKKRAYVAVAHSMLVAIYHILKDGVVFKDLGADYYNQFNKERKINAYLKKLKALGWEASVVAA

SEQ ID NO: 293502 - protein, 366 aa, unidentified
MEGQNNQEARYIGIDLGKRTYEMAVVGKGGKAALSNGKTSIQGRQALYKKLRPQDKVALEAGNLAFIMAKEIEAAGAGCRVYVLNPSRLAVIYASMSKTDKEDSLKLAHILEDFREERLPAVAVPGDEEMRRRKLLAGYRREQQSRTRTINRLHGLFMAQGITTMKKKDLATTPRRQEAAKQLEGFEREEAEHLLQCLELYEARIAALDKRIDEEAAEDGQMQRLQTVPGVGPKVSFAFVAHVAAERFENAAQVSNYLGLVPRVYISGDTVRYGKITKRGNGYVRALLVQAAWSLARTKQGGNLKLRYEYMTKEKGMSKKKTIVGIARRLAVLLYTLMRDGTGYEARPFTADRQAGKTAARLALSA

SEQ ID NO: 293503 - protein, 379 aa, unidentified
MDHANTGTPAETILHGALELSKNSWLLALQFPDRAQPSLYPISGGDTVGLMAKLTAARDRWAKMSGKAPSIVLCYEAGYDAFWLARFLKARGIECLVVDAASMQVNRRARRAKTDRIDVGMLLRALIAWGQGDRHVWSVVRVPSVDEEDLRRSHRERDRLVRERTAHINRIKGLLFGQGIRGINVKTKYKTLQIDKLVTGDGGPLPPRLASEITREIARLALIQEQIATLERERDQAPTPCKATEKKRLQLMCLTGIGPAIAAVMTREVYYRQFDNRRQVAGFLGLATSPHDSGDVERSQGISRAGRGQVRGTMIQAAWLWLKHQPKSAITRWFVQRTAGQSGRIRRIMIVAVARKLAIALWRFLEQGLVPQGAMLANR

SEQ ID NO: 293504 - protein, 365 aa, unidentified
MSQATTAPSHLTIGIDLGDRNSHVCLLDTAGEIVEESRIATTPKALRARFEGLAHTRIALEVGTHSAWVSELLKELGHDVIVANARKLRMIFQNDSKNDRLDAEQLARVARMDIKLLYPIEHRDRPVRADLSVMRSRNVLVETRTRLVNHIHGVLKSFGYRVKKYAPSGFHRQVAGQIPEELQPALQPILDTLAALAERTLVLDREIRRLSAKVYPETGWLSQVDRVGPLTALRYVLTIEDPKRIEKSRNVGAYLGLRPKQRQSGQRDPELRITKAGDRELRRLLVQCAHQILGPFGKDSDLRRWGLELASRGGATAKKKAVIAVARKLAVLLHRLWLTGEVYEPLRNANRHAAAQTHEPAAVAV

SEQ ID NO: 293505 - protein, 349 aa, unidentified
MRTAQAVRGKDVYVGIDVHKENWHVTIRSDGEERFNGRIPGKYQSLKSILHRYRECRVTVAYEAGPFGFWLLDRLVQDGIKAMVVPPSLIPVESGNKVKTDKRDSRKLATLLESNMLKHVYVLTPEEREHRDLLRTRRQIVDHRNDVARQIKSKLMFYGISAPFTSATRWGLQYIEWLKSITFETSYLKESFDLLIELYEYLTRQIARINRTIVRLCRDKRYRHKIKLLCTVPGIGKLTAIELLVELQDMSRFTSAEGLASYIGLTPAEYSTGERTRQGRITRCGNKRVRTYLVESTWVLITKDPYLRAKYLRLKSLRGGKRAVIAIARKLLIRLRRMLLDTVPYRMAA

SEQ ID NO: 293506 - protein, 387 aa, unidentified
MKKIYLNVACAGMDVHYKFSNVTFRDPSGKVVRRQRLDHRHREELQERLNRWPTGIPVVMEASFGWGWLSDLLEEAGQEVQLSNCYKVEQMRKARGWVKTNKKDADLISLLPFEQSDWWKVWRAPAEVRNRREQMRFRGDLVGLQTMVKNRIHAIFHRHGIFHEFSDLFGGQGRKFLAELCLHNPTDLSYQALLALRGQVKLLDHLRRQLADVARILHKQLVKTPLIMRLKTIPGIGLILAHVLAAEIGRIERFRNHKALASYSLLAPRSDDTGQDDPRHSPLGRHLGVRGNRTLKWAFIEAAHSAVRSGGRWRAIFDRVTNGGKKDRNRGYIKVARELAKVMYAVWAKGVDYQTVPPVRPGRNKNKKKSRSETGQLCHPMVHALPA

SEQ ID NO: 293507 - protein, 366 aa, unidentified
MASISRSHGLIHLGLDVHKDSISVALLHPGSDAADVERIFHDEASVRRLIARLGDPRRIRACYEAGPTGYELHRLLASIGVRCEVIAPSLIPKAAGERIKTDRRDARRLARLHRAGELTAIRVPTVAEEAVRDLCRARDDAVADRTRARHRLSKFLLRHGVVWRGGTSWTLAHDRWLHGIRFDEPALQATFRHYLAVLEVRDADLRSIDADLVPWFSTEPFADQVARLAAYRGVDQLGALTLASEVCDFRRFASAQMFMGFCGLVPSEYSSGERTRRGRITKAGNAHIRRQLVESAWAYRHHPGLNRRTRQRQEGLPHDTVTRAWGAQLRLCSRFRRLASRKESGAVVATAIARELAGFLWAEMTA

SEQ ID NO: 293508 - protein, 466 aa, unidentified
MSRPAKSSPAKRRSAAQAKSVSVKSSSAELDVVHPNAAGLDLSRDEIWVCVPADRDPEPVRVFGTFTPDLHALVEWLIQCRVDTVAMESTGIYWIPIYELLEAHGIKPYLVNARHVKTVPGRKSDVLDCQWLQKLHRLGLLSASFRPDAEMVTLRAYLRHRAELLERRAPHILLMQKALHQMNLQLTQVLTDVTGQTGLQIIRAIVAGERNPQRLAEFRDGRCKSSQEEIAKALTGTWKAEHVFTLKQHLEAYDFYTQQVATCDEEVERLYAAFKPRWDAPAVMPDLPPIKPNSRCKNQPAGHVRQAVFRIVGVDLTAVDGLNEGAVQIILSEIGTDMSAWPTVKHFASWLGLAPHNDISGGVVLRSRTLKSNNRARQAFRQAAESVSRSDNAYGAFYRRKRAQYGHQVAIVATAHKIARAVYFMLKHQVPYDADTVEEAESKRREREVSRLKRQAAQLGYNLSPA

SEQ ID NO: 293509 - protein, 480 aa, unidentified
MEEAEMKSKKRPQSTRHKRTTTDRRRSGTPLLQRIQPDAAGIDCGAEYHYVAVPPDRDPQPVRAFRTFTTDLNRLADWLVHCGVKTVAMESTGVYWIPVYEILEARGLEVVLVNARHLRNVRGRKSDVSDCEWLRDLHSVGLLSPSFRPADEIVALRSYTRQRESLVQEAATHIQRMHKALTEMNLLLHVVLSDITGATGLKIVRSILDGERDPARLAIHRDYRCHASPQEIIAALTGNYRAEHLFALRQNFAAYQFNLQQIAECDAAIQVLLDTLAGQQPPPPTQLPPPRRTTAPKRHEPRFDIRTPLHRLTGGADLSQLDAIGPHAALQLVAEIGTDMSRWPSAKHFTSWLTLAPNNKISGGRLLSSKTQPSANRAAAILRRCAMSLTRTSTALGAFYRRLAVRAGKATAITATARKLALLVYRVLRGDITYSDPGADAYAQLHRARALKTLRKRAQQLGFALVNLNSGELLPTSTVS

SEQ ID NO: 293510 - protein, 442 aa, unidentified
MPTRKSTPPTVIPLPVQIALDRGDHEMHAAILPPGAARPVQEIFKTGAETLHGFVRRWQQAHPGHLLEIAFEQPAPGLLHALMDLPGVELYPMNPSQTARYREVLHSSRKKDDATDALVILELLKTHRQHFPKWEPESPSIRRLRLLVEGRRKAVNDRTDAVLSLISLLKIYYPQALELCGENMSKPMTLAFLKRWPTLQALKQSSAATIRAFYYGQHVRRGKAIEARLLLVEKAEPLTHDAPMLEACEMRLGLLLDQIRTLNVHVAAYEKQIAALASAQPQHAILQSFPGVGPVIGARLMAALGSQKENLPHAVNLACLSGIAPIIKRSGKSTSTQRRMARPVFLHQTFMEFAESSIKSCLWAQAFFRLKRAQGKGRWASVRALAYKWIRILHQCWTHDIPYDENRYIAQLRLKSSPLLPYLDQLLAAPNTTSILNKPTEA

SEQ ID NO: 293511 - protein, 357 aa, unidentified
MQTQINELNFTGQNIYAGFDVHLKSWSVTIMTEKLTHKTFSQPPKPELLHQYLVKTFPGGTYHSAYEAGFCGYWIHNKLKSLGVNSMVVNPADIPTTDKEKVQKEDARDSRKIARSLRSGELKPIYVPSLKTLEDRSLVRTRYTLVKDLARNKNRIKSFLHFHGIEIPASFSNNTWSKCFIHWLDTIVMPEISGKYSLDAIVTSSKNLRVSVLQVTRHIKELSTAKEYEEQVTLLRSIPGIGLLTAMTLLTELETINRFESFDKLCGFIGLIPSTHSSGDNDVVGNITRRGHSILRSAIIESAWIAARIDPALTKSYHDYCKRMEPNKAIIRIARKLLNRIRYVLKNKKTYVCAVVK

SEQ ID NO: 293512 - protein, 319 aa, unidentified
MFVGIDVAKAELVVSVLPNRERFTVANDERGVRTLVERLRAIGPELIVLEATGGYELLGVAALAAAALPVVVVNPRQVRDFAKATGQLAKTDRIDADILARFAEVVRPAVRVIPDAEAQELEALLARRRQLLEMLQAERNRLGQVFGKGKRLVRKSLKAHIAFLERELRMTDTDLGEMVKNSPAWRERDELLQSVPGVGPVLSRTLLADLPELGRLSRREIAKLVGVALLSRDSGTMRGRRFVQGGRATVRAVLYMAAPVATKRNVVIQEFYQRLVAAGKPKKLALVACMRKLLTILNTMVRTRTRWSAEAACGMLTTA

SEQ ID NO: 293513 - protein, 377 aa, unidentified
MMQASLHSTPIAEHCATISVAIELSWRSWVLVIHSPDRDRLSHHKLAAGDVAGLLTQIARVRARVAAGLGREPAVVSCYEAGYDGFWLHRQLTAAGIGNLVIDPASLAVDRRARRAKTDRIDGEQMIRALLAHLRGEPRALSVVRVPSPAQEDARRQARERERLVKERTGHLNRIKALLRTLGLAAGRPMRADWLAWLARQRDWQEQPLPPGLRDELLREHARLRLLCEQLAALEARAAPEEIRKTATRLQGFKGIGPVIANILAGELFWKDFQNRRELAGYLGLAPSPWRSGRVDHEQGISKAGNRRARQVAVELAWLWLRHQPGSALSRWFHDRVGTQRGRVRRIAIVALARKLLIALWRFLTTGLVPTDAQLTA

SEQ ID NO: 293514 - protein, 361 aa, unidentified
MTGTMTWVGLDVHARSTHAAAIDAMTGELRRERFGPGLEAPVAWMLEQPGPVRACYEAGPTGFGLQRAAAAAGIGIQVIAPGKTPRGPSDRVKTDRKDAELLARLLLAGSLTRVVVPPPEVEAAREMTRVHDACRRDLMNARHRVSKMLLRHGRVYPKPTTWTAEHRRWLSRQQFPEPASQLVFADLIASVDGLTARKQAIALQLSELATDEQWWPTVARLRAFRGIDTLTALSIHLELGGDWRRFERAAALGAWLGLTPTLNQSGESSRQGSITKTGSTLARRLLVESAWHYSREPRLGATLKNRQAGQPAHILAISNRAQHRLYKVHRTMKARGKPHNVVVVACARQLAGFLWAAATAD

SEQ ID NO: 293515 - protein, 344 aa, unidentified
MTTQQLIKTDLEVKPIQFAGIDVGAEELILLIRRNGKPLEPQKFTNTPTDRARLVKKLVKLPGLIVCLEATGVYHFDLAIALHDAGVLLMVINPKASHNFAKVLMKNSKTDVVDANTLAEYAARMDFVAWTRPSNEKLALRSFARRIHALTGQKAAAKNHLHALAATQETPKAVLEDAKLAIAQLEKRIDCLTAEALVLINSSPELKRVLTLLTGIKGIAESSAIALMGELLLLPPGLSHREWVKFAGLDLKAFDSGKSVHKKARLSKAGNRHIRSALYMPALSAKTHDPHVSAYFQHLVDNGKKPLQAVCAVMRKLLHAIHGMLKHNEPFDNARFYAIPAAAG

SEQ ID NO: 293516 - protein, 423 aa, unidentified
MMKLKYSICCGLDVHKNVIVATIVTTNKDGISEYLQKSFSTINSDIQRFHNWLIENNCYHVCMESTGKYWIPIFNYLENDIDVCLTHPKYVKAIKGKKTDKKDSKWIADLYKFDLVRCSFIPPKDFRQLRELSRYRFKLVCMKSSEKNRIQNCMTISNVGIASVLSDPFGKTATEIISYLLEHTADSMDEKAVRKLIKKGAKSKSDEIIEAIKGYTIETDQAKKLELARGHLEYLDDMITQTEVELYVRIKPYYEFVEFVSTMPGMTELSSTIVLAETGVDMDIFDDAKHLCSWCGLSPANNESAGKKKSVRIAKAGDYLKPMMVQCALAAIKSKKQPYFAIKYGRIKKRRGHKKAIIAIARMMMVCIYHMVSEKKPFTPTDYEELMDPQNHVERVVLNENNVFAYLESLGYDSSKLVKRNDN

SEQ ID NO: 293517 - protein, 320 aa, unidentified
MKIVAGIDVSKRTLDVFIDGKPFQVANDATGFTRLRAECKRKRVDLVVMEATGSYHETIAIYLCEAGIDVVVLNPARSHYYAKCVGKRVKTDRVDAQVLARFGQTHEAELERYVPPRLSEREFRALVRMRHDLVRTCAAAKTRLQGPVLQALEAKLLHAQIAFFNEQIEVLDEQIKALIQADEALKRKEALLRSIPGVGAITAWTLLAEVGDFARFPSAKQLAAFAGVCPTFRHSGTSQNGPGRMSRAGNPTIRKLLYLAAMAALRSEGVFKTQYTHLVDQGKAKMTAVVAIMHKILRVAYGVIKTGQPFLNEKALTTYK

SEQ ID NO: 293518 - protein, 351 aa, unidentified
MQITTIGLDIAKNVFQVHGIDGNETVVVRKQLRRGKLIAFFESLAPCLVGIEACATAHHWARELTRLGHQVRLMPAKDVKAYVKRNKNDAADAAAICEAVRRPTMRFVRIKSTDQQCQLMQHRTRDLMMRQRTQLINALRAHLAELGIVAAMGDKGVTELLMIVADEDDGRLPVEARASLALLAAQLNALQMLIGSLEKQIKMQHRANPASQRLETIPGIGIIGATAIAATVADPTVFRSGRDFAAWIGLVPRQESSGGKHKLGSISKRGDRYLRRILVVGAHSVLRRAMEKPGKYPWLTQLMARRPFKVVAVALANKMARMAWALLTYGGTYGAPAFDCSIGCWPMEGCV

SEQ ID NO: 293519 - protein, 407 aa, unidentified
MVASINDRAIRVAPGLRCARSVSSLDLRPTLDVMKGAGPPLLVGAPSGHTRGSHTNQPPRRGRRPLMQQQREYVGIDLHRRRSVIVRMNEAGEKLSTVRIANDPLELAAAIAKAGPEPEVVVEATYGWYWAADVLNMCGAHLHLAHPLGVKGFTYRRVKNDERDAADLADLLRMGRLPEAWAAPPAVRELREIVRHRDKLVRLRSGLKAQVHAVLGKEGVTVTVSDLFGVAGQAALAATPLGRPFARRVASLQRLIGVYDTEIDQLDKEIAAALRDDLGYRAIQAIPGVGPILAAVFVAEIGDVTRFSSAPKLCCWAGLTPRHRESDTTVHRGHISKQGSKLVRWAAIEAAQKAPCRTPIKEEFRRIAERRNCRPIARTAVARKILTLVFYGLRDGEIRCLSEVVEQ

SEQ ID NO: 293520 - protein, 345 aa, unidentified
MKKIAIGIDFAKEKFDVTAKNVMTGASEYGQYPNTPSGGRSMIRMVKKFSVGIDSSEWLFCGEDTGYYSQVISRYLTEKGYFMWLQNPYSIKHSEGGIRRGKDDKADSAAIADYAHRYEDKAHKYEIPSEQAEELHLLITRRDAYVRARQVIQNGANEIPKRSKQGDSINLIKASAKHLIMEINNEIDRLEAQMEELVKEEEDMQTNYEILRSFTGIGIVNAMCFIAYTDNFRKFDLNARKIATYWGVAPFGKDSGKSIHVDPHVSHFCNHKLKAILSNAANSAIVWNPVIVPYYERLGKAGKCDGIRKNNVKNKVIQIITAMIRDKKKFDPDYIFTNKNAQQEC

SEQ ID NO: 293521 - protein, 359 aa, unidentified
MSNEKYIGLDVHQATISVAVMDSQGKVVMESILETKASTLLEFFAGLRGSLFVTFEEGTWAAWLYDLLKPHVSELLVCNPRKIPLHKQGNKSDKIDARKLAERLRLHDLKPVYHGENGVRMLRELARSYLTLVKDLSRVMNRLKALYRSWVIPCAGRDVYYRRHRSEWLDKIPEAGTRRRAEQLYQQLDLPRHLRQQARRELLAESRKHAITAKLRKIPSLGPIRSALAVALIQTPHRFRTKRQLWTYSGLGLETRDSGEYHFVKGQPQRRKKQATIRGLNKDYNHDLKNLFKGVATRASVKPGPFQEFYQRSLAKGIKPTMARLTLARKIAAITLTLWKKGEDFEANDRTGEGRPSSD

SEQ ID NO: 293522 - protein, 480 aa, unidentified
MLLVSASSGLVPRRNGRDLCPVGKPRLRAPVQEPDKVAVARVACTINGAPCMAPSRGKCIMHGERRWFVGIDWASQEHVVSLCDGQGKKIGQRNFAHGGTGLSDMIAWLLKMSGGEPSEIHVAIETPHGPIVEALLERGFNVYSINPKQLDRFRDRFTVAGAKDDSLDAYVLADSLRTDMHLFRKLTIAEPLIVELREWSRIDEELKVERVRLANRLRDQLWRYYPQMLELGDLDEDWMLDLWQAAPTPEKAARASKAAIERVLKKHRIRRFDAAQVLSALRRPALSVAQGTIEAAIAHIKVTIERLRLVNRQLADAELQLDRLCKKLAEPVANDGENVPGQRQEHRDATILDSLPGVGRTVLVTMLAEAPHALQRRDYHALRNLCGSAPVTRRSGKSCLVTRRRACNRRLSNATLYWAQTATQCDPTSKAKYQALRARGHSHARALRSVVDRLLYVACAILEKGTLFDPSFAEKKNAAA

SEQ ID NO: 293523 - protein, 348 aa, unidentified
MTVYIGVDFHARKQMLSYLTTEDGEIQQIELLHEEEDVRAFYAQLRSLGQVVVGFESSGYAAWFEEMLEELGCEIWVGHAAQIRRMARRRQKNDRRDADLILELMLRGDFPRIHRYSRANREVLQQLRYRQRLVKMRTMVINSLRFMAASRGITLRGKLQSQRGQGRVLALALPTPMDQQRDELCRLLMELQLKIETVEEVLQQTAAADVKVKRLRTHPGIGLLTGLGLVHTLASIERFANGRKVTAYAGFDPVEDSTGERRRMGSISKQGSRLLRSLLVEAGQVAARHDNELSQVYRRLLVRRGHATAKVAVARRLLVRAFIMLRDEIDFAEFCRRGVAARSSRRSA

SEQ ID NO: 293524 - protein, 346 aa, unidentified
MHSTTIAVDLAKSVFEVAVSRHPGQVSERHRLSRGQFSRFLRERTPATLVMEACGTAHFWGREAGARGHQVVLLPPHAVRPYVLRNKTDGADAKGLLEALRNEAIRPVPVKSVEQHVLGGLHRLRSAWMATRTARLNTLRGLLRELGIAIPVGARQVVPHVWGLVSDAESEVPEGLRPALAEAAREIAELEARVRGVERQLEGLARGSAVVTRLRTIPGVGLLTATALVAFVGDVARFPSGRHLASYLGLTPRESSSGLQRHLGRISKRGDPYLRMLLIHGARSVLCHAKRAAGERDRLRAWALERQQTRGHNKAAVALANKLARIAWAVWRNERGYAGATQAAID

SEQ ID NO: 293525 - protein, 310 aa, unidentified
MDATYVGIDVSKEKLDVHLRPSAEAFAVARDGKGLHELVERLRGVAPELIVVEATGGFETIVTAALAAAALPVVVVNPAQVRHFAKALGQRAKSDPIDAAVIADFAAAVKPQLRPLPDVAARLLAELVGRRAQLVEMLAAERQREERVANARVRKSLKRLIAALAKELKTIEDDIDGLIRSSPLWREKEDLLKTFPGVGETLARVFLADLPELGQLDRRKIASLVGVAPFTQQSGHWKGKSMIAGGRAAVRSAVFMAAMSAIRCNDVLRAFYQHLLALGKPKMVALIAVARKLLTILNAMLRDQKPWQHA

SEQ ID NO: 293526 - protein, 321 aa, unidentified
MNAEYDGRQIVGIDLHRRRSVIVQLAEQVAGWGESPEVVLEATYGWYWAVDVLQEAGARVHLAHPLGVKGFAYRRVKNDERDAADLADLLRMGRLPEAWIAPPAIRELRELVRHRAKLVALRSGLKAGVHAVLAKCGVHVPMSDLFGVGGRRLLDELALPDAYAGRVASLRRLLDGFGFEIDLYSKMLTARLAGHRGYRAVQAVDGVGPTFAAVFVAEIGDVHRFARAEQLCSWAGVTPLHRESDTKVHRGRITKQGSTLVRWAAVEAVQRVRGGPIGSARARIGEHRGPNIGKVAAARKLLTLVYYGLRDGHIRCLARPA

SEQ ID NO: 293527 - protein, 384 aa, unidentified
MSKLNHTDTPADVEYATVYLAFELSKAKWQLGVILPGSQKLRRFMIAGGDLAALTAHLATWRAKAAASGKPVRVVSCYEAGYDGHWLHRWLTDQGVINYAIDPASIQVNRRARRAKTDRIDLEQLMNTLLRYLRGEPRVCSIVRVPSPEDEDRRRVSRERDRLLKERCGHTNRITGLLHAQGIRDAKPLARGFIASLAGMRTADGRPLPARLKQEIVREHERLCLVHRQILALEAKDRTEMRSPARGSIEERIKRLIDLRGIGVVGGRKLMQEAFYRSFDNRRQVGSFFGLTNSAYDSGNSHRDQGISKAGNRRARTLAIELGWLWLRYQPESELSGWFRARVGDLKGRIRRIAIVALARKLMIALWRYVTTGVVPTGAVCRSI

SEQ ID NO: 293528 - protein, 358 aa, unidentified
MEPQVLKQSLGIDVAKDSLSLCLGTLAQDLEKQFTAGSDVPNEAKGFQQIEKWLNKLCVDKDRLVVVMEATGVYHEGAALYLHQRGYAVSIMQSGRVKRYAQSLDQRSKTDALDSRMLAMLGCERKLPAWSPPDGTLRHLKALSRERAFLLKEKNVEGNRLHAAEASAYGNLREAKRQAKRLKLLEAQLGEVEAEMRELVGSDEALAKKMKCLESIPGVSFISAATVVGETCGFNEITSAKQLASYAGYDVVLKESGNFRGKTKISKKGNSHIRSILHMPSMTAVRVNPTLRVFYQRLKPNKAKPLVALVAVQRKLLLLMYSLYKNNEYYNPDIEQKKQQEPKPLLHRIAEPLLENAS

SEQ ID NO: 293529 - protein, 339 aa, unidentified
MELYAGLDLHSRNTYIGIMDKAFNRVFKKRVPNHLERILQTLDPFRDQIKGFVVESTYNWYWLVDGLMDAGYSSAHLANPAAIKQYEGLKYSDDQHDAFFLAQLLILGILPQGYIYPKKDRPVRDLARKRMFLVQHKTAHILSLQSLIARCCAMKVRANDMRSLTVKELEGWLKEEYLVLSAQANLDSINFLKQKVKQLEKAIIQKVKLNKAFKYLLTVPGIGNILAMTIMLEVGDIKRFPKVGNFTSYCRCVPSRRLSDGKSKGSGNRKNGNRYLSWAFTEAVHLGRRYNERFRRYYNRKVAQANTSLATKALGNKLARICYYIMRDQVPFQEELFGH

SEQ ID NO: 293530 - protein, 377 aa, unidentified
MDQQTGEIISQPVSFSNDKEDFDFLVQKIKSYPKDSILIGMEDTGYYHFALLKYLLDLQYTVALINPKTTDFNRKMQGGITKNDKLDTINICDVLDTPERKKQYRITKVNSFDLYEQKQLTRHHHNLKEEENVYKNRLQKCIDIVFPEFNKLFNSKYGIVYMNILKMFGSAEDIANTDIRTIRKCFEIEGRGNRISLTPERLKECARSSIGISSSAEVIQIKHLTAQIELIEEQLTEIDKKIAEFSIQNNSPILSIPGISHFSGTSILAELGDISNYSKPSQIIKFAGVAPLHYESSQFNAQHTAITKKGSKYLRKTLYQIILPVIRHNPVFNKYYQLKISQGKGHRCAQGHCVRKLLRIIYHLLKTNQQFDPQLLR

SEQ ID NO: 293531 - protein, 360 aa, unidentified
MLYLGIDQHRKQLTVSVRNEAGDVVLRRQVSTEWERVRAFFDELRRLAQPDGGFAAIVEVCGFNDWLLKMLTEYGCRETVLVQVEKRSKKKTDRRDAHQLSGLLWVNRGRLLAGQRVEGVRRVQPPTKREAEDRQLTAVRQRLGRERTRTINRIKHLLRKHNLEQQQPAKGLDTKRTRGWLAGLPLGLIDRLEMDLLLAQWKLWDDQLARLELEIEKRQVKNPTAAVLATIPGCAAFGSLALASRIGSIERFPRPASLANYWGLTPGCRNSGEATDRLGSITKQGSAMARFVLGHMVLHVLRRDGQMRAWYGRIKRRRGSKIARVAVMRRLATIIWHMVKHNEPYMAGGPPRRKLADKAA

SEQ ID NO: 293532 - protein, 317 aa, unidentified
MAQKQTVVGIDIAKEKIDAAIRLGAEASFTNSTKGRRQLLAWLKEHEVDKAVMEASGGYEKSWARLLRGTGVEVAIVDPKRVRHFAKSAGQQAKNDAIDARMIAWFGEAFSDRLGKPDDAEREELGQLVTALQGIGRLKEKIDNWGEHEQPKDVQKAYRALLKEVARQQAKLEALIAAKIEQTERFAQPAEIIRSVPGLAHKAAAGLIAFLAELGRVDRQAAAALLGVAPFDDDSGKRHGQRHIQGGRRKLRCLLFTPILGAATQHNPVLKACYRRLRAKGKLHKVAMVACMRKLIGILNTMLARGEKWDPTKHAIA

SEQ ID NO: 293533 - protein, 406 aa, unidentified
MSVEVALTEKVWAGIDVGKEHHHCVVINSEGQRLLSRRVFNNEPELASLFDEVIELAGGQVLWAIDLNHGAAALLIGLLVAREQPLAYLTGLAIHRASASYRSEGKTDARDAFVIADQARLRRDISLLRPGDEIAVDLRILTTRRVDVVFDRTRQINRLRAQLLEISPALERALTLTNKGPLVLLTAYPTPAAIRRAGVARLDAWLRKQGARNATALAQTAVEAARSQSVVLPGERLAAQMVARLAKGVIALGDEIAELDELIEARFRDHRHAEVIISLPGIGPRLGAEFLAATGGDMTAFTGADQLAGFAGLAPQPRDSGRIHGNLRRPKRYHRGLLRSMYLSAQISITTSPASRTFYQRKRAEGKSHKQAVLALARRRINVLWAMLRDHTTYHDLPPIPITTAA

SEQ ID NO: 293534 - protein, 408 aa, unidentified
MKRYYVGVDWADREHQLYVGDEQGGKIAEMKVQEIPEGMAQLGRWLDESRAAGIELWAAIEKPHGRIVDFLLDHTVVVYPVNPKALDRVRDRYRMSQSKSDPFDARVLSEFLRTDHAHLRPLRPSSEQAQELKLLTRDQHRVVRHNTRLLNQLKITLKEYYPRPLEVFGDLDTQIAQDFLKAYPTPAALSELKRKQWNRFATHDHHLGKARCDELWEKVNKPQLMVPQHVVRAKAQLVEVLLEQLKPSLRAVKTYNERVECFFASMPAAEIAQTLPGGKSGTLVPTIWAELGDAQDRWESFPHLQAEAGVVPVTRSSGKSHVVQFRFACNKHLRHAAYLFAFASLNRSEWANRYYRDQRAAGHSHPQALRALGAKWLKIIFVMWRDHKPYDENYHLANIARQRMRQAA

SEQ ID NO: 293535 - protein, 372 aa, unidentified
MKKNTTGKRKSEQQRKETKAKAKRATTIGIDLGDRSSQYCGVDKEGEVVERGSVATTKKGLAQAFGSRRRCRIAMEVGTHSPWVSRLLRSWGHEVIVANARRVRLITESSQKNDKLDARTMAQLAQAAPQLLSPVRHRSEEAQADLVMIRARAGVVEARTKLVNAARGLVKSMGERLRSCDAACLGPEELAELPAGVRAALEPLLVQVQALSETIRHYDERIEQIAKTRYPETERLRQIQGVGPLIALTYVLTVDDPCRFRKSRDVGAYLGLRPRRRQSGNQDPQLRITKEGDRYLRKLLVQGAHYILGHRGPDTDLKRWGQKLAGRGNKNAKKRALVAVARKLAVLLHKLWVSGEVYEPLRQSVRKQLAAA

SEQ ID NO: 293536 - protein, 313 aa, unidentified
MEEIWIGIDVSKARLDVAIGEAGEIWSADNDDLGIARTVERCSQFHPRLVVVESTGGLESRLVSELYLAKVPVARVNPGRVREFAKAAGLLAKTDKLDARLLARFGQAVKPAPTCLPSEEEQLLSAMVTRRRQLIDMRTAETNRLPTAHVSMQPNIEKLLTWLDEQISALEQKINAFIQSHPDFKAKDDLLRSVPGIGPVTAAILLSDLPELGWLDRKRIAALVGVAPFNNDSGFHKGKRRVKGGRPNVRTVLYMATVSASRFNPVIRSFYEQLLKRGKLKKVALVACMRKLLTILNAILREHAPWCLSTTAS

SEQ ID NO: 293537 - protein, 386 aa, unidentified
MNSVGIDVSKGKSMIAVMRPFGEVVVSSFEIHHTDSELCELTKLLSGLSGETRVVMESTGNYHLPVAWLLNDSGFYVSVVNAMLVHDYGNNSLRRAKTDKKDAIKLANYGLDHWLTLPRYVPEEDTRLMLKNCYRQYQQYSKVRTMLKNNLISLLDTAFPGANRLFSSPPRADGSEKWVDFVAAFWHCECVCGLSEKAFISKYQKWCKKCSYNFSEDKALDIYASACGHFSVMPKTDTAKLLVEQAVSQLRATSAALAALKLEMQSLASSLPEYPMVMRMFGVDPALGPQLMAEIGDVRRFHSKKALVAFAGIDALPYQSGQMDIYSRSISKRGSASLRRTLFLLMGVYLQNAPVNEPVYQFMDKKRSEGKPYKVYMMASAFTMPL

SEQ ID NO: 293538 - protein, 355 aa, unidentified
MDDTKYIGMDVHKETISIAVLNSSGKLVMQSVIETKAITIVENVRGLRGDLHVTLEEGTWAAWLYDLLRPHVNEVLVCDPRKNALLKAGNKSDQIDARKLAELLYLNKLTPVYHGEHGVRALKELSRSYLTISGDVVRVMTRLKAVYRSWAIACAGKQVYAPRYRAQWLGKIREAGVRRRAEFYYQQLDELRSLRQQVRRELLAESAKHQASKLLCQIPSIGPIRAAQLIAILQPPHRFRTKRQLWAYGGLAIETHSSADHRYVDGQLRPSKKQVSLRGLNRNHNHELKNIFKGAAIIAATKAGPFQEFYAALVAKGIRPEMARLTLARKIAAITLIVCKKGVRFDAQHLNPQTA

SEQ ID NO: 293539 - protein, 346 aa, unidentified
MELQTVGIDLGKTVFHLVGLDLHGRVMVRKRFSRSQLLHFTSNLRVQLIGMEACGGAHFLGRVLQQQGRQVRLMPAQYVKPSVKTNKNDYIDAEVVAEAVARPTMRFVPIKTDDQLDMQSLHRVRERWVMRRTAVVNQIRGLLLECGITLRKGRRYVDAALPVILEDATSKLSGALRVLIAQLKLELDQLASRIDEADSAMERTARENEACRRLTAIPGIGPVSATAFIAAIGNGAAFSKGREFSAWVGMVPRQDSTGGKQRLPGIGKRGNSYLRRLFVQGARAVMTHRTKQTSDLSLWLEKLVVHKHHNVAIVALANKLARMAWAVLARDEPYRPPVLSCSVNIR

SEQ ID NO: 293540 - protein, 327 aa, unidentified
MEEVVGLDMHLKKTQGTIMSMNGDIVRQERFDTDKEHVMKFLKKLPKGTRVTLESVGFCWPWIDFIEGLGYRPLLANPVKVKSRAEDIKTDKVDSELLANLTRMDWLPTCYVPSKELRWLRSMLRHRAFRRRMTTAIKNRTYSEFRKRGIDVEDLGTHTGREGMMSSNIYEVNQNIEILNAVENQIKLIETRLKRQYQDVKPIRLLQKIKGIGFLTAITLYAEICDIERFSNPEKLAKYAGLVPRVRQSGEVTRMGREMKGNKWLKWILIEAAWSHIKFCRGGRLSKVYENAYQRKKDKKKAIKIVARKLVNIIWAVWKYEREFHAY

SEQ ID NO: 293541 - protein, 391 aa, unidentified
MKNRYESVAYGGMDVHRKFSNVTLRDARGEVVARERLDHLDRQKLREHLARWPKGTLLVMEASFGWPWLSDEVEAAGHEPRLSNCYKVEHMRKARALPKTNKRDADLVSMLPQESKPWWVVWRAPPEVRDLREWMRHRVGLVGMQTEVKNRVHALFHRHGIFYEEATDLFGGEGRRFLFALCQRGRHENGTLPDGALEALRSDVRMLTMLRAELATIAWRLRGRLKRDPLVRRLMTIPGIGLILAHVLASEIGDIGRLKNHRKLAAYACLAPQCDDTGEPDPTRDPLGRHLGDRGNRTLKWAFVLAAHGAVKKGGKWRALYDRHTAGGKKNRGRGFIKVARRLVKVVFAVWSQGTQYTQTPPSRPGSRPARRRRKDSRPGTGQLDVAMVQA

SEQ ID NO: 293542 - protein, 354 aa, unidentified
MTDLSMADPDRLVTLGVDTHLDVHVAAALDERGRLLDTISLPTTAAGYRALLDWAAGLGTIERVGVEGTGSYGAGLTRWLTARGIVVLEVDRPDRRTRRSRGKSDPLDAEAAARAVQAGRASGLPKAGGGAVEAIRALRIARDSAMEARSRIANQLHALRVTAPDRLRDELRGHALDALVRRAARLRVPGVVDEPSAATRLAMRSLARRHAALSAEIATLDVHLRRLVTRTAPQLVARPGIGVHSAGQLLVTAGGNPARLRSDAAFGMLTGTSPVPASSGKTVRHRLNRGGDRQANRALHMVVLTRMAHDSRTRAYVARRTTEGKTTSEIMRCLKRYVAREVYGLLLQSPGLTT

SEQ ID NO: 293543 - protein, 346 aa, unidentified
MRNTTVGIDLAKNVFHLCAANERGRVLWRKRTTRRGLEAVLAKLPASTVAMESCGGSHYWARRCRKHGRVARLISGKFVKPFVKSNKNDIIDAEAIVEAAQRPTMRFVPVKTTEQQDIQGLHRVRERLVKNRTALVNQCRGLLLENGVAIGQGRHRLQRQLPEIVENQCGELSGLFLGLVRELYEELCGCNERIKALERRLQEISARIEPCARLLSIPGVGPLTASAMFAAVGTGADFKNGRHMAAWLGLVPRQFTTGGKPKLLGISKRGDVYLRKLLIHGARSVLISGNDLGSPQRWARTVASRSCTNKAAVALANKNARIAWKLLRTGESFRSPGHGPHGQAQR

SEQ ID NO: 293544 - protein, 378 aa, unidentified
MGRPVRSRPVATPLLHPGTCVPPLDRVREKGMAVTIVEAAPVVGGVDTHLDVHVAAALDCFGGLLGVEPFPATPAGYRALLGWMGEFGPVVRVGVEGTGAYGAGLARFLRRSGVEVIEVDRANRQARRQHGKSDPADAIEAARAAHNGRARGLAKTRDGNVEAIRALVVAKRSARNTRIKTINQIRQLTFTAPDELRERMRGLATVPLTLEAAGLRPRAGGDPVMYATKLALQTLGRRVLSLGAEASRLDEVLGELVAETAPSLLALFGVGVDTAATLLVAAGDNAERLRSEAAWAHLCGVAPVPASSGKVVRHRLNRGGNRQANTALWRIVMVRMLHDPATQAYVERRTKEGRSKLEIIRVLKRYVAREVYRHLPRG

SEQ ID NO: 293545 - protein, 349 aa, unidentified
MLIIGCDFHSRFQQIAMVDTETGELIERRLEHGNGEAKKFYAELQQPVRVGMEATGYAQWFERMMAKLGHELWVGDAAEIRAAMVRKQKTDSRDALHILDLLLTNRFPRIWIPSPEEHDLRQLLRHRHKLVCLRTSLRNQLQALAMGQGVCRKKKLWASSGRAELEALGLDPWARRRRQELLEILDRLDPSLAELDRAVTQEAEHRPAARYLMQQPGVGPVTALMFVLTIGPIERFQRSKQVVSYLGLNPRESSSGGRQRLGAISKQGNSLARYLLVEAGQTAARYDEGLRRDYQRLKFRRGSAVAKVAIARKLAVRLYWKLREYSSPAPSTRTQGSPETPVVGANLSS

SEQ ID NO: 293546 - protein, 367 aa, unidentified
MIINSIAKDFENIIAIDTAKTSFQVYVVNQKTNRRRNDKVTRKKFVEHITKLGTGLIFMESCSASQYWAREFEKLGFTVKLIAAQHVKAFLYNKKIKNDAKDAEAIFKCGMQPDTKFVRVKSVEEQTVALLHTLRKGEIKHRVQLCNRIRGVLAEFGIITDKGRNNFDKNMSELRAQCENEISNLHLKSAIDALFDEYKESLEREDKYTQQILQNRQDELNKLAMSCPGVGEITASAIVAEVGNAKQFKNGREMSAWLGLVPSQHSTGGRSTLGGITKTGNKYIRGLLDQCANSIYRNAKTHLDKGTDNQLDRFALRLKSKGKPAGKIAMALANKIVRILWAVLSSGNEFKSNINFQDKDRDVLCLE

SEQ ID NO: 293547 - protein, 464 aa, unidentified
MQQPVEVQVDEHEQIVERVAAIDVAKASGMVCLRVPHESIPGRRVTKVWPVRASTAALVELGDHLRCERVQRVVMESTSDYWRPFYYLLEAAGLTVWLVNAAQAKNVPGRPKSDKIDAVWLAKLAERSMVAPSLVPAEPMRRVRDLARARFDLVADRARVKQRIEKLLEDALIKISSVLTDALGVSGRAMIEALIAGQRSPTALAELAKGRARARRADLAQALHGRFTDHHAQLARMLLGQLDELTARITQVTDLLDAAIRALPTPTTTTPTTTATTTTATHPSSRADGDQSVPTPEQAGYHSAVKRLCAVPGAGPDSVRAVLGEIGLDMSVFGTAQRICSWAKVAPRTVQSGRKTGRARTGKGNPYLKAALAQIATGAAKTDTFLGARYRRLIKRMPKAKALVALQRSILVIFFHLLADPSTDFDDLGSDFYQRRIDRARRATHLLRQLHALGYQVQLTDTAA

SEQ ID NO: 293548 - protein, 404 aa, unidentified
MNGLPDRTYAVYLGLDVGKEHHHACALDPAGKRLHDKTLPQDEQRIRDLLTDLSVHGDVLVVVDQPASIGALPVAVARSMNIQVAYLPGLAMRRIADLHPGNAKTDARDAYVIADAARTLPHALRRVDVGDDALADLEVIVGFDDDLAAETTRVTNRVHGLLTQIHPALERAIGGSLHHPAVLELLSRFGGPSGLRTAGRRRLLAVAKPRAPRKYQAFVDAIMTALDEQTVTVPGTRAADLVLPKLADQLAGLLAQRAEAATQVEEMLDAHPLAQVLTSMPGVGVRTGARILLEVGDASSFATPGHLAAYAGLAPVTRRSGTSIRGEHPSRSGNKNLKRAFFLAAFAALKDPASRAYYDRKRAEGKRHNAALICLARRRCDVLYAMLRDGTTYQPGRPVTPIAA

SEQ ID NO: 293549 - protein, 400 aa, unidentified
MNPVIGLDVSKGESEVQAFLAKGIPFGKSFKIYHTSEGLNTFLQFLNNFEEKTLVKPTVILESTGHYQAPIIQFLEKYNYLYIVINPILSHQAKKSSLRKVKTDAIDAYNLCELFYKEELEPYKKRGITLLNLRHLTRQHEAITGLYIQAKLQFHTMLDQVFPEYRRVFGDLFSKVSLNLLNNFPTSEKVLEICEQDLAEKIHSLCKTRSYQWAIKKAAKLKEAAKNNPFEKIIYQSHLISLSMFIHMLLQYQEHLSILEEQIDTLAKDIEEYKIIQSIPGIGEKIAATIIFEIGEIDRFNHPKKLVAYAGIDPSVHQSGKFTATINRITKRGSSRLRHVLYMAVLCGIRSSRNKRLKEFYDKKREEGKPSKVAIIACVNKLLHWIYTLMKRKENFLDLS

SEQ ID NO: 293550 - protein, 307 aa, unidentified
MEVIYPRCAALDVHKKTVVAGVRIAEESKVTTDTGIFATTTKGLLELLDWLSQYSVTHVVMEATGVYWKPVWQVLSGDDDLTLVLANAAHVKNVPGRKSDMNDTAWLRELFAHGLIRPSFVPDIATQQLRTLMRSRKQLVRDQTRHVQRIHKTLEEANIKVASLLSDMLGKSGRAMLEAMIANETDPARLAALAHKGVKATQEQLREALTGRVTEHHRFLLALHLEVIDHLDGSIARIDERVEATLSPFRDAVELVATAPGIRDLTAEGIIAEIGIDMSRYPNEGHLLSWAGFCPRQDESAGKRRST

SEQ ID NO: 293551 - protein, 359 aa, unidentified
MTSIPLISPVVIGGVDTHKDLHVAAVVDADDRVLGTASFPTTRAGYRTLLAWMRGFGHLERVGVEGTGSYGAGLHRYLTGQGIEVWEVARPDRSDRRRRGKNDVIDAQNAAHAARAGRRVVTAKTRDGMVEALRMLRATRTAAVAAHREALQVLDAQIIAAPAELRDQVRGLTRMQLVRALASWRPEPSAPARLENAARMALGSLARRIMHLDDELAELDELIAPLVREIAPSLLQAPGFGIHTTAQLLVTMGDNPERIASEPRFAKLCGVAPLDASSGKHERHRLNRGGDRAANSALYIVTLTRMRHDERTRDYVQRRTSEGKTKSEIIRCLKRYAAREAYYLIKHDHDHPDRIGTPA

SEQ ID NO: 293552 - protein, 344 aa, unidentified
MSQIVMVHVGIDYHDEALQVCVLDDEGAELFNRSLPNDPRAVRDVIIDQGWPRSIIIEACCGAADFAAELVRQTEWDVQLAHPGYVNRLKQGPDKTDHGDAWLLADLGRVNYVPRVWLADQFTRQLRRLVRYREGVKAERKNVKLRIRSLLREERLLSPPANPWTKAWKAWLASVELGEQSRWVLDRELEQLARLEADVQAVEKRMAMATEEDELTQKLLAQPGIGLVTAVTMRAAIGRFNRFGSGKQLARFCGVTPCNASSGKRQADAGLVKAGSRELRAVVIQAAQRLPRHVEKWKVLKQRLTKSKPANVATAAVANRWLRWLYHQMVTLPQFAEVPETAAA

SEQ ID NO: 293553 - protein, 362 aa, unidentified
MNPFAFSNDLSGFQKLLDCLKDFSLDELLIGMESTAHYAENLTFFLFTRGFKLCIINPIQTASLRKSSIRKTKTDSIDTFLIIKALSLNHFRLFTQHDFDSMQLKSLCRFRQKLMKVRTKVKIQLVSYVDLLFSELQFFFKSGIHIKACYALLKEEPNPDKIASMHLTRLSNLLKKTSKGHFGKQHAIALKELAAQSVGIKNDTLSLQILQSINQIELFSSQLDEVEKLINQIMDNMDSVIKTIPGIGNLNGAMIIGEIGDITRFEKPCQLLAYAGLDPSVFQSGKFTASRTRMSKRGSKILRYALINAAWQTTLVNQTFRDYYNLKISQGRGHYSALGHVAHKLVRVIHKMMTDNVEFNLD

SEQ ID NO: 293554 - protein, 323 aa, unidentified
MEEGRIPTTVAALQKHFGGEPRMRIALETGTHSPWISRLLTSYGHEVIVANPRKIPTLTGSESKNDRNDAEQLARMAAFDPKLLHPIEHRSLERQQDLNLIHTRSVLVRARTMLVNSARGLVKSAGGRLPSCSSEAFPEKVSVAVPRELKAACEPLLKQIAQMNRTLAGIDQRVEGLAKKYPEIALLRTAPGIGPIVAACYVLTLGNPETMETNRQAGAYLGLRPRQQQSGGCDPQCGITKTGNSYLRSLLVQSAQYILGRFGPDSELRCWGLKLAACGGKRGKKRAIVAVARKLAVLLLSMWRNGKKFQPFPQSATQLAKAV

SEQ ID NO: 293555 - protein, 331 aa, unidentified
MFPVGIDVSKNTLDLCMLYDGIKGRIKTRNIQNNRHSVENILRWLRLQHCSPEDVHVVMEATGVYHERLATELHDAGFRVSLANPHRSREFARGMGIMTKTDKVDAYMLACYAFLKKPHRWEPPAPEIRYLGALLRRRDVLLGDALREENRLEKYLSTDTPADIISSCRRMAQLLREEVSNIERQIKAHIKASPALRRDYTLLTSIKSVGPQLGMHMLVVLRSHNFVSAEEAAAFLGVVPIEKRSGTSVRRRPRMSKIGPPQLRAKLYMSALCGKIYNKRMRNIYDEMCLRGKPKMVAIGALMRKLVHWCYGVLKTRTVFNDEDLKPVLST

SEQ ID NO: 293556 - protein, 338 aa, unidentified
MKLYGGIDLHSNNSVIVLSDGEDKVVYRRRLPNELASVLAELEPYRDVIEGLVVESTYNWYWLVDGLMEAGYRLHLANTAAIIQYSGLKYADDESDARWLAKLLRLGLLPEGYIYPKKERPVRDLLRKRGQLVHQRTSNLQAVQNLMARNRGHSLNANRIKRLADEEVDRLLPNADLALAVKSNLAVMRTLDVVIDGLEKTIKARVKLRPAFKPLLTVNGIGDILGLTIMLETGEIGRFAKVGNYASYCRCVGSKHLTNGKTKGRGNTKNGNKYLAWAYIEAANFAVRYNPRIRRYYQRKAARTNGIVAIKTVAHKLARACYYILRDQVSFNVNKAFP

SEQ ID NO: 293557 - protein, 354 aa, unidentified
MKLYVGLDVGLEETSLCIVDGEGLTVREVKVMTEPAAIRSAVEGYADRLERVGVEASSLGIWLYRELQPAGLPIIVVEARHMRVSLSTMRNKTDRNDARGIAQMMRLGWYRAVHVKNIDMQKMRTLLTSRKLLKRKLIDLENHIRGALRAYGLLVGAVARGAFEARVRELIEHSDPIFVMTIEAMLDVRRAILEGYDRLHRVLLQVVQHDAVCRRLMTVPGVGPVAALSFKVGVDDPLRFARSRTVGAHFGLTPKRHQSGTSIDFEGRISKQGDVAVREALCEAAASLLLRVRKWSALRAWGLRIAKRSSMLCAITAVARKLASILHRMWVSETDFHVGFGAKVTQRLRLKPAQ

SEQ ID NO: 293558 - protein, 339 aa, unidentified
MRRYLGVDLHRNCFTVCTLGEDGKSELRKWSIHSLSEFAQTVQATDAVAVEATGNARHFCQALKERGCRLVVVNPHQFQVISRSVKKTDAHDAKTLAEFLSKDLLPEVRMKETLPAEIASVLQTRDKLVKLRTTLKNKINNLLAARAILIRKESLTSDKGLEQVLQAQVSDLEKVELEVLVGQIRHLNDSIRRLEAAIKEQGPKLPGYENLKSIKGIGDIGGSILLSTIGDIHDFADEGKLAAYFGIVPRVQNSNETERSGRITKRGNKLGRTALVQCALIAMRYSPYLANYYARIKAARGTGKAIIALARKFLGIIYKTLKNGWVFKDFPGFVIASSG

SEQ ID NO: 293559 - protein, 320 aa, unidentified
MAKKKSKFFIGIDVSKQHLEVAVHESDCQFRCANKVNAFGKLIVELIDWRPALVVLEATGGLEIPVVNALHAAGLPVVVVNPRQVRDFAKALGQLAKTDRLDARVLAHFAAAIKPPLRPLKSKEEQELAALTGRRDQLIEMLIDEKNRRAAAASDTVRDQIKAHIDWLEECIAELDEQLKALLQSSAPWQAKDDILQSVPGIGPVVSFSIIADLPELGTLNRQQISKLVGVAPLNRDSGQQRGTRHIYGGRAELRRVLYMAALSASRHNLVIKEFYERLCAKQKPFKVAITACMRKLLSIINVMVRDNSCWKSPQQTVSA

SEQ ID NO: 293560 - protein, 477 aa, unidentified
MKHKGAKSKTKSEGSKPIHESNPDAGGIDLSPTEIWVAVPPERAQNSVRKFEAFTKDLIELVQWLVQCGVGMVAMEATGVYWIPLYQLLEDAKIKVYLVNARHVKNVPGRKSDVRDCQWLQYLLSVGLLRGSFRPAQAVCAARSIWRYRQELISTTGQYVQHMQAALDQMNVKLHYIIDDLTGLTGQAIIGAILKGQRDPVQLAKLRDKRIQAPESLIAKALEGDWRKEHLFVLQRAWESYQQIQGQIQQCDQELVAYARELEAATQVIQPAKTMCLRAELMGTEPHSKVSVPKPPKVRKKTSKNQPQGPWKEELERFFGVDLTAIPGISVLTGLTLMTELGNDLGAFKTEHHFASWLCLCPDNETSAGKVLRRRTRRSQNRVRYALRMAASSLHHDKSYLGDKYRRLRTKLGAPKAIVAMAHQMARIIWTLITRQVPFDLSVFAFEQQLNERRRLKRLQNSARQMGYQLSPIAAGK

SEQ ID NO: 293561 - protein, 336 aa, unidentified
MRELLFVYIGVDVSKETLCVDAGDAFRGVVPNTPDGIRKMLAVVKRKLGRGRAPHVCLEATGPYGEALLAVCRGRGFPRSVLNPAKVRHYAKAMSESAKTDPIDARVIREFAEAKHPAADRVPGSAETLLRQLMTAREALTKSAVQLEGVLDSMTCTSARKAVTQAVGCVKRRIKALEDGMAAALKADRRLEGLAAELAGIDGVGALSAAKIVALVPELGSLGRRDAASIAGLAPFRRDSGKFSGKAFISGGRASVRRALYMPALVAIKHNPTLKAFYQRLVGEGKPFKVAITAVMRKLFIHMDGIAHKWLAAHGGTGVGNAPQPFPLLPSFPRTP

SEQ ID NO: 293562 - protein, 343 aa, unidentified
MLYAGLDLSRKRLDFCLLDGAGFAVAEGAAPPDRDGLRTLATRVGQHRQPVFAAVESMNGARFVHDELERHGWRVEVADAVRVRGLAPLACKTDRIDARVLAELCRLDLVPAIWLPDQAARGARERARFRLHLVKHRSSLKNRIHQTLLSFGQPCPLSDLFGVRGRRQLELLEPWAGTVDASLRLIDELDREIATLERQLRQLGADHPYVRLLVTVPGIAWVLGYTIAAEIGDINRFSAPAKLSGYTGLCPRVYQSGEHDRRGALTKHGPRYLRWALLEASIHACRHPLYAERYQRTKHRLGRQRGPRVAQVDLARRLAEAIWHMLTRNQPFAPAGAAKVLAA

SEQ ID NO: 293563 - protein, 380 aa, unidentified
MDVHSKNYTLCAMEPTIGAEDRIFGEVQVAPDYKEVICFIESLKMKLGFCDDYSIECGYEAGCLGYTLYHQLTGAGVKCVILAPTTMLTQQGKRIKTDKRDARLIAQCLCYGGYHPVYIPTGEDDAVKEYLRMRDDHKLALKKLKQQINAFVLRHGQQYSGTKWTIKHVTWLKKLELDPMYRETLDEYLASCEEQEAKIERYDKRIEEIASEARYQENAKKLGCFLGIRTHTALSLIVETGDFKRFAKGNTYAAFLGLAPGEHSSSDNVNRLGISKAGNTHLRCLLIEAAKGICKGAIGHKSKELRARQSGQPAEVIAYADKANTRLRSRYYKMIRHGKKKNVAVAAVARELACFIWGMMTGNISIRPKGDTSGPAVSQG

SEQ ID NO: 293564 - protein, 342 aa, unidentified
MAIVAGFDVHRAQITFDALDTDTGEVKRGRIDATPAAVVRWTERFDGEVIDVAVEACTGWLFVCDALVAAGAVPHLAEPVETRALRGRKRRAKTDREDARWLRELLAEGRLPEAWIPPEHVRQWRSRARLRHTLIDERTQWMQRIQATLFHHGISGTPEKLRTRAGRAFLEALDVPADARERIEIALAMIDAIEAQIAPLERELRQLARRQTGCRALMGLYGMGELTSLVTLCELGDVGRLSASRKAVRMAGIDIGVHRSDRRARVGKLTRQGSPQLRWALYEAALSACRPSSPDHADYLALKARGLSHTRASLTIARKLARRSFHVLRELGPDALEPVAAA

SEQ ID NO: 293565 - protein, 347 aa, unidentified
MTIVEDTRVITGGVDTHAGMHVAAALDSIGGLLGVREFPATAAGYAGLLGWLRSLGNLALAGVEGTGSYGAGLARYLAAAGVRVVEVDRPDRQDRHRQGKSDPLDAVSAARAAQSGRASGAPRGRDGAVEAIRALMVAKRSARQERTQAVNQARALIVTGPEELRARFAQRSPAQLIEAIAALRPRPGDVPGYATRVALRELGRRAQFLDAQLDRLDELIGPLVTARAPGLLALHGVGPDTAALLLVAVGDHPERLRSESSWAYLCGVAPIPASSGKTAGRYRLNRGGDRQANSALWRVVMVRLRSHEATRAYADRRGKEGLSNKEIIRCLKRYVAREVYRQLRAES

SEQ ID NO: 293566 - protein, 344 aa, unidentified
MVSFKCRPTLKGLVSQLEKMQKYFEAESLKLCYEASYIGHCLQRDLMQSGYYCDVISPGSIPRKGSKAIKTDRIDALDLAQFYANDLLTIVQIPDAETEQDRDLLRSRQQLMKQQVDLRRHVQSLLRRNGLHYKAETQNKTHWTKHHYCWLERTKEGSSGSLGVNLRLLLRQLESISEIVAAYGEEIESMAKQPNYKEAVSALTCYKGIKNLFALTMITEIGDVKRFSHPRQLGAWVGMDIREYSSGGKHNRFGITKQGNRYLRTAFIEANQRAYRTTKLSREIKTRRANANPEYIAIADRCLRRLSKKGNRLLEAGKHPNKVKVACAREMIGFVWESLNKVAA

SEQ ID NO: 293567 - protein, 349 aa, unidentified
MDNHTQYSGFAGVDLAKKVMQIHFVTGDGEITDKQVKRAEFLDFFRNRTKCLIGMEACGASQDWARKLEAMGHEVHLMSPKAVKPFVSGQKNDYNDAIGIYKAMFNGVRRVPVKSTEIRDLQTLRRIRSQVTKDKVKEINHVRGLLAEYGIVMGKSITAFNKGISSALESLKERGDVSPLVAEELQTTVESIKTKIERQKRLDREIEQLARGCKNYENFLKTPGVGPFTAAMLCVLLCDPSIFANGRQFAAYIGLAPRSRGSGGKNYVTGIPSKFNCDSESRAVFVECAQALARYKNKSPWVDAILRRKPKKVAVIAIANKLARQVWAMANKGESFKEPLHKRWVICYN

SEQ ID NO: 293568 - protein, 392 aa, unidentified
MMVSVGIDVSKDKHDCFIVNSEGEILADVFTIPNNMDGFHYLLQRIQDCANTQNKIKVGLEATGHYSYNLLGFLLDNGLATYVLNPLRTNLYRKSLSLRKTKTDRVDARTIASMLLSDVGLKPYTDTAYHNEELKSLTRYRFDKVKERAKLKSSIARLVCILFPELEKLVPSLHIASVYALLEEFPGAKQIAAAHLTRLKTLLETASKGHYKRDMALEIRDAARNSIGSWMPAKSLELQHTIRLIRELDDEIAEIEKQIQAIMDELNSPITTIPGIGFRMAAMIFAEVGDFTRFDSPDKLLAYAGMSPSTYQSGQLKNCYPHMEKRGSRYLRYALYNATKYVCHWDPTFAAYLAKKRAEGKHYNVALSHATKKLVRLIFAMEKSRQPYRLVA

SEQ ID NO: 293569 - protein, 345 aa, unidentified
MKPTSQMTLDVYFRQCVGIDISKDKFTACLYMYDRASDVGCCTKSIDFDNTKSGFNQMVRWSRKEAVKSHPLTYLMEPTGVYYEHLAYHLHKIGQIVYVVLPNKARKFCESEGIKTKTDAMDARCLALMGCVSRKPKPWSPPAAIYRELRQMTRFHADLCAIRRSVANRMEALDHMEGVSKTVRKNCEKLIGEIDTLTEKNGKAIMKKVAEDKELQIKVKRIATAKGLREPTIICVIAETEGFHYIENRKQLVGYAGLDVKARQSGNEDPRHSISKKGNAHIRAALYMPALTAIRFNRQIKTAYGRICQKHPKEKMIGVTAAMRRLLLLIYTLWKNGEEYDETRL

SEQ ID NO: 293570 - protein, 365 aa, unidentified
MTEITRAPVARVGVDLSKRVYQVHAVDRAGRVMLVKAMPPQRFFEWCAQLPAGCVVAMETCGGSHHVARRLQGLGLDVRLIAGHFVTPYRMAGKSGKNDANDAAAICEAASRPHMRFVPIKTAQQQGQLALHRLREGYKEERTALINRVRGLLAEFGLVFPKSPEALRRVLADVVEDAANELPGLARLAIQRTHEHWIDIELQIAWCDDRIAEHVRADERAKKAAALLGVGPVTASAIAASVGDFKQFVNARQFGAWLGLVPSQNSTGGKASLGRITKRGDDYLRTLLIQGAKSAVMTAHKRSDRISQWLVQLKERTSWQKAVVALANKNARILWAVLTRDAAFDPDHVPPVPAARISPKLQPAG

SEQ ID NO: 293571 - protein, 442 aa, unidentified
MNSLPVLNPKAAAIDVGSEHMHVSVAGGPPRVFGSTTTELHALRDYLLEQGVNTVAMEATGIYWLCPYEVLEKAGLNPIMVNGKYVRNLPGRKTDMSDCQWQATLHAHGLLRAGFVPPDHIRRLQDYLRLRADHISSGATSEQHMQKALERMNIKLHDVISDLTGVSGLKMVRAILEGERDPEKLLALCDPTIQKKKAKRVCEALRGTWKDEHLFALRQALAAWEFYRAQIAECDQALEEVLKKMTEHKADPPGEVPKSDRKKKSNTPQIDGLLEMLWKICDGKNATKLPGISEYTLLRLISEVGTDLKAHWEDEKRFTSWLGLAPGTHQSGKRRRSQKRSTNKAGRILCVIAQAVGKTNDRALGGFYRRIRSRSGGLVATKALARKLGEMFWRVMVHGISYVEQGLVKYEQKVLQTEQMTLARRAKKLGLELIAIQKPMKT

SEQ ID NO: 293572 - protein, 368 aa, unidentified
MRNNSKKASIAVTGKRTVGLDLGDRHSYYYTLDAAGENVESGRVKTSQEGLEKRFGGQEAARVVIEAGTHSPWVSRLLAGLGHEVIVANPRKVRLISDNEGKDDPVDAELLARLGRVDVTLLSPIQHRGAEAQADLAVIRARDALVGARTQLVNHVRGAVKSLGSRLEKCSTRSFGDKMGDQVPEALQEALEPVLEVIAEMTQQIGGYDQQIRGRCQEKYPETALLTAVPGVGALTALGYVLTLEDPHRFASSRAVGSFLGLRPGKDKSGQQDPELRITKAGSPLLRRLLVGSAQYILGPFGPDTDLRRWGLKLAGRGRKNAKKRAVVAVARKLGVLLHRLWVNGEVYQPLYQAERAVAVTAGASARS

SEQ ID NO: 293573 - protein, 445 aa, unidentified
MAHANRLSRGDLRRNARLERLRRVVSHDRAVLAVDLADDTQVVVVCDHDSRVLARRTWRCRPWQLDGALRWGLAVACRQGFAGVVVACEPTGHRWRVVVEHADRLGLEAVCVQPLLVRRAREAEDFTHDKSDDKDALLIARLTTQLHCYLPERPTAAWARLRHLGNRRVEQLTLATAAQQRLRDLLECGWPAALEVARHPLDSLTWRAAMTVGRCDPARIRRLGFARFARAVARELPRWGGRRRNLGVLRALYAATGDDRGVEAQRAGALERAALVLADFKQAPAALAEVEGRMAKALAELGLAELVTTIRGVSVVGAAAILAETGDPARFDDAKAVVTHAGLCPRDNASGAFAGKTTISGRGRPLLRLAAWRAVWGALPHNPVFAARYAHLTSRQHNRLNDGQARTAVAAVDLTPGGGHRGYAAMVDGSGLMVAWRCSHSMGGR

SEQ ID NO: 293574 - protein, 404 aa, unidentified
MWYAGIDWADDHHDIVVIDEQGQRVASCRVPHTPEGLAQLVTFLQGTVAAPTPQELACLIETTHGLLITALLDAGLAVYPVNPKTVDRRRKPSGAKTDAIDAYLLAKTGRSDLADLQRLTPDSPLVHELKALTRDQDGLIQSQTRLVNQLTACLKAYYPVALDLFTKLQQPLTLAFLQAYPTLEATRCASVDQLTQLLRQHHHPTPLPTAEALREQLHRPQLQADDITSRTKARLMLALVSQLAPLLAQIKQYDAEITRLFLSHPDSPIFASLPRAGKRLAPRLLAGWGDDRERYASAASVQALAGTSPVAYQSGKYVKAHRRYACIKPFRNVLFQFAWQSTFRESWAQAYYHRKRQEGKSHSMAVRALANGWVRIIQAMWLNHRPYVVETFLTAQHAHAGQAA

SEQ ID NO: 293575 - protein, 371 aa, unidentified
MAANSGASLRRKGPSAGTLGASQPKPSRRRRTPVQQQPQYVGIDLHRRRSVIVRMNDAGEVLEVAKIDNDPLALSLAIAEAGPDPEVALEACYGWYWAADLLQAEGARVHLVHPLGLHWDTRRVKNDVKDATELANRLRRNDLPEAWVAPPGVRELRELVRYRGKLVALRTSAKAQIHAVMAKLGIIPPVPDMFTAAGQVLLDGMDFPGPYGLRVESLRDLLDIYDRELTIVERWLHRALKDHAGYGAIQVLHGVGPITAAIFVAEIGDISRFPTARHLCSWAGLTPKLHESDTKSHRGRITKQGSTIVRWAAVESVARYHGGEVIAPTFRRIAERRGTMIAQVAAARKLLTLVFYGLRDGEIRCLYREAA

SEQ ID NO: 293576 - protein, 339 aa, unidentified
MKLYGAIDLHSTNSVVSLIDEQDRVVYQKRLDNNLTVILHQLSPYRSSLEGIAVESTYNWYWLVDGLMQADYRVHLVNTAAVQQYEGLKYTDDHSDARWLAHLLRLGILPQGYIYPKQERAVRDLLRKRSQLVRHRTANLLSVQNLVTRNTGSSISSNRIKQLPLEGVSSILADKDHVLAVQANLSVMQCLEEQIGRLERVVKERVKLRPAFRYLKTVDGIGEILALTIMLETGEIGRFSAVGHFASYCRCVGSQKISNGKRKGSGNKKNGNKYMAWAFVEAANFAVRFNPQIRRFYQRKKAKTNGIVAIKAVAHKLARACYYIIQDEVPFDVAKAFAD

SEQ ID NO: 293577 - protein, 309 aa, unidentified
MGTIVVGIDVSKDRLDVHVHPAGTMLSCSRDAAGIEDLIGELERLGAQLIAVEATGGFETVVVASLAAAGHPVVVVNPAQVRAFARAIGQRAKTDPIDAAVIAHFAAATKPPVRPLPDATTQALADLVARRRQIIQMIVAEGQREKRASPRARKSIARLRKTLQSELSDLNDDIGETVRGSPVWREKEDLLASVPGVGPVTARTMLAEMPELGSLDRRQIAALAGLAPFTRQSGKWRGKSFIGGGRASVRAVLFMAALTAMRRNPALRAFHQRLRSAGKPKMVALIAVARKLLTILNAILRDKTKWQTA

SEQ ID NO: 293578 - protein, 320 aa, unidentified
MKTSDNVSVTVGIDVSKLNLDLHVSAGLYDSFRNDGSGFSDIKKLLSKFTVSLILLESTGGYENGIVCYLQRLGYDVVVVNPRFARDFARSLGRLAKTDKVDAELLSQFATVINSRDDRARFVRPLTDETRRHLADMVSRRRQLVDLITVERQRKSVSSQYASESIDAVISYLRSQLERVDADISAHVSLYYSDLSDLLTSFKGVGSATVGVLLGEVPELGKLNRRQISALIGVAPFNRDSGQMRGRRRISGGRSLVRNSLYMPTLSAIRFNPVIRGFYERLVKSGKSRKVAQVACMRRMVCILNAMLRDGSPFEPVMGN

SEQ ID NO: 293579 - protein, 317 aa, unidentified
MDKPPAADRFVGIDVSKDRVDVHVRPDAMAFACTTGPDGLAELVNRLTPLQPHVIAMEASGGYEGAVAAALAEAGLPVAIVNPRQVRKFAGAIGRLAKTDAIDAGVIAHFADAIRPTPKPMPDALMLRLRELLARRRQLVIMINAEKQRLGKAADKLTQRSFKTILRSLEAERARIDRAIDTLIEGSPLFHAKQDLLKSVPGIGDVVARTLIVELPELGSVDRHQIAALAGVAPMNRDSGRYRGKRRIQGGRVEVRAPLYMACLVAIRHNPPLRSFYRRLRDAGKPARLAIVAVMRKLLTTLNAIVRDNKAWAHAQT

SEQ ID NO: 293580 - protein, 369 aa, unidentified
MKQRKKTKKGMPMKTKVKISYVGKKVFIGIDVHRLSYAVTAVCEQVVVLKCSVPGEPHKMVQFIANKFPGAEVSSAYEAGFSGLVLHRALTAAGVSNLVVNAASIEMRVNDKVKTDKRDSLKIAIHLSQGRLEGIRIVSEEEELTRLIARTRDQLVKSRGMLMNSVRMKLLQFGKLPIEYRKVLHLKSVEAWIAEKDFPGLLKIAIRYLVECWKSINIQLKAIKQELRLQAKSDPREAIYRSVPGIGPISARVLSNELGDMKQFRNERRLFSFSGMTPSEHSTGEPKNQRRGHITHQGSARIRKILTEAAWVAIKRDPALRAVHQRISVKSGTKKAIVAVARKLLGRIRSLFIKGEFYVNGKGLPPSAA

SEQ ID NO: 293581 - protein, 411 aa, unidentified
MDLMYARCAGLDVHKATVVACVRMPGPRPDARHAETTTFATTLRGLEALAAWLTAHGVTHVAMESTGVYWRPVFAVLEGTVQVQLVNARHVKMLPGRKTDVRDCEWLAQLLECGLLRGSFIPPAAVRDLRDLTRLRKALIRERGHHVNRIAKTLELANIKLGSVVTDIMGKTGRAILQALSAGLEDPEQLAACAQGSIRKKQAALREAVEGRLTPQYAFLLEQHLALIDTLDAHITTLDARIEAAMAPFAEAAALMQTMPGVATRAASAILAETGMDMSPFPTAAHFASWARLCPGNHESAGKRRPTTTGKGATWLRATLQEVAWAAVKTKKSYYRALYHRLKARGGPKKAIVAVQHAMLVALWHMLKRRVPHQDLGADYFAQRNTERTLRHHVRRLEQLGYQVLLAKEAA

SEQ ID NO: 293582 - protein, 424 aa, unidentified
MSKKKSSVAGLGALYARVCGLDVHKKVVVACVRILDAKDGTVQSTLRQFGTMTADLVELRQWLAEARVTHVAMESTGVYWQPVFNLLEGHFKTWVVNAQHIKKVPGRKTDMKDAEWIAQLMQCGLLRPSFIPDRQQRELRDLTRQQTKLVQQRNAVDNRIEKVLETANIKLGSVASDVLGVSGRKMIEALIAGEKDVTVLAELAQRKLRDKIPQLQRALEGELNDHHRFLLRQLLGQYDFLEKEIASVSERLGAIAPPSFRAAVEQLDAIAGVGERGARALLAQTGTDMSRFPTHKHFTSWAGQCPGNHESAGKRRSGKTPAANRHLDAVLTEMAHAAVRTKNSYFKSQYHRLAGRRGKKRAIGAVKHSLLVTVYFMLRDHKPYKDLGVDYFDKLNPQQRIRYHVRKLQDLGQQVELSPIADAA

SEQ ID NO: 293583 - protein, 368 aa, unidentified
MEKSSTVFVGMDVHKDSIDIAVADAHEARHFGRVGGDAASVDRAVRKLRSRHRTFTVIYEAGPCGFWLYRRLRAQGLGCLVVSPSLTPRNAADRIKTDRRDAMKLARLARAGELTSVHVPDALDEAMRDLVRTREDAVAMQRQARQRLAALLLRNDIRYVGKTAWTAAHRRWIAHLKLPQPPQQIAFEEYVQAVHEAGARLERLNVALHRQLEHWRWRPAVEALQALRGISAIHALRIVAELGDLSRFPSPRGLMGYLGLIPSEDSSGPRRRQGRITKAGNSSARRALVEAAHAYAHPARVSWVIARRQSALPKSVTDIAWKAQLRLCSRFRRLAARGVPRNKVVVAIARELSGFVWAIARGIHPSAK

SEQ ID NO: 293584 - protein, 344 aa, unidentified
MHFIGIDLHKRIFTACVLNDDEKVVEELVDIETDEKGLDFLMSRYPADDCRIVFENLTRAHFAFHYLYDHGYAVSVAHTGHGALREIADTNLKTDKVDAYKLALVCKDMWAGRRFIRRTHISSDENMRMKAVIRVANECSCIRDEMKLRIMEYMNLHNIQEHPRYKDVAGMRYREYLLGLGDPALMRMVNMMSAAIEEIEASSKEIEAYAGRCEDARLLMSMKGISALTAVTVVTAIDGIYRFDSPEKLVSYFGLAVRTSESAGKRKKGCITKEGDPLVRKYLANVVKNHSTRCPDSDLARFYRRKSDEMPHWKAVTAAMRKLTCQIWHMLTYKEQYRPNAAGH

SEQ ID NO: 293585 - protein, 333 aa, unidentified
MSSITIFATNFNIIIMAEVVLFEQIVERGCGLDVHKKTVVATIDGAGLKRETREFGATTRSLTELKEWLLSSGITHVVMESTGVYWKPVYHVLEPSGMTVWIVNARHVKYVPGHKTDKRDSKWLCKLLLAGLLKPSYIPPREQRELRDLTRYRRKLIEQIASEKNRIIRLLEDCNIKLSSVLSDTQGVVGTKLIDKLCANGKVSMKDIEEVYHGKLQASKEEIYEACEGVVTEHHVFLLQAIKEDILSCEAIIAKITSRIKGMLSTYENVLELLKEVPGLSTKSIEDLIAEIGLDMNAFPTEKHLASWAGVAPGNNESAGKKKVDALHTEISR

SEQ ID NO: 293586 - protein, 338 aa, unidentified
MKLYCGIDLHSNNSVVVILDEVDKVIYQKKLDNDLTLILNQLAVYKNKITAIAIESTFNWYWLVDGLIEAGYTVKLVNTAAVQTYSGLKHTDDKDDARWLAHLMRLKILPTGFIYPKEERAVRDLLRKRSQLVRQSTTNILSLQNILARNTAQSLSSYKIKKLDDEQADKLIKDPNITLSLKSNLNIIRCLQSTISDIENAVLQQVRVRQEFKKILTVSGIGEILGLTIMLESGDMSRFPKVGNFSSYCRCVKSERFSNGKKKGEGNRKNGNKYLAWAFIEAENFAVRYNDKIKAFYQKKKAKTNGIIAIKAVANKLARACYHILKDQVAFDVNKAFA

SEQ ID NO: 293587 - protein, 446 aa, unidentified
MEIEGSGVTVGLDAAVVANHHVIVRRPTAGGRGEVVANFVAAPTLAGMDTLTKRLSPYAPVMAVAEPTSMTWLPLSIALQRAGCSLALVGNRHSARLRSALAGKNKSDPIDADMLSRAGEFFSLQPARIPCADELALKRVCQRRGKLIVDANRSLRRIISLARWAFPDVWNAFAGSRPTALAVLTRWPDLAQLARARTSSVSDVVAAHTRGVGDVDDRAAHIRSAARAWAEFWDGHVDLDALAWETAELLEDYAAAEARLQRATDAAQRRWEQLWGDDALLLSVPGMGPITAPTVRAFLADASQFDDAKQAQSFVGLNPSNWSSGQMEAPSRAITKEGPGVLRLAFYQAGNVARTVDPQLAEFYRRLMVERGHCHTQASCAVARKLVARTWATLTSGRSYQLRDLAGQPITRRHAREQAATLAVPDDVRRRTRARSAATHRGRLTR

SEQ ID NO: 293588 - protein, 439 aa, unidentified
MKKKIQYRAESVERILPEQLAQAFPVGARVLVGVDVAKRNFVAALCNGSGETVLRVRFEHPRQTAQFVGLLGGLRAGERLVEVAMEPTGTYGDALRYRLGTSKISVFRVSNKHVHDASELFDSSPSKHDGKDSSVIGWLHAQGRSKRWEELDPVRRSVRALVAQRDLYDEPMSRLIAQMEPLLARHFPEFEQFFDLSQRMTPWVLLELFGSPAVLGKLSVEEVLAAMKDQIRRRPSAEDLQSLLEAARSTSGAAMVSEETELVRRMATEVLHLMRKRRDVDARIAKATDDVEAVKAIRPCLGPVTAAVIYAYLGDPKSYASAAALEKAAGLNLVESSSGTDPHAEDKVPRHISKRGASIVRKYLFLAAMRLVRSDDIAKAWYQARRSFKAQQRTKAIVAVERKLCRSLFHVAKGQTFDTEKLFDNRRLGVVRPSKEEAA

SEQ ID NO: 293589 - protein, 344 aa, unidentified
MESMHYVGLDIHKKIIAFCIKTASGRIIKRGTVSATRQTLNKWLENLPQPWMAAMEATLFTGWIYDFLKPHAYQIKVAHPAMLKAITAAKKKNDRDDAEKITDLLRVNMLPECYMAPAELRELRRVLRYRTHIVRTATKEKNKISGLLMEVGGAYNKKRLHGKKYFDELLDKIEDVPESVINMLRLSRSNLEIFTDIQKRLARTLKENQLIRERVRRLMTIPGVGEITALTWALEICEPERFHSIDQAVSYCGLCSAQKESAGKEYRGPISKKRNKHIQTILIEAAKLAPRWNPQLAEVHEKESAKGNNKNKATLAVARKLVAYMLAVDKTKNDFRIIGSKKAA

SEQ ID NO: 293590 - protein, 351 aa, unidentified
MPRTTTVHAVTTIGIDMGKNTLHMIGLDSRGAIVLREKVSRGRITSRLANLPPCLIGIEAGMATHYVARELTALGHDVKQVPPAYAKPFRQGHKNDFRDAHSVAEAVQRPTTRFVPAKTDEQLDLQALHRVRSRLVGERTAVINQIRGFLLERGIIVRQGLRFLRQALPDILAKRTDVLSPRMVRIVADLAGDWRQLDERIKPVTDEIETLAKTDDSCRRVMTVPGIGPIISSAMVAAIGSGAAFARGRDFSAWIGLVPKQMSTGDRTILGRITKRGNGYLRMLFMQAARVILLRPGSWPKHSFGVWLARVAQRLHPNVLAAALANKLARIAWTVLAQERSYEARITKAAA

SEQ ID NO: 293591 - protein, 311 aa, unidentified
MKVYIGIDWSENKHDVCFLDEMGEVQLVQEIAHTIAGFWQLDQARQSLGVGRQEVILGLETAHNLLVDYLWEQGYEQIYVLPPAAVKSAQKRYRQSGAKDDRWDAHLIANLLRTDQRCYTPWKPDQPLTRQIPELDAAYAPLSQAQARILETLIRSRNACLTRLDQLFRLHPDHEIYDSLPKAGTLLAPALLAKLGDDRARYPTPAVLQAVVGTCPLTKRSGKHSYVLFRKACDRDFRHIVQQWARLTLDVSPWAATYYRTVRPHCQTDNDAIRRLANRWLEILWRVWVDRKPYDEALHLKQHTLRNRIDY

SEQ ID NO: 293592 - protein, 358 aa, unidentified
MSLDKSNKLDFTGQPIYIGLDVHKKSWSVSIFSNYGEYKTFNQPPEVDKLFQYLRHHFPGGDYRSVYEAGYCGFWIHDQLREKGIQCLVVNPADIPTKNKERRTNRDRIDCRKLGRSLRNGEIAGIYVPCRPKLEDRTLIRTRQSMVRKQTRCKNQIKAILLFYGVVIPEQREMGHWSRRFIQWIEGVRMERASGDMALRVHLEELSHLRQLIASLNRAILRLARTEEYGLLVRLLKTVPGISTLTAMILLTELGEITRFPSLDELSCYVGLVPDTQASAEKEYVGGLTQRRHAQLRWLLIEASWTAIRKDPALLMAFEQYCKRMRKTKAIIKIARKLLNRIRYVLKNQAEYVPCVIA

SEQ ID NO: 293593 - protein, 327 aa, unidentified
MRIATVGIDLAKNVFAVHGVDESGKPVLIKPRASRDQLSALIANLEPCVIGMEACSGARYWARVFQRYGHTAKLMAPKLVAPYRMSGKRGKNDAADAAAICEAVMRPSMRFVPLKDEHQQATLCLHRTRQGFVEERTATYNRLRGLLSEFGVVLPQSPERLRLDIAAHLDSLPSWVRRCISDLLEHAGNIEVRLGEYDRAIAEIAREDVRSKRLMQLRGIGPTTASALLGSIGAGHDFRNGRLLAAWLGLTPGQHSSGGKARLGSITKAGDAYLRSLLVLGARAVMANLGDKQDRFSRWIRNLMERRGYWRAAIAIAAKNARCLGQF

SEQ ID NO: 293594 - protein, 349 aa, unidentified
MAEPRISSTGERIDVGIDVHKETYTVTCLRQRQIVKTATVPADPARLAESLPRWFPGARLFSAYEAGFSGFVLHRVLTTAGITNIVVNPASVAVAANDKVKTDRRDAKKLARELADGRLRGIYIPTEAEELARLLPRTRAQLVAHRATITRQITAKLHQFGLITPGSRRLMSSRYLREIAAWELPPELHVSLTLLADQWRFATRQLLEVRRLLREQAKAQAALETVYRSVPGIGEVVARTLATELGDMTRFANERALFSYTGLTPSEYSSGAAIRRGHISRQGVSRLRHVLVETAWRALSGDPILQAMFDRIAATRGKQRAIVAIARRLIGRIRACFRHGTPYAVGTVS

SEQ ID NO: 293595 - protein, 464 aa, unidentified
MTASKKLWRNRKERKEWARRLQSEDPGLEVVHPHAAGIDVGNSAHYVAVRPDRDAEPVRRFECFTADLHRLADWLQSCGVKTVAMQSTGVYWIPLYEILEERGLEVCLVNARHTKNLPGRKSDVQESQWLLKLHTYGLLNYSFQPVSEIRVLRTYWRQRGEHVREAATCIQRMQKALTQMNVQLANVISDISGLTGQAIIRAIVAGERNPLKLAALSDPRVHASQEEIAKSLEGNWRSELLFVLQQEVDMYDTYQKRIAECDQRLQKHLASLTHPLQVQPTTQKPKTKKPPAKNAPRFDLSSELQRVTGVDLTRIDGIDVMVAQTLLSEVGLDMSRWKTESHFASWLGLCPDNRISGDKVLNRGTRRVVNRAATALRQAANTLMRSRSYLGAQYRRLRTKLGAPKAITAMAHRLARLVYRMLKYGQTYVDKGTDYYEERSRQQQIQLLRKRAAKLGFQIAAIHA

SEQ ID NO: 293596 - protein, 368 aa, unidentified
MGIVVALDVHRKQITYKTLDRETGEVKRGRIAPAARADVRAWLARFAGCEAEFALEGTTGWRFVVEEIERAGHRAHLVDPAETAAKRGRKRRAKTDSADCDLQLRLLCAGELPESWIPPAHLLELRTRVRMRKTLIDQRTAWQQRLQAQLFHQGVPAGLRPRTRAGREALVRAELSPAGRELVSLALRMIDAIDRELAPLDRQLCSFARRQPGCRALIARLYGVGPVSATAILAELGDARRFARSDDAVRHSGLDVTVYQSDEKRARGHLSHEGPELLRWALFEAALSGRPRRLARPRLLLAGCRADRSQPGLPLGCAQALPARAPHPARARRRSARPRRGRPARRGGDRSCRLTTPAHARACPSSRR

SEQ ID NO: 293597 - protein, 341 aa, unidentified
MDDYIGLDVSMKETAVSIRRGGKRVWRGKCPSDPKLIADLIRKRAPSAKRVIFETGPLSIWFYHALCAEGLPAICIDARHAKAALDMAANKTDANDADGLAHLAEVGFFREVRVKGFDSMLTRTLVAARTRLVRICTELSNQIRGLMKTFGLVVPAGKGSTFEKNVRGLLVDQNGLSAIVLPMLEAWRSLRIRAAELGRQLVAEARQNQACRILMSIPGVGAITATSFATAIEDPNNFKRSRSVGAWLGLTTRRYQSGEVDYDGHISRRGDRQVRGLLFEAATVILTRSSAESGLRTWGLKLRERVGFKRAAVAVARKLAVIMHAMLKTGTFFDRTVGAVA

SEQ ID NO: 293598 - protein, 595 aa, unidentified
MLPQSPSASQAPRRFGVGIDTSRYGHYAAFLNEQLQPAAAELQFPESAAGYALLRGRLDSLTRRHGPAHFVVRLDAAGQYADNLRHFLHGLASPAAAPGASTSFSLTLSCGDPQRNKNYRAALFGSKKSDPVEARAAARFALAERPSTDIPLSQELRILRQVAGRLQAVVRQRTRLLNQFHHLLALTFPELALLTKELAAGWVLELVHRYPTAPLLAAAPPTDLGHIAYLPDRHIAPLLEHARASVASLAGATVAELVREQVRQLRDSGARQKRLENLLVTAYRALPEANHLDSIPGFGAVTAAVLTACTVAIERFATPAKYVAFFGVLPVEVASGVERDGQARAPRRWAMSRRGNDLVRRYLWMAALSAAQCNPAVKALYARVVAKHPQHKAVAVGHAMRKLLHLAFAVWKTGRPFDRDHYPWQTPTHVESSDNGMSPAPETSDNTRSQEGQAAGHKPVRMPAQPVVTAARTDTLADAAAVGEGTYLDFAHLKRQLPLARVLDQLGLTARLRGSGPQRRCACPLHRGDARGRTFSVNLDANVWQCFAQECGRKGDVIDLWAAVQGLSLRAAALELVQTFGLEPAPCGGTEKRHG

SEQ ID NO: 293599 - protein, 356 aa, unidentified
MQTQGTKKIDFKGKELFIGLDVHKKSWSVTILVEGMEHKTFTQLPDPKALFNYLQRMFPGGTYNSAYEAGFCGYGIHRELNALGIKNIVINAADIPTSQKDQLQKRDPIDSRKIARALEKGMLRAIHIFDRDMEELRSLNRTRFYLMRDLRRSKNRIKSFLQYYSITIPLEMDNNQWPLKFVAWLKQIQMQTLSGQDAFSNLIRSYEYHREQILTLSRQIRLRVTEYDKELYSLLKTISGIGPLTSSALITELGDINRFPHIDHLSSFVGLIPRVKQSGETSYSGGITFRCNSYLRTLLIESSWQAIRKDPALMQYYHQHLINNKGQKVIIKVARKLLNRIRYVMKNRQPYVTGVA

SEQ ID NO: 293600 - protein, 344 aa, unidentified
MEISVLGVDLGKNVCSVVGLDASGAVVMRRKVRRETLIALAEKLPACIVGMEACCGAHHLGRVFSAHGHDVRLMSPEYVRPYVKAQKNDDRDAEGIAEAATRPTMRFVELKSQDQLDTQTLHRSRDRLVGERTALINQLRAILLERGFVAPQGKRKLEGFLALLMDEQGGAGLTPRIILLVADARKQWAELDRRIAAFDAEFVRWVKENDEARRLTTIPGIGAIVASALVAAVGRAESFDRGRDLAAWLGLVPRQFTTGGRPKLLGISKRGNKYLRKQLIHGARAALPYVAERDTPLGRWAKGLISRAHRNVAIVAFANKLARIAWAVLRRHERFAAIGTPTAA

SEQ ID NO: 293601 - protein, 434 aa, unidentified
MQEVTDEPLYRDRVCGIDIGKAQMAATIRVPSEKNPARRMSETRMFGTTKAGVLELADWMRAWQVGAAVMEATSDYWKPVFYRLEAEGFECVLADAKQVRNLPGRPKRDPSDSQWLACCFERGSVTSCFVATPEFRIIRLHTRRRRDLTGERTREKQRAEKLLEDAALKLSSVLTDLHGVTGRDIMDRLIAGERDPKVLAQCARTRARRKIPQLREALEGAEFFTEYHARLLRSILDRIDAITAEIDQLSQVIEELLAPYEEQLQQAESMPGWERRAAQDVIAETGVDMTRFRTGGHLASWCGRTPLDKQSGNRKGQRKHKRGNKYAGAVLGETAVAAGKTQTREGTRHRKIARSRGKAKAVVATGNTQMKVFHALLSSPGTRYEDLGPDWDTDERRTARRLSRLVGELGAMGYEVTLCRRQDPRPEPEPATQA

SEQ ID NO: 293602 - protein, 382 aa, unidentified
MGKTTRYVGMDVHAATIAVAVVEGRGLPRSVGVIPNRPEAVRRLIGKLGEPSNLRVCYEAGPTGYVLYWQLTKLGVHCEVIAPSLVPVKAGDRVKTDRRDAEKLARAYRSGDLTAVFVPSAEHEALRDLVRAREAAKTDELRARNRLGKYLLRNGQYAPTGCRAWTLTYWRWLRTVKFPHAAQERTLLEYIVEVEHQQQRVERLDGAIDEAVRSAPEHMKAVIEALQSLRGVAKLTAVTLVVEVGTFRRFERATQLMSYTGMVPSEYSSGEKSRRGAITKAGNNHLRRILIEAAWHNRHRPCLSNRQRAVHKHLDPGVIKIAWDAQLRLNARYRRLSAKGKPHGKVITAVARELVGFIWSVGTRTELAFAAGAKPTASTKAA

SEQ ID NO: 293603 - protein, 349 aa, unidentified
MRYIGVDLHKTNFVVCFLSEDETCKLEIFPLSKAGISRFTSELSKDDAVAVEVTQNIYYFYDQIKTYVDRIVLVDTYRFAIIAQSKKKTDKADAQALARFLKLDHLPEVPVPSEKVRQLRHLLQARETLVGLRTKLKNMGHAALTRNGIALLRSAFASAIGRERLQKREDLSAADTVILQSALRQIAELDKEIEQLEAEIVRLGKTLAGIKRLLQLHGLNLLSVISLLAEIGDIHLFETSKQLVAYSGLATSIRQSNQTTRQGHITKQGRKRLRTVAIRAVLSMVNRTNTPLMDFYARKKREKGSGKAICTTARKLLTIIFVTLKKELDYWYLEDRLYNRKLRQLNAAA

SEQ ID NO: 293604 - protein, 408 aa, unidentified
MNAVGIDVSKGKSMVAALRPMGEVALLPQEFLHTEVGLEQMAYAILALGEDTRVIMEATGRYHEPVAAALHEYGIYVCVLNPLFIKQSGGGSIRKVKTDKADAMKIAKYGLDNWVDLREYTPMDTVRQQLKLCSRQYNLYMKTVVSLQNNLISLTDKTFPSVNELFSSPERADGHQKWVDFVMTFYHCDCICRVSEKAFTERYQKWCKRKGYHFSAEKALDVYAGSCGHITTLPKNDNTKLLIATAAQQLLSGKMTLAALRAEMTRLAKQLPEYDTVRAMYGVGETTATQLMAEIGDVRRFPRRSSIVGFAGVDPAVDQSGKHSAKSVPTTKRGSPHLRKTLYQIICTYLRKAPADEPVYQFLDKKRAEGKPYFVYMTAAQNKFLRIYYARVKECLEAFDAQQDTSQR

SEQ ID NO: 293605 - protein, 399 aa, unidentified
MLAVGIDISKSKSVAAILNQDGSMHTSPFEFHHTQPELDAFIKYILNSNQSATILMENTGHYHYPVLKAFREAGLPVCMVNAYQIKKFGDMDLRKAKTDKKDAVRIARYALEKSYSLVPYTSMEQKYEDLRFLARQYNQRMLTLKTNKVFLLNLLDETMPGITNILPLTTRAPGTSLSVLFINRFKSYDRIKKMGKSRFLDAFEKIARKSRNRQTKTYGLAIYEAALRNITTRGENEYTLAAQDQCLELVCESQKAADSIILKMQTLAETLPEYAVLRSMAGVGDRLGPLILAEIGDIRRFHSGKALNAYAGNDAPPYQSGTFESHNRHISKRGNAALRKYCFEVMQALKLTRPQNDPVYLFLLKKEQEGKPYNVAKMAGVNKFLRIYYARAMETLKQQ

SEQ ID NO: 293606 - protein, 364 aa, unidentified
MKNIIKQVLGTDIAQKELVVCLGCMYDDWTPELYARHVFPNNLKGFNALLSWVKKNTDSSVAVSFVMEATGVYHESFAYFLDEHNLAVSIVLPNKISNYMRTLAINTITDKTAADAICQFGLERKLDNWQSPHPTYGSIKQLTRERDQIITERTVCKNQLHAEVSQAFPNRSSKKRLEERIKLLDKHASQINEELKVMVAADREIKNNVNLLCTIPGVGTLTACTILAETNGFELIRSKKQLTSYAGLDVREKQSGTSVKGKPRISKKGNRFLRKAMHLPALAAIRHNNRYKAIFARIVQKQGIKMKAAVAVQRKLLELSYIIFKTQKPFDPDLFLKMENTTKSQEYPETKKEIVEIQTTSFTV

SEQ ID NO: 293607 - protein, 404 aa, unidentified
MYNAVGIDVSKGKSTVTVLQPGGTVIRKPFDVSHTSQNLNELAAYLDSLDGDTRIVMECTGRYHEPILKALSEAGLFVSVVNPHLIKNFGSNSLRKVKSDPADARKIARYTLDNWAELRQYSGMDNTRTQLKTLNSQFSFFMKLKVAVKANLIALLDNTYPGVNKLFDSPVREDGSEKWVDYAYSFWHVDCVRGIGLKAFTERYQAFCKRHHYIFQADKPEKLFNASKELAAVFPKEKTYKLLIQQSIQQLNLASGHVERLRREMNELASTLPEYSTVMGIYGVGRTYGPQLIAEIGDVSRFTHREALTAFAGVDPGVDESGQHKSKSNRASKVGSARLRKTLFQIMTTLLQNAPEDDPVYRFLDKKRSQGKPYYVYMTAGANKFLRIYYGKVKECLRNLEQES

SEQ ID NO: 293608 - protein, 349 aa, unidentified
MPVMIGVDPHKASHTAAALDEHGQLLDRQRIATTLDGYRLLRQWAVRWPDRCWAVEGAHGIGRALAQRLVGDGEQVLDVPAKLAARVRVLSVGHGRKSDPCDAVSVAVAARNAGGLRQVKVEDQATVLHLLTKRRQDLVATRTQTINRLHRLLMDLVPGGARRNLTANRAAALLATVIPAGAPAVTRWQLAGEFVADVRQLEQRIAAIEARIKAAVAQSNTSLLELFGVGPVLAATFLGEVGDVGRFPSKHHFAAHTGTAPLEASSGQVIRHRLSRSGDRKLNHALYMMAMVQVRRPSAGHVYYQRKLAEGKSPKEALRCLKRRLSDAVYRCLVIDQAKQPPVMATTSN

SEQ ID NO: 293609 - protein, 340 aa, unidentified
MGTVTTIGLDLAKNVFQVHGVDADGAAVLRQRLTRGRMLKFFAKLPPCLIGIEACASSHFWARQLMALGHDVKLMPAQYVKPYVKRGKNDAADAEAICEAVTRPTMRFVGIKSPEQQSAMMLHRVRLILNRQRTQLSNALRAHIAEFGIVAPIGRNGIDQLLDIVADTEDARLPTDVRTCLDMLAAQLRIVKEQILENDRRIMASARETEIGRRLMEIPGVGPLLASAIVATVPDPSIFRSGRDLAAWIGLVPRQNSSGGKERLGGITKAGHRYLRQMLIVGAVAVIRFAERHKSKRPWLVQLLARKKVKVAAVALANKNARMIWAMMSNGERYREPQIA

SEQ ID NO: 293610 - protein, 344 aa, unidentified
MTNIQHKETAHEAKPDLFAGIDVGAEELILVIRKNGKPFDPQKFTNTPADRIRLVKKLVKLPGIIVCLEATGIYHFDLSLALHDAGVLLMVVNPKAAHNFAKVLMKNSKTDAVDANTLAEYAARMDFVAWTRPSNETIALRSFARRIDALTGQKAAAKNHLHALTATLETPKAVLKDVKLAIAQLQKRIDRLTAEALILIGKHPELEQILVLLIGIKGIGNSSAIALMGELLLLPPDLSHREWVKFAGLDPRAFDSGKSVHKKSRISKAGNRHIRSALYMPALSAKQHDPHVKAYFQHLVNNGKKPLQAVCAIMRKLLHAIHGMLKHNEPFDNTRFYAIPASAE

SEQ ID NO: 293611 - protein, 383 aa, unidentified
MRIVCGLDVHKDSVFVCILSENGDKFESKYGVLTPELEELHQLLVNHGVKEVTMESTSIYWHPIWRILEDIEELKLVNPYFIKQLPGRKSDVRDAAWIAECTMKDLIRGSFVPAPLVQRMRQYNRRIFDLNKEKVYKLTKLDAVLQRCNIRISNYISSTDSKSYKEVVRLLSEGVTDAILLADTIHGRTVNRVGKDVIIASLTGVVSEVDIDLIRQYREEIELDDRHLQECQEKLTAICKKEFPKEFENLQTIPGVKERSATSILSEIGADMKMFITASALVSWCGLKPRNDESAGKIKSRKITHGNKYIRKTMIECAWGASRTQDCFYSQFSYIQTVVRRKNAMKVKVAVARKMLVAVWHVLNEGVPYRDYKMLQAQAGGNS

SEQ ID NO: 293612 - protein, 366 aa, unidentified
MANDEAALTELLTDVLALAAGREVLWATDLNRGGAALLIGVLEARHQTLVYIPGRSVYHASRTYRGDGKTDAKDAAIIADQARMRRDLQPIRSGDQISTDLRLLISRRTDLVCDRTRAINRLCAVLLEYFPALEAAFDYAMLKAAVVLLTKYTTPAGIRRVGESRIAAWLRNQGCYNAKTIASRAVAAAHAQHTTVQAQEVGADLVAALARTVLDLHKQMAEVEKQIEARFREHQHAQILLSMPGFGTLLASEFLAATGGDMTAYDSAARLAGVAGLAPVPRDSGRISGNFHRPKRYDRQLLNAFYLAAQSAARYCPQSRTYYQRKRSEGKNHKQAVLSLARRRLNVLWAMLRDGTPYQQPAAMAA

SEQ ID NO: 293613 - protein, 343 aa, unidentified
MGEVSTIGLDVAKSVFQVHGVDDTGAVVMRKRIGRAKVLEFFDGLSPCLVGLEACPSAHYWSRELRALGHMVKLMPPSYVKAYLKRGKNDANDAAAICEAVTRPSMRFVPIKTQEQQTGLMLHRTRQLLVRQRTMLSNAIRGHMAELGIISAKGRNGTAELLQIIGDVADDRIPPVARLCLDLLARQYLTLNAEVSSIDKRIHAWHRSCEESRRLEEIPGIGPIVATALVAEIGDWGAFRSGRSLAAWIGLVPQQHSTGGKERLGGITKQGNRYLRWLLVAGAMAVIRYARQHGTRRAWLTRIMGRRPAKVAAVALANKIARMAWAIMVRGERYTEPKLLLAA

SEQ ID NO: 293614 - protein, 424 aa, unidentified
MKKVDYLSTLFVGIDIGARQNVVSAINFEQEFFIKMKPVPNTQSGAEQLESMLVKILENNIFKVTIIGLESTSFYGVHIANFLSASEKLVPYKPYVYCLNPKEVANYKDSFNALNKNDGIDSFVIADFARVGRIHTEPWRGSQYLALQRLTRHRLHIVECLTREKTYMLSNVFLKFSEFALLDGEEHPFSNKYGATASSILTDFLSSEDIANASIEELVEFINTKSRKRISDPQMTAKILQQAARNSYRLDKCLYEPLTTSIACSFNCIQAFEKELSTINKAIEKAVMGMNPVEYQILMSIPGFGPVYSSGILAELGSVHAFPNNDAIAKYAGIVWKENQSGDFKAENTPMNKAGNRYLRYYLIEAAGSVIRHVPEYQAFYQKKFAEVTTHQHKRALALTSRKLIRLIFGLLAKNQLYSSNRVD

SEQ ID NO: 293615 - protein, 346 aa, unidentified
MDKISVIGLDLAKNVFQLHAVDEGGAVVLRKQLSRAQMPRFFAKLPPCLIGMEACGGAHYWHRKLTEFGHTVRLMAPVFVKPYLKSNKNDRNDAEAICEAVQRPTMRFVTPKSPEQQAMLHLHHARRQLVRQRVAVGNHIRAVLAEYGICLPQGVKVVSQRLPALLEDAENALPALTRHLLAELLEEHNALIGRVQRLEAQLKAWHAGNEASQRLEGIPGVGVLTATALAATVNDGLAFRNGRQLAAYLGLVPRQASSGGKDRLLGISKRGDGYLRSLLVHGARSVIRHIRRRLQAGQPGGNPWVEALLQRCHVNEAAVALANKMARIAWVLLTRNERYQVIPNHA

SEQ ID NO: 293616 - protein, 431 aa, unidentified
MTEQSSAAPVQNPEPEFAAFVAIDWADQKHVWSLQVPGSRQIERGQWDNTPEAIEVWITEWRLRFGDRPLAVALEQCRGALVAMLSKYGQLHLYPVHPLTLAKYREAWYPSRSKDDPKDADLLREILCQHRDRLRRLDPDTTTMRLLQFQVENRRKLVEQRTALSNQLTDLLKLYYPQILLWFPDITTLLVGDLLLRWPTLLELQKAKAATLEKFFHQHNGRSQPQIEQRIEQIRQAIPATQDKAVIRSSQGMVRVYVEQIAGLRQAITELEKEIAQLARQQPDWEIFDSLPGAGEVLAPRLMAALGSRRERFASAAELQCFSGIAPVKEASGNSQRVHMRWACPKFLRQSFHEWAGCSIPFCGWAKAYYDQQRARQKSHHTAVRALAFKWMRILYRCWKDRQPYREEIYLLSWAKRNLPRPRLAQSVQTP

SEQ ID NO: 293617 - protein, 360 aa, unidentified
MDMDKYVGMDVHKAMTVVAVLDGSGRLVAEAIIETRSETIKDFVRGLSGKIHLTFEEGTQSAWLYELIKPLVAELIVCDPRRNKLMAVGNKSDKVDAKKLAELLRTGSLKGVYHGDAGTKKLKEVVRLYLTLMSDAIRVMNRIKAIYRGRGIATTGTAVYRAETRLDWIAQILDEGSRVRLEALYRQLDFLSEQRKHARKEVVTEVRRHAAYRILIQIPSLGPIRIAIIIAVVVSPHRFRTKRQFWPYCGFGVVTVTSADYVTIDGKISRSKRPVGTRGLNRNYNRHLKAVFKDAAQYASRKPPFKQHYDRLIAKNMRKQMAMLTLARKISAITLAVWKAEDCFDSGRLSDPNMVKEVVA

SEQ ID NO: 293618 - protein, 344 aa, unidentified
MEYFAGLDVSVKETSVCIVDDTGKIVREVKVPSEPAALLAVLKNPTYHFKRIGLEAGPLSQWLYNALAEAGLPVICVETRHMRAVLKAQINKTDRNDARGMAQMMRVGLYRPVHVKTLRSQKLRMLLTHRKLLQSKAIAIDNDLRGTLRNFGLKVGLVGTVRFEARIRELVENMPDLAALIEPLLVVRRTLREQFCILHRRLLAIVRDDEVCRRLMTTPGVGPVVSLTYRATVDVPARFRKSKSVGAVFGLTCAKYQSGEVDWDGRISRCGDEMMRVMLYEAAQSMMRSKKWSWLKAWAMQIAKRRGMKKAIVALARRLAVIMHRIWVDGTEFCWTRDQAAAAA

SEQ ID NO: 293619 - protein, 367 aa, unidentified
MKKVSTVGAKPSKKISQQKLTVGLDLGDRNSWYCILDESGQIQLEQRVRSNAKALREVFGQLPHSRIALEVGTHSPWISRLLSELGHEVIVANARKVRLIGESRKKDDRLDAQTLARLARIDPGFLSPVKHRSAQAQADLMMIRARAGLVRARTALVNTVRGLAKSYGERLRGCNVRNMNPEKAEGLSPELQSALEPLLAGIEELSEQIREYNQRIEKLAQESYPQVALLRQIKGVGTLIALTFLLTLEDPHRFRKSRDVGCYLGLQPGRRNSGQSEPQLHISKEGDPYLRTLLVQGAQHILGPFGVDCDLRRWGLKLAERGGRNGKKRAIVATARKLAVLLHHLWVSGEVYEPLHNSRRTAVAAAA

SEQ ID NO: 293620 - protein, 316 aa, unidentified
MADTRRWGGIDVSKAQLAIALRPTGQGWQVPNEDEGMTRLVARLQAGEPTLMVVEATGGMELPVTLALAAAGLPGAVVNPRHTRDFAKATGQLAKTDALDARVLAHFAEAVRPVPRLLPEAQAQALSALLGRRRQLIEMLTAEKNRLSAAPVGLRPRIQAHLHWLEHALRDVDTDVARRSRTSPVWRVKDHLRQRVPGVGPVLSQTLVAQLPELGTLTRQRIAALGGVAPFNRDRGPRRGNRTVWGGRAHVRTIVDMGTLVAVRVHPVLTTLYARLRAAGKAAKVALTACMRKLLAILNAMLKHQTPWQENYARTS

SEQ ID NO: 293621 - protein, 360 aa, unidentified
MNNPSSSNHQGIVGGVDTHKDLHFAAVVDAYDRVIANNSFPTTRHGYKSMLNWMQSFGEVKRIGVECTGTYGAGLLRYLQQFGIEILEVTAPDKTDRRKRGKDDTIDAENAAHAAFAGIRTVTPKTRDGMVESLRVLKLCRKTAIAARRIALQMIQMNIISAPEAVRESLRTMTRMQLIRTLAAWRPDLGGYRDISTAYKIALKSLARRYLELHDEIADLDVMISVIVDELAPELIAGKAIGYESAAQLLITVGDNPERLKSEASFAALCGVNPIPASSGKVNRHRLNRGGDRAANSALHIIAIGRLRTDAKTKEYVEKRLTQGHTKLEALRCVKRYIAREVYYTLRKRNNVVNSTQITT

SEQ ID NO: 293622 - protein, 365 aa, unidentified
MQKISTTQTSGKSIFKGQLTIGLDLGDRASAYCVLNDAGEIVLERKLATSPKAMTEIFGKMARCRIAMETGTHSPWVSRLLTALGHEVIVGHAQRVRLITKSRRKDDRQDARKLARLARIDPELLSPVKHRSVQAQLHLTEIRARAGLVSARTALVNGARGLVKSYGERLRKCDTRQFRREATGGLSTGLRDALEPLLREIESLNDRIQEYDRRIERMAKLTYPEASLLKQVKGVGDLIATTYVLTMEDPHRFRKSRDAGCFVGLQPGRRNSGESEPQMHISKEGDEYLRTLLVQGAHYILGPFGEDSDLRRWGRKLSERGGKTAKKRAVVAVARKLAVLLHRLWVSGEVYEPLHNNQKAMTAAA

SEQ ID NO: 293623 - protein, 315 aa, unidentified
MTKPKSTKVSVGIDISKSTLEIAIYETGESWSCNNSTEACAGLVPKLKQRQATSIVLEATGGFETLVTATLAAADLPVIVVNPRQVRDFAKATGQLAKTDLIDAQILAHFAAAIDPQPRPAKSAEAQHLEALLARRRQIVGMIGAERNRLANNRDRAVVKDLKIHIAWLERRLKSSDDELQRVLKDSPAWCQHDSLLRSVPGVGPVLSLTLLAQLPELGQLNRREIAKLVGVAPFNRDSGRWRGSRHIWGGRAAIRSPLFMATLCAIRINPAIKCFYQRLIKVGKPPKVAITACMRKLLTILNIMIKTQTSWRTA

SEQ ID NO: 293624 - protein, 326 aa, unidentified
MEWTVAIGIDTHRDLHVAVALDRLGRLLGSLEFAVDEHGFAELVRFARSLGQPTFAIEGTGSYGASLARALLAEGLLVYECERPERRSRKGKNDLLDAEAAARRLLSGQRLPLPRSGAGREQLRLLLAERRSAQRSRLQALNQLQAALVSLDPPLRARLSRLTPAALEREPLLPRPLLAPLRRLSKRIRLLEGELCEIDAELGELTRALCPQLLAETGIGPLCSAQLLVSAADPSRLRSEASFAALAGVSPIEASSGQVKRHRLNRGGDRQLNWALHMSALNRIRHHPETRAYYERLLSKGKTKREAIRIVKRVLARRLYRTLVAA

SEQ ID NO: 293625 - protein, 351 aa, unidentified
MKLTKYIGMDVHKAMTVIVVLDSEGKVLAEAVIQTKGSTILDFFKSQRGSLHVAFEEGTQAAWLYDLISPHVASVTVCNPRKIIRHGNKADKVDAKLLAELLRIGTLKPIYHGEKSTRAVKELALSYASVVEDGTRIKNRLKALFRGRGIECNGTGVYDPDERKIWEAKLDSKAVCARADIQWQLLDLIERLSEKAENDLMAEARKHTATRILRSVPGIGPIRAAVILGIAATPHRFRTKKQFWGYCGLGVVSEISAEYELINGRVRRSKKRPLLRGLNTNYNRAMKAVFKGAAKSVSAGAWKSHFDAMIANGSLESLARLTLARKIASITLAIWKKGERYDHRKLKLHAA

SEQ ID NO: 293626 - protein, 332 aa, unidentified
MSVYVGIDVHRKRSQVAVINEGGEVLANRNVPNGAKPILSVIGGLPAGTPAAYEAAFGWGWLLELLEGYGFEPHMVHPLQCKAIASARLKNDKVDAATLAQLLRADLLPEAWIAPPAVRQLRAMLRHRAQLVRLRTLLRNRVHAVLADHGHGRPAGCWSGPGRAWLASLELPAVSREVIDDALALMDALQQPIDRLDQEVRQRAKADPRVKVLTQLPGVGPFTALVLLAEIGDITRFGSARKLASWAGLTPTVRGSDRTVHHGHISKQGPAWARWVLCEAAQTARRHPDFAPGYEALARRRGRKIATTAVARKLITRAYHLLTDASAVGEPG

SEQ ID NO: 293627 - protein, 343 aa, unidentified
MQTITTIGLDIAKSVFQVHGVDAGGQVIIRRQLKRRYVLSFFQKLTPCLVGIEACASAHHWSRELQALGHTVRLMPPAYVKPYVKRQKNDATDAEAICEAVTRANMRFVPTKTPEQQSGLVLHRTRHLFIRQQTAVINAIRAHLAEFGTVAPVGRHGVEELLNVVADPNDKRVPEIARACLSALGAQLRRIKEQILEFDRLIRAWHRSNEMSMRLDEAPGVGPVLATALVAAVADPKSFRSGRNFSAWIGIVPKQHSSGGKNRLGNISKQGDRYLRGLFVAGALAVIRYAKIHGTKHRPWLTALLARRPTKVAAIALANKIARMVWAMMAKGERYKEPIALAR

SEQ ID NO: 293628 - protein, 412 aa, unidentified
MRVIIERCCGLDVHQETVVACLLIGAPGDRPTKEVRTFRTVTRDLEVLRDWLAAAGVTHVGMESTGVYWRPVYAVLEGHFDLIVGNARHIRNVPGRKTDVKDAEWIADLVRHGLIAKSFVPPRPLREMRELLRYRRKLTESQAAERNRLLKLLETANIKLASVMSDVFGVSGRAMLRALIEGRASVEAMADLARGQLRRKRSDLILALEGRMEEHHRFLLATQLRRLEAIEQDIATLDLRITERLEPYRMPHALLMQIPGVDWLVAAVLIAEIGVDMSVFLSVYHLSAWAGVCPGSQESAGRQKSGRARKGNVHLRTILVGAAISAARTKGSYLKDKFHRLKARRGAMRAALAIAHKILVSAYHMLAKGLPYRDLGEAYLDQISQTRTVANLKRRLERLGYHVTLERTTQAA

SEQ ID NO: 293629 - protein, 355 aa, unidentified
MSQTANTAIAVIGIDIGKNSFHVVGHDARGAIVLRQKWSRGQVEARLANIPPCLIGMEACVGAHHLSRKLASLGHDARLMPAKYVRPYSKGQKNDFNDADAIAEAVQRPTMKFVATKTAEQLDLQALHRVRERLVSQRTGIINQIRAFMLERGIAVRQGIGFLRTELPTILATRTDALSPRMLRVIEELAGDWRRLDQRIDGLSGEIEALARQDQACSRLMTVPGIGPIISSAMVAAIGTGDVFSKGRDFGAWLGLVPKQISTGDRTILGKISRRGNRYLRVLFVQAAWVVLVRIKNWERYGLKSWIEAAKRRLHHNVLAIALANKLARIAWAVLAKGRAFELTRTDDAGVVRPA

SEQ ID NO: 293630 - protein, 407 aa, unidentified
MELPAIFQSVVGLDVHQAKISACAMIEQPDGTLTVEHREFGAFKRDRRALAEWVRTLGPDLVVMESTGIYWKSPYAALEQVGIAAWVVNARHVKNVPGRKTDVADAQWLATLARAGLLRASFVPPADIRHLRLIARQRQKLSGMLASEKNRLHKLLADAGIRLNVLVSDIHGQAGRAMVKALIEGQPLPEILDLAGRLRASREELFEALQPEQLSDAHRFVLSEIMAHIEELEARMGRFEQTLLAGLPAWEPQLVLLQTLPGVDRIGAAMLLVEIGTDMASFASAEKLASWVGICPGNNESAGKRKSGKTRKGNAWVRRLLCEFAQAASRSRCGLKEKFKALSIRKGHKKAIVALAHKMLRIIFAMLKNHTPYQDQAVDYEALLVQRNAPRWIKMLAKHGFISPAST

SEQ ID NO: 293631 - protein, 278 aa, unidentified
MAIITTVGLDLAKRYFQVHGVDKQGKVVLKKKLSREGVLSFFVNLPPCLVGMEACGGSHYWAREIGKFGHTVRQISPQFVKPYVKSNKNDANDAEAICEAVSRPSMRFVTTKSIEQQDIQALHRIRDRLVGNRTALANQTRGLLLELGITMPQGIRHLRTMLPIIIEDMDNNQTLLEKDYLSDLYSELVELDAKFAAYDAKLAAICKQSAECMRLLKVPGIGPLSATAIVAAVGQAKEFKNGREFSAWLGLVPRQNSSGDKTKLQGISKRGTSTCGRC

SEQ ID NO: 293632 - protein, 360 aa, unidentified
MIVQGTSVGLDVHALSVVAHAIDEETGKIARARLCPDHREVLGWLHQLRGPVRVTYEAGPTGFGLARAINNSAGMECLVAAPSKLQRPAGDRIKTDAKDAAHLARLLRLGEITAVTVPAPEIEAVRDLVRARDDARADLMRVRHRLSKLLLRQGIVYSGGTPWTCVHEAWRRKQRFADRHLTAAFDHSFDAVLAATAARNRLDEQILDVAASARFADPVNRLGCLRGISALTGLALTVEIGDWSRFTGSSIGAYVGLVPSEFSSGTSRVQGSITKAGNTHVRRLLIEAAWHHRKSYSTSGPSLRARWAKVDPALRARGHAGNRRLYGRWQGFTERKKNPLVANVAVARELSGWCWSLATM

SEQ ID NO: 293633 - protein, 419 aa, unidentified
MNDSTLSVGADVHLKDIVLRAVDQGDGHEVIEPLSVTNNLPGSRSAAETIAQTATRLGYRRIQIGYEATGMLWIPFHHFLSTSPLLEPFDLALVCFNPKLVADFKDALVLRRPKNDERDTFDVAARVRFGEWPDSYVPSPFWQGLRRLTRYRFKLAQNLSREKMRFQSYAFLKWSDWNRVKPFSNLFGATSAALLTEFTAAELRHMTHDQLADLIAQRGRGRFYDPHAKARAVQRSLRSSYPIDPEADEMLTATLATQLDHIRFIQRSQKRLDQHIARAIDPVPNPIISVPGLGPVITGGLLAEIVDVSRFPEDRHLAQHFGITWERRSTGNFVSQNTRLTKVGNPYGRYYFIQGADKVRRYAMEYKAYYWRKYNEVSKYRHKRALVLTARKLIRLVHALLTKNEPYVRPPTPVNAQED

SEQ ID NO: 293634 - protein, 342 aa, unidentified
MYIGIDVHKKSWTVTILTDHVEHKTFNTPPNCEGLITYVQKHFPGATVVCVYEAGFSGFWLCRKLRAAGFDCLVVHPADVPTSDKEHRTKSDRIDSRKLAQTLRARQLHGVWVPTPVQQQKRSLSRYRHVLMRDLRRYKNRIKSFLMYYGIEVPAKYDNSFWTWKYIEWLESLEFDHTAGKLSLQALIKGYRFHYEQILTMARQMRALFRKEEKQMYCLLRTIPGVGPLTSIALIAEIADIGRFSNGRRLASLVGLTPHKEGSGDRVRVRGITQRHNEYLRTMLVEASWQALRQDPALLRYYESLRPKMRPQKIIVKVARKLLNRIGYVMRNKKEYETGIVE

SEQ ID NO: 293635 - protein, 315 aa, unidentified
MNGPEDVVVGIDVAKATLDVAVRPSDDTRQVANEASGIAELVAWLQALKPQLIVVEATGGYEAPLVAELGIARLPVAVVNPRQVRDFARATGRLAKTDRLDAQVLAHFGQAVRPTPRPLPDEQAQALAALVERRRQVVAMRTAEENRLGATRVAAVRARIQAHLTWLESDLSEIDDDLRKRLRTSPLWREQDDLLQSVPGVGPILSLTLLAELPELGQLSHRQIAALVGVAPLNRDSGTLRGRRAVWGGRGAVRTTLYMSTLRATRCNPPIRAFYVRLLAAGKAKKVALVACMHKLLTILNAMLKHHTSWQAQAA

SEQ ID NO: 293636 - protein, 349 aa, unidentified
MIVIGVDSHKRTHTAVAADETGRRIAEITVAATGAGHLSLVRWAARFPDRRFALEDCRHLSRHLSADLLRAGETVIRVWPKLMAGARRSSREPGKSDPIDALAVARAALREPGLPVATLDGPERELRLLVDHREDLVAERTRAQNRLRWHLHELDPGNEPGPRSLDRRGVLAALEARLAEAPGTVARIARDLVRRIRDLTIAIDALGREIAGLVADLAPTLIALPGCGPLTAAKLVGETAGVGRFRSAAAYARHNGSAPLPVWSANTERHRLSRKGNRQLNVALHRIAITQLRIDERGRAYLARRRAAGDSQTEAIRALRRRISDEVYRRMRHDERLRATARATLAPAA

SEQ ID NO: 293637 - protein, 334 aa, unidentified
MRFVGLDIHWRRTSMCILDRNGNQVKQTTIRGGWEKVLAVVADLPKPMAVCYEASCGYGHLHDRLSKLAQRVVVAHPGQLRLIFRAKRKHDRVDAAKLAKLLFLDEVPPVYVPSRQVRSWRQLIEYRRRVIDKRTRSKNGIRTLLRSHGIVSPRGLWTGKGRQWLRRVGLPELAGFQRDLLLEELEQFDRQVEGMTRLLNRMGRGHPGVVLLQTIPGVGPRTGETIVAYMDDPSRFSQARQVGAYFGLVPCQDASAAANRLGHITREGPPTARKLLVEATWQGIRQSESIRRYFERIVGGKPERRKIAVVATAHHLLRCMHAMLRTQQAWREAA

SEQ ID NO: 293638 - protein, 427 aa, unidentified
MIVLGADTHKRSHTIAAVAAGTGELLASQTIQVGRRGFDVLLQWARGLGEERVWALEDCRHVSASLERLLIERGERVLRIPTHLTAKERKRSRERGKSDAIDALNVARAALQEGLGGFPMARLEGPELDLRLLVDHRERLVRHRVELNSTLLWHLHDLWPELQLPGGALFSKKWSTRIGGRLARAEQTMRVRIARDMLRRLRELTATINQLERDITILVEQIAPQLLTEPGFGPLIAAKLVGEIAGAERFATPAKLARVAGVAPIPASSGNTQRHRLDQGGNRQINAALHRVIVTRARCHQPTRDYLERRRREGKSTREAIRCLKTYLARHVWRLLQPPHPDQRELPLSILDIEAAGAGFGAGVSADCGAWNLTLRIFSCAANSPASHLRCTRVILPWTRARSPATGVSGAPSASRSARRTFASATA

SEQ ID NO: 293639 - protein, 482 aa, unidentified
MKKRTIFQQQSQDLMQIFEEAATSKKVLVVAIDYAKKEHTIMFCNGDGHILRRPFGVKNTPEGVDYLIEQVYKTCNYHKIKRKHVFYGGEDCGSYTENFAHCLREHGWLVAGVNAQDAKRQRENIQASTDRLDLLGIARMLINRRGNCLPCQSGVYRNLRTLVRHRRKLVVLTTEERNRMHCVVDQLFPGFLAERNSGLFPFHEPSLRVMEGRFSAAQIKRRKRATLVDLLARAGAQEPAQKAKQLQAYAANVLQPPKEYIATLQTSLTQHVGLYRCLKNNITSLEREMAIWLAQTQGAFLMTVRGIGMVLAAGVTAEIGNPATQKPVNNLVSYAGIIPRVSQTGGSEGDTYVGSVAKRCNRILKDYLVQSASHLGLHGADDLMADHKRRDAAGQHANYGIARRYLRIGMHMMRHCHIYLPQDLRESSTFEARREYYQVTWPYLLDKWKRYDAHEVAFACENPLGQWRDMVQHVYNITLRIK

SEQ ID NO: 293640 - protein, 317 aa, unidentified
MTHHTTLTAGIDTAKDKLDVAVHGLATHITVENRRPGWLRLGAILTEAGVTRIGIEATGGYERGVVEHLRTAGFTVIVLQPLQVKAYARLHLRRAKNDRLDATLIAACTLALDDPSCAPDPRLPPLTDALTFVEQIEEDIARCKTRLEHIVEPRLRRLVMADIKRLQARRTAELKRITRALRCHHDLAQRLDLVQSVPGIGERTALALILRMPELGHISHQQAAALAGLAPFDDDTGQHKGQRHIAGGRSRPRRSLFAAALPAVFRWNPAIGALYRRLTNKGKPHKLALIACARKLLIYANAVLQRASPWSQIQPVG

SEQ ID NO: 293641 - protein, 427 aa, unidentified
MNCNTQNARIAEVDEKTLVVGIDVGSEYHYARAFDNRGVEYSKKAFKFGNTEEGFETFKAWILSICKEQNKNKVIPGMEPTGHYWFNLGKYLQDNGMRPVLVNPFHVKTSKELDDNNPTKNDRKDPKVIAGLVKDGRYTYPYLPTGIYAELRTASNLRYRLQGELTGIENRLARWFSIYFPEYKTVYGSLDAISGLMVLKAAPLPEDIVALGVDGVNQIWREAKMRAVGKKRAQTLVAAAEHSIGTTEGLTAARYEIRLLLEDYESRSEKLKEVMDLIEELVHQIPMADKLLEIKGIGIRTVSGFLAEIGDLGRFSDPKQLQKLAGYALKENSSGKHKGQSKINRRGRKRLRHLLFEAAISLVGKNQEFKAIHHYYTTRKDNPLKKMQSLIAVACKLIRVFYAILVKGVEYDPKKMASDIRRPALAA

SEQ ID NO: 293642 - protein, 316 aa, unidentified
MEAPVAGIDVSKDKLVVYFQGKYYEFPNDRQGYEEIIKILPKGCKVGIESTGIYHINLAKYLMGEYDVRIINPFILKKFKDFRGKKSDKNDAKKLAEIVVSMGSEFTTSDARELTSQWDFVTRSIARVKNRLRRDLILLGYKDSLSKKNLEEVLRGGDSIVLVEVRFLLEELERLEVRKREIEEKLEDLVPKDSLIFTIPGIGKTLGCIILARVGDIRRFSDKKKFVAYCGLDPVIESSGKSVVSKGISKRGDAVLRRAFYLAALTAIRVNPVIKRFYEEHKGKLKGKKLIIACARKLAVITWAVLYYNKPFDASE

SEQ ID NO: 293643 - protein, 341 aa, unidentified
MKRDISVVGIDIAKRVFHLVGMDERGKIVMRKRCSRGEVLPLLANLGPTTIGMEACGGAHYWARCLREQGHEVKLMAPQFVKPYVKSNKNDMRDAEAIAEAVTRPSMRFVPVKDVAQQDIQALHRVRERLVTARTALVNEMRGLLAEYGMVLPQGLAKFRQALMSTLEAEHTKLTPLGQELFHKLFGELGKLDAELAYYQDKLEALAQAHPVCQRLLTIPGIGPLTATALIAAVGDAGVFKNGRQFAAWLGLVPKQYSTGGQTRLLGISKRGDSYIRKLLIHGARATLRWARTKADRRSQWIRGLLDRRGWNRTAVAVANKNARIVWALLSRGGIYEANAS

SEQ ID NO: 293644 - protein, 358 aa, unidentified
MLDQNQACYVGIDIHRYEHTAVAADRFEEEKACLSFANTPEGIKAFLLWLDKLVKPNQDCVIGMEGANGNGRQLCSFLIPRYQEIYEVNPIQTKQRRDHHTSKDKSDPIDAGLIVEVLTRRLDKLPKITKQDRSAVLRDREQLLLFHEDITRQTTRLKNQLHQLFHEENSQYHLTKGTPFAKKSLDRWQRYAEYHSHRCQNLNCFVIKKKIKQLKQLMETRKQIDEKINLSFDQVPEKNLLTLPGAGYLTAAKITVAVKGVKRFKNLDAFVKYAGIAPIARSSGKSQRHKQDKAGNRRLNTAIYTIALTQIRCLPVAKAYFAKKVREGKSKKHALRCVMKRTACIVYGMLKNKEDYRN

SEQ ID NO: 293645 - protein, 416 aa, unidentified
MGKQRDKACGADIHKNTIVATILSLAGAKNQAEFGTTLPELLKFKAWLIDDGCGVVAMESTGTYWIPIYSVLEDSIEVLVANPYMIKHIPGKKTDLNDSEWLAELCLKGLITPSRIFPKEDRVLRNLTRAHEGLVKIRTQLKNKIHRDLSSSHIKLSSVITDIFGKSGMHIMQGLLEGQPIDQIIEGIPSGRVKKNADKIKASIENNLDSSQIFLIQSNLELISSIQDKIDRIDADLSRKFIAKLNDLKIAMSIPGIRFTSAATILAEIGDYRNFSSPEKLASYFGIVPFVNQSAGNLHTGCITKHGSKHLRWIMVQVARAASKKIGSKLRKFYLRVRARRGDNVATVALARKILCILYHLLTNQEMYEEPGVAKRTRSVWADQPSSQNELTAQEMIDILRRSGYEVRKIDRGACG

SEQ ID NO: 293646 - protein, 391 aa, unidentified
MINIGIDVGKFKHCATVLDDSTGEVLIKPFFLTNNRKGFDLLYSKTKQFIHRKHSVGMEDTGHYMINLTNYLLDKKFTVKYINPRATFLRRKELGISAKNDRKDALLIAEMLSEKRFWRSISVRSIENSKFRDITRLYHQLQEQQNQDMNRLQRALDIVFPEVNSLSWTRYSKAYMKFLSTYPSASSIALEDIRILRKALKTEGRGRQCKVTAEEIRELAKNSVGEDNISIDLEVTSIIAIINTREEQIRMLEKKIEEFSHKLNSPIISIPGISHISGMTILAEIGDINQFQNTGNLISFAGMDPLVYQSGKYDAAHMPISKHGSRYMRKALYQAVFTVCKYSPTFHDYYTKKRNQGKSHRCAQGHCARKLLRVIYKLLSTNSLYDQNHIQ

SEQ ID NO: 293647 - protein, 317 aa, unidentified
MTFAGIDVSKTHLDLALVSNSPKPTRLRFPNSPEGRQALLAALAHHNPAWVALEPTSAYHLPLLKLLAENRLQVALVNPYHLAAFRKAKGERQKTDRQDALLLARYAQVYHEDLRAYTLPPETLQTLKALVGYREDLAGREQAILNQMEAAEWAGSKEVLALLQKELACVKGLLGEVEARIQALLATLPEAEVLMALPGVGPQVAAAVLALLPPELWGRAKRAASYAGLIPEREESGKSVERGRLSRKGPPLLRRKLYMGALVAVRHDPEMRAFYHRLLSRGKTKKQALLAVAHKLLRRMMGRLREYYAGQPAQGVA

SEQ ID NO: 293648 - protein, 373 aa, unidentified
MSFTSDTILVALELSNSLWLVGTRQAGARVSQMHRVSAGDTAMLMRLLDELQASGRGQGTPSPIAVCFEAGRDGFWLHRLLTAQGITAYVVEPTSILVNRRAKRAKTDRLDAEGMLRVLAAYIAGDTQICSMVQVPTPDEEDGKRVHREREYLVQEQTRIENRISALLVTQGIRSRPSLRSWERDMALLETGDGRKLPQHLASELNRLRRRLVLVRELISELDTERDEHLIATSGDAITTKVTALSEIYGVGDNFAAVLTREVFYRHFVNRKQLASYVGLAPMPHQSGNVDKDRRIGRAGNARARKTLVQAAWLWLRYQPKSELAAWFHKRVGDLKGRARRIAIVAMARKLLIALWRYTESGEIPAGAVFRSA

SEQ ID NO: 293649 - protein, 341 aa, unidentified
MYYIGLDVHKKTISYCVKDVSGQVHREGKIGTTRNELDCWVGTLPQPRIMAMEATIFTGWIYDYLLPHAEQVKVAHPLMLRAIAAAKKKNDRIDAGKIADCLRCDFLPECHMASTEIRDRRRTLRYRHLLVRQMVQMKNRISGLLMETGVTYNKQRLHKRGYFGELLSSNEEVQENIRPLLRLSRETIVRCQRTEYALVSSLQRDPLLAERLRRLRTVPGVGPITALTWALEVGDVSRFRSVKQAISYCGLCGEEKSSADKVLRTPISKQRNKHIQRVLVEAAKLAPRQNHELALIHERENQKGNRNRATLAVARKMVAYLLAVDRREREFVPADGRGKAA

SEQ ID NO: 293650 - protein, 348 aa, unidentified
MLIIGCDLHSRYQVIAMLDTETGEVVTRRLQHENGEAKTFYASLPKLSLVGIEATGYTQWFERLLAELGHELWVGDAAEIRARAVRRQKTDTRDAEHLLDLLSTQRFPRLWVPSPQERDGRQLLKHRNKLVRMQTSVRNQLHFLAMSQGVCRKKKLWSARGRAELEGLSLGPWASQRRKELLELLDQLGPRIAELDQAVKTEAERRPEAVELMKHKGVGPVTALAFVLTLGPVERFRHSRQVVSYLGLNPRENSSGGRQRLGAISKQGNSMLRWLLVEAAQSAARFDPELRRQYQRLKFRRGGQIAKVAIARQLAVRLYWRLRSPEAPPVRMPGSPSSGVVPSTGSRE

SEQ ID NO: 293651 - protein, 412 aa, unidentified
MEILFKCCCGLDIHKKTIVACLLRIDEHGEFSQQVRTLGTTTEELLRLCDWLVEAGCEAAAMESTGVYWKPVYNVLEGQMELLVVNAQHIKALPGRKTDVKDAEWIAELLQHGLLKSSFIPPQPQRDWRDLTRYRTSLVRERARLVNRLQKVLEDANLKLAGVATDVMGVSGRAILEALLSGQTDTQQLAELAKGRLRKKIPQLKQALSGRVREHHRFMLAEQLSHIDYVDEAIERLNEEIAQRLRPFEPELQLLDTIPGINRRIAENLAAEVGLDMNRFPSGAHLASWAAMCPGHHESAGKRHSGKTRKGDGWLKLTLIEAAHGAARTKDTYLSSQYHRLAGRRGKKRALVAVGHSLLVIVYYVLKRQQAYFDLGSNYFEELHRERLQRNLIRRLEKLGYQVTLKALQPAA

SEQ ID NO: 293652 - protein, 399 aa, unidentified
MSERKSLELRVSVDVGSRRHSVAVGLSDGQVLEEFEITHRREGFQEFFSRIEKHQKAQGCKVAVAMEGYNGYARPLDSLVRQRGYRLYNINNLKLARFKEIFPGAAKKDRIDARKGLELFQLRDHLPLAKDVLQEVTGTPKENEILKRLTRRRRRLVNERVRVVNNLQADLQAVCPGLLEITTEASNQWFLNFVISGDTILQLARLRKSTLLKIPAVGRKYASLIQQWQKRAHFSEEAQWVSEMIQEDARRCLELDERIKTLETKIKEVAKSSKIANTLLSIPGFGAVCTSELAGEIGTVERFSKEGSLALYLGMSMLDNSSGKYQGTKQPKHVNTRAKAAMMTAVDRHRKYVPQSQKYYEKKRTEGKTHNQAIRALGRHLCRIIYQMLKEQREYRVRC

SEQ ID NO: 293653 - protein, 337 aa, unidentified
MAFIGVDLHTNSFTICRLDDDGSEAFETFPLSASALQGFCLSLDANDEIAVEATGNTAWFCNEIRPCVGRVVVVNPRQFQVIRKSVNKTDKNDARALAFFLSKDMLPESRLKSTAETELSSLVATRDVFVKQRTMLLNKIHAMFVRRGTKLKKEGLASKKRLCALDVSQFTALEQVELTALRNQALGLTETLAELDKAIEAAGADLPGHDGISSIKGIGPRSAAILLAGIGNIDDFESADKLAAYVGIVPKVSQSNETDNRGRITKRGNKLMRTTLVQCTLVAIRYSGYLNAFYQRIKERRGAGKAIIATARKLLSIIYDTLKNGWVFEDFTTFKVK

SEQ ID NO: 293654 - protein, 344 aa, unidentified
MEHFAGLDVSVKDTSVCIVDDTGKIVREVKVASEPAALLAVLKNPAYRFKRIGLEAGPLSQWLFSALAESGLPVICVETRHMRAVLKAQINKTDRNDARGMAQMMRVGLYRPVHVKTLRSQKLRMLLTHRQLLQSKAIAVENDLRGTLRNFGLKVGMVGKVRFEARIRELVEHFPDLTVLVEPMLIVRRVLREQIAILHRRLLAIVRDDEVCRRLMTTPGVGPVVSLTYRATVDVPARFRKSKSVGAVFGLTCAKYQSGEVDWSGRISRCGDEMMRVMLYEAAQAMLRSKKWSWLKAWAMQIARRRGMKKAIVALARRLAVIMHRIWVDGTEFRWTREQATATA

SEQ ID NO: 293655 - protein, 421 aa, unidentified
MLILYQRCAAIDIGKDVIAVAVRLPGDGAEHRQTIKQTFKTFYGVLKHAARWLTEQQVTHVAMEATGIYSMPVYHALIEHGGFEKVLVCNAGHVRNVPGRKTDLSDAEWLVHLLECGLLRGSFIPPAQIKAARDVIRYRTKLTESRTSELQRLGNVLQDAGIKVDSVASTITTQSVRAMVEALIDGERRPVLLAELAKGRMRARIPDLQRALEGRFDDHHALMCRLHLDHLDHLEEMIARLDTQIQDMMQPFRAQRELLTTIAGIGPFAAAAIISEAGADIGETFPSAGHFASWIGVCPGNHESAGKRHSGKPRKGNQHLQHVLVECAWAASRTPGYLQSLYRWHVRKFGGSRNPTAKNKAIVAVAHKLAIIIWHVLATGKPYTDLGADYLDRRIDPAKETRRLIARLQALGHTVTIEPAA

SEQ ID NO: 293656 - protein, 464 aa, unidentified
MAVLNVGIDLGVTAKHHAEVINSEGIRVCSSVTFPGTKEGFDMVSKHALKHVAEGTKLRFICEPTSMSWFPLAVYAKRYGYEMMRVKAQKSHALRKYYSKHSKSDKLDARTLAMMPIVDRESLEEVYLPDKVTNALDRRCRQREKIAKEIASIKTRVKSLYQWVMPGLTDCFEDPYGERAKAFYKKYSNPFRVKRLGISRLRKVLDKAGRQQPSDGLAKRVYEAAIRGSALYDHSDEYIDFDELQKEIECELHLLESHEKVQKRVDEAINRLYVCVHPNKNIETIPGIGETLGPVFLGIIGNSDRFSSQSKARSYSGMIPKQNDSGESSKKGLNITKEGPSRYRRALFLASDTGRQWDPQLAKVYYDQMVNKGNCHTQAVCAVSTHMVGRIVRVLKEKRPYELRDLEGRPITKKEANILITREFTVPEEVRKRTRSRRIKKGYKRDQIQGIAQMQSSRSSQYPS

SEQ ID NO: 293657 - protein, 344 aa, unidentified
MERYLGIDPHRDSCTLSLVSAQGKKTKQFVVPTEGSALVRSVRDLRGELHVCVEEGEWSEWLSEILSPFVERLVVCQPQKRRGPKSDASDSRELAERLRTNRTGPPVYKPPRPWARLREAVRLESKLTQDVTRTKLRLNSLYRRRGLASPRGEIYSPRHRGAWMAKLPAASRPSAEIWGEEIDALGELQCKAKSQMLEAARTFPIWRTLQTAPGIGEKRAAILVATVVTPHRFRNKRLFWSYCGLGVVTRTSSDWVQHTGQWVRAPVVQTRGLNRACNRPLKAVFKGASMTVRRMLPPNPLLDHYDRMLLAGTKPNLAQLTMARKIAAIVLAMWKTESEYKIMS

SEQ ID NO: 293658 - protein, 354 aa, unidentified
MSQKLNSEITVIGIDIGKNSFHIVGQDRRGALLLRQKWSRGQVEARLANLPPCLIGMEACVGAHHLSRKLKALGHNARLMPAKYVRPYSKGEKNDYRDAEAIAEAVQRPTMKFVATKTADQLDLQALHRVRERLVSQRTGIINQIRAFLLERGIAVRQGLHFLRAELPGILAKCPDVLSPRMVHLIEDLATDWRRLDERIEGLSDEIGALARHDKGCERLMTVPGIGPIISSAIVAAIGTGDVFSKGRDFGAWLGLVPKQISTGDRTILGPISRRGNRYLRALFVQAAWVVLVKIKPEGWERYGLRSWIEAAKQRLHHNVLAIALANKLARIAWAVLHKGRAFECVKTNASRAA

SEQ ID NO: 293659 - protein, 411 aa, unidentified
MENILARCAGLDVHKESVEACVRRIEANGRVHSETRHWGTMTRDLVEMADWLAAEEVTNVAMESTGVYWKPIFNILESRFTVLLVNARHLKQVPGRKSDVRNCQWIAQLLQCGLLKGSFIPPRAQRELRDLTRHRTQLVEEKTRTINRIQKVLEDANIKLASVATDVMGVSGRAMIQRLIEGETNPCKLADLAQRQLRGKIPELEKALEGKLTDHHRFLLMMLWKELAQQEELLAELDAKIEEHTRPFAAEIVRLDAIPGVDHRVAEVLLAEVGAEMKPFPSDEHLSSWAGMCPGNEESAGKRRRRRITPGNRWLKKTLAQAGWAASHTKNTYLASQYRRLAGHRGNKRALIAVGHSILVIFYHMIRTGSGYADLGVDFFDRREPERLTRYYVKRLERLGHKVTLATSVAA

SEQ ID NO: 293660 - protein, 465 aa, unidentified
MTKRGQSQARHNRNRKVRRNLTVINPDAAGIDVGASVHYVAVPPERDEQPVRSFGAFTEDLHQLAQWLVQCGVRTVAMESTGVYWIPLYQILEDYGLKVKLVNARHVKHVPGRKSDVQDCQWLQQLESFGLLSGSFRPEAKICVLRSYMRQRQMLISNASRHIQQMQKALTQMNLKLHQVISDLSGQTGMRIVRAILQGERDRLKLAELKDPRIKSSVGTIAKSLEGDYRAEHLFALRQAVELYDYHQQKIAECDQEILKEMQSLESRAEPGSVPPPSLKRKGRSRHNLIPFDSRAELYRILGVDLTRIDGLNEATVQLILSELGLDLCKKWPTEAQFASWLGLCPNNEISGGKVLRRGTRRVINRVANALRMCAESLLNSKSALGAYARRMRAKRDSKIAITATAHKLARLIYRTLKFGQEYSDIGQAQYEAQYRSNVVKSLQKRARQLGFQLVDLHHASVVVP

SEQ ID NO: 293661 - protein, 395 aa, unidentified
MFIVGIDIAKRSHEAIIIAEDGQVVRKAFSFRNNCTGYNLLLEQVRRLTLVKSQIVFAMESTAHYWLALYARLLKDGYTVMVLNPIQSHSLRELYIRKAKTDARDSLIIADLVRFGRCKASNVPQDKILALRELCRSRAYRVDMAADLKRKLIALLDRIFPEYESLFDSVFSKASIAVLRKYSTPQKVKNAHLGELTDILMERSNGHFGEWKAHQLKEAACSSFGIDDSDGVYSMLLGMFLEQILSLTAQADSLEKQISVFFQEFNNPLTSIPGVGTVLAATILSEIGDITRFSSAAKLLAYAGLDPSVKQSGEFKSNQNRMSKRGSPYLRRAIWLASTVAVHRDPMFQTYYEKKISEGLHYMNVIGHVSRKMTTVIFAVLRDGQPYQPILQSAG

SEQ ID NO: 293662 - protein, 475 aa, unidentified
MGRDSGKQKKENMKALSPEQEAGLKQKAEEISKGLQSYTWRDLETGGKFTHNDKLTFIRDDMLIVGCDIGSERHYARAIDAKGRELSKGAYSFENSAEGFQSAKDWALCLAAQHGKNQIVLGVEPTGHYWFSLAAWMIAKGISVVQVNPYAVKQTKELADNSQAKNDAKDPKLIAELVKNGNYGVPYLPEDVYAELRVLCTLRDQLMEDRVRNMNRLHREMKIVFPEYREAFGKIDGIFTLSVLANAPLPSELVALGEDGVKDIWHAEKLRGGGYKRAKEIVRLAGVSAGLTQGAEARKIAIVSFVGKVMELAAELEEIEAQIALKCREIPRADNILEIHGLGAATVSGILAEMGDIDRFDAAKEIQKLSGLGLVACSSGKHQGQTKISHRGRKRLRYWLFQGALSVVSHNEAFRQIHEYYTTRAENPLKKMQSITVIACKLLRIIFTILKKGVRFDPDKMLSDITHPAPLDAAA

SEQ ID NO: 293663 - protein, 344 aa, unidentified
MSKHSIRAGDVAGLLVRLAQLKEKARGRTGRDFPIIAIQEAGLDGFWIHRVLQSEGIESHVVDAASILTSRRRRRAKTDGIDGETLVRTLLAYKRGEPRVCAMVKAPTPEEEDRRRICRERKTLVGERVEHVNRIKGLLFAQGVSDYEPLKRNRRARLEELKTGDGRPLPAHLKAQISRELDRLELVLPQLKAVEAERDALLKPVSEGCPTPVAMLAQLKGMGPEFTAILWSEGLFRSFSNRRQLAAYAGLAPTPWQSGSVAHEQGVSKAGNPRLRTTMIQLAWLWLRHQPTSALSVWFQERVQSNGGKMRKTTIVALARKLLVALWKYSTSGVVIEGAVMKTI

SEQ ID NO: 293664 - protein, 388 aa, unidentified
MIYVGIDIAKLNHFAAASSSDGEILIEPFKFTNDYDGFYLLLSNLAPLDQNSIIIGLESTAHYGDNLVRFLISKGFKVCVLNPIQTSSMRKNNVRKTKTDKVDTFVIAKTLMMQDSLRFMTLKDLDYIELKELSRFRQKLVKQRTRLKIQLTSYVDQVFPELQYFFKSGLHQHSVYALLKEAPTPAVIASMHMTHLAHLLEVASHGHFGKEKARELRVLAQKSVGVNDSSLSIQITHTIEQIELLDSQLFHTELEMANLVTCLHSVIMTIPGIGFINGGMILGEIGDIHRFSEPKKLLAFAGLDPSVHQSGNFQAQRTRMSKRGSRVLRYALINAAHNVVKNNATFKAYYDAKRAEGRTHYNTLGHCAGKLVRVIWKMLTDEVEFNLE

SEQ ID NO: 293665 - protein, 369 aa, unidentified
MSTSVVYVGLDVHKESITIAVAREGREPAETLKTIPYDGVRLRKTLSMLCKNGEVLKVCYEAGPTGFGLCRRLREKGTDCIVVAPSLVPGKAGDRIKTDPRDARRLAHFLRSGDLTEVYVPDEAVEAIRDLERARDDAKCAERVARHQLSKFLLRQDRHWEGTAWTGKHRDWIRVQKFAHPAQQRVLEDYLKTVEDLAERVEKLTAQVEELVQETALAPLVKALQAFRGISVVSAVTIAAEAGDLRRFATASQFMSYVGLVPSEDSSGKRQCRGGITRCGNRHLRRILVETAWHYRHPPRLSKELRRRNQGIAVRVQRIAWEAQKRLNKRLYHLVHAGKNVNKAITALARELAGFIWAVGQEEKLLEAT

SEQ ID NO: 293666 - protein, 377 aa, unidentified
MPDVISRAPADVRRWVALDVHKLSIVAAVLPPQGGTPEIARIETTEKAIRRFIGKLGGPDGLAVAYEAGPGGFALWRLLSSMGVACDVIAPSLIPIRAGDRVKTDRRDAKKLVTLLRAGLLRFCEPPTPETEGLRDLLRCRDDIRCARTAARHRVVKQLLRHHRIYRDGKKAWTKTHIAWVRSQRLDDPLAQLALEQMMTHLDAIDSQLTTLDAGLEQIAGDDRWATQVGALRGFRGISTLTALGLIAEIGDFARFSHPRELASWLGITPAEYSSGESQHRGHITKTGNRHARRLLIEAAWHYRHAPRRPATGPEPSPRAWQAQIRLHHRHRHLTHAGKRSTVVTVAVARELAAFLWAELTEQPARPELLTQEAATA

SEQ ID NO: 293667 - protein, 330 aa, unidentified
MSESNMTAPPSQLCVGIDTGKQWLDVALSDGRSLKRRANTRDGHLALVAELKALGVARAGIEATGGYEAELCRVLRSADFAVQVFQPQQVRAYAMFRLQRAKSDSIDARIIARCTAEMKELRAPPDPRLSGFAGHLTMIEQIEEDIARTKTRCERAVGERATAHHKAEIKRLTGLRREELKLIETAIRQHADLARNLDLVESIDGVGRRTAIAIIVRMPELGRLSREKAASLLGVAPFIRQSGRFQGERHVEGGRARPRTALFACAQAAIKWNPQLANFYKRLRDKGKHYSCAIMACTRKLVIYINTVLERQTPWQSECQEIAGAINSSK

SEQ ID NO: 293668 - protein, 376 aa, unidentified
MKNLIFVGLDVHAETIAVAVAEADGSVRSLGVIPNRAESVGRMIRKVGKPEQLRVCYEAGPTGYVLYWQLSELGVKCEVLAPTLIPVKAGDRIKTDRRDAEKLARCYRAGDLTAVWVPDAAHEALRDLVRARLAAKRDQLRARHRLGKFLLRHGRRTPEAMSAWTDKHLAWIKTVHFEHSAQETTLLDYLHEVEHVAERLVRLERSIDTTIETLPVKLRAVIEALQSLRGIAQISAVTIMAEVGELSRFEHPRQLMGYSGALSREHSSGPRVCRGAISKAGNAHLRRIVIEAAWAYRHRPAVGTTLAARQRRSDPALIATAWKAQHRLHQRYLRLIGRGKSKQQTVTAVGRELLGFIWDIGVQVERQTQLPLKQVV

SEQ ID NO: 293669 - protein, 344 aa, unidentified
MAEVSTIGLDIAKSVFQIHGVDVEGAVVIRKRVNRAKVLEFFAALPSCLVGIEACPTAHHWSRRLQALGHTVRLMPPSYVKAYLKRSKNDANDAAAICEAVMRPSMRFVATKSEQQQSILMLHRSRQLLVRQRTMLSNAIRGHMAEFGIVSAKGRNGTAELLAILANEQDDRFPIAARFSLDVLARQYAVLTTEISIIEKRIHAWHRTCEESRRLQEIPGVGPIVATALIAEVSDWKAFSSGRGLAAWIGLVPRQHSTGGKERLGGISKQGNRHLRWLLVAGAMAVIRYARKHGTKRLWLIRLMGRRPIKVAAVALANKIARMAWAMMVRGERFKEQNLLPAVA

SEQ ID NO: 293670 - protein, 452 aa, unidentified
MAKKKKKKTNETISMPVLNSNAAGIDLGSRSHFVCVSQDNVKEFRSHTDGLHEIAQHLTSHNVKTVALESTGFYWQQLFALLQDYDFEVILVNARHVKNVKGHKTDVVDSKWLQLLHSIGLLSNSFQPDNFTKELQIYTRMRKSLIEESSRYTNKMYKSLVLMNIHLKTVLADMTGQSGIKVIEAILDGEKDECNLEKLVGRNVKASRDEIVKALKGNFKDEYLFELSVNYNSYKLVWEQIKETDNQIEILLVKWRNEKGNTELRKKHKKNKRVPRQKNDPKFDIETVAYEMSNGVDLTKIEGVKLSTVLVMMSETGFDIADDFKSAKHFASWLGYAPNRKITGGKVMSSHTPKVKNPLSVAIRMAANAAGNSQSRLGDFFRRISYRKGRVVAITATARKIAVIIYNMLKNKTEYSYQYEKDEEQRMRKIQIKQIKKKILKFNIEKKELELA

SEQ ID NO: 293671 - protein, 319 aa, unidentified
MTQNDLVVAGIDVAKDKVDVCIRSLSLRRPFASTVEGRRELVSLLRRKKVGKAVMEASGGYEREWAKALRDARIEVRIVDPKRVRSFARSAGRLAKNDTIDAEMIAWFAETFGEAPGQAHDAARETLAQIVNARQGLLDLQTKLQNRGEHAGPEPVQKMHARLLKKIVAEVSKLEAVIAAMIKATPHFAELAEIIGSVPGLARTTSAGLIARMPELGHVSNKVAPALLGTAPYDDDSGRRRGERHIKGGRRKVRNLFYMACLGAATQHNPVLKAFYCRLIAKGKEPKVALVACMRKLIVILNTMIARRQKWDTNLHVLG

SEQ ID NO: 293672 - protein, 342 aa, unidentified
MKIHTIGIDLGKTKFHIVGLNEHGEVVVRKQVSRVQLLRFTANRKVHLIGMEACGGSHFLGRALEEQGHVVRLIPAQYVKPYVKTNKSDYIDAEAIAEAVGRPTMRFVPIKSDDQLDLQSLHRVRERWVSRRTALINQIRSLLLERGITVRKGRRYIEAALPGILENADAKLSGALRLLLAQLKLELDQMAKRLEEADALIEQTALENEACRRLVKIPGLGPVTATAVIAAIGNGAAFRKGREFAAWMGVVPREHSTGGKQKLLGISKRGNRYLRKLFVQCARAVLQQKAKQTPGLRAWLEKLTSRTHRNVAAVALANKLARMAWAVLATGEAYRAPLAAAA

SEQ ID NO: 293673 - protein, 404 aa, unidentified
MNAIGVDVSKGKSMVAVMRPMGEIVHKPFELIHDDFNLKCFAVEVARMGSDTRVIMEATGRYHEPVAAVLNALGLYVCILNPIVIKQSGAGSVRKVKSDKKDALKIAKYGLDNWNNLREHTPMDTTRQQLKLFSRQYDIHMKTATALQNNLISLLDKTFPGANDIFDSPARSDGHQKWVDFVMEFWHCGIIAEISQGEFAERYKEWCRQYGYNFSQAKANDVYNASCGHFTTLPKNENTKLLITSAVEGLMAVMKQRAAIKNEVIRLSKLLPEYDCVMEMYGVGEITAAQLMAEIGDTRNFANRGAIVAFAGIDPEVNQSGSQNRESNKSSKRGSPHLRKTLFQVVSTYLKRSPADEAVYQFLDKKRREGKPYYVYMTAAANKFLRIYHARVKNFLNDLDNNQD

SEQ ID NO: 293674 - protein, 370 aa, unidentified
MDKDTAIYVGLDVHKESVAMSVAEAGRAPARFVGTYAHDAPRLIKALNKLGTPDQLHVVYEAGPTGYGLQRALKGHGYVCEVIAPSQMPRRAGDRIKTDRRDSLRLAECSRAGELHAVWIPDEQHEAVRDLFRAREDAVRARMKVRQQLKGFLLRHGVRYPGKTSWTKTFYQWLGSMNFEHQASQTAFTEYWLAVQAGDEHVKRLDKALQASVQGWRFEPVVDALQALRGIDVTSAIGLVVEIGDLSRFDHPRKLMGYLGLVPSQHSSGDKISRGSITKTGNAHARRLLTEAAWNYRFRARICRQAQQRQQALPEHIRSMAWSAQVRLTQRFAALDKRGVQRNKVCVAVARELAGFVWAIGTEANKAVMQ

SEQ ID NO: 293675 - protein, 343 aa, unidentified
MKITQIGIDLAKDVFQVHGVDANGKVTLRKKLTRAQMLTQFVNLDPCLIGMEACGGAHYWARKLTQQGHTVKLMAAQFVKPYVKSNKNDARDAEAICEAVGRPSMRFVPIKKETQQATLSLHRVRESFVSARTAQSNQIRGLLSEFGFTLPKGLTFIFTGLPQIIDDTKNGLAEPMRVLLGRLYQFLQELDRQVAELEKEIKLENRQNETCKRLEKIPGIGPISASAIVATIGEDVDHFKSGREMAAFLGLVPKQCSSGGKTTLLGISKRGDGYLRKLLVHGARAVLSRAQPEGSWSERLLQRRPFNVATVAVANKNARIIWALLKHKEREFSRDYTQAKACA

SEQ ID NO: 293676 - protein, 407 aa, unidentified
MLVQHAVPVSPLTVVVAIDVGKNEFAVSVTTGARRRLLKPRLGCPMTAPSVREVVGRISRLLPSGAVVKVGIEAAGHYHLPLLAAAVWPTGWELLELNPAHVTEQRRVLGKRTIKTDVIDLEAMTELLLAGRGLPVTATEVVLVELTAWSAHRTRRIEIRSGLKNQLLGQLDRSFPGLTLALPDVLGTKVGRLVAAEFADPTRLVALGSSRLIRFGATRGVQIRKPIADKLLAAARDALPMPDAAIARQVLAADLALASDLDRQVAQAEVELARLLPLSPFRTLTSVPGWAVVRAGNYAGALGDPARFGNPRQVYRSAGLNPIQYESAGKRHDTRISREGSVELRRALIDLGMGLWLNEPAATARAVELRARGKKGGVIACAMAHRANRIAFAMVRDQAVYDPSRWT

SEQ ID NO: 293677 - protein, 313 aa, unidentified
MEKNLFVGIDVSKDILDVGIIPTEEVKRFTNDDNGCRELVSWLGEFSPSLIVLESTGGLEMQAVGVLSSAGLPVVIVNPRQVRNFARALGKLAKTDTIDSLVIARFSQAVQPKVRPLKDDQTLELKALVTRRKQLSDMLVAEQNRLKGSHHRVKKSIAATISWLKSQIEDTDRDISESISNNDIWRDKEEILTSVKGVGPVLSASLLCLLPELGTLCRKKISALVGVCPYNRDSGHYKGKRSISGGRADIRSVLYMATLSATRYNPIIKAFFERLKTAGKPPKVAIVACMRKLLTTLNAMLKTKQKWNPAMVS

SEQ ID NO: 293678 - protein, 420 aa, unidentified
MVYLERGYNLKELPWSKTVSNSFLFKEACMILVGVDVAKDKHDCYIMTSEGEVLFKSFTIANNMEGFNQLYEKILSVIDNFDNVKIGLEATGHYSYNILGYLLDKGLTPYVINPLHSNLYRKSLSLRKTKTDKVDSRIIASMLMSDVSLKPYSNTLYHNEELKSLTRYRFTKVQERAKLKISISRLVTILFPELEKLVPTLQMNSIYALLYEFPSAHAISKAHLTRLTNLLNTTSKGHYTKDKAVLIREAAKNSIGSNMPAKSLELKHTIKLIKELTSEINEIEEEIKIIMNKINSPILTIPGICLSTGAQILAEIGDFKNFSSPDKLLAFAGLSPSTYQSGNMYSSNAKMEKRGSKYLRFALFNAAIYVSYWEPTFSQYLKKKRVEGKHYYVAISHVVKKLVRVIFHLEKTNERYSTVV

SEQ ID NO: 293679 - protein, 408 aa, unidentified
MEAIIERCAGLDVHQESVVACAICGSLDRRPTITVAAYGTTTAELLALVDWLEALEITHVAMESTGVYWKPVWNLLEGHGFTLILANAQRIKNVPGRKTDMKDAEWIARLLRSGLIESSFVPPTDVRDLRDLTRYRKKLRQDATSEKNRIHKVLQNANIKLSSYMSDLFGVSGRAILTSLIGGEVITETALELLVHGRLRSKLPSLVEALNGRLRRHHRDMIRFSWDHLCFLEQQIVTVEREIESHLQAYREKVDLLSTLPGVKPTAAAAILAEIGPDVKQFPSAGQLASWAGVSPGVYQSAGKVKRVRTLPGNAMLKATLCECAWAASMSRDTRLSACYWRLVKRMGKKKALIALAHTMLRIIYAMLRDNKSYEEFGPDFGTKKRLNHEDRMVKQLKALGYTVSKVA

SEQ ID NO: 293680 - protein, 376 aa, unidentified
MKRIVMCGADVHDNSMTTQIAVNKERPETRVFPYTTNGRRNLLKYLKLVARKHGADRVVVAYEASSLGFGFCDECTDAGIECYVLAPTKMPKSEEDRKRKTDKWDAQKILEQLRAHILAGNELAKVWIPDLETRDDREVIRMRLALGQKLTSAKTQVRTLLKRNGMEKPKDVGKAWTVSDRHWLHWLTEPESKLADGACVGLASLLRQIAFLEEEIKELDKEIEVLADTERYKAAAEALVEQLKGVGLLTAMVFLTEMGDLRRFKNRKKVGAFIGLVPSSNESGEHNDRKGHITRQGPARVRKVLCQASWARIGSDVDESKVHARIVKKNPKKKKIATVACMRRLGVRMWHIGMQAQIEAGVYETKQLPCSKRIAV

SEQ ID NO: 293681 - protein, 408 aa, unidentified
MTVVGIDVSKGKSMVAAMKPGGELVAAPYEVRHSDIELSHLALDVLCMEPDTRVVMEATGRYHEPVAALLHSEGIFVSILNPLLIKQSGAGSLRKVKSDPKDALKIAKYGLDNWSTLLEYTPMEAIRQQLKLCARQCDLYNKNIVMLTNNLISLSDKTFPGVNELFSSPEKADGHLKWVDFYRRFWHCDCINRMSPDAFEERYKKWCKSKGYHFSTDAADALYAASCRPYTTLPRDNNAKLLVTVAADQLIALRENQSKLEAEMLNLCKQLPEYETVMAMYGVGKSTGPHLMAELGDVRRFPHRSSIVAFAGVDPGVVGSGKMQLSSVTTSKRGSPQLRKALFQVVSTYVKCKPENEAVYQFYAKKRDEGKPFFVCTTAAANKFLRIYYARVKECLNAVESATQVEEG

SEQ ID NO: 293682 - protein, 404 aa, unidentified
MAVMIGIDPHKGSHTAAALDETEGLLGGLRVRSGAAQLEHLVTWAAQWPERTWAIEGAGGLGYLLAQQLVSAGEHVVDVQPKLAARVRLLATSSTNKNDPNDARSVAVAALRSPEATEVRAEDHAAVMKLWAKRRHDLVSARTQVVCRLHAVLCELVPGGISSQLYASKAAKMLDQFEPHNAVAAARQELGLQMLEDLRRIDEQMRETKRRIAQVVAASKTTLTEIFGVGPIVAATVIGYVGDVTRFASSDRFAAYNGTAPIEVSSGPRKIYRLSRRGNRRLNHAIHMAAVTQIRNLHSEGRAYYDRKVAEGKTGKEALRALKRRISNAIFRRLQIDAQRARKSIMGPGGQPGNDSKACVTDSHPEGRLFGEATPEPGTTLRPAATVVRSRRSKAPTRLARRAS

SEQ ID NO: 293683 - protein, 404 aa, unidentified
MRVVNQRSCGLDVHKKSVVACVITQESQETRTFGTMTADLLVLADWVTSNRVTHVAMESTGIYWKPVYNLLEGVDLTLLVVNAQHVKAVPGRKTDVKDAEWLADLLRHGLLRGSYVPNRAQRELRELVRYRAGMVRQRGQVVQRIQKVLEGANIKLSSVASDIVGKSGRAMLEALVAGTEDPEALASLAQGRLQKKRPALVAAMQGLLGHHQRLMLQSQLRHLDFLDNEVEKMGQEVEERMRPFEPALALLDTIPGVGRRAAEQLLAEIGTDMSRFPTSRHLASWARVCPGNNESAGKRKSGWTGGGNPWLRATLIESAWSAARCHQTYLAAQYRRIAARRGGKRAGIAVAHTILVMAYRMLSDGCSYQDLGPNYFDERDREAVANRAIRRLQRLGYKVTVDAA

SEQ ID NO: 293684 - protein, 389 aa, unidentified
MFYLGIDIGKNTHVASLVDDKKNVIFKAFSFSNSIDGAESLILKLEAFKNELEVGMEATGHYWLSLYSYLVEKNFTVRVINPIQTDGWRQGIEIRKRKTDIIDSLLIADLLRYGDFVETSLSNEDYLSLRNLSRFRSYLISSIGDLKRKTIALLDQVFPEYASSFSNIFGKTSKEILSNFSTPSDFEDINSDDLSTFLESVSRKNYASKKIDEISKKASSSFGINFCLDSFSLQIKMLIEQISFIQNQVLDVENEIEVLLEKLNSPITTIPGIGSVNAATILGEIGDIKRFSNPSKLVAYAGLDASVSQSGEYESTYNHMSKRGSPYLRRALFQSALRAEFCDPVFSAYYQKKITEGKHHLVATNAVARKLCHTIFAVLTKNEHYQVQS

SEQ ID NO: 293685 - protein, 348 aa, unidentified
MRCYQHQHRFYCGVDLHARTMYTHVLAADGQTVFEKDLPTEPDTFLDAIAPFRPDLVVGAECMFSWYWLADLCADEQIPFALGHALAMKHIHGAKTKTDRIDAAKLAALLRGGLFPIGYVYPRAKRQTRDLLRRRSFFVRQRAQLLAHVVNTNTQFNLPPLPKKLTYAANRTPDLVERFADPSTKLAVTADLGLIDGYDQQVADLERHLVRHAKVDDPVTFGLLRTVPGIGPILGLTLLYEVDDIARFPEPGNFLSYSRLVRCPHESAGKKKGTGGKKIGNAHLKWAFSEAACLMLRGCLPAKSWMQRQERKKGKRKALSILEAKIGRTVYHLWRKQVPFDVKRFLNG

SEQ ID NO: 293686 - protein, 341 aa, unidentified
MKVTTLGIDLAKSIFRLHGVDARGVAVLRRQLTRKQLLPFLAKLSPCLVGMEAGSGAHFWAREIGKLGHEARLMSPHFVKPYIKSNKNDANDAEAICEAVGRPSMRFVPSKSTSQQDVQGLHRIRAQLIKWRTALANETRGLLAEYGIVVTKGIAPLRRTLPLILEDRENRLSGLFREMLVEMAERLRLLDERIREYDLRVARVFGQDERCQRLAQVEGVGPLVATALVAAVGNAHEFKSGRELSAWLGLVPRQHSSGGKTVLLGISKRGDRYLRTLLIHGARSALRTVESRKDPRSVSISRLKGRQGPNVAAVALANRNARVMWALLRRGEVYCPATGNI

SEQ ID NO: 293687 - protein, 442 aa, unidentified
MSNELAVPTAPEPEWAAFVAIDWADRKHYWKLVAAGSQKPEQGELDNTPEAVAVWAAGLNVRFGSRPIAVCLEQSRGSLVYMLLKFPQLVLFPVHPRMAASMREAFHPSGAKGDTSDTAVLLTILLCHRDQLRRLKPDTAETRLLQRLAEQRRLMVNEKTRHSNRLTACLKLYFPQILKWFDDPTSPLVGALLERWPSLEPLQRVHDGTLRKFFHQHNCRSEERIQERIDAIRQAVPATTDTAVLGAEAMAARGFLAVIATLRAHIAELDEQIAKAFAAHPEIALWDCLPGAGAALGPRLLVAFGTDRQRYTKAHELECYSGIAPVRSASGQSEWIHFRWACPKFLRQTFHEFAGHSIAKSEWARAYYDLQIGRGKSHHAAVRSLAFKWIRILYRCWKNRTPYDEQVYLQSLQKRNSPLKALLPGAAWKDVAGFQKLSENPS

SEQ ID NO: 293688 - protein, 319 aa, unidentified
MFVGIDVAKAELVVAVHPGDARWTVANDERGVRTLVERLRETAPTLIVLEATGGYELLCAAALAAGELPAVVANPRQVRDFARATGQLAKTDRLDADILARFAEQVRPAIRTMPTAEAQELGALLTRRRQILDMLGAERNRLGQVFGKGKRLVKKSLKTHIAFLERELRNADRDLDDAVRRSPLWREQDDLLQSVPGVGPVLSRTLLADLPELGRLSRREIAKLVGVAPLSHDSGTFRGRRFVHGGRAAVRGVLYMSALVAAHRNPVIRAFYLRLVAAGKPRKLALVACMRKLLTILNVMVRTKTRWMAESSAASLTTA

SEQ ID NO: 293689 - protein, 361 aa, unidentified
MQTLNENSVVIGVDVHKYSHTAVAMNAWGEERGTLNFTNNTLETYTNWLDHLGPKENIVIGLEDVNSYGIHLVHDLRNKNYHIRYVPAILTERERNKSTKHDKSDSVDAKRVGKVILTKYEDTLPAKESIANEEELKTAQALDLLLMERRDLVKEKTLLKNQLHVLLHQYYGDHYRDAFKKPFNGKAVAFYRTDLDQNAAEGKIVLGTSITRRLGRLVLVEDQITSISKEVETIGKKSEEVMALHMNIHGCGIVTACSIMAELVTVRRFKGKDNLASYAGVSPREHSSGRKRKLHTNPFGNRRFNRALHTIALSQIACKGDPEGKEYYRKKQKEGKTKLWALRCLKHQIAKRVFQTLKYAK

SEQ ID NO: 293690 - protein, 337 aa, unidentified
MIGVDLAKSVFQLHGASMTGQPKFRKKLSRQGFAEFMAKQPPAIVVMEACGSAHYWAREMSRCGHEVKLIAPHYVKPFVKRQKNDMADAEAIVIAAQRPEMRFVEAKSTEQQSRAILFRARERLVHQRTELVNALRACLYEFGHVVPQGIHQLGRIKGILDEPNSDLPELMREECGDLMKQIAEKTVRVDARTAKIKALAAEADTARRLQTIPGVGPLTALAVEAFAPPMESFRSGRDFAAWLGLVPRQFSSGGKERLGRVSKAGQSDIRRLLIIGAMSRLNWLGRKSITDGSWLARIAARKPRMLVAIALANKMARTIWALLTKNEDYRDSAQVAA

SEQ ID NO: 293691 - protein, 376 aa, unidentified
MSNVRFIGLDVHAETVAVAVAEPDGEVRSMGVIPNRSESIRKLVKKLGPAEQLRVCYEAGPTGYVVYWELTALGVKCEVVAPTLVPVKAGDRVKTDRRDALKLARSYRAGDLTPVLVPDAAHEALRDLVRAREAAKKDQLRARHRLGKFLLRHGRRPSTTMNSWTQTHLTWVKTVHFEHAAQEATLLDYLHEVEHMADRIERLERAIDDAVRTAPERMRAVIEALQALRGIAQVSAVTIVAEVGELSRFPKPRQLMGYSGAVASEDSSGGRIRRGGITKTGNAHLRRVVIEAAWAYRYRPAVGAALRKRQVSVSQDVKEIAWKAQHRLHARYRHLTARGKCKQETVTAVGRELLGFIWAIGVQVEAHGRGAQSVAA

SEQ ID NO: 293692 - protein, 321 aa, unidentified
MARRREVATMWVGVDVAKRMIDVARGSHGPLERVERAVGPLQTWARTLPAHARVVLEATGGLERVVTTVLRARGVAVSVVNPRQVRDFAKATGQLAKTDRLDARVLAHFGAALAPRETVAKALDAEALRALIDRRRQLVETRTAEKNRRHTAPEAVLGSIDEHIAWLDHEIAQLDQAIEGAATACAALADPLTQLQAIPGVGRVVALTLVTHLPELGTLDRKRIAALAGLAPFARESGLQRGRRAIWGGRGDARAMLFLAAQSAARWNAPLRTFYERLVGRGKPKKAALAAVARKLLVAINAMIRDGRGWQPTLLGQPSCC

SEQ ID NO: 293693 - protein, 373 aa, unidentified
MNTIIYCGVDFHARQQTVCCLTTETGELSTYELKHENKDELRKFYSQFHSPVVVGLEASGYSPWFEQLLEELGHEVWLGDAAEIRRRARRRQKNDRRDAELILELLIRGEFPRIHRPSPESREILRMLRYRHKLVKVRTIIKNSLQALAIQSGLSRQAKLFTRNGEQKLLEAMMSPVMSQQRQQWLELLKDLDQRIRETEGWLQQQALKDPRISLLRTHPGLGLLSSLAIVHTLEPVSRFPNQRRVAAYGGFDPMEHSSAEKKRYLGISKAGSRLLRFLLIEATQTAVKREPDLKRFYCRLEQRRGKPKAKVAAARKLLIRGFIMLRDQINYAEFQQRAVAARLARDYARTNMPGHLIGQPASPAKGSEERAD

SEQ ID NO: 293694 - protein, 369 aa, unidentified
MVLNDTDGSDVTGLEIIQASPSVVVGVDAHKRSHTLVAVNRLGQKLGQLTVEATDAGHVKALRWAQTTFGPDPALWAIEDVRMVSGRLERFLIDAGLTVVRVPTRTMAKTRASARTPGKSDPIDAEAVAHAALRYPSLPLSCHEPVSYELKLLIDHRANLIKQRTAAINRLRWRVHQLDPEYDCGPNLKADIHRERLRDWLIEAQSGVLAEIAAADVDELSRLTQLIRPLERNIEMRVADVAPNLLAVQGCGSFGAARIVAETANVTRFRTEAQFAMHVGVAPLPFWSSNNPHVRGARYGNRQLNAAIHVIAMSQLRSGGIGRPYYDKHVEAGDSTRGALRRLKRRIARVVFNAMRKDYALRTEPAQSH

SEQ ID NO: 293695 - protein, 346 aa, unidentified
MTTVDVTRPVTGGVDTHLDVNVAAALDAIGGLLGVAEFPTTPAGHRRLAEFLASFGTLARVGVEGTGSYGAGLSRYLRSSGVEVVEVDRPNRQSRRRTGKSDPVDAIEAARAALSGRAQGAGKSRDGNVEAIRALVVAKRSSRSTKIQTLNQIRHLGFTAPEELRSRLKGISRQHLGAEAAALRPRAGGDPVVFATKTALSLLGHRVLVLDAERERLNLLLGELVEKTAPQLLEIHGVGVDTAATLLVTVGDNPGRIRSEAAWAHLCGVSPIPASSGKVTRVRLDRGGDRQANSALWGVVITRLRSDPRTQAYMERRLKEGRSKPEIIRVLKRYVAREVYHRLPSA

SEQ ID NO: 293696 - protein, 417 aa, unidentified
MSSQQEVYVGLDVARDSMEAVWVDEEGKRMGSLSFANDNSGYEELLGKLQKFREAGNNITVGAEGHAGDLTPLDQYLNDEGFDFLSIHPLKVRRYKDILGQPQKTDNYDAYVVADFLRSRDDQLENMPQFDPTIQKVKKLSRTYKDLKKQINRYTNQLDEVLAEYFPELLDDSFPDLTTKTTLKLLNEYNSLEKIREAEIEELGKFLYDTSRGYYGEKLASRLIETVKRIDRSPIAESAYRVKLETLTDILLTIREHTKEIKKKISHLLEDWEDARIVLSLCGAGDITVGRWLGEVESTDRFDGSDPLGLFCGVAPLPHSSGKYSTDKASRRVNKRAKDAIMQIAKSSVQHNPESRRYYNKKRDEGKSHWHAIKCLARQLIRVIYAMLRDRTYYQPNKKSKQQGEEEDKKEVTTTPA

SEQ ID NO: 293697 - protein, 430 aa, unidentified
MKSNTQNAKIEAITEKTLVLGIDVGSETHYARAFDYRGIEYSKKPFKFSNTEAGFVTFKEWILDLKERHEKDKVVPGMEPTGHYWFNLGKFLQDNEMKPVLVNPHHVKKSKELDDNNPTKNDRKDPKVIAGLVREGRYMIPYLPDGVYADLRTASNIRFQLQAELTRIQNRISRWFNIYFPEYKTVYGKPDAKSGMLILKAAPLPEDILTLGIDGVNQIWRDAKLRAVGKARAKTLIEAAEHSIGSKEGTVSARMEIRMLLEDYESRNTRLQEVMVLIEELVKEIPMAEKLLEIKGVGIRTVSGFLAEVGDISRFNNPKELQKLAGLALVENSSGKHKGKTTISRRGRKRLRYLLFEVAMSLVAKNPEFRELHNYYTTRRLNPLKKMQSLMAIAAKLIRVFYAMLTKGVDYDPKKMISDIKRPTVYLQAA

SEQ ID NO: 293698 - protein, 359 aa, unidentified
MFYGVDLHSDNVKVAILPEDNATPEVKRFPLNSEPFYEFLHSLSTRDYVAVEASTNTFWFHDQVSPKVKQCFVLDPYKFSIISKSIIKTDKRDAIQMAKLLKYAVMTQEELPTVYVPTPQVRELRSLFSTYNCFKEQIITTKNNLHAILRSHGHKIGREGFSKKNALKEILSLDLPASAKLQITCLYESLLSLEKNAEEIKDEILRKGHIFSREIEILTSIKGISVFIAIAIMTDIGDIRRFPDSKELCSYLGCVPRVDSSNQTTRIGRINKHSRRLTRNLLLQSVRHFRTIKKYGEFYDRKINGKCAGKVRMALVHKVLRAIYNILTRDTLFYYVEPKNHQSKLNSYKKFLAKTPAVA

SEQ ID NO: 293699 - protein, 411 aa, unidentified
MRLFVGDDWAEDHHDIEVMDGAGRVLARRRLAEGVAGMAQLHELAGGLLGEDADGSEVLVGIETDHGPWVMALVAAGYRVFAVNPLQSARFRARHSVSGAKSDAGDAHVLADMVRTDAHQLREAAGDSPAAAGIKVLARTHKTMIWERTRQVQRLRHQLREYFPAALDAFGDLDAPDTLELLAKAPDPQRARKLTRAQVSAALKRARRRNIAERATAILVALRSGQLGQPAALTAAYAATARSLIAVITALNEQVTTLQGQVEEHFGQHPDAEIILSQPGMGAILGARVLAEFGDDPHRYADGKSRRNYAATSPITRVSGKKKVVTARFVHNDRLVDALNAQAFSALTASPGARAFYDQQRAKKLEHNDALRRLANRLVGILHGCLKTRTPYDEATAWGHRENLRQSPAAA

SEQ ID NO: 293700 - protein, 321 aa, unidentified
MPQPLGLANAGLRILGADVAKDAVVFHDNLTGRGFSLDNRPEALRQGLTPYAGHDWLICETTGGYERALLEAAAAVGLTACRADAARVKAFIASHGARAKTDSIDAAWLSLYGLERAARLTPWRAPAAEREALGELVRHRQDLLAQRTCAKNRRSAPGGAVLLDLLDQQIAFLTAQIARIDAQIDELLKAHAQMARDEAALRAIPGVGPVCARTLIALLPELGRLGPKQAASLAGLAPHPRDSGQIQRRRRMTAGRNGLKPTLFMAALAATRAHPHLRLVYQRLINAGKPKRLAIAAIARKLVVIANAVIRDTSYNNSQLT

SEQ ID NO: 293701 - protein, 354 aa, unidentified
MQQLERAAEVIIGVDTHKDTHTAVALNALGARIGAITIPVNQDGYRQIEAWACSFGSVRAFGIECTGSYGAGLSRALQASGHRVLDINRADRSARRRHGKDDPLDAEAAARAVLSGQATTLAKSGTSSVEMIRHLKLARDSAVKARAQAMQMLKALIVSAPAELREQLEGIRGKVTLVRHLTALRPGPMTSTTASAKVGLRALARRWLSLTEEIQGHDRDLDALAAAHTPELITAPGIATGTAAEMLILVGDNPERIRSEAAFAKMCGACPVPASSGKTSRHRLNRGGNRQANAALHRVIVTRMRCHQPTIDYVSRRTAEGKTKAEIMRCLKRYVAREVFTQLCKPRRPASETA

SEQ ID NO: 293702 - protein, 316 aa, unidentified
MHTENESVFIGIDIAKDSLDIHVNPTEECWTSANTAKGIQDTVKRLEALTPACIVLEATGGLEMPLTASLAAADLPVAVVNPRQSRDFARVMGILAKTDSIDARVLALFAEKIQPPCRPLPSEEGLALKELVTRRNQLIDMRTMETNRQRRISSRHVVTSIDTVIETINEQLKEIDHEIKQRIKASPVWRMKDKLLQSVPGVGDGTSAILMATLPELGLLTRRQIASLAGLAPMNRDSGKWRGRRMITGGRVNVRKALYMPTLTAVRYNPIIKSLYDRLVNKGKAPKIAITACMRKLLSILNALMRDNSSWHHVHP

SEQ ID NO: 293703 - protein, 431 aa, unidentified
MEDVMQSESERLAAYRQLRTNIRGSNNHLIVGIDIAKEKHYAFVGTANGATLCKQLIFQNNREGFDLLTSRVEVLRIKHQCEQVVFGLEPTANYHKPLAEHLIREGLQLVQVSGNSVKQNRELLDNRWDKHDRKDAANVADLIAQGKCQFYDYPSESIRDLRELLSLKKRLKKEEHGLKARVRNNLLALYFPEMDQYVTTCQRDSLSVISNCCSPVLIAGMEYDTFYNTVVCTRKSKKQEEHLYQIWQSAKMSIGCNAGVAALYEGKALIKQLLEVRAALQELDKVILALCSGIEEYPYLLSIPGIGPDTASKIVAYVSDPNRFDHAKQVIKLAGLDLCASRSGKPSAKATPVISKKGQADLRFALCQAALVASTSNSQFSIWFARKLQGREREKGIYSIVRVKLAAKMLVIAWTLMKKKEMFAYEHLNNT

SEQ ID NO: 293704 - protein, 362 aa, unidentified
MRIIGCDLHARQQAVAMLDTETGEVVSMTLKHEGNNVREFYSSLPRPVRVGIEATGSMQWFVNLMEELGIECLVGHPAEIRAAEPRKQKHDRRDADLILKVLVENRFPAIWLPSKELQDLRSLLRHRHQWVRMRTRIQNALQSIALANGLRRGTSLWSHDGQNTIASLPLAPHTAYRRSELQALYQKFEAEIEKLNQRVEEQACGRAGARLLMTHPGVGPVTALATEVFLGDPARFADSKALASYVGIIPREYSSGGRQRLGGLTKQGNPLLRFLWGEAGAHAVRRDPELQRFYRRKLIQKGFGKASVAVARKLGIRLWIMLRDQIEYNEFCRRGQKQQKSSEACAGMPETRNGAKSHRPVD

SEQ ID NO: 293705 - protein, 401 aa, unidentified
MPFHAGLDWGGASHAVCVIDGAGRVVARFDARHDAAGLAALLAGLRRIAPPAELPVAIERPSGLVVDALVGAGHPVVPVHPNVVKACRPRYRAAGGKSDPGDAFVLADILRTDGHRFRPLAPLSDEIRALRALVRGRDDLVAQRVALANQLRSLLEGFWPGAAAIFAAIDSPIALAFVSRYPTPESAARLGGKRLAGFLAQHSYCGRRSPAELLARLRAAPKGLASEPEAEAKGELARALAAVLERLVPEIARLSSHIEHAVAELPDGRIVMSFPRAGRLCAAQMLAELGDVRERFPTEDQLAAEAGVCPVTHASGKSHGVVFRWACNKNLRLAVTCFADNSRHASAWAAGIYRRARNRGCRHPHAIRILARAWIRVLWKAWHDRAEYDPAKHAAAAKIAA

SEQ ID NO: 293706 - protein, 350 aa, unidentified
MGGTTCGLDIAKSVMQLHWVDADTGEIGRKKLARAKLAEHFAQLRPMRVVMEACGSAHHWARVLRELGHEVELLPARQVRPFVRSNKDDAADARAIWLAAQQADIRRVPIKDREQQAVLALHRSRQHWVSVRTATVNALRGLLYEFGVVLRGGRQAGLKSLAEQRAAIDAHLPEAIRRLVSGQLQGLAQVNERIDDLEHELTALQKQMDKAVQLRKVPGIGVLGATALAATLGDGAAWRSGREFSASIGLVPAHSGTGGKARMGGISKRGDSYLRTLLIHGARAVIQGSKQRPLWLEQMLGRRPTNVVIVALANKMARTAWALVAHGREYQRTWQQLARRECSPAAGAPA

SEQ ID NO: 293707 - protein, 424 aa, unidentified
MKVTYQTCCGVDVHTSFLVATIVKTTGDIEPSYQKKRFSTFNNSILEFKQWLLDNDCHDVCMESTGKYWVPVFNLLEDDINVVIANPKWVKAVKGNKDDTKDSKWIGDLFRLGLVKGSYIPCKKVRILREYTRYRYKLVSCRSSEKNRYQNALTVCNVALDSVVSDIFGKSSTSIIDYLLEQSGSSINHEEIASKLLRSLKSKEDAVIESVEGYQMTDAQKYRMRLVRAHMDYITAEINDVDKMIENMISSNTDFENAVQFLCTIPGVKRDSAITIISEIGTDMSQFSSSRRLCCWAGLTPGSNESAGKKKSVRITRAGVYLKPALVQCAHAAVKSDKSPYYKKKYESLVKRRGKKRAIIAIARMILTAIYQMLSTGEQWNPSDLYKIDMPVALVEKQKAKAIKQAKKLLQREGLLPPDEPLAS

SEQ ID NO: 293708 - protein, 465 aa, unidentified
MEKHYELFVGIDISKGKADAAILQVSNLRSVKPKFLRKKLSFKFTRSDVLSFLSAVRSKYDDNCTHVTFGLEVTGIYSNNVYNFIKSQLNDLEEIRFLNTEFVNKWRKTHNIAKSDPLDAQTISNIIGTDPDVRFVNHVAFDNEKGYQDLKALIHRYYQVKKTYSQEINRLISTCDVYFPELQYVFEPKSAAFPAILSSYPTTQDIINASKSEVFDCAYEATKHRVTLDKIDMLFNYCNDTLTDFNISYTSRSIILDLTASVTRLKSLLKELEKKIKVLASMFDVYELLLTITGCGPITAATVIAETGDISRFHSADKFVSYAGASPRIDRSGKSVETIGRISKKGSKYLRHALYMIAEFARRHNPVLKAQFDRIKNGNKKRHRLAVIAIANKIARYIYSTMKNKSSFIITYESLMRLSEVTRNTFFQNITTKFSKRIRRQIYQYSDVNGEIHQFVYIQNKDIEI

SEQ ID NO: 293709 - protein, 417 aa, unidentified
MEHFAAYLGIDWSDQKHDLCLVDAFTGHKEKKIINHTPEALDEWATTLRTRFSGQPLAVCLEQSRGPLIYALLKYDFLVLFPVNPQTLAKYREAFSPSRAKDDPQDAEYLVELLVHHRDRLKAWLPDDEKTRTLQLLVEHRRRLVGDRTRISNRLTALLKGYFPQILTWFDDIRTNLVCDFLTTWPTLEAVKRATPKTLQKFFHEHNSVGTDTNQRRIASITEAMPLTTDKAVINSSVMMTKALASQMKTTITAITEFDTEIAALCQTHQDYRLFDALPGAGPVYSSRLLAAMGTNRARWTTADELLCFSGIAPAIERSGKSERIRWRYFCPKFFRQSFIEYAGESIKHSFWAKAYYSSQKAKGKSHQAAVRALAFKWIRIIYRCWQTKTPYNEVTYLESLRKKGSPLLNYAANNPA

SEQ ID NO: 293710 - protein, 418 aa, unidentified
MAEVMIGIDPHKASHTAVAIGLSEQQLGQLQVCACPSQTDQLLAWAAAWPERAWAVEGAAGLGHLLAQQLAAAGERVLDVPPKLAARVRLLQAGDTNKNDPNDAFSVAVAALRSTAKRPVIAEDHAVVLKVWAKRHRDLARARNQACCRLHAVLCDLVPGGIRKEISAGQAARILEQVRPADAVTTARCELAAEFLTDIRRLDAQLRTTNKKLAAAVKASGTSLTGLFGVGPVIAGTVIGDVRQVFRFPSRDHFAAYDGTAPVEVSSGGRKVYRLSLRGNRRLNHAIHMAAITQLRYKHSQGRAYYEKKLAEGKTHKEALRSLKRRISDAIYAALVADARQAAAACSKGPGGQPGNLSVSRAAGSHPAHTSSSDKPLPGLPPPYGPAQRQDPPPLSPTERVGTGLGTPRPAEEIRHNH

SEQ ID NO: 293711 - protein, 316 aa, unidentified
MSANEIETFVGIDVSKSTLDIRIEPDSETLHVAYDVQGVKEVCRRLTKAAPTLIVMEATGGLETRLASVLVAKSLPVAVVNPRQTRDFAKATGELAKTDRIDAAVLCRFAQAIRPAVRPFQDADSRDLEDLVNRRHQLVENRVQETLRLGTAASKALQKSVKSHITWLDRQIATLDDDLGKRLRASDAWKAQDDLLRGIPGVGAVTSLTMTAKCPELGQLNRQRIAKLVGVAPLANDSGKHRGKRFVWGGRADVRAALYMATVSAIRCNPAIRPFADRLKQAGKPAKVVIVACMRKLLTIMNAMVKNNAPWDPKSA

SEQ ID NO: 293712 - protein, 349 aa, unidentified
MQFVRVSKQYYCGVDLHADVMYVCVMTKAGRAVFHHELPTDFSRLLQHLKPYLSSIAVCAESTFNWYWLADGCAKHNIPFFLGHALYMKLIHGGKTKNDRIDAKVMADLLRTGFFPPAYPYPEKMRATRDLLRRRSHFSQQHAEALRHIKTLLYQQGYTDLPTVHNFDAEKISKTFSVYKLPDDVAYSLQADLDMIRYLDTVTAKLEWRIEKNARGHDNHALALLKSVKGLGTILSLTLLYEIHTIKRFKSAQCFSSYARVVKVERSSHGKKLGSKNSKIGNPYLRWAFGQLAVSAQRFYPGIKEYTQKLIRKYGNAKAYTLLAHRFAVTIYYMLKNKTAFEVNRFVAT

SEQ ID NO: 293713 - protein, 494 aa, unidentified
MATGESTTTQQAKQRKAYRRRKARGQARAARAQEVEAARVEGLPVTQAHAAGIDIGSRSHWVCVGCCGDDRDDLIQEFPAHTEGLHQILAYLRQHSVTTVALESSGVYWIPLYELLEANGFEVLLVDPSYTKQVKGRPKTDRLDCQWIYRLPSVGLLAAAFRPDEKTCQLRSYLRQRANLIRYGGQHIQHMEKALEQMNLKLTEIVSDITGVTGRAIIQAILKGTRDPHKLAKLRNRRCKASEAEIAQALNGSYRDEHLFALRQAYEAWQFYQKQVGAVEEQIEQQLGRMKQDRALPPLKPRPRNGGRKPNQPRFDVRSALYYVVGIDLTEIEGIGEQTALTIISEIGPEVSRFATVKHFCSWLGLCPQLQKTGGRVRSSRTRPGVNRAAVAFRLAANGLYASQGALGAFLRRQKARLGAPQAVTATAHKLARIVYLALKHGLAYVRQSQEEYEVRLREQQVKAVKRKARQLGLEVIDKQASAETADAETAARC

SEQ ID NO: 293714 - protein, 355 aa, unidentified
MDSKKYIGMDVHKESISIAVMNGAGKIVMESVIETKASMILQFIDGLRGDLQVTFEEGTSAAWLYDLLKPHVTKLLVCDPRKNASMREGNQNDKIDARRLAELLRLNHLSPVYHGEHGLRSLKELVRSYLTITKDLVRVMTRVKAIYRSWAIPCTGKQVYAPRHRAEWLGKIGEPGVRRRAEFYYQQLDALRTVRQEVRRELLAEAKKHKAWKLLCQIPSIGPIRAAVLLGILQTPHRFRTKRQLWTYSGFGIETQSSADHRSVDGQLERVKKQSSIRGLNRNCNHDLKNLFKGAAIVASSKPGPFQEFYTALLTKGLRPEMARLTLARKIATIVLIVWKRGACFDAQHLKPQTA

SEQ ID NO: 293715 - protein, 457 aa, unidentified
MPSPLNNEPDFAAFIAIDWADREHAWAMQVAGTTIRETGKLRHTPEAIEAWAMQWAMRFPGRPVAVALEQSRGHLLDPLRKYSHLVLYPIHPTTSKDYRKAMFPSGSKDDPGDADLLLDLLTLHRDRFRALNPDTEQIRKLQMLVEKRRQLVDERTAQTNRITDQLKLYFPQVLDWFDELHAPIVAAFLRRWPTLPQLQQEDPQQVRDFFYQHGSRSQQRIETRLVQIGQAIPALQDPAVIDPAALMVRTLLRVVEALNDGIRALQKSIEEAASVHPDYAIFSSFPGAGRTLAPRLLAAFGSQRERYGSAGEVQAFSGIAPVQQASGKQCWTHFRWACPKFLRQTFHEYAGLSVQFCSWARAFYQKQKAKGNGHHAAVRSLAFKWIRILFRCWQSRQPYQEELHQAARDARSVPIATKTIAAATIIRGQAPGSKSGKRQDSQLKSAREILKSLMAEA

SEQ ID NO: 293716 - protein, 401 aa, unidentified
MKQLYAGIDWASKTHAVCVVDDHGRIRARFQVPNTGKGFGGLVRRLVKLGVTGVAIERPDGPLVQALLDAGLRVIVVTPRQVKALRSRYAAAGAKSDAADALLLADVLRTDGHRLQPLTPDSDATQVLRALTRTRKDLQKARVALTNQLVAQLERCFPGAVGLFADLHSQVAISFLRRYPTSHAAAGLTQAKLAAFLRRIHYCGHTPVAVLLQRITTAPAAAISPDQAAGRAVCVAALLDAIQVTHSRERDLEAEIIERLALHADAAVFTSLPKAGHGVRAAALLSEIGDVRARFPNEEALAAVAGVAPVTRASGKVHSVGFRWACDKKLRNALIDFADDSRHASPWAAKVYTDALGRTRRHPHAVRILARAWIRVIWRIWQDHTSYDPAKHGGAVRLLAA

SEQ ID NO: 293717 - protein, 335 aa, unidentified
MHYLYYVGLDVSKETFDASLVAFEDANEMAHRKFANSRKGICSCLHWVEKRHGILLDDVIFCAEDMGSYISEMAVCASDRTLNFNFSLISPLVIKYSMGIARGKTARVDARRIAEYAITHYRKIALYLPAEKELCQLRTWLILRAHLAKQRVAKLVLLEKLDYKEKFADVSIQRSMLQEEIAYAETHMKTIEREMKELIAADSNICRNYKLLTSIKGVGPITAIVMLCSTLNFTKITDHRKFACYCGLAPFEHSSGTSVRGGCHTSSMANRDIKVQLNRSALIAIRCDPQLKAYYERKVAEGKHKFSVLNAVRAKIAARCFAVVRRGTPYVALQI

SEQ ID NO: 293718 - protein, 441 aa, unidentified
MCPKPRFSDMVGAKLNPGNTADARPFYLGLDVSLQTGVACLLDSLGQEVMPRWSFHNNRPGAEELAQKVAELLKRHGATILMVGMESTGIYGWHLACFLGEAPLLRAWNALVYMFNPYRTLNFKKAMGDLGKTDRVDALVVAQWLRVGHLPAPFAIDTVYGPLQRLTRFRYHLSETITREKLYTLGLLFLAFSEFGATVPFKDPFGATSQAVLEEFSLDELAAKPLEELSAYVARRGHGRFTEPGEVARTLQQAARDSFRLDKVHDSALRLVLGVSLTNVKTLACQLKEVDAAIARDLKAIPLAACLLSVPGLGPVYTAGLLAEIQDIHRFQDHAALAKFAGLTWRPHQSGDFTAEETPLTKTGNTYLRYYLVQAANSVRVREPEYRAYYQVKYNEATKHHHKRALALTARKLVRLVDALLRDAQLYLPPGQRHGGRAAVA

SEQ ID NO: 293719 - protein, 337 aa, unidentified
MNIVFLGIDLAKNFFQLCGLNQAGKPVYTKRTGRKELLQTLANIPACLIGIEASTGAFYWQREFEKLGHKVKVISPQYVKPFVRGQKNDGNDAQAIAVALMQPTMQFVPPKSPEQQDIQALHRARQRIVNHRTATVCQIRGLLLDREIPIGSAVSRARRAIPLILEDAENGLSSRMRRTIAELYDLFNDPGRRIHFFDKEIETVFRQSEACQRIAKVKGIGPETATAVVAIGKGTEFKNGRHFAAWPGLVPRQHSSGDRQVLMNMTKKGDKHLRTLFIHGARAVVRVATNNNDGHMNQWVNRLKERRGFNKTTVAVANKNARIIWSMLRNDTGYQVV

SEQ ID NO: 293720 - protein, 342 aa, unidentified
MSEVTIIGIDLAKRVFQLHGASEDGSVVFRKKLSRGQVLAFIAQQCRCVVAMEACATAHGWGREFEKLGHDVRLIPPVYVKPFVKRQKNDAADAEAIVEAALRPTMRFVAVKTEDQQARAMLFRTRRMFVGQRTQMINALRGHLAEHGLVAATGTAQLKRLADAIEDSDTALPEGVRDLGQMYLAQIEGLNARVAELDQKMKCAAKEADVARRLQTMPGVGPITALAIETFAPELSSFRRGRDFAAWLGLVPKQHSTGGKARLGKTSKMGQRDIRTLLVSGAMAVLQAVERFGTPNNGWLTRMRARKPRMVVAIALANKMARGLWAMMTKQEDYRNPVAMMA

SEQ ID NO: 293721 - protein, 391 aa, unidentified
MNYVGLDVGLRKSSLHILDSNGKAVKRKEVGGGWGKLIEAVRQIPRPFTLCYEASCGYGYRYDHFSPLAERGAVGHPGQLRLIFRAKRKNNRVDAEKLAKLLYLDAVPQVYVPSVNVRAWRALIEFRQKLLRRRVSLKNQVRALLRGLGIVPVRGLWSKKGLAWLAEQKLSSMDDLRRAMMVDDLVQVNARIRQLESELKKIADGHPAMALLQTIPGVGIRTAEAFVAYVADPRRFSRLNRIGAYLGLVPCQDATGNTNRLGHITREGPATVRKLLCEAAWQGIRRDPRTRAYFQQVMHGDEERKKIAIVATAHRWARVMLAMLRNGEVYRTREKIEEEPAGLSGPSTPPLLADCTPALSRKRRDRGGRGRKGGKVQGVATRGASSLTTPG

SEQ ID NO: 293722 - protein, 435 aa, unidentified
MSTLGIDLAVRAAHVATLTNDQGEVIWSRRRFRSHPPDLAALSAAAGPASELTVVIEPTRSAWVVVAAHFRATGAKVVMVAPERSADLRSYYRKHTKNDRLDSFVLSRVPLLHPEGLIEVTGLGPAAPLKRAVRRRVRLVGERHGCHQRVDAMLDLLGPAYNEALGTRDTRTVAVILERYGSPKSLRRLGISRLTDLVRRTSGGHFGAEYARRIMDAASEAIELWRGGGLDFDELAWDLAQEIRIIGQLEVEISRLDARIAELYAAVDPKGIARSAPGVGPVLAAGIVGRLGDVNRFANLAGVRSFTGIVPGVNQSGLTETRPGITKQGDPGLRRDLFFAADMARHHDPQLAAKYHRLIVERRLHHYAAVCHVATTLVTRIAACWRSGQHYVVRDVDGRQVTPVEARAIIAERYAIPPEARRRARVPDAVSEPTR

SEQ ID NO: 293723 - protein, 361 aa, unidentified
MAERLTVAGLDVHARSTHGAAICVPTGELVRVRFGAGVDGPVEWLKSLPGPVRACYEAGPTGFGLYRAAVAAGVEMRVVAPGKTPRAPSDRVKTDRKDAELLARLLLAGQLKSIAVPNPRVEAARELVRAHDGARRDLMTARHRVSKMLLRHGVVYDGATTWTRSHRSWLSRQGFAEPVSDLAFADLLAAVDGLTARKAALAERISRLALDQQWWPTVARLRAFRAIDTLSALAIHLELCGDWQRFRSPRSLGMWLGLTPSLQQSGQSSHAGAITKTGSTLARRLLVEAAWHYSRPPRIGATLHNRQQGQPDHILQISNRAQQRLHRVYHGMRARGKHPNVTVVAVARELACLLWAAATAD

SEQ ID NO: 293724 - protein, 460 aa, unidentified
MNKLFAGIDVSLGNNQLCLMDFEGNPVGKSISFANNLPGALAMVSHLNSVMEKGNFEKLTIGMEATALYWFPLFNFLNSEPALEAQVLPLNPKVVSNFRSAYTDMDKTDVKDSFVIADRLRFGRIPQGYVPDVGFLALQRLTRFRYHLVQCASELKNYTKSFLFLTFSEWNRTGPFSDLFGATSTKLMKKYASAQELAEVSPEELEELLREFSKGHFRNVEAKAALVNQKARDSFPVPKELADQVHLLLKQTLQQLGLLDKHIARLDKKIAKKMRKFSNVLESIPGIGPVLAAGILAEIGDVTRFSGQAKLAKYAGLTWRKNQSGNFNGDVTPLTKTGNVYLRYYLIQAAQSLTQHNDEYREYFHRKLDEVTRHPYKRALSLTARKFVRLVYALLSRNQLYMAPEERKRRELTPKEVNQVPEHDSMMQTEVSEAPKPYKKVKTLTVAARPKNSALPAGTC

SEQ ID NO: 293725 - protein, 436 aa, unidentified
MTLINFVAANQKYYAFNLLSVFIMVFWSVQYLLQHLLVQTQVSHQLLQPLILILQLPQTPQFRHARPGKFFLPVNGMDYFLPLRLTVRNVLTRRITMNIVFLGIDLAKNVFQLCGLNQAGKPVYTKRTGRKELLQTLANIPACLIGIEASTGAFYWQREFEKLGHKVKVISPQYVRPFVRGQKNDGNDAQAIAVALMQPTMQFVPPKSPEQQDIQALHRARQRIVNHRTATVCQIRGLLLDRGIPIGSAVSRARRAIPLILEDAENGLSSRMRRTIAELYDLFNDLGRRIHFFDKEIETVFRQSEACPRIAKVKGIGPKTATAVVASIGKGTEFKNGRHFAAWLGLVPRQHSSGDRQVLMNMTKKGDKHLRTLFIHGARAVVRVATNNNDGHMNQWVNQLKERRGFNKTTVAVANKNARIIWSMLRNDTGYQVVCN

SEQ ID NO: 293726 - protein, 333 aa, unidentified
MVTAAIDIHKQVLQAVVLDGESGELAEERLAGREALADWAMRWRGRVEAVAIEATTGWRWVARELQAHGLEVRLADPGQAKALQGRKKRAKTDRLDARWLALLLGKQMLPQAWLPPAEIQYLRDQTRLRKALVDDRTRWAQRLHALLQQEGWPCRRARLLTVAGRRWAQALALPDPARAQVELYLRLLETLEAEIRPLEHELCRFAKQDRRCQALQRIFGVGPILAGHLLAEIGEAGRFRRSRQLVRLSGLDPVVEESADVRRRGKLAKQGPPTLRWALVQAAQHAPRPSSPDRHLYTSVASRCGSQRAKLTVARKIARRAYHLLSTLEAEAA

SEQ ID NO: 293727 - protein, 360 aa, unidentified
MRIIGCDLHARQQTLAMLDTQTGEFVNRTLMREGDQVREFYAQLPHPVLVGIEAIGPMHWFLNLLEELGIECQVGDAAKIRAAEPRKQKHDRRDAELILKLLVENRFPAIWMPNKEQLDLRALLLHRHHWVRLRTQIQNGLQAIALANGLRRGPGLWSYDGQAKIAFLPLPPHASYRRSALQTMYRKMEEEIENLTEQVAEQAKQRCGARLLMTHPGVGPVTALATDVFLGDPQRFADGKALASYVGMIPREYSSGERQRFGAITKQGSPLLRFLWNEAGAHAARRDPDLQRFYRRKLVQKGLGKARVAVARKLGIRLWIMLRDQIDYQEFCRRGQKQSSAACAGMPEVGNGASRHRPVD

SEQ ID NO: 293728 - protein, 403 aa, unidentified
MVFLGVDWAEAHHDLCLLDEQGKLLGRRRVTDGLEGVRRLHELVAEHAEEPGQVVVGIEIDRGLLVQALLAAGYQVYAINPLAVSRYRDRHTTSQAKSDAGDARVLADLVRTDRHQHRPIAGDSELAEAVKVLTRAHQNLVWSRQRQLNQLRSILREFYPGALEAFGTDLAGIDAIAILERAPTPAQGRLISRAKIVSALRKAGRERNLEAKAAEIQTYLRAPQLQAPPLLTQAYGRSVASIVRLLLQMNRELASLEQELAAHFELHPDAEIYLSLPGLGIVLGARVLAEFGDDPTRFAHPKARKCYAGTAPITKASGTRQVVLARVARNHRLANACYLWAFASLTRSPGARRYYRQLRARGHTHQQALRALGNRLVGILHGCLSHRTPYLEEIAWPLLDAAA

SEQ ID NO: 293729 - protein, 431 aa, unidentified
MQLTGRPGRKGDRGLETFAWYVGIDWGSEEHRLCVLDASGQVCGERTVAHTVAAVHEALQWVRTSTGATADAIAVGIETPRGALVDTVLEQGFRVFAVNPKQLDRFRDRFTAGGAKDDRRDARVVADALRTDPRAFRAVRPEDPQVIQLRELCRIVEELQVEEARLANKLREQLYRVNAPWLTLSPAADEPWLWTILAETPDPVAWGQLPRRRISPALRAHRIRRLTAEDIVTTLRQPTLTVALGVPEAVATRIASLVPQLLLVHQQRTTGARQIDRLLETLAAADRSEGEPHEHRDVEILRSLPGVGRMVTATMLTEAAGPLADRDYLTLRTYTGTAPVTKRSGKRVFFVQMRYACKWRLRQALYHWARISIQHDDAARAYYDALRARGHGYARALRSVADRWLRILVAMLTTRTLYDPARPRTLVSVPA

SEQ ID NO: 293730 - protein, 343 aa, unidentified
MQIRSVGIDLGKTTFHVVALNAAGKVLLRKKFTQKQLVAFTANMQTSLIGMEACSGAHFLGRVLRGQGHDVKLIPAQFVKPFVKSNKNDFLDAEAIAEAVDRQNMRFVPIKTDDQLDLQAMHRVRDRLVARRTSVINQLRAFLLERGMVFAKTPFKLKQAMPEILENADANLTPRMRTLVSLLWSEWKDLEQQIVAMNEEVEQIASSDPACQRLRQIPGIGPLVATAIVAAIGNGAAFHKGREFSSWLGLVPRQHSTGGKARLFGISKRGNCYLRKLLVHGARSAVLRVRRERSPFGPWLNALERRSPVKVVITAAANKLARIAWAVLSSGQDYRAVPDAITA

SEQ ID NO: 293731 - protein, 348 aa, unidentified
MIVIGVDAHKASHTLVAVDRRGRKLGEKTVAATSEGHAKALRWVNATFDDGDLTWGVEDVRTVTVRLERDLMDTGAVVVRVPTYVMARLRGSPRVVGKSDPIDALAVARAVLQEPDLPRARHHPESLACKLMVDRREALLHQRSATMTRLQWRVHQLDPKRDVGQGMLQWRIHRDDLRQWLGTQNGLLAEFSRDELEEIDELSQKIYDLLRRITSHVDRIAPSLLALTGCGPLMAAKIVGETADVTRFPNESAFARFGGVGPIPMWSGSSEGRMRNSKTGNRQINAALHRIALTQIMKGGPGADYYHKRIDNGDTPAMARRCLKRHLARTVYRRLLKDRMPTTTSDSS

SEQ ID NO: 293732 - protein, 388 aa, unidentified
MLPMINALEVQKGKPAMKKNTTELEKPRRLVLRKNKQRELTIGVDLGDKTSRYCVLDREGNVLFERSTATTKKGLAQAFASMGASRIAIEVGTHSPWVKRLLESWNHEVIVANAHRVKLITESTRKDDRLDARQLARLARVDPELLSPIRHRSEGAQAHLVMIRARAALVEARTKLVNSARGVTKSFGERLASCDPDQMRVKCLVGLPSSLQSALQQLVTAVESLTRQIHEYDNKIAQIARSGYPETARLRQVTGVGELIALTYVLTLEDPQRFRRSRDVGGYLGLRPKRRDSGASRPQLRITKEGDVYLRMLLVQGAQYILGRHGVDTDLRRWGLKLAARGGKNAKKRAVIAVARKLAVLLHRLWVTGERYEPLRHSQIASSLQVAI

SEQ ID NO: 293733 - protein, 347 aa, unidentified
MRFYTQQHPFYCGIDLHARTMYLCILDQAGETLLHRNMQATPEALLKAIAPYRGQIVLAAECMFTWYWLADLCAEHGIPFVLGHALYMKAIHGGKAKNDKIDSQKIAVLLRGGMLPQAYVYPAEMRATRDLLRRRMHLTRKRAELLAHVQNTNSQYNLPAIGKKIAYKANRDGVAERFADPAVQKSIEVDLALITYYDQLLRDVELTIVKTAKHHDAHTLYLLQTVPGIGKILSLVLLYEIHQIDRFPRVQDFASYCRLVKCAKESAGKRSGTSGTKIGNAHLKWAFSEAAVLFLRDNPAGQKFLTRLEKKHSKGKALTILAHKLARAVYFMLKNKRAFDMDTFLHS

SEQ ID NO: 293734 - protein, 420 aa, unidentified
MFTCPQKTAISSPDFKLETGVRIAYVGLDVHKLSISLAALCEGKWVFERTFATADLTDLKKALKKLKQLFGQVLICYEASGCGFRLQRHITEWGYVCQIIAPSLIPTKPGDRRKCDKLDARKLAQYFEAGLLTSIHIPTVEQESVRDLVRCRFTIRKDVTRGKHRVVKMLDRKGRIYEGTAWTSKHRDWVASQEFLLHSERVTFHHLIGSLTSQESRLAEIDKEILAISQQDPYREQVSVLRGFRGVDTLTAMVFITELGDLRRFGSPRQLMSYLGLVPSIHQSGKSGNTAKGITRAGNSFVRHVMIQASWTYLKKPSIGKKIRERQDGLPAWVIDRSWKAQKRLHTRLHHLSGTRGRVVAIPAVARELACFLASALLELTDFQEDSPKAVAALRPAGETRAPGLPGTCVPGGRALTQTR

SEQ ID NO: 293735 - protein, 341 aa, unidentified
MNNIKKIIGVDIAKRVFQLHWIESGTGEIVSLQLKREQFLEYFANLVPSLIGMEACGGAQHWARQLQKMGHEVKLLPGKQVKPFVGGNKSDVHDARAIWTAMQQPGLKPVAIKSEEQQAVLALHRMRSQLVKFRTAQINGLRGLLTEYGEVMPQGKVGIKKAIAETLQRLSDRLPSVVIDTLREQWERVATLDKQVTDIERRLTQWLKQDPASACIFEIPGVGLLTATAAVATMGDAKAFKSGREFAAWLGLVPRQSGTGGRIRLLGISKRGDTYLRTLLIHGARSVLMHAKEPDPWVTELRHRRPLNVAVVALANKRARLIWALLANERAYQKGYVNQVA

SEQ ID NO: 293736 - protein, 386 aa, unidentified
MTQHSHVTTSNGLDYDRTLILAVEISNRSWVVAAQVPGLRQKGVKQQLVPRADALMAAVEGYKRRAAAAGLAVERVIVAYESGGSGFWLARWLQQRGVEVYVMQPSSVPVDRRMRRAKSDRIDADMLLRTLLAWLRGEPRVCSMVPVPDEAVEDARRPIREREELIRARVALVNRIEAVLTVLGAGDYNPLRRDCRERLGQLRTALDQPLPPHARAQIERLLDRLDLIRQQVADLEAQRDQAVEGEAAGRTEQMIQRLARLRGIGVQTATVLVHEAFVRRFRNARALGSYAGLTGTPYSSGGTQREQGISKDGNRRLRATLVELAWMWLRYQPGCALSRWFHDRLGGSRGRLRKVMIVALARKLLIALWRYLQDGAVPQGMELKPA

SEQ ID NO: 293737 - protein, 340 aa, unidentified
MMTYAGIDLHATNSVLVVIDEADRVLYQKRLRNELRVILTALTPYQTTVQGVVVESTYNWYWLVDGLMDAGYRVHLAHAPALPQYSGLKHADDQHDARWLAHLLRLGLLPTGYIYPKAARAVRDLLRKRSQLVRHKTMVVLSLQSLLTRLTGSRLSLPRLRQLTPDGVQALVPFPEQGQSVLSSLTVLQCLEEQIHAIELTVRQAGRVQPGYALLQTVNGIGPILALTILLEAGDMRRFPTVGHFASYCRCVGSEHLSNGKRKGAGNTKNGNKYLSWAFIEAAHFAIRYEAVIRTYYQRKQARTHPLVALKAVAHKLARACYHIVREQVPFDLHRAFGSV

SEQ ID NO: 293738 - protein, 359 aa, unidentified
MNVNHYIGFDVHKKSVSYCVKGADGLIFEEGKLRSTHQTLREWAQKRPEPWRGAMEATLFSGWIYDALKPFAAELQVGHPALMKAIGASKKKNDKLDARKIADLVRCNLLPACYVAPVEIRELRQMLRYRNLVVAQAVRMKNKMSGLLMEVGAEYNKQRLHGKKYFTELLDTVEEVPESVKDLLRLSRGALEMFETTQLQLLAKLRNDRRLAQRVTLLKSIRGVGEVTALTWILEVNDPQRFSSIAQAVSYCGLTSALVSSADKQQRGPISKQRNAHLQTVLIEAAKLAPRWNPQLAALHARELKRGNRNRATLALARKLVAYLLAVDKSGQPFQIHNLTETKTAVAETAAEREVEQTA

SEQ ID NO: 293739 - protein, 286 aa, unidentified
MLTIGVDAHKETHVAVAVDAAGQECGQWAGPNSAEGWAAIRAWAQGLGTERRWGIEGAWNDGRGLAQSLVTAGELVHEVNARWTAKERRRARNRSKTDQRDAQAIALYVWREGTMLPPVASEDDSAVLEVLVSQRDAAVAEATRLRNQAHHLLLQCDPSYRKHVPALTTEEGIAALEQYQAPETSVLAQTRAAAVRMLGQRLRLAVAQAEDLKTQIEARARAGFAPLIQLKGINALTAGMLAAILGPGRRFRSDADLALYAGVAPLEVSSAGRVRHRLNRGGHRQP

SEQ ID NO: 293740 - protein, 363 aa, unidentified
MNSVYHTELSSLEETRGQFNGGKADIKLGIDVHQDFYVVVMQEGGSNPKPPQRFQKQAFLLWAAKLKSRSAEVHAVYEACGFGFSLQRQLSQLSIHCYVSCPQKLDEHNKRVKTDSLDAKALCLRLDRFVRGNREALAMVRVPSEEEERSRAIHRQREQLIKVRKMLEAQGRSLMVNHGIEPVKNWWKRNNFAALPLPAWIKELLQNSQPILIALQQKISALTLQLQVAAAFNQPRGLGAMTSVMIDREIGDWHRFNNRRQIASYTGLCPGEYSSGHTRLQSCVTKHGNPRLRAALVELAWRLVRFQPNYSAVRKWKERLAKGTLTTGAARKKAIVALARQLAIDLWRIRTGRLSAEALGLEI

SEQ ID NO: 293741 - protein, 408 aa, unidentified
MKRYYLGVDWGDRLHQMYVGDEEGKKVREIKLPETVEGLTEFGRWLDEKRAEGFELWAAIEKPAGRIVDFLLDHGVKVYPVNPKAVNRVRDRYRMSGAKSDAFDAYVLAEFLRTDQAHLRALEPSSEKAQELKMLCRDQRRVGRHKTRLLNQLTTTLKEYYARPLEAFENIETELALDFLTRYPTPADLQALKPKEFKRFATKQHHLSQQRYEELWEKLSQPQLAVPDHVVRAKAQLLEVLIDQLRAAIKAVKTYHHKVESFFASSPAAQMAKTLPGGKSGTVVAAIWAELGDAPSRWDCFRHLQAEAGAVPVTKASGKSRLVQFRFACNKHLRSTMYWFSFVSLNNSEWAKLYYRQQRAQGHTHPEALRALSAKWLKIIFVMWRDHKPYDEKFHLANIALQKIRQAA

SEQ ID NO: 293742 - protein, 399 aa, unidentified
MEKDVSLELRVSVDVGCRSHNVAIGLSSGEVLDEFSITHEPEGFRQFFSRIEKQERRFGCPVAVAMEGYNGYARPLDTLVRARDYRLFNINNLKLARFKEIFPGAAKTDPIDARKGLELFQICDHLPMAKDVLQEVRKTPQGNEILKRLSRRRRRLVDERVRVLNNLQSDLHAVCPGLLDITGEADNLWFLNFLISTDDLRKLVRMREATIRKIPGIGKTYASVIIQWQKQAQFSHDVEWVGEMIQEDAVRVLELRDKIESIEAKMEDVALGSDIARTLATIPGFGAICTSELAGEIGTIDRFNNEASLALYLGMANLDNSSGKQKGSKPPKQVNTRAKAAMMIAVDRHRKKVLQSQRYYEKKRTEGKKHNQALRALGRHLCRVIFKMLKELRGYILPV

SEQ ID NO: 293743 - protein, 351 aa, unidentified
MSQKSSSAIAVIGIDIGKNSFHVVGHDQRGAIVLRQKWSRGQVEARFANMPPCLVGMEACVGAHHLSRRLKALGHDGRLMPAKYVRPYSKGQKNDFRDAEAIAEAVQRPTMKFVATKSAEQLDLQSLHRVRERLVSQRTGVINQIRAFLLERGIAVRQGQRFLRTELPQILVTPPEVLSPRMVRMIEELAADWRQLDARIGRVSDEIEELAKQDAACERLMSVPGIGPIISSAMVAAIGTGDGFGNGRDFAAWLGLVPRQISTGDRTILGKISKRGNRYLRVVFVQAAWVVLVKVRPDRWAGHGLRPWIEAAKKRLHHNVLAVALANKLARIAWSVLARGRVFEASKLKAT

SEQ ID NO: 293744 - protein, 346 aa, unidentified
MTIVGGFDVHRKQITFDYVDTGTGEVRSGQICAATRKALRAWLGEHCPGGDAEFAVEGCTGWRYVAEELAAVGARVHLADPAETAAARGPKKRAKTDRADARLLRTLLWEGRLPESVIPPAQVLEVRTLGRLYCALMDERRAWQQRIQAQLFHQGCPPITALLSPTGRDGVASAELSAAGRQYVDTALGRIDELTEQIAPLRTQLVGFARRQPGCRALQRHYGIGPLCAAIIWAEIGDARRFARSEQLVRYAGLDITVYSSAGKRSCGHLSRQGSPELRWAVFEAAKSATHHSSPDYPYYQKLAATRGGKRATLAVARKLLRRCYHSLRELDDAALALPIPQHHAA

SEQ ID NO: 293745 - protein, 400 aa, unidentified
MNEFSNNRSESEPLVSSRVLAKAIRDGGAHGAYVGLDVHKDSIAVAIAEPGRSAARFDGEIKNEPKAVAKLVRRLSERYGGEVLLWCYEAGPCGYVLYRQLLALGQDCQVVAPSLIPKKAGERVKTDRRDALKLAQSLRSGDLTAVWVPGVEQEAMRDLTRARGDFKVQEKKAKQQLNAFVLRHGHHWHGKTRWTQAHYRWLETRRLEHDWQQVVLQEYIDAVKAAAQRVAGMRRHIELALPQWSLAPVVDSLVALRGIDVLAATVLLAELGDLSRFDSPKQLMCFLGLVPSEHSTGKRRRQGGITLTGNGYARRILVESAWCYRFPARRTAHLRRKAARASDEATAISWRAQKRLCGRYQHLLRAGKNTKQTTVAIARELVGFVWDIARREMPAPSAAN

SEQ ID NO: 293746 - protein, 357 aa, unidentified
MKIVGCDLHARQQTIAMVDTQTGEFTEKTLSHEGDAVRAFYAALEGPVVVGIEATGSMQWFLELLEELGIQCRVGHPAEIRAKETRKQKHDRRDARLIWELLIEDRFPEIWMPSSKERDLRTLLRDRHQWVKMRARLQHTLQAIALNHALRQGHALWSAAGQRALEALPLPPYTRQRRDELLALYAQLQKRIQELDKEVEAQARQRPQARRLLTHPGVGPVTALATDVFLGDPSRFATGNQVASYIGMIPCEHTSGKRQRLGKMSKQGNALLRYLWTEAAMSTVRKDPELQRFYRRKLIQKGMGKARIATARKLGIRLWIMMRDQIDYEEFCRRGKLRQTGEAHAGMPDFNSGPAQQ

SEQ ID NO: 293747 - protein, 345 aa, unidentified
MKITTVGLDIAKRVFQLHGVDAAGKTVLRRKLQRSEVLAFFKALPPCLVGIEACGAAHYWARQIRELGHEVRLMPPSYVAPYVKRGKTDAADAAAICEAVTRPTMRFVPIKTAEQQAVLMLHRTRDLLVRQRTMLVNALRGHMAELGIIAPQGIARVADLMAVLFGEDTTNVPALAREALRGLAAELEALDRRMKEIEVAIVRWHKDNEASRRLATIPGVGPITASAIVATITDPFQFHSARHLAAWIGLVPRQHSSGGKQRQGGISKQGDRYLRRLLVLGATAVIRHSRSKSTAEAGWLKSLLERRPARLVSVAQANKTARIAWALLVRGEAYRMPAAVPGGAA

SEQ ID NO: 293748 - protein, 343 aa, unidentified
MPHYVGLDVSQKTTAICVVDAQGKRLWRGVCATDPGPISARISQHAGVDAKVGIETGSMTPWLVHGLRAAGLDVACLDARRVKAALQMQLNKTDENDAEGLAQIMRTGWYRAVHVKSLDAHRARALLGARAQLVGMTTRLSNMIRGVLKTFGLLPGAGRGLRFDRKVEALLEGAPEIALVVRPLLATWRQLRQQIAVFDKAVLQQVRADPICRLLMTVPGIGALSSLMYVSTVENPSRFSRSRAVGAHLGLTPRRYQSGETDRSGHISRCGDARARTLMYEAATVILHRVKRPLHLKDWAEAIERRSGSGKARVALARKLSVILHSVWRSGEPFRWVEPAMAA

SEQ ID NO: 293749 - protein, 335 aa, unidentified
MDRQYVGIDLHRRRCVIVRKSAAGEKLSSVRVANDALGIASAVAEAGPNPEVVIEATYGWYWVVDLLQEQGATVHLANPSGLNWGTRRVKNDERDAVDLIDMLRLGRLPEAWIAPPATRELRELVRYRAKLVALRSGLKAQVHAVMAKEGVLPAVTDMFCQAGNAQLDTLELADAYATRVQSLRTLIDAYDHEVARLEAQIRSRLRGHRGYRAIQAINGIGPTMAAILVAEIGDVTRFRSAPALCSWAGLTPKHKESDTTVRRGAVTKQGSRLVRWAVIEGTVRYHGGGKLAADYRQIAERRGKNKATMAIARKVLALIYYGLRDGEIRCLAHAA

SEQ ID NO: 293750 - protein, 328 aa, unidentified
MTGPSILGIDVSKDTLDVCLLHKEQTFQKRFGNRPGGHQELLRWLRKQRVRRLRACLEATGLYGEEVAQALYEAGYQVSVVNPVRIKKYADSQLRRNKTDRLDAQVIASFCATQELVWWTPPAPEWRELRDLVRHLDDLMTMRQQERNRRASGIKSPAVITVLEQHITYLDDQIEQLTQLIHDHFDRHPDLKRQRDLLRTIPGIADTTATHLLAEVRDFLAFDNPRQVVAFAGLNPCLRESGSSLRGKARLSKTGSAALRAALYMPALSAKHHNPLIRPLCERIEQDGQPKMVAIGAAMRKLLHQAYGVLKTGTPFDPDYLSHPCVSS

SEQ ID NO: 293751 - protein, 321 aa, unidentified
MDTFLSTSDRYLGIDVSQAQLDLAVRPGTQTGTMANDPDSLDRLVEQLVAQPPRLVIVEATGGLETPLVAALGAAGRPVAVVNPRQVRDFAKSLGRLAKTDRIDALVLAHFGEAVAPEPRRLPDESARQLHAVVVRRRQVIEMLVAEKNRLQRTHASLRERVRQHIDWLDQDLAGLDGELHDRLQASPLWRAKDDLLRSVPGVGAVTATTLLAELPELGQLNRKEIAALVGVAPFACDSGQHRGQRRIWGGRATVRQALYMAALSGIRFNPVLQRHYQHLRQAGKPAKVALVACMRKLLVILNAMVRDQAPWDPKKSHQPA

SEQ ID NO: 293752 - protein, 340 aa, unidentified
MNEITTVGLDLAKRVVSLCGEDGSGRVVVQRTLRREAVLGWFVPRPPCLVGVEACASARELTALGHTARIIAPEFVRPFRMSGKNDANDAAAICAAVRQPHLRFVSVKSAEQQAQLVVHRLRQGWQEERTAGLNRLRGLLAEFGRIYANSAAAVLAGARAALADETLPPALRHGVARQLEHLRELDDHLAECDREIAQQARDDPRALRVARLSGVGALTASAVAATVVDPSQFRCGRQFAAWLGLTPRQYSTGGKTRLGRITRRGDTYLRALLVQGARSALQAALRAAAPRRTRLAVWIAATYERIGYHKTLVAIANKHARLIWVLLTRDEPLRAHAAVN

SEQ ID NO: 293753 - protein, 335 aa, unidentified
MKHYAGIDLSMETSHVCIVDAEGRKVAAQCVDSTPEAIAALLERHGPMERVVIETGRMTPWVARGLHELGVAIVCIDARQAHQSLKAMKANKTDPHDAAGLAQLARTGFYKEVHVKSPTSHGVRSVITARAHLVEARVRLDNTIRGLCATFGIRPGAGQGERFLARVQAAIAVPGLGEAVASLLRARTGLVDEIRRMDRELKAISIASPACQALMSIPGVGVQTSAAFAAAVDEAGRFKRSRTAGAYFGLVPRRHQSGELDWTGRITKQGDGTVRKLLYEAANSILTRTRQTFALKTWALKIAKRRGLKKARVALARRLAVIMHAMLRDGTLFEA

SEQ ID NO: 293754 - protein, 422 aa, unidentified
MFENFLSTLFVGIDVSSKSNTVCALDFKGNKLLNLTVANNRPGAESILENIVACLNIHKLEYVVIALESTSFYSIHIANFLSCDQRLLPFSPFVYCLNPKTTANHRKSFVDMDKTDPLDAYVIADFARCGKISIKPWRGPQLLALQRLTRHRFHLVQLMTREKSYMVSNIYLKFSELAVLDKKDKPFSNMYGATSKAVLTEFLSLDDIVYSSIEDLVKFLQKKGKNKFSDPFKTADILKQAARNSYRLDKVLYEPLNIAIASSFNVIKTLENEIKSVDRAIEKTIKGFNPIEYQCLSSVYGIGPVVSGGIIAEIGSIDFFHSHNALAKFAGLTWRQKQSGKYTSTETRMTKTGNSYLRYYLVEAANSVIRYIPEYKEYYWKKYSEVTTHKHKRALALTARKLVRLIFGLLTKNQIYSCSKAE

SEQ ID NO: 293755 - protein, 317 aa, unidentified
MSHFYLGIDVAKAKLDCALRLPNGKFRAKVISNSPEGFAQLVTWLSAHDAAKPHVCMEATGIYWEEVAQFLATAGLTVSVVNPAQIKAYATSRLTRSKTDAVDAKLIADFCAERQPLPWQARSEAEVALRALVLRLDALQAMRTQESNRLEVARDAVRQDIQQHLEWLDTDIRQLVKTLNDHINNHPDLKQKRELLDSIPGIGERTSAIILAFYADTDRFANSRQAAAFAGLDPRQHESGSTVRGKPRLSKIGHTFVRKALYMPAMVTLYKTVWGKRFKERLALSGKPPKLIIGAMMRKLIHVAFGRLYWNQHFLPL

SEQ ID NO: 293756 - protein, 416 aa, unidentified
MAQLKIIYPICCGMDVHRDFVMACIASTDKQGVTQYSTKRFSTYSGGLRSLRDWLTDNNCRDVCMESTGKYWFPVHNILEADFNVVVTHPKFVKAIKGKKTDKKDAIWIADLFKHDIVRNSFIPPADIRQLRDICRYWVKLTAYSTGEKNRAQNCLTVSNYKLDSVFSNVFGKSASAIISYMLEHPGEQFDVEPFVDGHCKSPIEDIQAAADGAFNTWQAQKFKIIREHMEDLDKLKALLEDLILRLAEPYMEQIKLLLTAPGISDMMTAIRIIAEIGTDMNQFISSKHLCSWAGLTPQNNESAGKKKTTRIGKAGQYIKPLLVQCALAAANPRSKKYPEILAKYQHLKKRRGSKKARVAIARRLLTAIYQMLLKNEPYAPYIAPANDFIPKNRVLSPEQALALLRSKGYIIDVLA

SEQ ID NO: 293757 - protein, 414 aa, unidentified
MFYVGIDIAKAFSVCSVIDDKEEMSIKPFPFNSSTAGFKKLLNNIVSLDCDNKDIIIGMEATGLLFENLYRYLINLNYNVILLNPYQTAQYRNMVTMKYVKNDNIDSLIISLLIKSGRYSKGYVNEEQLQSLKVLFRHKENIKDKLKSLKRETSSLLAVVFPELDKVIKDPYNVSSLILLDKYPTAKHFENVTVKMILKLFRKVKGNNFNEAKAELLLSYTKDTIYSGVAKDARAFFIRSNITLIRALQEQIKSLEDEMLKIFDKPISSSEITKEDEDYISSVLDNLRTIPGVSDKTLLAVLAECGHLDRFKDAKSLIGYLGLYPTQEQSGNTLKYGHLAKRGAKFAKKALYLASVAAVRHNSELKQIFRNHVALGRAKKEALIIVARKLAYIIWAIYNHNKPYDPARVFIAHP

SEQ ID NO: 293758 - protein, 388 aa, unidentified
MASATLTQSVHQRAPDVVIGVDTHKDIHVAVALAPNGGRLGDFRIPTTRRGYDELMTWTEQFGYTPVFAVEGTGSFGAGLCRELVDAGYEVVEVNRPDRSTRRRLGKNDAIDAEAAARAWIAGTATVTPKAGGERVEMIRMLKCAKDSATGSRTRAINQIKAILVTAPAALRERLEPLHRSALIRACSALRPGPLDAPLAAAKRALRTLARRVLALEVEIAGLRDDLDQLTQAVCPALRQTFGVGVDNAATLLTATGDNPERLRSDASFAALCGVNPLPASSGKTHRHRLNRGGNRQANAALHRIAVVRLRWDEQTQAYAERRTEEGLSKAEILRCLKRFIAREVFRILMGGPAVRLKKACEVGAFYWTVPAPDIVNPGRVEHGSASV

SEQ ID NO: 293759 - protein, 399 aa, unidentified
MHVGWDWASEGHDITIIDSAGQIIDRWAPTHDEAGITTSLQRLAGHGSPDDLPIAIEATHSLVIDRLLAAGHPVVPIHPNAFHAARPRWGASKAKSDPGDSYKLADYLRTEGHRLRRLEPLSAETAQLQAIVRMRDDHVAAKVAATNQLQALLDRHWPGAAAVFARLDSSITLAFLEDYPTPTSAARLGEARMEMFCRRHSYSGRRPASALLQRLRSAPEPTGVLNDQTLTELIRAQVRHLRSLLTTIADLDRAAGAALLEHPKARLLAPMPRIGEINLAQVIAELGPILDRAADVHHACAEIGAAPVTRKSGKSEAVNFRWAVNTRARKALVTFADNSRHGSPWAAQLYAQARSRGKRHPHAIRILARAWARVIWACWHTNTTYNPTQHGAEQRLAAA

SEQ ID NO: 293760 - protein, 410 aa, unidentified
METIIERPAALDVHKAQVTACVRTPAPGGQREQHFAEFPTTVAGLLTLRDWLAAHAVTQVTMEATGVYWKPVWAILEDEFELLLVNARHVKNVPGRKTDMSDSAWLCQLAEAGLLRASFVPPKPIRTLRNLTRYRKTQIQERAREANRLHKALEDTGIKLDCVATDILGVSGRAMLDALVSGTTDPELLADLARGKLRQKIPALREALEGRFDRMHALWIGAILAHIDFLDEQITSLTEAIAEQIAPFAQAVELLCTITGVQRRTAEAIIAEIGVDMSIFPSAKQLASWAGQCPGNHQSAGKRRSGKTRRGSKWLDWALEEAALAATRSKDTYLAAQYARLRPRRGHKKALGAVKHSIILACWHMLSTGELYNDLGGDYFARRDPEKTTKRLVVQLERLGHIVTLEKAAA

SEQ ID NO: 293761 - protein, 348 aa, unidentified
MRPVDVRPDYQLFVGADIAAASVTVAWQAPGAAVSRPITIEQTPAGFAALRQRLLATGEAPATILVVMEATGSYWLALAQALAAHGFAVSVINPLQAHHFAKALLRRAKTDAIDAQTLAQLAALLQPAPWTPPPAIYEELRQRLTQRDALLALRQQVRNQRHALLHGPTVVPSVQARMEDLIDTLTAQIAAVEAELAAVADQDAAWAAAIRRLQSIPGIGRLTAAWLVVSTLNFTLCTTAEQAAAYAGLVPLPRESGTSVRGRPSIGRGGNGRLRTALYMATLSAAQHNPTIKPFYDRLRAAGKPKKVARCAAARKLLHLAWAVGTTQQPFDPGYQQQQHAPVPAHAA

SEQ ID NO: 293762 - protein, 418 aa, unidentified
MLKIVFPICCGIDVHKNFVVATIGTTNKSGVTDYQTRQFSTFTESLLQLLDWLKARSCIHVCMESTGKYWQPVFNVLEEYCDVVVANPKYVKGIRGKKTDKKDSIWLCDLHKHGLVPSSFIPPFSIRQIRDLMRYRFKLINFKSSEKNRIQNSLTVSNIMISSVVSDTFGVSSMKIINHILDNPDDKDFDVSSMLHASMQNKAETITKSINGNLTKPQADKMRVCIHHFENIEKHISDIERVVLGLAQPYLPQIEIILSLPSIKDVFTAIAIIGEIGSDMAVFNSSKHLCSWAGLTPQNNESAGKKKSVRVSRAGVYIKPLLVQCANAAIKSKKCPYFKIRYAQIKKRRGHKKAIIAIAHTLLNCIYHMLDKNETFNYDLYKIDSKPKQTYASQITEEMAIRYLQTLGYQIPDMRNPT

SEQ ID NO: 293763 - protein, 344 aa, unidentified
MITIGIDPHKASLTAVALDPTGRHLATRRVAVNAGAYQTLMNWTVRWPQRRFAVEGATGLGRGIAQLLAAHGEDVVDVPATLSARARLLDTGGTRKTDPADAASVAHAAMRHKRLRPVVAEDHTTQLRLLAERRDDLAVQRVRVLNRLHVLLRDLIPGGAPGDLTAAKATVLMRGLRPLTATDACRRDLARDLLNDVRRLDRQLSANEAQTRQALAATRSTLTDIHGVGHIIAGKILGHIGDISRFPTPDHLASYTGTSPLEASSGDRQRHRLNTTGNRRLNAAVHTIAVCQARDPGPGRVYYLRKIAEGKTPAEARRALKRRLTNILYRHILKDQQHRPARTT

SEQ ID NO: 293764 - protein, 352 aa, unidentified
MNQRYEKCRQYVGIDRHRRRSVVLRMDGEGEVVDCVRIDNSVSNLVAEVAKAGPGAEVAVEATYGWYWAVDALSEAGFAVTLAHPRGIASMQNRRAKTDQLDAKELADLLRIGRLASAWIAPPGVRELRELVRYRHKLVRTRAGVKASVHAVLGKCGVIPEIADIFGPIGTKMLNTLVLPDPYASRLASQRRILAVLTAEITLVEVETASRLKDSREYRSLLSIDGIGPVMASIFVAEIGDVHRFTSPDQLACWAGLTTRVDSSDAKTRRGHVSKQGSRLLRWAAVEGCQRAREPYLAERRRAIVARRGKGAQHIATVAAARHLMRVVFYTMRDGHARCLDGSLAPTVPALR

SEQ ID NO: 293765 - protein, 359 aa, unidentified
MFTERTSVGLDVHARSVVATAIDTKTGELFKQRLVPANEVVIDWLHTLPGPVAVTYEAGPTGFGLARAMATAGIRCEVAAPSKLSRPAGDRVKTDVRDSLQLARLLRVDDITSVRVPTVTQEAARDLVRAREDVRGDLMRARHRVSKLLLRHGHVYYGGQTWSAKHHAWLHRIRFADLGTRCAYEADLEAIDFAVARRDRLDATIAELAADSEFTDLTRRLCCLRGVSTLTGFALAVEIGEWQRFNGNSIGAYLGLVPSEHSSGQSRRQGSITKTGNSHVRRLLIEAAWHHKPRYVVGPVLRARWEQAPEPARARAHIGNQRLHDRWNSYTRRHKKHTVANTAIARELAGWCWSLATLE

SEQ ID NO: 293766 - protein, 370 aa, unidentified
MKKSILYVGLDVHKNTIDVAMADGQDKSQVRSYGKIDNTPDALDKLLKKLQLGKSELSVVYEAGPCGYEIHRYLTSKGISCSVAAPSLIPRRSGSRIKTDRRDAVNLARLFRAGELTCIYIPTREDEAMRDLTRSRDDFKRLQRKVRQRLLAFLLRHGFRYTGTKNWTKAHTNWLAGLKMEHPAQQIVLQEYIDAANECTVRIERVTEQIRVLLPEWSRAPFVKAYQALRGVSMIVATTVVAEIGDMSRFKKPKELMAYLGLVPSEHSSGNTIRRGSITRTGNGHVRRVLIEAAWTYNMRARKTITILKRQEGLPKSICDISWKAQTRLCTRYQRLYAKGKSKQATITAIARELSAFIWAIDQEVQQTIA

SEQ ID NO: 293767 - protein, 343 aa, unidentified
MYFIGVDHHKQVSVMTVMDENGEELKRGRVPNLRKDVARFLEGFRPFTAVLETGRSSYVMADLLRELGGEVKIANALQVKAIAHARIKTDKRDSRTLAHLLRAGLIPEIYQREAWNRRAQRVMRMRAYWVSKQTEVKNKIRALLAQQREEVRLEVEKREDGLFSPKGLEFLGRLSLESREKEVLDDLVEGYQEIRGHIRKSDGLVRALYGEIEEAARIDTVPGFATMLSVLMAVEIADIGRFPRAAELHSYAGVIPSTYSSGERSYHGHITKQGNAWLRWAALEAVYPAIKKDFGLRALYSRLARRKGANVAKVAVARRLLTIIYRVLTEKRDYVPAMKQSAA

SEQ ID NO: 293768 - protein, 342 aa, unidentified
MQVTTIGLDIAKNVFQVHGIDAAEKVVVRKQLRRSQVPEFFKALPPCLIGMEACATAHYWARELTKLGHKVRLMPARDVKAYVKRNKNDAADAEAICEAVRRPTMRFVQVKSAEQQSQLMLHRTRDLLMRQRTQVINALRAHMAELGITAAQGNAGLRELLAIIADAADERLPAEAHSSLIVLAAELQAMRTLIASIEKRIIAQHRSDEASKRLRSIPGIGLVGATAIVATITDPKAFRSGRDMAAWIGLVPRQDSTGGKQKLGPISKQGDRYLRRILVVGAHAVLKLARQKPEKYPWLTQLLARKPFKVVAVALANKMARIAWALLVKGGPYRARALVAAA

SEQ ID NO: 293769 - protein, 280 aa, unidentified
MGVRSLIKRLEPLNCARIVVEATGGYETLLVASLQAAALPVVLVNPRWVRSFARGLGQLAKTDHIDARVLALYAERAELKVRALPDEQTRELRAMCARRDDLLDMIVAEQNRLEHAPKRLLREIRSHVDYLRKRLKHLDRDIANAVRGSELWRQKNELLNSVPGVGPVLRASLLAWLPELGTLNRQEAAALVGVAPFNRDSGLMHGRRTVSGGRAPLRRVFYCATSAAIIWNPLLRAYYEHLIGNGKLHKVALVATMRRLLLILNAIIKSNTPWKSPRPA

SEQ ID NO: 293770 - protein, 360 aa, unidentified
MSMYFIGIDISKYKHDCCIISAANQKVVSKVIIKNNKAGFNELLTIIHSLANPADIRIGFESTAHYALNLELFLENSLLTFMEVNPFLISEYKKSKTLRRTKTDSVDCESIARWLMTVEYKPHSKGFYHAYSLKSLTRLRDKLIRQRSFYLVKITNVLDHTFPEFKPFFNERLSKTALYLLENYGSAEKMASMNSASYEKLRSVSRGKFSPQQFLRLKELAVNTVGVNNSIFDVELNSLLSLYKSLVKEIDTIKKEINQLIEEVHPHYMSVPGIGPLSAAVIYSEYGDISNFTNPGQMLAFAGIEPGINESGTESHGGKMVKRGSSQLRYTLINCCLPLIRFDMTFATYYAKKRGEGKPH

SEQ ID NO: 293771 - protein, 322 aa, unidentified
MTEEKVYVGVDVAKSALDVAVTDSEEARQFANNDKGISQAVSYIAGLKPTVIILEATGNLEMPLAAALQADRLPVVVINPRQVRDFARATGVLAKTDTIDARIIALFGARVKPQIRPLPDKKARDMRSLLTRRRQLVEMLTAEHNRLFQTHEDIRLGVETHIKWLEEALSDINDDLERRIKCSPSWREKDSLLKSVPGVGKVVSTAILIELPELGKLNRRKIAALVGVAPLNRDSGTMRGRRTVWGGRAKLRSTLYMAALVASRRNPIITAFYQRLLYAGKAKKVALVACMRKLLTILNSMMRTMTAWQPQTILNSVSMEVK

SEQ ID NO: 293772 - protein, 317 aa, unidentified
MEAPLIFVGIDVSKAQLDVAIRPIAQALSVTNDKAGIKTLVKHLEKLQPSLVVLESTGGLERQVMTALIGAEIAVTMVNPRQIRDFAKSTGQLAKTDRIDAAVLAHYAEAIRPKPRPLPDELTLELRERITRRRQIIDMIVAEKNHLATACKAIKKRITAHIAFLEQELDDADRDLDRFIQKNPVWKDNQEILCSTPSIGPVSSRTLLAELPELGTLGRKQIAALVGVAPFPSDSGTLKGRRTIWGGRASVRSALYMATLVATRFNPIIRDFYKRLKAKGKASKVALVACMHKLLTILNAMIKNKTRWSQDFSLKTT

SEQ ID NO: 293773 - protein, 347 aa, unidentified
MEHYAGIDVSLDSASVCIVDAQGKILKEAKVACEPEALIIWLAEHGTPMARIGLEAGPLSQWLFAEMKAAGLPVELLETRHVRAAFKAMPVKTDRTDARGIAQLMRLGWFRPVHCKSLPAQEVRALLTTRKLLQAKRHDVEMSLRGVLRGFGLKVGPTTPKTFAMRVQELVAHHDTLRTIAEALLKARAVLAQEFKAIEKRLAALARTNAPTRQLMTTPGVGAIVALTFASAIDDPSRFRSSRRVGAHFGLTPRKHQSGETDVTGRISRIGDHGVRVALYEAANVILTRAVRGSDLKSWALRVAQRAGMKKAKVALARKLAVVLHRMLADGTTFMVSKVAPSAAVAA

SEQ ID NO: 293774 - protein, 350 aa, unidentified
MNVTTYGLDLAKRVFQVHWVEPETGELKRKALARSDVSVFFARREPGVVAMEACGSAHHWGRRLRDLGHEVRLIAPQFTRPFVKTNKTDVADAEAIWEASQRPGMRYVALKSEEQQAVLSLHRIRAQLIKFRTMQANQVRGLLYEFGVVVPKGWRVLLAQAAPVLAEGARGVVPELVRRELWTQVEGLRMLTARIHELERQIGSWQRRERECRRIAQVPGVGELTATAVVAMVGDARTFRSGREFAAYLGLVPRQSGTGGRVRLLGISKRGDPYLRTLLIHGARAVVLRESRAERERDPWLKGLLTRRPKNVAIVALANKMARTIWALLAYGREFDRSWSRAHMPAAAYC

SEQ ID NO: 293775 - protein, 440 aa, unidentified
MNEEDRSRLEEFRQFRKEVRGSSEYLLVGIDVAKDKHYAFFGTAQGKTLLRRLVFENNVEGFRKLLGQARALKDQNGLRRIVFGMEPTANYHKPLGEHLIRCGHLVVLVSGVAACENRKTLDGRWDTNDTRDAANVADLVSQGKCLFYEFPVGALQDLRNLLSLKRRLKRMEHGHRVRIRNHLVAKYFPELDRYYEQSEATALAIVRWCLDPSEIAGLEYKEFAGMVGSIRGRSSQERRLQAIWKMAVDSVGCEAGPVVEFEAQVMVEGLKQIRESIRQIDEKIQELCSPFPEYEFLLSIPGFGPDVSAKVLGAIGNPFRFQNRRQVLKLAGFDLSAKRSGKRSESVIPVISKKGKADLRYALYQAAFIASIRNQDFIVYYTHQLRGREREPGIKTKMRVKLAAKLLIIAWTLMKKKEPFHPSYLRAAGPSVSTGDGRER

SEQ ID NO: 293776 - protein, 348 aa, unidentified
MNATIVAVDLAKNIFELAVADADWRIAKRQRLSRAKFLGFFVRLAPCQVVMEACGSAHFWARRIRSLGHTVRLLPAHYVKPYVRRSKTDRADAGALIEAARCAEIREVPVKTVEAQQIQSLHRLRSQWMSTRQRYVNTLRGILREFGFAIPLGVNAAKTQIGAAIADPDSEVPVALRATLAEMLQEIRLLEEKILDVERHLNALTRADVRVQQLRQIPGIGALTSTALRAVVGDIQRFPSGRHFASWLGLTPSERSSAERRRLGKISKQGDTYLRTLLVHGARSTLLAAHRAERAGHCLDRLRRWALDCERQRGHNKATVALANRLARIVWATWKYERTFDGNWSAAA

SEQ ID NO: 293777 - protein, 371 aa, unidentified
MKKGTTRYLGLDVHKATVTVALAEDGSQPVVYGTIANDPSSVRKLVRQLGREAKLVVAYEAGPTGYALHRQLLELGAECTVVAPALIPRRPGDRVKTDTRDALTLARLLRSGDLTPVWVPGEEDEALRDLVRARFDAKADVLRAKHRLSKFLLRRGIQVPPGTKAWTARYQAWLNQLSFPQAAAQVVFDDYRATVRATEDRIRRLETELRSCAQDSRQAALIAALQTLRGIGFVSAVTIAAESGDIRRFANAPRYMSFTGLTSSEYSSGQSHHRGAITHAGNAYLRHVLVQAAHNARHAPNCSRELQQRQAGLPSDLVALAWRAQLRLHQRYRHLVGRLGRPKAVTAVARELAGFVWAVGQRMAEQEVSPA

SEQ ID NO: 293778 - protein, 345 aa, unidentified
MEIHTVGVDLGKTVFNLVGLSVQGEVIVRKRFSRKQLLHFTANLRVGLIGMEACGGSHFLGRALREQGHEVRLMPAQYVKPYVKTNKNDYIDAEAIAEAVRRPRMRFVPIKTDEQLDMQSLHRVREGWVGRRTAVINQLRGLLLERGITVRKGRRHIEGALPGILEDADNKLSSALRLLLCQLCSEMKHLQSQIDEADAVILKMAGEDEACQRLDEVPGVGPVTATATISAIGNGAAFKKGRGFSAWLGLVPGEYSTGGKQKLLGISKRGNGYLRRLFIHGANAVMQQRGKQSSGLRQWLEQLTARVHRNVAVVALANKLARIAWAVLAKGQRYHPSLLAEGVCA

SEQ ID NO: 293779 - protein, 355 aa, unidentified
MNSVKYVGLDVHQSTISVAVLDADGKLVMQSVIATHASTILDFMQGVRGTLHVTLEEGTHSAWLDDLLVRRVTKLVVCNPRKNALLKAGNKSHTIDARKLAELLRAGLLSPVYHGQNSTAAVKQLVRSYAALTEDTTRIMARLKALYRSQAIACAGQKPYGSRHREEWLAQLTESGLQRRARRLYQQLDLLQQLRREARRDLILECRQHRETKLLRTIPWLGPIRTALLIGRVQTPHRFRRKRQFWAYCGLALETRSSADYQMVNGQLERRKKPVFIRGLNLNHNHDLKNLFKSAATTAAARPGVLREFYENLLRKGMRSEMARLTLARKMAAVTLHVWKKGEAFDAEHLKPQAA

SEQ ID NO: 293780 - protein, 391 aa, unidentified
MIYAGIDVAKDKHDCFITNSDGEVLFKSFTIPNNREGFETLFQKIQSVSDDLTKVKVGLEATGHYSYNLLGFLLDKGLPTYVINPLHTNLYRKSLSLRKTKTDKVDAHTIASMIMSDVNLKSYSDTSYHNEELKSLTRYRFDKVKARAKLKSSVSRLVCILFPELEKLVPTLHMVSVYSLLSEFPSAHAIASAHLTRLTNLLSESSRGRYGKDTAICFRDAARSSIGSHIPAKSLELKHTIRLILELTSEIDEIEAEIKTIMDEISSPILTIPGISYKMGAMIIAEIGDFSRFDSPDKILAYAGMSPSIYQSWQLDNCYAHMEKRGSRYLRYALYNATKYVCHWDESFGTYLAKKRAEGKHYNVALSHATKKLVRTIYAMEKSGQAYTNVA

SEQ ID NO: 293781 - protein, 391 aa, unidentified
MYYIGIDIAKRNHEVSIIDADGKILSKSISIANSQKGLDTFNNYLSSFNVTSENSIIGMESTGHYWLNLYSSLVNLNFNVFVINPIQTDAFRKMYIRKTKNDSKDSYIIAQIMRFGEFSSSSISDENIFAIRQLSRYRSSLVDECSNWKRKVITILDQVFPEYSDLFSDTFGVTSKELLSKYPLPENMLEVSTKELTSLLNKASKGRFGIGKAQEIKEYATKSFGISFAKETFSFQIKQIINQISFIESQLKELEKEITNILKSLNSEITTITGIGDILGASILGEIGDISRFEKASQLVAFAGLDVAINQSGEFTGTEMKITKRGSPYLRRSIWIAATIACFKDPALSVYYKKLIDRGKKHLTAVGAVARKMCNIIFSVLKNKKPYTPNI

SEQ ID NO: 293782 - protein, 310 aa, unidentified
MEQVYVGVDVSKDRLDVHVLPRGEVFAVARNGEGLEELNKRLGGLGVSLVVVEATGGFETVVAASLAGASLPVVVANPAQIRAFARALGKRAKSDPIDAEVIARFAGATRPELRTLPDEQTRTLADLVARRRQIVQMIAAERQREKRTQLRRVLRSIKNVVAALEKALNDVDQEIDDSVRGSPVWREKEDLLASVPGIGPVTARVLLAEMPELGSLDRRQTASLAGLAPWTRQSGQWRGKSFIGGGRAGVRTALFMASLTAVRHNPVLKAFHQRLIAAGKPKMVAIIAVARKLLTILNAILRDKRPWQIA

SEQ ID NO: 293783 - protein, 345 aa, unidentified
MPVAAASSPSTYRLFAGVDIAAATFTAVWMAPGASPSRPLTLDQTPQGFAALEARLRSAGHAPGEVLVVMEATGSYWVALATTLAQAGFAVSVINPDQAHNFAKALLQRAKTDAIDARTLARLASMLQPARWTPPPAIYAELQQRLAERDTLVDLRQQVRNQLHALIQLPVVIPAVRARMEDLIATFDAQIMAIEREIARVLPQDTAWAASAELLLSIAGVGLLTAAWLLVGTLNVTIGVNPEALAAYAGLAPHPKESGTSVRGRERVGRGGHKRLRTALYRATLAAARHNPVIKAFYERLRAAGKPPKVARCAAARKLLHLAWAVVRKGRAFDPAYGQHQRDVA

SEQ ID NO: 293784 - protein, 417 aa, unidentified
MQYAPVTLSDQPVNGLTCGIDWARDDHALAIVDSGGRGVYRGVIEHSAKGLADLIVVLNRAGAIEVAIERPDGPVVDALLEAGLTVVVINPNQVKNLRSRYGSAGNKDDRFDAFVLADTLRTDRARLRPLTPNSPQTAALRALVRTRRDLVIHRVAVANQLREHLKRVYPGPIGLFDVLDSPISLRFLTRFDCQDRADWLTPKRLGAWLATVAYRGRTDPAVLHARLTAGPRGATGAQGRAYLGITRALVATLSTLGDQIHLLAIQIGEQLADHADAHIFTSLPRSGTVRAARLLAEIGDCRGKFPTPDALTCLAGVTPSTRQSGKMRSVSFRWACDKQLRDAVCDFANDSRRANPWAADLYTRARARGHDHPHATRVLARAWLHIIWHCWQTNTPYDPGRHRALQTLLTQQPHATT

SEQ ID NO: 293785 - protein, 354 aa, unidentified
MDRRSIFVGIDLHKRVSQVTAMGETGELASWRLQNEDLPRWEKVFKPLARNAQVALEATGNWMWLADLLQEMGAEVHLAHPSKVRIIAESRNKNDRVDSEALLMLLKAGLLPEAYLASVEVRQKRQLLRLRQGLVHMRTEVKNRLHALLAQHNIHPKVTDLFGKGGRAFLERVGLPPVSNTCRRVWLEILDALSVQIKRVEDFLYKNLEDEPQAKLLQTMPGVGKLTAYLLLAEIGPIERFSRPDKLVSYAGLCPSTRASADKVYYGRTGPAGREYIKWALVEVAQTAARCDSFFASFYTRMRHRKGNGKAIVAVARKMLEIIWRMMRENRPYIPRPKANNRVGPSAPVAGSRK

SEQ ID NO: 293786 - protein, 377 aa, unidentified
MSKIRFVGLDVHADTIAVAIAEPGGEVRSLGIIPNRLESIRKLFGKLGPIQHLKVCYEAGPTGYVLYWQLTALGIACEVVAPTLVPTKAGDRVKTNRRDAEKLARCYRAGELTAVWVPDAAHEALRDLVRAREAAKKDQLRARHRLGKFLLRRGQRPTDAGKAWTKKYLEWIKTHVRFDQPALEATLAHYLHEVEHAAEQILKLERAIDEAVTQASPEIRSVIEALQALRGVAQMTAATIVCELGSLSRFESPRQLMGYSGLVSREHSSGNHIQRGAITKTGNAHLRRVLVEAAWAYQHRPNVTGFLLRRQKSLALSEEVKQMAWKAQHRLHKRYQAFALRGKNKNQIVTALGRELLGFVWAIAVHTEAQSKLLQQV

SEQ ID NO: 293787 - protein, 420 aa, unidentified
MKIFVPVAGVDVSKRFSDLCVLSPDNNVLLRQKIYHDMVSMKLAEKKLHEIELECGARPVVVMESTSHYHLILFQFFTDAGFEVVVVNPIQSGALKNINVRKVKNDRVDAYRIAMLYRLKVLRPSQIPTSSLRGLRLLTRQRSELKGDVARFKNRMTAYLDQIFPGYGEVFSDVGGSASRAVLHMCPTPEELLNADGSLLAKVICEAGNKGPKFGAEKAAKLREAAGSAQVIGVRSASNASLIKNVLDIIEGLLAAIQRIEGEIKELVTQDTRLDEDVKLLCSIPGIGFSSAVVIVAEMGDISLFRKPKQLAAYFGLDPGERQSGTFKGRKNKLSKRGSPQVRAALHMAAVSSVSRNRDGTYRNPVLAEYYERKCAEKPCKVARVAVMRKLSNIIYAVLRDRRPFELRTPQEHMALLAAA

SEQ ID NO: 293788 - protein, 382 aa, unidentified
MENPRPHEPAFTRSAREVAQGRGAEASLIQIVRADMAKTATEVQVFAGVDVSARELSVAMRSATMDREEVQSFSNNAAGHQALLGHLLRGKGRARVCLEASGDYSLDLALTLHANRRAEVSVVNPRRARRFAESLGERSKTDPVDAHVLCQYAVRMPWEPWVPPSALALRLRGLTRAIEALGVTQTQEKNRQHSLRASRALPTFVIRELQRHLEYLQLRITRLRREALRLIARDPELDRRFRLMLTTPGIAETSALQILGELAALPATLDARQWVAFAGLDPVRFSSGTTVDKKPRISRGGSRHLRRALYMPALVAIRHEPHLRAFFQRLVAHGKAPLQAIVAVMRKLLHAFFAMFRSDHSYDGSRLCLVEVASNPVAMCAA

SEQ ID NO: 293789 - protein, 309 aa, unidentified
MKEELVYLGVDIAKAYLDTAMGNEKSRFSNDALGHRQLINWIKQMPAKVQVICEPSGGYERALVRALVGAQLKISLVPANRVRQFARAAGILAKTDRIDAKLLCAFGEAMQPGTISASQLEQQHLRELESQRRHLTHLLVMEQNRAARMSDLCVCKMNRRLITQIKKQIEQLELLIQGQIKASPELSTKAEKLTAISGVGARTAALLLAQLPELGQLNRREVAALVGVAPFNRDSGRMRGKRAIYGGRKPVRHGLYMAALVAAHHNPILRNFYLRLRAAGKPAKLALTATMRKLLIVLNSALKTDLSYA

SEQ ID NO: 293790 - protein, 339 aa, unidentified
MTVKTVGLDLAKDVFQVHGISENGRVIFNKAIKRAKLLAFFETLPPCTVAMEACGSSHHWGRAMRKLGHDVKLMPAGYVKPYVKRGKNDAVDAEAICEAVRRPTMRFVEIKTEEQQAILSIHRTRDLAVRQRTQMANMVRSLLREFGHILPIGIEAVTAFAKRHLDGDHPGMPDIANGMLGMQCYQFLGLNERIDGYSKMIEQHALLNADARRLMRMPGIGPITASAIVATIGDAHQFRTGRDLAAWLGLTPLNKSSGGKERLGKITKKGDRYIRKLLVVGMTSRAVMAKRSPEKVDLWTAKIIADKPFRLATTAMANKAARIIWAMLTRKQEYRQPAF

SEQ ID NO: 293791 - protein, 343 aa, unidentified
MSEISTIGLDLAKNVFQVHGVDRSGAVVLRRQLRRGAVEKFFAQLSPCTVGVEACGTAHHWARVIGRYGHHVRLMPPAYVKPYLKRNKNDGRDAEAICEAVSRPTMRFVAVKSIEQQATLAVHTTRALLVRQRTMIANSLRAALGELGIVAAPGFEGLRQLMTRLEAPNEEVPEIMRGALLLLAKHWQALDADERVIERQITKAARADGEARRLMQVPCVGPIIASTVLAKVPDARVFRSGRNFAAWIGLTGRDHGTGGKHRPGRISKQGDRMLRALLITGASAYLRQQRMRGVSDPWLRDLLARRPYKVVMVALAAKTARIIWAMLAKGEPYRGRASALAAA

SEQ ID NO: 293792 - protein, 441 aa, unidentified
MERTFVAYIGIDWSDRKHDICLYDPESAQREYSVIGAQPQEIANWVATLQQRYGNSPIAICLEQKRGPLIYALCQYDNLVLFPINPRTVSNYRRAFQPSRAKSDPVDAQILIELLLKHPDKIPPWQAASCELRALRQWSESRRMLVGEKVRLTNRITAALKNFYPQVLEWFEDKDTQVFCDFITQYPDLHSAQAVSAEELTLFFQSHRVIRRSAIERRIHQIQTAGIPLTEDPGIVEPMQWLVQTLVIQLKALLHRLDELNQTIEQLFQSLPDAAFFDALPGAGPHLAPRLLIAFGDDRSRFGSAQAFMSYIGIAPVKEESGKKRWTHLRWSCPKFLRQSFVEWADQSRRHSSWANAFYQQQRRSGKSHPKAIRALAYKWGRILWRCWQDRVPYDEDRYLAALQRKRSPLAAMLVQSPLEGMTSAGGECGNSRVQVTLKDT

SEQ ID NO: 293793 - protein, 412 aa, unidentified
MLFIGDDWAEGHHDVVVHGDMGKTLARRRLPEGVDGLARFHELVASCWGEDSEPDPARVVVVIETDRGAWVKALAAAGYRVYPVNPKQAARHKETIAVSGKKDDFFDAGALADMGRTRRHQIRELAADSDIAEAVKIAARAHQKLIWERTRQLLRTRSALREYFPAALDAYAALTLTGPGALELLGRAPDPASAAKLTVTQITAALKRAGRRGGLAQRARDIQAALRTPHLAQPAVIAEAYAASVQAGAAVITTLNAQVKVMETKVSELFRRHPDAGIYLSQPGIGDITGARILGEFGDAPGRYASAKARKNYAGTSPLTIASGKKRTVLARYIRNRHLIDALHAQALSALTASPGARAYYDELRARNTGHDDAMRRVAGRLTGILHGCVKTGREYDEAAAWSHRASPPQAA

SEQ ID NO: 293794 - protein, 412 aa, unidentified
MEGETVIAGVDTHKDVHVLCLLDGLGRKIWSGSFGADPEGYDRLAEAIGDPGSCMVVGVEGTASYGAGLTRRLVELGYNVVEVLRPKRDKARPGEGKSDPLDAERAARKAASGRGCSVPKSQDGWVEAVRQLYVARRLAVATSTSCVACAKSMLTTAPGALRERFRGRERPKDLMPLLARGRKAGDALEESALASLRSVAAVWKEARSQVESLDERIRALLEANAPALLGVEGCGTTTAAALVVAAGDNPGRLKGEAAFSMLCGASPIPASSGKTERHRLNRGGNRQANWALYEIAIKRMAYDERTRRYVARRTSEGKSRREAVRCLKRYIAREVYRVLMDPNPDGAAPEGPELAKMRKAMRVTQKKAAAGLGLSAATLGHLERGKRRSTKLERRYYELLCELKGALPQTAY

SEQ ID NO: 293795 - protein, 349 aa, unidentified
MRFYSSAHRFYCGVDLHARSMYLCILDAGGQVVFDKNLPASGQAFLQAIAPFRDGLVVAVECLFCWYWLADLCAREQIAFVLGHALYMKAIHGGKSKNDQIDAGKIARLLRGGTLPQAYVYPAGMRETRDLLRRRQYLVHKRVEAIAHIQNTNSQYNHPVFGKKLGYAANRDELDIANRFTDPSVKKTVEVDLALIDHYDALLGDVELYLTRSAKVDDVQTYHRLQTLPGVGKILALVLLYEIHDINRFPDVGNFLSYARLVRCAHESAGKQKGSGGKKIGNPHLRWAFSEAACLFLRQSERARRWKAKQEKKRGPAKAMGILAAKLARAVYHVLTKEVAFDEQRFWNC

SEQ ID NO: 293796 - protein, 346 aa, unidentified
MKIIGCDFHPSYQQIAVFDTTTGEVMETKLMHGDGEAERFYRELEAPALVGMESVGNSLWFEQLVERLGHQLWIGDAAQIRASYVRKQKTDKRDAGHILKLLLENRFPQIWVPSHQQRDQRQLLIHRHKLVGMRTRIKTELQHVALNQGMQKKRTLWSKGGMSDLKKLSLEGWTSRRRADLLSLLSMLETQVSELDKAVEEAAGRDPQARLLMTQPGVGPNTALAFVTTIGDVARFQRGKQVASYLGLIPSERSSGSKRRLGAISKQGNVFLRTLLVEAAQSAVRHDEDFKKEYRHHCHHKPKGVVKVAVARKLAVRLYWMLRTQTPYPQVVHNEGSPSHFVVSES

SEQ ID NO: 293797 - protein, 483 aa, unidentified
MKPKRQEKNKKTTDHSTQHHWHEMNRKQRREMMRKMQTEDLSLEVIHPDAGGIDIGNESHYVAVPPGRDSQSVRLFGCTTAELKAMAAWLKQCRIRTVAMQSTGVYWVAVYDILEQAGLEVYLVNARDTKNLPGRKSDVQESQWLMKLHTYGLLRNSFRPSQEIRVMRTYWRQRNDLVQSAGRHILRMQKALTQMNLQLANVLTDISGATGQAIIKAILAGERNPHKLAEFRDPRVKASEEQIAQSLEGNWQEDLLFVLKQEHEGYEFCQKQMAECDRQLEQYLQQREDRSHGAPLPEEKRQGRLKKKRANKPQFDLREGLFRMTGTDLTRMDGIDVMTATTVISEAGYDMSKWENENHFVSWLRLCPDNRISGNKIIGKGRLPTNNPISIALKLAASTLRESKTYLGAQFRRLRTRLGAPIAIKAMAAKLARLVYRMLRYGMKYVDQGAAFYELRHRELQIKRLKAKAEKLGYRVTPIPAAA

SEQ ID NO: 293798 - protein, 413 aa, unidentified
MLFVGDDWAEDHHDVELVDETGRRLGRARLPEGIEGIARLHALIAEQMGEEWAEADGEEEPAQVVVGMETDRGPWVAALVAAGYQVFAINPMAVARYRERHGTSGAKSDAGDAHVLAEIVRLDRAHHRPVAADSALVEGIKLVARAHQAAVWDRQRHVLRLRSTLREFFPAALAAFADLSAPETLELLERAPDPDRAARLSLAKITAALRRAGRRGDLQARAAAIQAVLRAEALRQPAVLESAYAAIVTGQARMIAMLTTQITDLGQVVGDHFGRHPDAEIYTSQPGLGDILGARVLGEFGDEAHRYGDAKARKNYAGTSPITRASGRSKLVLARYARNRRLATALHQQAFSALRASPGARAYYDALRARGTSHHAALRQLANRLVGILHGCLKTRTLYNETTAWPHTNQAAA

SEQ ID NO: 293799 - protein, 435 aa, unidentified
MEEVTDEPLYRDRVCGIDIGKAELYATIRVPSDSNPARRASETRGFATTRRGILALADWLRCWQVPAVVMEATGDYWKGPFYRLEAEGFECVLADAKQVKHLPGRPKRDASDSAWLAACFERGAVRSCFVPDPEFRVIRLHTRYRRDLTDERTREKNRTEKLLESAAIKLSSIVTDLHGVTGRDIMNHLIAGERNPKVLAQLARARARRKITELEHALEGAEFFTPEHAALLKAMLERIDGLNAEIGKLTAVIERLLAPHEEQLAQAESMPGWGRRSAQDALAETGPDMSKFPTGAHLASWAGRTPLDAQSGKRTGRARHKKGNKYLGAITGETAVAAGKTATREGARYRKLARTRGKAKAQVALGNTQLKVYHKLLSSPGTRYQDLGPDYYERQAATRRKLAYHVREIEALGLEVTLARIPGPDPDGPGNTQAA

SEQ ID NO: 293800 - protein, 398 aa, unidentified
MAYIGIDISKISFVAAYPSAKGYRTQTFPNTAAGVRKFIATLSVAEHHCVIEATGNYGFLLLYLLHQSGIAVSLVNPKQIKHFARMMMAVTKTDEQDACMIAMYGEKMNPPLYKMPSQAIILLKQKKTVIRQLRKQLVASKNLRESLVVLPYRDKACLRALDKTIDFLTKQIEQLEAELADIASSEFDKQLKALTSIKGIGITLATALTLTTGGFTYFDNAKQLSRFIGICPTYQQSGTSVNIKGHINRNGDEHLRSLLYVASWTALRYNTACRECYLRLKTNGKPSKVALIAVANKLVRQAFAIATTDSTYIDGFVSTKNNLSFIFLPLYLLFNTVRFHCCSPLNKFYFRVVVISPKCSGRIVSVSVVPITPAFDISHSRGTYLDGCCIDIMSDGYD

SEQ ID NO: 293801 - protein, 316 aa, unidentified
MVGIDVASMHVDVATIGAELPEALSRVNNDADGHSALADGLARLRPELVLMEATGGYEAALACALQAAGLRVAVVNPRMARDFARAMQRLAKTDRIDATTLAEFAGVLARRPDCERFIRPVSVPEQQDLAALVTRRRQLVTMQLSERQRLRLARPVTRPSIEALLEAIARQLDDVDGEMARHVEQHHAQMAQLLQSVAGIGRVAAATLIGELPELGRLNRRQICALVGVAPYANDSGASRGRRRIVGGRFEVRRALYMATLTATRHNDAIRTFYERLVAAGKLKKVALIACMRKLITHLNAIARDHLNAQVRPVRA

SEQ ID NO: 293802 - protein, 326 aa, unidentified
MEHELHYIGIDTAKEKLDVDVLRPDGRHRTKKFANPTKGHDELVSWLKGHKIDHAHICIEATGTYMEPVAECLYDAGYIVSVINPALGKAFAQSEGLRNKTDTVDARMLAEFCRQKRPAAWEAPHPLERALRALVVRHQALTDMHTQELNRTETAREVQRPSIDAHLLWLEAELKRLEKQIKDLTDDDPDMKHRRKLLESIPGIGEKTSAVLLAYIGLKDRFAHARQFAAFAGLTPRRYESGSSVRGASRMSKAGHVSLRRALYMPAMVATSKTEWGRAFRDRLAANGKKGKVILGAMMRKLAQVAYGVLKSGVPFDASRHNPVAA

SEQ ID NO: 293803 - protein, 355 aa, unidentified
MDRYIGMDVHAASCTLAIISEKGRKLRDFVVETNGQSLVEAIRMIPGHKHLAFEEGLQSAWLYETLNPHVDDIVVAGITTSRGQKSDKIDAYGLAEKRRVGSLGKQVFKAPRQFTRLRELSRIHMTLVSDTVRVQARIKSLYRSRGILVTGVNVYGLRHRKEWQSQLPSSIQTRATRLYDHLDFILEQKKQAEADLLREAKKHRIFSMLETAPGFGPIRAARLLPIVITPHRFRTRRQFWSYCGLGIVTRSSSDWVQTSDGKWIRARVPQTRGLSRQHNHVLKDIFKGAATSVIIQRNKDPIYGRYERLLDGGTKPTLAKLSLARMIAATVLRMWKDEKEYDPGRASPSTTTRES

SEQ ID NO: 293804 - protein, 396 aa, unidentified
MYTLFVGIDVSKDTFSATGFDAKGEVRFTLSVPMDQSGFAALLKAIRARARDLTTVMAAMESTGCYHINLFSFLCNRKITTVVLNPLLIFNFAKLSLRKTKTDKKDSLTIARFLLVHKDSIEQFTLSQPIKDLRELARERESLTHLIAATKNEIKRLVQTTFPELEGMANVFTTTMLLFLKEYPSACLIKTAGISAVAGALERSGRDRRVSVSAEDIIAAAKRPVASFSAARELILPEKISTLLHLMEQVDHISDMLTEMCQSMVIEEMQIITSIDGIGDTAGAAFLAEIGAIDNFPSAKALIVFAGLDPTVYQSGKFEGTSRISKRGNRHLRRIIYLMALGVIRVNKIFREYFLMRRKNGLPYRKAVLATAHKLVRVIFAMLSHKSCFRAKENSL

SEQ ID NO: 293805 - protein, 370 aa, unidentified
MLDTTTFIGLDVHARSIKAVSLDVMTGEVRAATFGYDAGAVAEWVRSVDPRARCVYESGVTGFDLQKRLSGLGVDCAVGAVSKMIKPSADRRRKNDRNDAEFLARMLSVGNVVEVWVPDDECEAARDLTRALEDARDDLSRSKQRLSKFLLRHGLVFDERTPTGRRKGNWTRAHWSWIESIRFAEGADNDVLAYYVDAVRRAAEEKARLEGLVEAEARKPRWRKRVDSLRCLKGVDTATAADLVFEAGEFSRFRNARSFAAWVGLTPSEHSSGENDRRGAITKAGNKHLRKTLVEAAWHYLTCSGRPKDLAKGQAPDRVARRHAAKGVRRLVERREALLARGVHGNKANVATARELACWVWAVGLMAEEA

SEQ ID NO: 293806 - protein, 400 aa, unidentified
MAEQLAHLWVGIDAGKAHHWLAAVDETGATVWSRKVPNDESAILTALGEILALSDHVHWAVDIAGTASALLLALLAAQDQEAVYVPGRTVNRMSGSYHGEAKTDARDAYVIADTARLRRDFTSIKVPAQLAADLALLTAHRTDLIADRVRMLNRLRDVLTGIFPALERAFDYADHKGALILLTRHQTPAAIRRQGQARLTAWLKGRNVRNPDAVAATAQQAARLQHATLPGQEVAAGIVADIATQILALDDRLKHVDEQIRRTFRTHPQAHIIESLPGMGPILGAEFIVAAGDLCAYATAGHLASAAGLVPVPRDSGRRTGNLHRPKRYSRRLRRVFYLSAQTSIIREGPNRDYYVKKRSEGCKHVQAVIALARRRVDVLWALLRDGRPFTLHPPVLQAA

SEQ ID NO: 293807 - protein, 415 aa, unidentified
MKSLYRCVAGLDVHRMLYVLTVLTEQADGSLSKQQRQFSGFQRDVRALVSWLQSLGVELVIMESTGIYWKSVYAALEQAGIPAHVVNARHVKNVPGRKTDIADSEWLAQLGRFGLIRPSFIPPKDLRELRLVSRYRQKLSQMQAGEKNRLHKLLDDAGIKLGAVVADIDGVSARAMIEGLIAGKPIEQLADLAKGVMRHKREVLELSLEGELTARHRLVLEHIQAHNRYLETELATLDTYLIKAMEPYRDYWQLLQTIPGIDQISAAMILIEIGDDLSAFANAKHLASWAALCPGNHESAGKRKTGRTRKGNHAIRYLLCEAANAARRTKSALHEKYQSLVARRGHKKAIIAVAHQIIRTIYVLFTRRHAYRDSGFDYQAALVKKNAPRWIKALKQFGYWPKLDSSAHPALIPAR

SEQ ID NO: 293808 - protein, 337 aa, unidentified
MGLYCGIDLHSNNHMLTVIDEADRRVYERRLPNDLAVTKAALEPYRAELVAVAVESTFNWYWLVDGLMEAGYAVRLVNTAAVQQYEGLKHTDDKHDAFWLAHLMRLGILPTGYIYPKSERGLRDLARQRMRLVQHRSSLITSVQNQVWRSLAVRLRSETIKGRGKQPWPEISDPDLALSVKAGRAAIDTLTVQIERLEKLILERVDRSPRFRMLKTVTGIGPILAMTIALEVGDIGRFAGVGEFASYCRCVDSQRLSNGKKKGEANRKCGNRYLAWAFMEAAHFAIRNLPAAKRFYERKRRQRHALLAVKALAHKLARACFYVLRDQVPFAPERLFV

SEQ ID NO: 293809 - protein, 354 aa, unidentified
MSKYTIKLFVGMDLGDKKNQICILDHDGSIVHSTSISNTAMGLNQFFDRFDTPKEVLVSMETGTCSPWISHLLSARGFRVLVGNARKLRAIWDTDNKYDDRDAEMLARIARFDPELLYPVSHRSRAAHMDLAVIKARDALVRCRSKLINFLRGISKTAGERLPSCSAEAFDRTVVDHIPEDLISAAMPCLNMIHELNLQIRQFDRQIEKLCADTYPETKALREIVGVGPITALSYVLTVEDPHRFSKSRDVGAYLGLTPKRDQSGETDKPLSITKAGNSYLRCLLINSAHYILGPFGPDCHLRRYGMRIASRGGKIAKRKAAVAVARKLAVLMHRLWISNENYDPWYHYCKKAA

SEQ ID NO: 293810 - protein, 330 aa, unidentified
MQDILTCVMGLDVHRDIIVACLVKGAVDAEPEAETRTFSTLIPEMQKLRDWVIEAECRNIAMESTGIYWQPIYEMLESCFDGEISILVVKARHMKNVPGRKTDMKDAQWIATLLRAGLLKGSFIPDKTFRELRHLTRYRKSVVHDITAQKNRIDKFLQSSGFRFTAFLSDTFGASGRNIIRHLIERGSIDREALDKCLKTKTRNRIDEILVALNGSLSVHQRRFLNIVFLHLEDLEAHKHTIEDEITEEVLKHTDALNLLCSIPGIDVTAAAAIVAEIGTDMSAFPDSQHICSWAGLSPGNNESAGKQITDSLSSIRRPRHSVVSPVKTV

SEQ ID NO: 293811 - protein, 463 aa, unidentified
MKNKKSTGKRTRRSRPLLKRINLNAAGIDCGSAMHYVAVPPDRDPEPVRSFKTFTSELHRLADWLVACGVNTVAMEATGVYWIPIYEILEARGLEVLLVNARHVKNVPGRKSDVTDCEWLQELHSVGLLRGSFRPVAEIATLRSYLRHRETLIQSAATTINRMQKALVQMNLQLHVVISDITGTTGLRILRDIVNGQTDPQHLALHRDARCQASQAEIAAALTGHYRPEHLFVLTQNLELYDAFHRQIESCDIQIEGHLRTLAASADTPLAPLPAARSRQKARGHEPRFDVRTPLHQLSGADLSQLDGIGPYNALRLICEIGTDMSRWPSERHFTSWLTLAPDNKVSGGRLLSSRTPPSANRAAAVLRMAAVSLGRTQTALGAFYRRLAYRIGKAKAITATARKLAILVYRTLKGDLVYQDPGAATYDLRHRESLVRRLRQRAGALGFNLVNGQTGEILDGVS

SEQ ID NO: 293812 - protein, 462 aa, unidentified
MARRQAQPRDPAARKLAGSLPIVNPNAAAIDVHSDNHVVCVPADRATPNVRTFGANSCDLLQIAAWLKGCGITTVAIESTGIYWIPLFELLEAQGFEVYLIEPGQASRCGARPKTDVLDAQWLQRLHSHGLLQGSFRPPDEVIALRAYLRQRQMLISYASTHIQHMQKALEQMNVKLTEVVSDINGVTGLRIITAILAGEHDPARLAALRDGRCKNDEATIAQALEGTWREEHLFELSQAYELYRAYQMKVTECDRRIEQAVARLPDRSAGDALQRKLPTRGRKPNDLRFDGANPVFRALGVDLTAIEGIDVSTALVILGEIGVDVSKFPTEKHFASWLGLCPNHQASNHKLKSRRVRKGKNRVAIALRMAARSLHRSHSALGAFFRRMHSRLGTKGAITATAHKLARYVYAMLKHGQAYVSQGLAEYEAAMHERMTRGLRKKARALGYDLVASQQSSPAVP

SEQ ID NO: 293813 - protein, 430 aa, unidentified
MKSNTQNAKIEAITEKTLVLGIDVGSEMHYARAFDYRGIEYSKKPFKFSNTEAGFVTFKEWILDLKERHEKDKVIPGMEPTGHYWFNLGKFLQDNEMKPVLVNPHHVKKSKELDDNNPTKNDRKDPKVIAGLVREGRYMIPYLPDGVYADLRTASNIRFQLQAELTRIQNRISRWFNIYFPEYKTVYGKPDAKSGMLILKAAPLPEDILTLGIDGVNQIWRDAKLRAVGKARAKTLIEAAEHSVGSKEGAVAARMEIRMLLEDYESRNIRLQEVMTLIEGLVKQIPMAEKLLEIKGVGIRTVSGFLAEVGDISRFNNPKELQKLAGLALVENSSGKHKGETTISRRGRKRLRYLLFEVAMSLVAKNPEFRELHNYYTTRRLNPLKKMQSLMAIAAKLIRVFYAMLTKGVDYDPKKMVSDIKRPAVYLQAA

SEQ ID NO: 293814 - protein, 368 aa, unidentified
MPRIAEAVVPVTGGVDTHADVHVAAAVDQVGRVLGTQAFPADAAGYAGALAWMRAHGELAKVGVEGTGSYGAGLARYLASCGVEVVEVIRPNRQARRQRGKSDTADAVAAALAALNGEASGVPKSHDGAAESIRMLKVARAGAVKARTQAGNQLRDLLVTAPQALRQQLAGLPRGQQVEMAARFRPGDLAGPAGGARAAMASMARRHQQLAAEITRLDTALEELVTRAAPAGFLAKRGVATQVAATLLATTGDNPGRVRKEASFAALCGASPVDASSGKQLRHRLNRGGDRQANSALWTIAMTRLAHDPRTKAYLARRTTEGKTKKEIIRCLKRYIAREACKALCRPQRPTRAPAPQAKQDLSAPALT

SEQ ID NO: 293815 - protein, 354 aa, unidentified
MTSTKYIGMDVHKESISIAVMNAAGKIVMECVIETKANMILQCIDGLRGDLHVTFEEGTSAAWLYDLLKPHVTELIVCDPRKNASMREDSQNDKIDARRLAELLRIDHLSPVYHGEHGLRTLKELVRSYLTVTKDLVRVKTRVKAIYRSWAIPCNGKEVYAACHRAEWLEKIKELGVRRRAEFYYQQLDALRVLRQGVRRELLAESKKQRAWKQLCQIPAIGPIRAAVLLGILQTPHRFRTKRPLWKYSGLAIETCSSADHRSIHGQLQRSKKNSVRGLNQNCNHDLKNLFKGAAVIASSKPGPFQEFYAALLANGMRPEMARLTLARKIATIVLIVWKKGVSFDAQHLKPQTA

SEQ ID NO: 293816 - protein, 417 aa, unidentified
MISFPKRERAQRAAACVGVDAGKFSHTLVVRPQHQPDSKPFSFPTTRAGFDDALAFIRRQVLHAAAETILVGIEFAGNYGFTFAHYLAQLGFSIVSVLPAHTKRWKDVAHNQPLKTDAKDAGTITDLVAQGHFVGFPFLTPAYADLRYLVTARERLSLLRRGAITQLRTLLQVVFPEFEALFPLVTKRTPTALLRGFPTPHELVAAGKAKVRRLLRAASRGHLGAETADRPLRAARATLGLPGAQARLRQEILLTLERIAVFERQIRTLEAELVAALEAVPESPYLLSIPKVAPVTAAIFLGSIGDPRAYESGQQILRVAGLSLIERSSGVLRGTKRISKRGRPLLRQAAYMFAVRSITQGSLFRAEYEALCQRNGGAKMKAVVAVMRSGLRLLYSIARDRRPFTVEPPAHRRAAAA

SEQ ID NO: 293817 - protein, 321 aa, unidentified
MTHFHLGIDVAKAKLDCALRLPNGKFRSKVIANTDNGFTQLVAWLASHQAIPLHVCLEATGIYWESLAQFLATAGVTVSVVNPAQIKAYAASRLSRSKTDAVDARLIADFCAERQPEPWQPPSPEEITLRALVLRLEALQTMRTQESNRLGVARDAVQGDIQQHLDWLDDAMQQLVKTINEHIDQHPDLQQKRVLLDSIPGIGERTSAIILAFYADTDRFANSRQAAAFAGLDPRHHESGSSVKGKPRLSKIGHAFLRKALYMPAMVTLYKTAWGQRFKDRLTGAGKPPKLIIGAMMRKLIHVAFGVLKSGKAFDPALHSA

SEQ ID NO: 293818 - protein, 390 aa, unidentified
MPMNYVGIDISKYKHDCFILSCFGEVVNEGFSFTNDAEGFKKLEKELNLCGKGNVRIGMEATGNYGINLKLFLEEIGFEFMEINPLLVKEHIRGKTLRRTTTDKLSAKAIAQYMLSNGYRPHQTQFYSKFALKQLTRFRSRLVSIRSTYLVKMTNVLDCIFPEFKPLFDNKFSVTALYILAHYPNPEAISNMNSRSYDILRRKSRGSFSMDKFVTLKALAKNTVGVYDKCYGAQLETLLDLHSQIDCKIDEVEAEIIRIVEDLNPPTLSVKGIGSVSAAVIISEFGDISRFESPTKMLSFAGLEPGYFQSGTSEHKGHMVKRGSPYLRNTLMNCCRALRLHNETFAVYYRKKVSEGKPEAVALSHMAKKLVRLIFALETRGEPFDLNKLR

SEQ ID NO: 293819 - protein, 325 aa, unidentified
MLGIDVSKATLSCALLDAETQQTIWFKEVPNTTQGVKKLLGQTPQSSPWILEPTGRYGQEVARLAREQGRNVLLALPQKAHFFLKGLQHRAKTDKLDAKGLALYGINAPQLMPYPLKDAMHDELDQLLSARKGISDSIRRLEAQRRDLPRAAKALEPSIAALREQLKELDRQIATLATAPEMQVAKELQKVPGIGPVVSATLVSCLTSHHFNHSDQFVAYCGLDVRVCQSGQKRGYLTLSKQGPAELRRLLYVAAQASLRANDSPFKAQYERERAKGLPSTAALCAVSRKMARLCWSIVHHGTSYDPQRVYQQSQPQKEEANSQK

SEQ ID NO: 293820 - protein, 350 aa, unidentified
MMIIGCDFHPRFQQIAFVDQETGEYGERRLSHPGEAEQFYRSLAGRQVRIGAEATGNFRWFRRLMQELGLEFLLGDASAIRASCTRKQKTDKRDARHILTLLVEDRFPAVWQPPMENDDLRQLLMHRCRLVRMRTGVKNQLDSMAKNEGVLSPRVWSSKRRSEIEALPLPGWYAQRRSDLLGLLEELDERIKPLDKAVGEAAEGNAEARLLMTHPGVGPIVSLAYVLTIGDWRRFPRGKQVGSYLGLIPAEESSGNSRRLGHISKQGSTLLRWLLVEAATTAQRYDASWHRQYVRLSMTKHHGVAKVAIAHKLAVRLYWMLRSGDDYSKVMERSSHAGSPCSAVASGPRG

SEQ ID NO: 293821 - protein, 315 aa, unidentified
MNELNFCGIDVAKRSFVVGISSRKQTKTFTHNPKGIQQAVEYLKNCANLSLVVLESTGGLEIPLAKALYRADFRVVIANPRQTHQFAMAKSLAKTDAKDAKMLASYAKMLEFDGEVEKQLYIPPTPEMEQLEALVLRRTQLVEMRVAEKNRLHQVHESQQASVQQLIAHFDGLIDKLEKQIAVVNESFNDTLKKFNDIKGIGAITSATLMSMLPELGKLNHKQIASLVGVAPHPKESGNQKWRSRCSGGRQAVRNALYNAANVARQHEPKFKAFYERLRAKGKPFKVAVNACMRKLLTVINAIVRDGSQWQANTV

SEQ ID NO: 293822 - protein, 412 aa, unidentified
MDVIYPQCCGLDVHKKTVTACLITSIEGLEPVKEIRTFRTMTADLLALADWLQEAGCTHVAMESTGVYWRPVYNLLEGQCELLVVNAQHIKAVPGRKTDVKDAAWIAELLRHGLLRGSFIPSNPQRQLRELTRYRSTLVQDRARTLNRWQAVLEDANLKLASVVTDIYGVSARAMLEAILAGERDGEALADLARGRLRAKRDQLKEALEGRVTAHQSFLLTEHLSTLEYLDEAIARVSGEIDQRLIADQEAIALLDTIPGVGQRAAEIRIAEIGTDMSRFPSAKHLASWAGMCPGNYASGGKRRSGKTRKGSRWLWQVLVEIAHVAAKTKNTYLAAQYKRIAARRGKKRALIAVGHTILTIVYMMLTRKQPYQDLGAAYFDQREQQRVERRLVQRVERLGYEVSLQPRALAS

SEQ ID NO: 293823 - protein, 320 aa, unidentified
MSVTSVTVGIDVAKAHVDVCVLGAKSSAQRFDNDAEGHSALAAALQPLDVGLVVMEATGGYEAALACALQATGLPVAVINPRQARDFAKSMGRLAKTDAVDARTLAELAAVLLRRDDLQRFLRPLADERQQWLAALVTRRRQLLTMLHSERQRLQITPKKLHASIEAIEAAIKAQLDEIEEQMVTHVREHFGELDTLLQSAAGVGPVASATMIAELPELGRLNRREIAALVGVAPMANDSGGSKGRRRVQGGRFEIRRVLYMATLTATRYNPAIKAFYERLKAAGKLPKVALVACMRKLLTTLNAIVRTGKPWDKSLHCA

SEQ ID NO: 293824 - protein, 309 aa, unidentified
MLSSVGIDTAKATLEICIKPQKIRFEVANNSAGFEALLERLKDFNISRVLIEATGGYEKDVLIALASAGLETICINPARARKFADAMGKKAKTDKIDAEVLADFAAHLSAPQGQPVSPEREELRELVKQRAQFVQSRDDDKRRRQQCRSATVMAHFDEHIEQLKVLIKRLDEEIDQAMVQLDDTRARQLLAVTGIGRVTAANLLASLPELGQLDRRQIAALVGVAPYNNDSGSHRGHRQIWGGRAHVRRVLYMSSWIIIRHNTEFKARYEALRARGKCAKVALVACIRVLIVRLNAMLRDNTPWRVQTA

SEQ ID NO: 293825 - protein, 339 aa, unidentified
MPQVATLGIDAAKNLFHLHGVDAHGKVVLKKRLARTKVLAFVAGLAPCLIGLEASGSAHDWARELTKLGHTVQLISPQFVKPYVQGNKNDPKDAAGICEAVGRPHMRFVPIKSVDQQDMQALHRIRERQIKARTALVNQIRGLLAEYGVVIPKGVAQVRHKLPFILEDAENGLTMLAREWLQALAAELQALDQRIRETDTQIQRVFESHDACQRLAQLEGVGPLTATALVAAVGEATTFKNGREFAAWLGLVPRQHSTGGKPLLLGISKRGDRYLRKLLIHGARAVVRTVDGKQDGRSRWLQGLIGRRGKNRAGVAQANKTARVAWALLAKGERYRPAA

SEQ ID NO: 293826 - protein, 472 aa, unidentified
MKSKSSRKRNPVDPVAEEIPDAEHELVIERVAAIDVAKASGKVCVRLPGQTGRRFSRVWDVPARTGAVSELAEQLIESGVEKVTVESTSDYWRIWYYLLEAAGLDVQLVNARDVKNVPGRPKTDKLDAVWLAKLTEKGLLRPSFVPPAEIRQLRDYTRLRVDLTRERTRYWQRLEKLLEDALIKISAVASTLDTLSTRDMIEALIAGERDPGRLADLARGKMKAKRSELIAALDGRFDDHHRELARMLLDQIDTLTAQIATLTSRIEQLLAAMPDTRSRGDGGTGGDPDRPSTGHGVEPETAARFTDATLLTPVERLDEITGIGELNAQVVLAEVGLDMTRFPTPAHLVSWAKLCPRTIQSGPVTRGGKTGRGNPYLKGALGEAAAAAARTDTFLGERYRRIVKRRGKLKALVAVARAILVVIWHLLANPEARFRDLGPDYHTQRIHTERKLRNHIAQLTAMGYQVTLEPAA

SEQ ID NO: 293827 - protein, 459 aa, unidentified
MQTFYLGIDASKGYADFIILNTHKKVVLESFQLDDTFDGHCLLYELLMNFLTDHPDSIICAALESTGGYENNWYNALLGFQGTLNLQTARINPLGVHHNSKADLKRNVTDKISARSVAEYMIAHPEKVSYQSQDQLASLRKQWGFIKMLTKQCTQILNQLGSLLYSANPEILTYCKDGVPAWVLKLLVKYPTAANLARAKVSAISKIPFVSTTKAEALVLNAKKSVASAVDEVTQQLVAATVKQILHLKETIKIQTAIMAKACAVPEVELLKTFIGISDASAIGLILNIQSVKRFKSVKKLAAFFGLHPKLKISGDGVSAVRMSKEGRAEPRQILYMVAMVAIIHNPLIREIYEKRVSQGMEKMAAIGLCMHKILRIVYGMLKNNRPFDPEIDRRNRQKPITPRKKRENKIRRYQDYDSKAPISRRQNAKRMEQEQSQSDNGAAVRDLSPRSIPDVSLP

SEQ ID NO: 293828 - protein, 366 aa, unidentified
MEKKIAYVGIDYHLNSLSIAVMVEGEKDLYQSIRIENKDKVILKYMKKLAKDFEIRACYEASCNGYSFQRKMLQWGYHCDVIAPSLVPKKKGDRRKNDFRDARNLAQNYAHGMLSVVHPPTEYEESVRSLIRCRLAFKEDEKRVKLQINSFLLSQGLDWPKNKWTHQHRMWLANLRFDNPYLQQVLDEYLEHLQYLQIRIKNLDSQIEQIAHSDIYASSVKRLRAFKGISTLAAMILIAEITDFRRFPNPRALMAFLGLIPSEDSSGDRQKGGGITKAGNRRCRTQLVESVQHYVRKPVIGPQMAQDLAEVDAKSANLARKCMERLHKRYWALIMKGKARQVAITAIAREFVGFIWAMMQDEPVTT

SEQ ID NO: 293829 - protein, 316 aa, unidentified
MAEETYIGIDVSKAELVVAVRPSGERMTLANDRAGIKRLVGRLGEIKPQLVVVEATGGLQRQVVAGLWMAGIAVAAVNPSWVRNFAKGRGVRAKTDRKDAELLALFAERERPEARPPADAETQALQELVMRREQLVEMSVAEKQRLHRASGTMRKELRHHIAYLEGRIKELEEDIDKTVRRSEAWRRKSEIVRSVPGFGQHFSAMVLAKVPELGTLNRKQIGALIGVAPMPDDSGSRHGRRIIAGGRFEVRNKLYMCAMVAARSNPVLKQFYERLVARGKPKKLALAAVMRKLIVTLNAMIKTNSLWRPPCPDPGV

SEQ ID NO: 293830 - protein, 426 aa, unidentified
MKRTQNAKILQIKNETLVVGIDIGKESHFARAFDNRGIELARLLKFSNTAQGFEQLDRWMQDTCKQQKKTEAITGFEPTGHYWFTLGDHLKDIGHKLAIVNPFHVKRTKELDDNSPTKNDRKDPKTIAMLVKDGRYRDVYIPEDIYQELREAVEERERLQERMNAVHNRVIRWLDIRFPEFQQVFKKWTGKTALLTLKTFPTPAMVIEAGEDKILATWRTSIKRSVGKKRAQALVKAAVSSIGRTNGNIASQAGLQNLLAEYELYQMQYEQLEQLMWELLLQVPNAVKLLGIKGVGLVTATTFVGEIGDIHRFEDPRQIQKLAGCNLVENSSGKHKGKTTISRRGRKRLRHGLFMAMIAILGKNQEFRELHQRNLTREKNPLNKMQSIVALCGKLIRIFFAILSKGVDYNPEKMMGDIQYSVKAAA

SEQ ID NO: 293831 - protein, 404 aa, unidentified
MWYVGLDWADTHHDVEVLDEAGKRVGARRFAHSHDGLNELKQFLLSIAASPERLACIVETNHGLLITFLLEAGIPVYPVNPKSVNQLRKSAGAKTDQIDAHLLAKIGRLELAELRRLEPDSPIVAELKTLTRDQDALVQTQTRLVNQLTACLKEYYPAALHLFAKLQQRSTLVFLQTYSTPQAAQAASLEEITATLRTGKHTNPTRGAPKIVEELHRPQLVANEVIVRAKSRLMLSLVKQLLVVIEEIASYDQAINTLFLNHSDQAIWRSLPRAGKRLAPRMLAEWGDDRRRYADAASVQALAGTAPVPFQSGNYAKAHKRFACLKPLRNALHQFAWQSTLKEAWALAYYQRKRAEGKTHSMAVRALANVWVRIIYRMWENKTCYQTATLEAAKLAHAPRQHAA

SEQ ID NO: 293832 - protein, 403 aa, unidentified
MNMNAVGIDVSKGKSMVAILRPYGVIVSSPFEIKHTSGNIQSLIEQIKSIDGESRIVMEHTGRYYEPLARELSLAGLFVTAVNPKLIKDFGDNSLRKVKSDKADAVKIARYTLDSWTELKQYSLMDEIRIQLKTMNRQFGFYMKHKTAMKNNLIGILDQTYPGVNAYFDSPAREDGSQKWVDFAATYWHVDCVRKLSLNAFVDHYQKWCKRRKYNFSKDKAEEIYGAARELVPVLPKDDLTKLIMKQAIEQLNTASKTVEELRALMNDTAAKLPEYPVVMGMKGVGPSLGPQLMAEIGDVTRFTHKGAITAFAGVDPGVNESGTYEQKSVPTSKRGSSSLRKTLFQVMDCLIKTKPQDDPVYAFIDKKRAQGKPYYVYMTAGANKFLRIYYGRVKEYLTSLPE

SEQ ID NO: 293833 - protein, 465 aa, unidentified
MPNHPKPRSKPRKTTRKMDPTEGLPALNLNAAGIDVGSAEHHVAVPGDRDAEPVQSFGSFTADLHRMARWLKDCRIQTVVMQATGVYWTALYDVLESYGLEVNVAHAQHTKTLPGRKTDVQECQWLQKLHTFGLLNKAFRPAEEIRVLRSYLRQRENLVAAAATCVQHMQKALTEMNIQLANVISDISGTTGMAILRDIVQGERDSEKLARHKHALIRATHKEIARSLEGTWRPELLFVLEQSLDLYDTYQDKIHSCDQRIDEHLGSMEAKVDPLREPIPQPPRRGKGARPHQPRFDLRGHLYRITGVDLTQIDSIDVKIAQTVISEVGLDMSRWKTEKHFASWLGLCPDHRISGGKILKRGTRRMINRAATALRLAAWSLIRSQSALGAKFRRLRSKLGAPKAITAMAHTLARLIYRMLKFGHQYADRGIEYYEAKYRQQQLYWVAKKAATLNMQLVPIPDVPN

SEQ ID NO: 293834 - protein, 337 aa, unidentified
MRFIGVDLHTTQITVCCLTEAEEPQTKTYSLVKLAEFVKELKPTDSVAVEATGNTNWFVGQIENQVKRVVIVEPRSFEVIRRSVKKTDERDAEALAHFLRAGLLPEARRRTPEQEAVRSLAQTREKLIGLRTKLINQIHALLVRHGRKEKRERLTGGRGLAQVVEKYEWSEAERVELEVIRQQVEALGEGIGKLDKAISEAGEQLRGFENLVSIKGIGVKSAAVLLSVIGEVADFKSEERLASYFGIVPRVRNSNETVHHGRITKQGSRMGRTTLVQCTLVAIRYSPYLRKFYQAVKERRGAGRAIIAAARKFLGIIYNTLKNDWVFEDFPNFVLAE

SEQ ID NO: 293835 - protein, 338 aa, unidentified
MPIYAGMDVSDKTTHVCVVDAEGTVIRRDVVASDPDVLAKWLKRHCPGLVRAVLETGPLSTFLYHGLAEREVPVICICARHAKRALSARINKSDVNDAESLAQLSRTGWFKQVHMKAGATHIDRAALKIRAQIVSSRNAMANQLRGMLKLFGLRLGTVTTPGKRRERLDALFGQRPDLRPVFASLIESIEALDGQISRSLGLLEARAAADPVCTRLMSVPGVGPITALAFKSSIEDPGRFAKSSDAGAYAGLVPRRSQSGERDFKGRISKAGDAMLRSALYEAANSVLVRLKRPCALQDWGRRLAETKGPKRAKVAVARKLAALLHKLWQSETEFRWA

SEQ ID NO: 293836 - protein, 340 aa, unidentified
MNTMTLLGIDIGKHSFHLHGQDAKGHQVLRKKTSRGQLLCTLAQLPACTVVMESCGGAHWLARQIGALGHAVKLIAPQYVKPFVKGNKNDFIDAEAICEAASRPAMRFCSIKTAEQQTLSALHRVRDSLIGQRTAMTNQIHGFLLEFGISLPVGVAGLGRVPTLLDNPQHPLPLGLKGVVMRLYRQIQQLRDEIKDIESELKQQLKDDEAGSRLQSIPGIGPITASAVLADIGDASNYRSGRDFAASLGLVPRQYSTGGKTLLLGISKRGDKHIRQLLVQGARAIMRYIDKREDALGAWVRELLTRRHSNVVACALANKLARIVWAVLAKGGQYDPHPHA

SEQ ID NO: 293837 - protein, 427 aa, unidentified
MNDTDLSRIEGFRQLKQEIRGSDRHLIVGIDIAKSKHHAFLGTANGRTVLKGLIFENSRQGLEKLLTRVQFYMDRDGFREVVFGVEPTSVYHKPLAEKLIEHGHMVVYVTNEAIKKNRSLLDGRWDKNDTKDAANVADLISQGKCNYYDLPGMPIRELRSLLLLRKRLKKQLHSCRVRIRNNLVAQYFPELDKSWNQAEDENLAIVRWFLSPEKIRSLEFEDFFNRVTKRCRGIRQHRRLRTVWEMAGESIGCRPGAAMHLEAKVLTESIKSTKEQIEKVEKEIEKISGSCEEYAHLQTIPGFGPYVSAVVLAAVGNPHRFENIQQLKRLAGFDLNASRSGKRSSSAVPVISKKGKGDLRYALYQAALVASSLTSQFRTYYHSILKGREKEKGIRTKMRVKLASKFLVIAWTLMKKKEPFSPSYLKI

SEQ ID NO: 293838 - protein, 340 aa, unidentified
MQRLYGAFDLHSSNSYLGISDDKDRRVYKKRLPNQPDVILTELEPYRNELVGIVVESTFNWYWLVDLLMEEGYRMHLANPAGIQKYKGLKHSDDQDDTFWLAHLLRLGILPEGYIYPKEERPVRDLLRKRGHLVKLRTSLINSLQGIIHRNCGVKLNARKIKAIRENHVTPLLSGQEDLALSGMVSKEAIDYLGQQIRKVENTVLGKIKLKKEYLNLLTIPGIGKILALTIMLEAGPMERFQKVGNLTSYCRKVPTKWTSNNKKKGKGNQKNGNKYLAWAFSEAAEFARRFDDHARAFYNRKASKKNFMVAHSALAHKLARAAYYVMRDQVAFDPQKLFA

SEQ ID NO: 293839 - protein, 331 aa, unidentified
MAGLNNVGVDVGARELVVSIDRNEMRESGVVFTNDADGHRKLIRWATKKGARAQFVLESTGVYGLDLAFALHRAKRVVVMVANPRAIAAFAKASLQRSKTDALDAETILEFSMRMPFVAWNPPAPSILELRALSRRIEAMSKTVTQEKNRLHASQQSKELSDFVKEDIRELVELLKGRIGRLRKQALLVIEQDPELAKAFGHITSIKGIADAAGIQLLAELATLPKDMTTRQWVAHAGLDPRQHQSGTSVHKPARISKIGNAHLRRALFLPAMVASRWEPNVKAFYEKLLAKGKAKMQALVAVMRKILHSIHGMLEHDQDFDGEKFFVVKG

SEQ ID NO: 293840 - protein, 321 aa, unidentified
MSNVTLIGIDIGKHTFHLHAQEKSGKEVLRKKCSRPQMMRFLANHPPCTVVMEACAGSHCLAREIKAIGHEAKLISPQFVKPFVKGNKNDFVDAQAICEAASRPSMRFVTPKSPEQQTLSVSHRMRESLIRDRTKTVNQMHGFLLEFGVSLPTGLAVIKRLASVLEEHDLPVRLVALLQRLHDHFVYLTEQIKLLDEELASQLADDDLGSRLLTIPCVGPITASLLAVEMGDARQYGSSRDFAASVGLVPRQYSTGGKPARVYMLRLKYQSGPLADWVRTLSTRRHSNVVACALANKLARIAWAIATRHSQYETEPGALNA

SEQ ID NO: 293841 - protein, 332 aa, unidentified
MYYCIGIDISKSSINVHIASNQQDVVYDNSIKGFKSLYSKLKKLYKKEMDKIVFIYEPTGSYSQALRKFCFTQQILCFIINPKQFSNYAKALGAEVKNDIEDARVLSKAIVLAKDGEVNIPHYDEDVELIKELMAYYKLLIKQTIQQKNHLESLSFKDGSKFAIKALKKSIEELKEKSDNVLDEISSIISNNPQYKRDYENITSITGVGKIGGIVLLHLFLKYPKANQRQITSLAGLNPIYKQSGSSIQSKYTISKTGSKLYRGVLFMGIMSAVRFDENFKAFYERLLANHKHTTQAQIAVMRKVIIIAHSLYKNDKKYDKNYGQSNEGCNE

SEQ ID NO: 293842 - protein, 345 aa, unidentified
MPIVGGLDIHRKQITFDYLDTETGEVKRGQIAPADRAHLRSWLARFAGRDDVAFALEGCTGWRYVAEELAGAGVAAHVAEPADTAFARGRKRHAKTDRTDSRHLRDLLAEGRLPECWVPPSHILECRALLETYHDLRAEHTGWVQRIHAVFFHQGAPALGEAALRTGDDLEALRAAAAAHPSPTGQLQVATALDMLAGLEARLDVLRHRLLAAARSLTGARVLAERLYGVGPVTGLAMTCWLGGAGRFSSSRKAVRFAGLDVTVWSSDRKGPPGRLSRQGPPVLRWAVYEAGKTHARASAPDHDYYAAVKDRQGGKRAAISEARKILRQACHILAELGDDALTAA

SEQ ID NO: 293843 - protein, 344 aa, unidentified
MTQYIGLDAHSKTCTAVVMDSKGKILKKEVFPTSERELLRFVDSVKRPRFLTFEEMNIAQWLYVLLKDRVDQVQVAHAPHLTKQRGAKTDFLDAQRLAHETRLGTITSVYHDDGPMFELRALVKSHQDFTKDMVKSMNRYKAFLRARGLFRKDKAVYSDESLLDDIKKPNDRFVAENIFRHISATREIKKSYEDKLLAIAKKWPIITKLCDIPGIGFLRATMIVSIICSGDRFTDKHKLWAYSGLVRHKEISDGKVYGNKKIKGSSDLKCVFTGAATAVLRGNSSLRVYYDRLRSKGVSDRDAKRAVARKIAAIVLMIMKSGKSYDERVVIANEETRSDITTSH

SEQ ID NO: 293844 - protein, 453 aa, unidentified
MRREKKAVGELSLECIEPNAAGIDVGAREIYVAVARDRDPEPVRCFSTFTEELRAIAAWLKQCGVASVAMESTGVYWIPLYEVLAESGLGVCLVNSRHVKHVPGRKSDVSDCQWLQYLHSVGLLRGSFRPEAAICALRALSRHRSNLVEAAAVHVQHMQKALTQMNLQIHHVLSDITGKSGLAIVDAIVSGKRDPEQLARLADGRIHAERETVIKSLVGNYRSEHLFTLRQSLEAYRHYQKMLVDCDREIEQHMSQLPNQPNGGQPLQGNKRGKRRKNQFHFDMGKELYRVLGTDLTAVPGLSALTVHTLVTEVGTDLGRFPNVAAFTSWLTLCPGSKKSGGKVLSSKTRKSNSRLAAALRLAAQTLHKSHSYLGAYYRRMRARLGAPQAITAAAHKLARIVYHLISTRTAYDESVFAQEEQKQAIRHQHRLLKQALALGFQLVPLTPPEVVH

SEQ ID NO: 293845 - protein, 366 aa, unidentified
MKKNSKKQTEKTEAQVSKTKRTVGIDLGDKYARYAVIEDGNDFIEQDRLPMTRAAFGSRFGHWKPARMAIEAGTHARWVSELLRAMGHEVIVANPRELKALTQSAHKTDGEDARKLARYARADVGLLKPVQLRSEATQLELLKLQTRDALVRSRAQLTTTVRGWTKAFGANIRQCTTQGFALRAEQELPEALRCTLQPVLDVIALLTELIKKADRQVEKMVAEHPVAARLDGVAGVGAVTAMAFVLTIEDPGRYRRSRDVGAGLGLTPRKDQSGDSDPQLGITKQGNGLLRRLLVQCAQQLLGPRGRDCAIRQWGLKLAGEGKNKRLKKRAVVAVARKLAVVMHRLWITGEQFVAFPQGQPAKVAA

SEQ ID NO: 293846 - protein, 356 aa, unidentified
MTKLQQFADFTDKEIFVGIDVHKKSWSVSLYYENHYLRTFSQPPSADALSKLLRKDYPGANYLCGYESGYSGFWIQRQLLQKGINCHVLHAADIPHTHKQKTTKTDTIDSQGIAQALSAGTVHPIYIPDPETESHRSLIRHRKRVQFDIRRCKNRIRSFLLQFGYVVPERFGDCWSNKFIQWLKAFDIDQSVTRTTLNHMIEQLELLRGNFLRVNKDIRQLQRSERYNPLMPTLLSVPGVGPLTALTLITEIADIKRFGSFRRLNSFVGLYPMEYSSGEHEYKGKITIRSNRYLRELMIEAAWTAIRHDPALLLVFEEWKRRMTAKRAIVKIAHKLLSRIRYIWLNETTYVKGIVK

SEQ ID NO: 293847 - protein, 326 aa, unidentified
MEHELHYIGIDTAKEKLDVDVLRPDGRHRTKKFANTTKGHDELVSWLKGHKIDHAHICIEATGTYMEPVAECLYDAGYIVSVINPALGKAFAQSEGLRNKTDTVDARMLAEFCRQKRPAAWEAPHPLERALRALVVRHQALTDMHTQELNRTETAREVQRPSIDAHLLWLEAELKRLEKQIKDLTDDDPDMKHRRKLLESIPGIGEKTSAVLLAYIGLKDRFAHARQFAAFAGLTPRRYESGSSVRGASRMSKAGHVSLRRALYMPTMVATSKTEWGRAFRDRLAANGKKGKVILGAMMRKLAQVAYGVLKSGVPFDASRHNPVAA

SEQ ID NO: 293848 - protein, 412 aa, unidentified
MTAIDQFAAHVGLDWADKKHDVCVQFKNGERIFHVIKHTPEALDIWLNELHQQVKGRIAIALELKKGPVVYALQKYPFVTVFPVHALSLARYRQTFWPSGAKDDPQDAELALELMLRYPQKIKAIEPDNADIRLLQQLVEQRRLLVEDKRRFVNRLINTLKQYYPQPLEWFSHRDSSLFCELIIRWPSLQQLKRARSDTIRHFMNAKGGPAVAYTEQRVASIASAIPLTTDKSVIEANALMATALASQIRLVGDLIRTYDQRIELLFDTLPDAELFKSLPGMGPCMGPQMLAALGDNRNRFNSAEEIQNYAGIAPVTERSGQKSWVHWRWQCAKFVRQTFVEWAAKTVNSSYWAKLYYQGLREKGKSHQSAIRALAFKWIRIIYRCWKTRTQYDEAKYLLALEARHSPLLKS

SEQ ID NO: 293849 - protein, 408 aa, unidentified
MNAVGIDVSKGKSMVAALRPMGEVALLPQEFLHTEIGLEQMAYAIIALGEDTRVVMEATGRYHEPVAAALYEYGIYVCVLNPLFIKQSGGGSIRKVKTDKADAMKIAKYGLDNWVDLREYTPMDTVRQQLKLCSRQYNLYMKTVVSLQNNLISLADKTFPGVNELFSSPERADGHQKWVDFVMTFWHCDCVCRVSEKAFTERYQKWCKRKGYHFSAEKALDVYAGSCGHFTTLPKNDNTKLLITTAAQQLLAGKVTLAALRAEMTRLAKQLPEYDTVRAMYGVGETTAAQLMAEIGDVRRFPRRSSIVGFAGVDPAVDQSGKHEAKSTPTTKRGSPHLRKTLYQIVCTYLKRSPVDEPVYQFLDKKRSEGKPYFVYMTAAQNKFLRIYYARVKECLEAFDARQSLAQS

SEQ ID NO: 293850 - protein, 354 aa, unidentified
MKRTTKYVALDVHQATTVASVREDSGRVIARSVLPTDGGAIREFVRGMRGAVHVTFEEGTQAQWLHDLLAPLVDRVVVCDRRGALRHGNKGDHVDADQLAELLRRGGLRAVYHGSAHRAGLKELTRTYQNLVEDSTRVMLRLKALFRARGIPTAGTAVYHRQQRARWLARLPDGGARFRATALYAELDVLRQLRPKAKAAMVTEARQDPAWPVLRTIPFLGPVRVALLLATMQTPWRFRTKRNLWAYAGLAVVTRSSADYALVAGQPVRRRRAPMTRGLNRNHNRVLKDVFKGAATAATARPGPLQDVYHNVIARGTREELARLTLTRKLAALTLRLWKKGERYDPTKLTAPAR

SEQ ID NO: 293851 - protein, 359 aa, unidentified
MMIVGCDFHPKWQQVAVFDGKTGEISEHQLMNGDGEAERFYRGLGAPALVGVEACGNSQWFVELLERLGHRVWIGDAAQIRASYVRRQKTDRRDAGHILRLLMEQRFPRLWVPTAEQRDLRQLLIHRHKLVEIRTRVKNGLQHLAMNQGVQKHSRLWSAAGRACLEQLPLGGWTATRREDLLRLLGELDAQIGHLNAAVEGVADDHPQVRLLRTQPGVGAITALAFVLTIGDVSRFKHSGQVASYVGLIPREHSSGGKQRLGAISKQGNGFMRQLLVEAVQTTCRLDEGFRKQYQARCHHKAKGVAKVAAARRLAVRLYWMLKQNVGYPEIACIESSPRVPLAGTNEADGLNGRSRTPC

SEQ ID NO: 293852 - protein, 388 aa, unidentified
MQTAADHPEAPTAIRHDLGAIFISLELSRSTWLITSLSPGGGEKMSKHSVRGGDVAGLLERFAQLQEKARARTGRTFPIIVIQEAGLDGFWIHRVLQNEGIESHVVDPASVATSRRRRRAKTDRIDGEALLRTLLAYKRGEPRVCAMVKAPTPEEEDRRRLCRERKVLTNERVQHVNRIKGLLFGQGVSGYEPLRRNRRQQLDELRTGDGRPLPKHLKTQISRELDRLELLLEQIKAVETERDALLAAQKVALPGPAAMLLDFNGIGPEFTAVLWSEGLFRHFDNRRQVASYAGLAPTPWQSGSVDHEQGVSKAGNPRLRTTLIQLAWLWLRHQPQSALALWFKERVARNGGRHKKTTVVALARKLLVALWKYVTAGVVIEGAVMKTA

SEQ ID NO: 293853 - protein, 410 aa, unidentified
MEVVFKCCAGLDVHSKTVVSCRRIIGPDGKLDRQVRTFGTTTQELLTLAQWLAEGSVTHVAMESTGVFWKPVWNILEGQFEILLVNARHIKQVPGRKTDVKDCEWIAQLLQCGLLRGSFVPPAEIRELRDLTRHRAKLADQHTAVTNRIHKTLEDANIKLGTVASDILGVSGRAMLTAIVTGENRPEVLANLARKRLRSKIPALQEALHGRITEHHRFLLETLLEQLRFLEAQIVRLDRRIAEKTRPFEAALARLDTIPGIARRTAENLLAEIGPDMAVFPSAAHLASWSAMCPGNDESAGKRRTGKTANGNRWLRRALIEAAWAASRTKNTYLSAQYRRLAARRGQRRAIVAVGHTILVTAYHVLAEVRPHYELGADYFDRLDPQRLTRHLVRRLEKLGHKVTLEPVAA

SEQ ID NO: 293854 - protein, 415 aa, unidentified
MPDYNFNSGDAFIMNAVGIDVSKGKSTVAVLRPFGEVVASPFDVAHTGSDLKALANFIKKLPGETKAVMEATGNYYEPIARYLHEQNIFVSVVNPVLISDFGGNTLRKPKTDKKDALKIASYALSYWVDLKKYVPQEDLRKSLKLLNRQYQQASKLKTMMNNNLISLLDLTFPGINKLFTSPSRESDGHEKWVDFVLAFPHCDMISKLTIKFFSRKYKKWCNSNSYHFTEAACKKIYEYSKECISSVSSKESTAFAVIQAARMLNSATENCHVIQLEMNRVAAQLPEYSTVMSMYGVGKAMGPQLMAEIGDPRRFHSRKAITAYFGYDSENNDSGQKVSISNSMTKKGASALRRTLFIIMQVLLQNKPIDNPVYDFLIKKQSEGKHYYSYMNAAANKFLRIYYAKVKEVLTAAET

SEQ ID NO: 293855 - protein, 343 aa, unidentified
MNEVITIGVDLAKNVFQIHGIDAEGGVVIRRQLKRGQMMPFFKKQPPCLVGMEACATSHHWARQLIGLGHEVKLMAPRYVKPYVKRNKNDMADAEAICEAVTRPTMRFVEVKTPEQQSVLMLHRTRQLFVRQRTTLINALRAHLAEFGIVAGVGRNGLEKLLQVIEEGEDDRVPPTARDCLLALRDQLEMVKHQIFGADRRILDWHRGSEVSRRLDDIPGVGPLIATALVASVPDPHIFKSGRDLSAWIGLVPKQNSTGGKERLGHISKAGNRYLRTMLVVGALSVIRRAKQVGYTKRPWLTKLLERRSTKIAAIALANKNARTAWAMMAHGTYYQEPVLWAD

SEQ ID NO: 293856 - protein, 519 aa, unidentified
MHQTKYRGIITEAGLLTMPPWEPAFRLVKPPIKSVSPFGGDLCFGWLGSPRLYLYKPLGCVSAFWKWIPARKDKTMQYQKVLKMLESIPYLSVGLDVGADFTWMSIMLPNGTLAGKPFKIVHSDPQSRELAVAKIKEAQEAYSLKSRCFLESTGIYHIPLLCFLRDKGFDCSVINPIITKNSTNLNVRKLHNDKFDSKKAAKVGLDASLKTSIIPDDEVIDLRNLVRDYYYFKDLQSAVALKLTAELKVSFPAYRKVFSKVTTQTSLKLLDAYPLAEDLLAAPKETVVEMIRSTARFGRKYALAKYDALRTAAEDAAIFGRALKSNSVRIRLYIDSYREYQKRLDTIMEAIHASVDGLKDSPTHGRILLLQSLRGVGFMSAAVLVAEMGSFDLFPSPKKLYAYFGLDPAVKQSGKFNGDKVHMSKRGSSLARRILHMVALNNLKVDKGSGMPVNPVIHSYYADKCKAKKKNVAVGAVMHKICNIIFAMLRDNKPFEVITPQEHCKQYLAAHPSKAQNAA

SEQ ID NO: 293857 - protein, 342 aa, unidentified
MTKLYLGIDFHKNTSTLCVVDDQGKKLELNTITTSKLVPFLSNRKYEVIGIEASGGTNHVVQKLKDGGHNVRIINSNKFKAVGLGGKKTDDRDAEAIAHILRTNYAPEVFHKSERARNLKSLLVSREQLVRARVNLVNHIRGTLREYGISMPAGMDKFLEHVSASLRLLLNPYIRDILAGMLSQIETLMMQEKMAEAGLEEMTADDERVAKLRTVPGIGNLGSIAIAAVVDDISRFKDAKHFASYIGLVPQEHSSGGKRMLGSITRSGSEIVRRYLIHGARALLLHTKEDCKDYNRLWAMKLKDKAGMNKATVAMAHKLARIAFSILKSNREYTVERPKRVA

SEQ ID NO: 293858 - protein, 318 aa, unidentified
MNTNTLQNINVGIDTGKSQLDIYVRPLDIYFTVPNTDKGISDAIKIIKKHKPQRVVIEATGRLEMPFILACDKAKLPYVVANPLRIKRFAEAIGQRAKNDRLDAELIAHYAERVQPELTKLKSENIRLMSDLVTRRNQLLTIQTMERNRLQILPKNISSTINPILTALKNQLEKVEAKIEKLIESCPEYQAKNTILQSMPGVGKILAASLISNVPELGFITNKQASSLIGVAPITRESGRFKSKRMIKGGRPQVRTVMYMAMMSAIQCNPVFKATYERLLAAGKPKKVAIVACMRKMVVTLNSMLRDGAMWDKDSVKN

SEQ ID NO: 293859 - protein, 423 aa, unidentified
MVPATNAVVAIDLASEKQMVVVTDHDSRVLARRTFRLPAWRLGVALDWAAERAAVAGFAGVTVACEPTGHRWRVVGQLAADRSMPFVCVQPMLVFRSRENENYSCDKTDERDAVLIARLTAELRCYVPEAADESWARLRHLGARRTRLRDETTSLLLQMRDLLECAWPAVLDTSARKFKSKTWCAALAVVTARCAGDPTRLRRLGMRRFEAAVRRELPRWQGERLSRRVVEAVFAALSDTTGVSVQRRGILERVGLVLEDWRDLHRRIDDAETRMVALLDELDLTDLVTSIQGLSAVNAAAILAESGDPRRFTTARALVKHAGLAPAEQTSGKFAGRSKLTGRGRPALRTAAWRATWGAMQSNAVYQARYLHLTTREVGRLKPGQARCAIAAALLRQLHAVITTGQRWNPEVARNGTRMTLAA

SEQ ID NO: 293860 - protein, 307 aa, unidentified
MVQSNKKDFSGQNISIGIDVHLRTWSVTVLTPSGFMRTHTQKASAKELFEHLNKHYPNGSYHAAYETGFSGFSTYYALTELGIKCTMVHAADVPTTQKEKDSKSDPVDSKKLAKALMRGELGSVYIHSKDSLDDRALVRHRATIVKLSGGIKSRIKHLLYNNGVEYPEEYFRSNRHWTRCFITWLQNDVRLLSDTRVSLDLLIAEVLHYRERLLDVNRRLRSLARSDRYAEKYGILMSVPGIGSTIAMSLLTEIDDIGRFSNQRQFASFLGLVPMMSSSGDKEYVGEKTFRCSILYQLIISSLRLKR

SEQ ID NO: 293861 - protein, 396 aa, unidentified
MAAIWAGIDAGKTHHHCVAIDESGRRLLSRRVANDEPELLELLGDVLALGDEVTWGIDLADGGAALAIAILINHGQPVRYISGRAIHRASEGYRGEGKTDAKDAAVIADQARIRRDLHPLRASDETVTDLKILTNRRTDLVADRTRTVNRLRAQLTSIFPSLERALDLANTGPLTLLTGYQTPTAIRRIGAKRLETWLRNRKVTRAGRLAEAAVQAAERQHTRLPGEELTAQLVHTLAKEVMALNQQIAEVDKLIEARFRDHPSFEVITSMPGLGVILGAEFLAATGGDMAVFGTPDRLAGFGGVAPVPRDSGKISGNLRRPQRYNRRLQRVFYTSALFSIRYCEDSRRFYDRKRAEGKRHTQAVLALARRRVNVIWALLRDGRCYQPAPPIALTA

SEQ ID NO: 293862 - protein, 431 aa, unidentified
MLKINPLSTLYVGIDVSSKSNYVCALDFYKNKYINSSFANNQPGAEELALKILECLKEHPDITTIVATLESTSVYSIHIANYLSSCEELMRFKPYVFVLNPKCTANYKKSYIGLGKSDPIDAFVIADYARAGNIESEPWRGSQFLALKRLTRHRLHLVECMTREKTYLVSNLYLKFSELQMLEGDDQPFCDIYGATSSSVLMEYFSPEEILDSSEEDLIAFLAKKNRNRIKDISKTADLLKKAARDSYRLDKALYEPLNVSIASSFNCIETFKREIKVIDNAIEKEIKGLNPNAFIILQSIDGIGPVFAGGIIAEIGDITAFHSSDALAKYAGLTWKSNQSGDFDGEDTPMIKAGNRYLRYYLGEAANSMRKHNVEYGTYYRKKYNEVPKHQHKRALALTSRKFVRLVYGLLARNQLYSGVSLDTSIKDSN

SEQ ID NO: 293863 - protein, 453 aa, unidentified
MARKHKKDSKANNAMLPVMRPDAGGIDIGATEIFVAVPADRAAENVRSFPTFTQDLYALADWLKQCGVKTVAMESTGVYWIPLFQILEDRGLEVCLVNARHVKNVPGRRTDVCDCQWLQFLHSVGLLRASYRPEQEVCAIRSLLRHRESLVQMAATHVHHMQKALDQMNLQLHHVISDVTGQTGLAIVEAILAGERNPYVLAKLRNDRIKASEAVIAKSLVGDYRPEHLFTLRQSLVAYHHYGKLIDGCDREIRRCLEEFKPPHLPDAAEGGNQKSQSMTASPDGVLRSELNRVFGIDLTQIPGIRVGIAQTLFGEIGPDFTKFRSASAFASWMGLCPDNEISGGKVLWVGTRKVKCRAATALRLAAQSLHHSKSALGDFYRRMRAKLGAPKAITAAAHKLARIIFHLVTTGQEFNDSRFAADQLRYQKRQEAKLRAKAKALGFQLIPIEQTG

SEQ ID NO: 293864 - protein, 400 aa, unidentified
MMTPDDIDVWVGLDVGKSAHHAHALDHDGNTLYDKPLKQDEKAIRTMLGKLSKHGRVLLVVDQPNTIGSLPLTVARNMGIAVAYLPGTAMRRTAQLLPGDTKTDRRDAHVIAWAALKLPETLRDAGPDDETLAALKLLAGHDEDLAHESTRHVNRLRSLLLQTHPAFERALKGERITRDATLALLERYGGPMGVKRAGIEDVKDWAKSNGLRAGRIIDDMFKAIGEQTVTVPGTLMAETIIPSIAHDIKTIRDRRREVGRQVEKLLEDHPLLTVLTSMPGIGVRTASNILLGIGSDIANFKSSAHLAAYAGISPVTGQSGTSIKGERPSRRGNKRLKNALWQTAFVASTKHPPSVAYYKRKREQGKHHNAAIICLARRRCDVIYSMLKNGTLYQEPALVA

SEQ ID NO: 293865 - protein, 346 aa, unidentified
MAISVVGVDLSKSVFQLSVADAKHHVVDRKRLSRTQFHRYLAKSTPARLVMEGCGTSNYWGRTAKLHGHEVKLLHAKYVKAYVRRTKTDAADADALVLADRDDSLHPIPIKCEELQALQGMHRIREQWKRASVARVCEARALLAEFGINASAGVRGIGNKLTLATEQAPVLIQPTLLDLIQEIHDLEERLKRVDHALAAYASTNSDVQALLNIQGIGIIIATAFVARVPNIHMFKRGRSFSSWLGITCREYSSGQTRRLSRITKQGDRYLRAMLVHGARAALMAARRKAANGKQLTRLETWAVNTQARVGHNKATVALANKMARIIWAVWTRHEAFNGDDALRFAA

SEQ ID NO: 293866 - protein, 399 aa, unidentified
MGRVAVGIDVAKEFHWAQAVDIATDDVLINRRVENDPASVAELIAELEGLEVAHGQLRVGIDVLGGIAALLSAMLLEAGIELVHVSGLAVNRARQGTSGGENKSDPRDAAAIADLVGHRRDLRAIEPEAELDAEVRLLVSRRRELVVDQTRRVNRLRDLLASIHPGLEAVVDPTQKGSQRLLVRYVTPAEIRSAGRRRLVDHIARAGRVPRAHVEQLADRALAAAQAQTLALPAEGVAAGLIRELAGEAWAVRERIATLDAEIEAALARHPDAALIRSLPGMGATLTAEFIAEAGGIERFPTADRLAAAAGLAPVLKQSGKVRYLQRASGGNKALKRVFFQSAFCSLGHPPSRAFYSRKRSEGKRHHQAVIALARRRVDVLHAMLRNRTPYEVRTARAA

SEQ ID NO: 293867 - protein, 346 aa, unidentified
MGVVCRIGLDIAKNSFQAHGVDKHDKEVLNKKLKRADVLPFFANLPSCLIGLEACGGAHYWARELTKLDAGHTVRLISPRHIKPFVINNKTDAADARAICEVVGRPSTRFVNVKTVEQQDMAGWHRIRERKVKERTALVNQIRALLSEQGIVLPQGITHVRKQLPHIVEDLNNGLSLCARDYLSELYSELADCDTLVAKYKARINAFAMNNEDCKRLQKIPGVGPLTATAIVAHVGTAKHFKNGRAFAACMGLTPREHSSGGKQKLLGITKRGNSHIRRLLIQGARIITRYCLQKLPEQTEQRIRWVQELAARRGKHIAAVALANKTARIIWRLLARGEEYKPALA

SEQ ID NO: 293868 - protein, 334 aa, unidentified
MALELLAIDLGKRSFHLYGIDTDGVILSQKVSRAKLAEVVRKLAPRAIAMEACASAHYWGRCWLAAGREVRLINPRFVKPFVKGSKNDAVDAEAIFEAALRPTMRFVPVKSTDQQDLQSLHRARDRLICQRTALINHTRGLLAEYGIVLPQGPWRFMAQAPAAIAAADLSDLARAIFGELLDQLDDLDRRVKKLDATIVGLCRTNEACRRLAKLPGVGPVVATAIVAAVNDGRQFRSGREMAAWIGLVPRQYTTGGKPRLGGIGRRANHYLRRQLIHGARAVVSRLPKHNDPRSTWLNALVTRRGFNRTIVALANKTARIAWALLSRKEEYAIA

SEQ ID NO: 293869 - protein, 387 aa, unidentified
MPRPNDLSRCLGSFEQDACLVAVIELSQSSWLIAGTVPGIERQPLKKISPDETALLRLLQRWRDEASRSGRCITRIAVAFEAGRDGFWLARWLTGHGVEAHVIHPTSVAISREHKRAKTDRLDTAMLMRVFLGWLRGERGHCGMVAVPTIEEEDARRPSRERENLVGERTRIVNRMKAALARLGIRGFKPELRKASRLLDSLRTPEELPIPPNTLDEMRRDLARLAILREQIAAIEQARLDRLQQTPQAGPHAMVRLLASIIGVGVETADMLVQEVLSRRLRDRRAVARYAGLTGSPDESGSKRREKGLAKSGNARVRRGLIQLAWRFLMFQKESALAQWFRSRTEGASGARKTTMIVALARKLLIALWRMVTTGDVPQGVVLRSPA

SEQ ID NO: 293870 - protein, 341 aa, unidentified
MKNTTTIAIDLAKDVLQVAVFNRNGKPVVNKAISPKRIRGFILQYPEASIYMEACGSAHYWGRQFKQLGHQVQLIPPHLVAKYRSGNKNDKNDALAIFEASRNPSIYFVTIRTLEQQDLATQHKLRAGYVKQRTQLGNRIRGFAMEYGVKFSQGIQRLRHQVPCALEDAENELTSVARTCLRQLLDQLIALDDIIKQTTEALVHQAKQIDACVRLVSIPGIGWLVASMLYARLGDGSAFRRGRDASASLGLVPGHSGSGGKNRLGKITKRGDKYLRCLVVHGARSTLHRVEGKTDGLSHWVRHQQLTKHANNTAVALANKIVRMAWSILNTGNEYRPPVAQ

SEQ ID NO: 293871 - protein, 345 aa, unidentified
MTTMNYIGLDVHKKTISYCVKDASGRIQQEGKVGSTRRELDCWMKTLPQPWTVAMEATIFSGWIYDHLLPHATQIKVAHPLMLRAIAAAKKKNDQIDANKLADCLRCDFLPECHMMPRAIRDRRRTLRYRHLLVRQMVQMKNRVSGLLMETGVEYNKQRLHKVSYFRELLSANGEVPPSIRPLLKLSRETIERCQKTEYALVSSLQRDPVLADRIKRLRTVPGVGPITALTWALEIGDVSRFRSIKQAISYCGLCGDERSSADKAMRMPLSKQRNKHIQRALVEAAKLAPRQNHEMAVIYDQERQKGNSNRATLAVARKMVAYLLAVDRQQRDFVPAEERRTTAA

SEQ ID NO: 293872 - protein, 448 aa, unidentified
MVVCVRRNILKVGGELQGKTIKLKKVSICDSQDSLTQLLSEYADGQQHVMTAESTFNWYWLADIAEEHGWNFRLADPCTVSQANIKAANDETDAQYLAERLRMGSLKSTTVLPRALRGARDLTRHRMRVMQEVSEKKIRLSNLYHNHCAHPLHGKQLQDLQFAYEENGIDAVLASGISGNGSELIIADLLAGLHDAQMRLERIEAQVYERLDQIDTYREGRLLLKNSMKGCGDVLSAVIITEIGDISRFRTMGEFVSYCRLAPASKLSNGKSKGQGNAKNGNAYLSWALTELATLMARYNKSIQHYLERKVKKTGLRVIGIRALAAKLARCVYQVLRKKEAFDLLLAFGGSHPQEPSASRAKTEESSQRKTATKSSETKVTGMTRTVVTDKKKIPGKKPALAVTQTQRLKSAVGQKTASVASRLKAPCALTTTKPAYADRGCVKSRRE

SEQ ID NO: 293873 - protein, 336 aa, unidentified
MTELTRIAIDTSKSVFTLHGTDADGRAVLRRNLRRQDMVPFFARRPPMEVVLEACGGSHHWGRVLAGLGHTVRLIPPQYVKPFVKRGKNDRNDAEAISEAAARPEMREVAVKSARQQANAMLLSVRELLVRQRTQLVNALRGHAAEFGHVGRLGRQGVAKLLADVAEDAELPTPAKDALALLGAEIGRLDARLAEVDARLVAQHKQTPTSQMLAEVPGIGPIGALSLVLRVDFSQFKSGRHFASWLGLTPREHSTGGKTRLGGISRAGDERLRQLLVLGATAVIRQAKPGKASAWLIALLARRPRKLAAVALANKMARIVWAMMTRGEAYRQPATA

SEQ ID NO: 293874 - protein, 354 aa, unidentified
MNTTQVFEKRKIAVAIGIDLAKDHCDVVAYNADNKICFTKANWAYPHLMEWLANAQPAVVLMESCKGCHVRARDIADLGHDTRLVKGADVKALRNVCQKNDIRDADYIARLLYVPGTKFVFVKNQRQQSLQFLQNEYKSIQELRIQVGNQIHAGLEEFGCPGPKSKKFIQSRMMAHLEKNAEPIPDEVMSSFLRRREMWLNLFEQEEEAQKRMEEIAKTDDDAQRIMTVPGVGAQTAVGMLVHIGGDIGRFKNSGQFAASIGLVPKQNSTGGNTTLNGITKCGPKRLRANLVQCGQVILMHADKLKGNFGDWVRKLRDSGKKRGVIVCAIAAKIARIVYRLMKDKVDYTPVPSR

SEQ ID NO: 293875 - protein, 348 aa, unidentified
MTKQLMAGIDLHGNNLVIGLVDQDGQRLKHQKLACDLKLVDAFLAPYKAQTKSLAVESTFNWYWLVDGLRALGYPVVLANPAEIEQYSGIKHADDKNDAYFLAELQRLNILPTGYIYDAQLRPVRDLLRRRMGLVHQRTALMLSFKSLYTRTTGQTMSLSRLKGLELAEAKQLYEHPANCLIATLQKEHIDKLDQSIAKIEKAVLACARELPCYQPLQTLPGIGRILGMAMTMEIGEIGRFKSAGDFASYCRTVGSKRMSNGKKKGDNNQKCGNKYLAWAFVEAANFAKRYDEQCRKWYDRKEAKTGPVIATKALACKLAKAAWHVIRESSTYDPQRMFPELAPKRTE

SEQ ID NO: 293876 - protein, 439 aa, unidentified
MVKGVCAGVDWAKDAHEVLVQDADGERLWRATIPHDEAGITRLCKTLVTLRVERVAVERPDGVLVERLLDAGLTVLALHPNQVAAARPRFRPAGGKSDPFDAFVLCELARTDSHRFRVLVADSDQTKALRALTRARQELVEQRVALCSQLRSELERCWPGPIGLFKDLDSQISLAFLERYPSPADARGLGAKRLAQFLARHHYTGRIPANVLLERLRSAPSGRAGEREGEARRGIVLALIAALKPIGEHIRLLTGEIAHAVREHSDGEIFLSLFKHPDSVITAATLLAEIGDCRGRYPTAEHLAADAGMSPIAIESGKRKVAHFRRGCDHRLRDATSNLADATRKWHPWAADHYARAIARGHDHPRAVRTLGRAWCRVLWRCWQDHTPYDPARHRGLQQHITVTIPSPSGAQPDIAATQRMLGAAVTEPAARQGRARSA

SEQ ID NO: 293877 - protein, 374 aa, unidentified
MEGTTFVGLDAHKDWISVAMLLPGRDQTIEWRIPNEGGAIRKMLRRVERESPGEVRFCYEAGPCGYALQRQITSWSEASCMVIAPSLIPGKPGERVKTDRRDAKKLAFLFRAGLLTEVQPPNEADEAARDLCRAREDAREDLVRSRHRLTKFLLRRGLIFTGGKRAWTQAHRRWLRTLRFDQEWDQVIFSDYLFAVEHLEGRLDALAERVEELSHDPRYAPAVAVLRCFRGFDTVAATSIVVELHTFHRFPSPRKLMAFLGLVPSEHTSGQRRRLGAITKTGNSHVRRLLIEASWNYRHPPRVGTLARRRQGQPARVVALADRAMQRLYRRYLRLTARGVPPQKAVTAVARELTGFVWAALSPLTALSALPKAS

SEQ ID NO: 293878 - protein, 416 aa, unidentified
MLKTLNVGVDISLREATISLLTWQGKYLGGSSKISNNLPGAKQLEESLLSILSLGNFEHIRFGMEATSNYGFHLAEYLASSEKLSAWKPLVYVIGAKHIKDFKKAFPERDKTDLVDSQFIAEYLRFGRLPHPFQAKCRYLPLQRLVRYRYHLVKNLERETKFFLANLFLKFPGWVQNRPIKTLGRTAMEVLTEFYSLDEIVHMPLEELALFVARAGKNRSPDPERIAAEIKRAARESYRLNPKLANSVQFILENIIINIRALKSSLKEVDKAIASQMEGFSNPLLSVKGIGPVYAAGIFACIGNIKRFSSDDKIAKLAGLVWKRKQSGKFEAQERHLIREADRYLRYYLIEAANSLRVHNEQYRAYYQKKYREVNKYQHKRALVLTARKLVRLVFSLLSKNQLYEPARAFQCAQPS

SEQ ID NO: 293879 - protein, 323 aa, unidentified
MSKHSMVCAGIDTGKHKLDVALDGRSDQLQLDNTADGHKALSAWLRQRQVKRVGIEASGGYEQAVVLQLRQDGFVVIVFQPAQVRAYAMFHLQLAKNDKIDAALIAARAVATRKIHAPPDPRLAPFAEHLTLIDQITEDIAHRKTRRASCRNARIRGHWNDEITRLKRLQNAELKALVKAIRQHPDLAKRLDLIESVDGVGLPTAVAILVRMPEIGRVTREEVAALAGLAPYDNDSCSQIGARHIKGGRKRLRGSLYCAALPASFRWNAQLIALYQRLMAKGKSHKTALIACARKLLIFVNTVIARGEPWTEKPIRPAHVEAM

SEQ ID NO: 293880 - protein, 392 aa, unidentified
MICVGIDVAKDKHDCFILSSDGEVLADVFTIQNNAEGFDTLLQTIRLCTRPQDIIKVGLEATGHYSYNILGFLLDKGLATYVINPLHTNLYRKSLSLRKTKTDRVDARTIATMLMSDVDLKSYTDTAYLNEELKSLTRYRFDKVKERAKLKQSVSRLVTILFPELEKLVPTLHMASVYALLSEFPGAKQIAGVHLTRLKTLLKEASRGHYGRDMATELRDAARLSVGSVMPAKSLELQHTIRLIRELDAEIDDIEAAIQIMMDEIHSPITTIPGIGIRMGAMILAEIGDFSRFDSPDKILAYAGMSPSTYQSGQLSLSGTYSHMEKRGSRYLRYAIYNATKYVCLWDPTFSAYLAKKRAEGKHYNVAISHAAKKLVRLIYAMEKSQRPYAAA

SEQ ID NO: 293881 - protein, 366 aa, unidentified
MRKVMAGMDLHGNNVMVGIVDDQGARLQHRRLACELPEIIEFLAPYKAELESIAVESTFNWYWLVDGLRAAGFPVVLANPAKIDQYSGIKHADDKNDAYFLAELQRLKILPTGYVYDPELRPVRDLLRRRMSLMRQRTTLFLSAKSLHQRTTGRGLELRRLKAMEPEEAAALYTHPANQLIAQIQKEHIDSLDQSIRQIEKAVLKVALQQPYYQRLQTIPGVGIILGLTISMEVGNVDRFAGPGQFASYCRTVDAKRISNGKTKGDNNQKCGNKYLAWAFVEAAHGARRFDATCRRWYDRKAGKKCTTVATKALACKLAKAAWYVMAKGTEYQAGKIFPGLTEPKAEEISGEQASASKGVGPNPED

SEQ ID NO: 293882 - protein, 355 aa, unidentified
MSMLAEQYEFVIGGDSSRDTVDLAVVDSATGALRAHLADRADGAGYARMLAWADSHAPGRRVWALEGTGSFAAGLAVFLAEAGEDVVEIGGVKRQRGAKNDQIDAARAARQALAREHQTKVRAHGLREALRMILTTRQAILVSRTKAINELKGLIVAAPEQLRSDLRGCSLARQLARIEAMRTQPEGAVEQRMAVLTLQSIAARVRFLSAQVDELDPELMTLLKHHPAGPALLAEPGIGPVVAAQLLVSWSHPGRVRSEAAFAALSGTAPLEASSGQRTRHRLNRGGDRDLNRALHTVAITRMRCHPETRAYHAKRTAQGKTHRDIRRCLKRALARRLYRRIQAATHQQQIPATA

SEQ ID NO: 293883 - protein, 361 aa, unidentified
MPMLEGKIDHVIGVDTHRDSHTAAILDPNGGLVAELTVTSNQAGSEALLGLVAQRAPGRRCWALEGTGSYGAGLASFLADRGEWVTEIDRPKRPRGRNGAKSDPLDAIRAGREALGRDYLASPRQRGHREALRVLQLTRSGAVKVAADARRQLKALLVTAPEPLRAALCGGTWLAQARGCAGLTAKASDPVEYRATVRALRLTAERSLAAHAEAKQLAEELRMLVAVMAPALLAQPGVGPITAAQVLISWSHPGRLRSEAAFAMLAGVAPIPASSGRVVRHRLNRGGDRQLNRALHTIVMIRETWHEPTKRYVTRRTAEGKDRREIRRCLTRATARQLFRLLERKAGHPVAAGRLALPSTP

SEQ ID NO: 293884 - protein, 320 aa, unidentified
MSVSPQPPRFVGIDVSKDTLDVVLRPTGEYLQAPNTPEGHAQIVAQLKPLPVACIVLEATGGYERACVAALLDAQLPVAIINPKRAHDLAKGLGILAKTDKIDGGTLAVCAEYCDLPKAKKTPEIQAQLEALVVRRRQLVTLRAMELPRLEQTVHPQTKKDIQQTITFLTKHINTIEKKITALIDSDDHFTGLAQRLRSVPGVGATTAAVLLAELPELGQLNRQEIAALAGVAPFNRDSGKHKGKRVTSGGRAGLRHCLYMAALSATRSNDKIHAFYDRLIAAGKPFKVALVACIRKLLTILNQLAKNRTQWNEHLANTV

SEQ ID NO: 293885 - protein, 413 aa, unidentified
MSIDPNPTALRVTAGVDWAKDDHVVCVVGDQGEVLDRFTVPHDAAGLKRMAARLLRAGVEQVGIERGDGPVVDTLMQAGLVVFVIPPGQVKNLRSRYGSAGNKDDRFDSYVLADVVRTDVRRLRPMVYDSEQTTALRGSVRARRDLVAHRVAAANQLRAHLQIVFPAAVTIFADIDSAITLTFLGRFTTQEAADWLSPKRLAVWLGSVSYSGGVDPAVLHARLVAAPRGVTGEPAGIHAGTTTALVAVLRTLGAQIQILAASIGEQLDTHPDAAIFTSLPRSGSVRAARLLAEIGDARGRFPTRDSLTCLAGVAPSTRQSGKVKSVTFRWGADKQLRDALCDFAGDSRRANPWADDLYTKAIARGCDHPHAARILARAWAHVIWRCWQDNLPYDPAAHGALQTLLNQDQPTAA

SEQ ID NO: 293886 - protein, 349 aa, unidentified
MMKKVLKQVLGVDVAQDELVVTLGRIHDDFSIELYAHYVFQNNNAGIIALIKWVQKLIISDVNVRFVMEATGIYHQKFAYYLDEHGFEVSIVLPNKISNYMRTLELKTITDKTSSEAIARFGLERNLDQWKRPKEVYRQLQQLTRERDQIVAERSVAKNQLHAEQKEAYPNKNSVKRIKARIKFLNQQEKEIKQEIEAIVNSNQELKNEIDNICTIPGVGRLTATIVLAETNGFELIRNKKQLVSYAGLDIKEKTSGTSVKGKPRISKKGNRNLRRAMHLPALGAIKHSPVHKTIYERLVSKGGIKMKGVVAVQRKLLELIYILHKNKAVYQADYEEMKREQLQLANSL

SEQ ID NO: 293887 - protein, 370 aa, unidentified
MSQSTTVVGMDAHKKMIWVAMLIGRLKDPIEWSVVNEVSAIRRMVRRIQREAKGQVRMCYEAGPCGYALKRTIEGLGMECVVIAPSLIPRKPGDRIKTDRRDARKLAELFRAGLLTEVTPPTEGEESVRDLCRCREDAKADLLRSRHRLGKMLLRRGIVWQGGKSSWTIKHRQWLHSLRFDHPADQLVFNDYLASIEHLEERVKGLEVALEAVSNEDPYREPVGTLRCFRGIDTVTALTLVAELHDFRRFKSPRDLMGFLGVVPSEYSSSDRVRRGHITKAGNSHARRVLIEAAWHYRHPHRLGEALRRRRKGQPATVIAIADRAGMRLHRKFNKLHGRGKPIGKVVVAVARELVGFIWAALYPLSVKAA

SEQ ID NO: 293888 - protein, 378 aa, unidentified
MPSENTVHVAIELSFSSWLVAARLPDIQKVRLHRVEGGNTAALLTLIGELRSRASRELDRTADLACCFEAGRDGFWLQRLLSAHGIAAYVLEPTSILVNRRARRAKTDRLDAEGMLRVLVAWLSGDRQACSMVRVPTPDEEDAKRPHREREHLVQERLRIENRIEALLFGQGIRRRPSLRSWERDMAELRTGDGRALPPLLRTELDRLRRRLVLVLELIRELEAERAAATAAQADDGAVQKITMLQRIRGIGPNFAAVLVREVLYRSFANRRQLASYVGIAPMPYQSGGMDRDRSISRAGNPRARTTLIQLAWLWLRYQPASALAAWFRERVGSLQGRTRRVAIVAMARKLLIALWRYVETGVLPEGIELRTQAEITA

SEQ ID NO: 293889 - protein, 412 aa, unidentified
MEVQRNKVCGVDVHKRFLVATILSRDGTKQTQRFRMNPDELSKFRTWVVENGCEQVAVESTGIYWIPVLNAIEGYVDLILANAYKIKNTSRPKTDLTDSEWMAELCLNGMIKPSRIFPRDDRDLRSLTRARERYVNDTTREKNRIHKLLDSCNIRLSSVLSNMFGKVGRYVLEGLLEGKDIDEIIEGIPVKRLMKKADQIREAVKNGLDITKIQLIRGSLELIAALERRVDELEAEIRRRVVHKKENIRILMSVPGIGFISAVTILAEIGDFRDFEKPEKLAAWCGLVPSVYQSADKLITGKITKHGSRHLRWILVEVAQTVARCGSPKLKRFFLRIMERKGFKVAIVALARKILCILHHLLMNQETYEDEVTKKEAMIKLAAPETPLSIEEMIEYMIKAGYEVKKKSGVGE

SEQ ID NO: 293890 - protein, 424 aa, unidentified
MKFKMQDKQNQLIERISDKHLVVGVDIAQQTHVARAVNFRGIVVGNPLTFENNEKGFARLIEWINHLKLLKGLNTEIVGMEPTGHYWLSLSKWLYDQDIDVVTVNPHHVKRNKENRDNTQSKSDKKDALVIADMIKNGYYSFIRPTSEAFEKLRVLMANRDVTVKRLTSSINQINRWVDIVFPELREVFKDVKGKGAIATLRLFPTPSELCSMKAQDIVEGWKKVMKRHAGLKKAQSLIDLAKSSVGSKQAHEAYKLHLEHLLEEFDLAKTQLERVEKEVTSVLDQITFAIKVLAIEGISEISLAGILGEAGDLSGFAHGNSLLRHAGLHLVEASSGKWKGQIVVSKRGRSRLRRFLFLTTLSLVSNNSDFKQIHFNNVNVKKMKKMKSIMKLVGKLARILVAIAKSHEPYCSQKVQPLAPIAA

SEQ ID NO: 293891 - protein, 337 aa, unidentified
MYYIGLDIHKKTISFCVKDVAGYVHREGKIGSRRCELDAWVRTLPQPRMMAMEATIFTGWIYDYLLPHAEKVKVAHPLMLRAIAAAKKKNDKIDAAKIADCLRCDFLPECHMAPTEIRDRRRVLRYRNLVVKQMVQMKNRVSGLLMETGASYNKQRLHKVSYFGEMMSTNADISDAVRPLLNLSRGMIRRSSKLEYDLVSSLERDPMLRERLRRLRTVPGVGSITALTWALEIGDYTRFSSNRQAISYCGLCADERSSADKVMRMPLSKQRNKHIQRVLVEAAKLAPRESPELAMIRVRELEKGNPNRATLAVARKMVCYMLAVERRQQDFVQTAAA

SEQ ID NO: 293892 - protein, 375 aa, unidentified
MKEKVRFLGLDVHAETIAVAIAEPDGEVRSLGTIANRAESIRKMVKKLGPVEHLKACYEAGPTGYVLYWQLAELGVVCEVIAPTLVPVKAGDRVKTDRRDAERLARSYRSGDLTAVWVPDEGSEALRDLVRARETAKQDQLRARHRLNKFLLRTGHRPAAGMKAWTLGYMAWVRQLRFKQVAQESTRLDYLHEVEHMAERVKRLEQAITEAVKLASPALQEVICGLQALRGVAQISAVTIAAELGNLSRFASARQLMGYSGAVPSEDSSGGRIRRGGITKTGNAHLRRIAIEAAWSYRLRPGVGPALRKRQEGVAEEIKEIAWKAQHRLHKRYMRLAAAGKDQRKIITAVGRELLGFIWAIGIKTEAASKLRMAA

SEQ ID NO: 293893 - protein, 338 aa, unidentified
MNLSRIGLDLAKQVFQVHGVDRHEHVVCRRQLKRAQVRDFFRQLPPCLVAMEACGSAHYWARELRELGHTVRLIAPQFVKPYVKGDKHDAHDAEAICEAASRPSMRYVPVKSAEQQAVQSVHRVRSRLVRARTALCNEVRGLLGEFGLIATRRGRAATMALLETVMATEPASLPAPMGELLRELKDELQTLEARIARLERQIQAHVRGDARIQRLLAVEGIGPISASAVAASAGDARQFRTGRQFAAWLGLVPRQHSTGGQQRLGNISKRGDTYLRTLLIHGARAVVRCCANKTDARSRWLQGLLQRRPANVVAVALANKNTRILWALLSRETCYRPG

SEQ ID NO: 293894 - protein, 411 aa, unidentified
MDLVYPRCAGIDVHKRTAVTTIGWVDEQGQRRRKTRTFGTMTAEIEQLAAWLVEHGVTHVAMESTGVYWRPVFNLLEPHVEVVLANAAHVKAVPGRKTDVRDSEWLLDLMQHGLIRGGFIPEAPIRALRELTRYRTGVIEERTRALNRIQKVLEDTNIKLASVVSDILGVSGRAMLEALIGGETDPEVLAGLARGTLRKKHDTLVQALRGRIEDHHRFLLRTLLAHVDQLTESITQLNAEIARRLEPYAAAVDLLCTIPGIKRRVAEVVLAELGTDMGRFADARHLCSWAAICPGNHESAGKRRSGRMRHGNRWLRGILVQAAWAAIKVRGSSFGARFRRIARRRGDKRAAIAVAHSLLTVVYHVLTRDEPYRELGGEYFDRRKPEHQARYYARRLAELGFDVTLDPVTAA

SEQ ID NO: 293895 - protein, 347 aa, unidentified
MLYAGLDLSRQRVDVYLMNEAGEPVQVTAAPADVDGLRGLARQVAGLGQPVIAAIESMNGARFVHDQLELAGWEVQIADAQKVKGLAPLACKTDRIDAWVLAELCRRELVPAVWLPTPGVRAEWERARFRLHLVRHRTALKNRVHATLLAFGRPCPTADLFGLGGRQLLGRLGLPEPWAGTTIAAVGLIDDLDVQIDACERELRRLGADHPYVPLLLTAPGIAWVLGYTIAAEIGDIGRFASPKKLAGYTGLCPWVYQSGSRDHRGPLAKNGPRYLRWALLEAATHAARHPCYRDHYQATKTRLGRQRGSKVARVEVARKLTEAIWHMLTTQAPFCPARPHAHPLAA

SEQ ID NO: 293896 - protein, 406 aa, unidentified
MIIFIQESDMSEAYEIRVCMDIGSASHQVAIGLSTGEILEEFDIAHTPQDIKLFFNKIETHKKYHQLPVVVAMESYNGHARPIDKYVLNKGYRLININNHKLAQFKKVFPGASKSDVVDTRKMFELFTLQDHLPLAKNALQEVAPIPEVNEKLKRISRRRRLLVNEKVRILNRFQSDLNAISPGFLEVTGSADNLWFLRFITSRDDITQLARMHYSSLKKIKGLGDKYALKIKAWQENAEFAVDAEWVGEMIIRDAKRILELIGEISDLEKRIELISSESEIVNRLKTISGFGTVCTAELAGEIGALERFESEASLALYLGMAVLDNSSGKYVGTKGSKHVNYSAKAAMMTAVAIHIRNSEQSKKYYDKKRNEGKKHNQAVRSLGRHMVRVIWSMLKNNRDYNAEK

SEQ ID NO: 293897 - protein, 367 aa, unidentified
MTCFLGVDLHKTQFTVHARTENRAESLDQIIQYPTTNEGYGNFLKRIRNLRTRGYSVKVGVESTGNTRFFKNQVEKAGAEVTVINTLKFKVINESTKKTDKHDASTISEFLSKDMLPKSYICSKETENLRRLLKSRERLVRSTVGQKNEIHALLVSMGFSDELRSLQTKKGRRKILDALESNDDYVLEAQSVKLMIFIIEQMEASVKTIEKQLAELTKDDAMVRRLLTIRGCGNITAWTIRAYTEDISRFPNAKKYAAFCGLVPWVQDSNETVHHGKITKHGPQELRTGFVQLVLGIRRCKDTSDWRMMQRYEYMKKNKGSGKSIVAAARKLAEIVWTMLSEKQDFDCSKMKGTYKIPNLVSQALAG

SEQ ID NO: 293898 - protein, 347 aa, unidentified
MTTALNHHWCVGVDLHKDTLTACTFCHCCGEVSFQKIACKCRRQIAEYFANLPRPHTVAIETVGFYRWLWEMLEPVVQRLVLADATQARALAGRRLKTDREDAFNIAELLAAGRLPLSYAPPLEVQMLRDLTRHRHGFSRQHARVLCRVKSIMNAHNRPGPARLQSDGLIRYLKAQGEKLPERHVAMLWNCVDQLALTERQIAQTERDIAAVIERETFRGVYGILVSFPGVALVTAATVIGEVGDFSRFTHRKAIGRFAGLNPRVFASGGKQRIGHIAKTGSPQLRWILQQAAWTAIRTDEGVRGIFLRIAKRSGRKAAAVAIARKLLTWMWAAVVKGETYHSRLAA

SEQ ID NO: 293899 - protein, 348 aa, unidentified
MRRYTGRHRFYAGVDLHARTLFTHVLDDQGTTVFEKDLPADPAAFLDAVAPFRDGLVVGAECMFAWYWLADLCQDHGIPFVLGHALYMRMIHGGKAKTDKIDAAKLAAMLRGGVFPLAYAYPRAKRQTRDLLRRRSFFVRQRAQLLTHVQNTNTQFNLPPFPKKLAYAANRTAAIADRFADPSTKLAVAADLALADAYDARIAELERYLVRHAKVDDPVTFGLLRTVPGIGPVLGLVLLYEIDDIGRFPEPGHFLSYCRLVRCTHASAGKTTGSGGKKIGNAHLKWAFSEAACLMLRSCPAAKAWVQRQARKKGKRKALAILEAKLGRTVYHRWRKQVPFDAKRFLAG

SEQ ID NO: 293900 - protein, 315 aa, unidentified
MQDFSTFVGIDVSKAKLDVHVLAESKSFSVPNDKKGFEALAQRLPQAGQCLIVVEATGGYERQLTLYLIERNHQVAVVNPKRVRDYARATGAQAKTDRIDALILARFGQAFRPRVEEQTSKKQRELAAHVLRRRQLVDLRAVEKNHRELAPSGAVYKNIQKVISVLDQQIRQIEKEIQKLLESDEQWNATAEIMNSVPGVGPVVTATLLTDLPELGHLNRKQISALAGLAPYNHDSGKFAGKRKISGGRMSVRNVLYMAARSASRCNPPIKALYDRLVKAGKFKKVAIVACMRKLLTTINYLVSTNTLWNPTHAR

SEQ ID NO: 293901 - protein, 338 aa, unidentified
MYYTGIDLHKKTSFITTIDACGKMVTRANLQNVEGDILAYFANLGDKTKIVIESMSSWYWLYDLLTGEGFEVVISNPVKTKAIASAKIKNDKLDSHMLAQLLRADLISTVHVSSLETRKLKELLRHRSRLVRDATRMKNRIHMLLMKNNFQSPFSDLFGVQGLSYIKEIDLPDYHRHQVETYLSLYEKLQAQIGPLTKRVRGLAKENHTAQLLMTIPGIGPITAMFIVAEVDDISRFRSYRNLASYAGLVPSLDASAGKEKRGRITKQGSRYLRTALVEAAQAAARMQNCRLRVFFRRRIVKAGYQKAVVATAHKILQYVFYVWKNQTPYKETYPVCA

SEQ ID NO: 293902 - protein, 457 aa, unidentified
MKNVRFVGLDVHAETIAVAVAEPDGEVRALGVIPNRPESIRKLVKKLAPAAKLRACYEAGPTGYVVYWHLVALGVPCEVVAPTLVPVRAGDRVKTDRRDAIKLARSYRAGDLTPVWVPDAAHEALRDLVRAREAAKKDQLRARHRLGKFLLRHGRRPPLGVNPWTQRHLEWVKTVQFEQEAQVATLLDYLHEVEHLAERIARLEQTLDAVVKTVPASMRAVIEALQALRGIARVSAMTIVAEVGTLSRFATASQLMGYSGAVPSEASSGERTRRGHITKTGNAHLRRVIIEAAWAYRYRPALGVALRKRQAPVAPEVKEIAWKAQHRLHSRYVHLLAKGKCKQQVVTAVGRELLGFIWAIGRTHDPRWRSRAAGEEAMYHKGRSIGGGRGTHGKENPRLTYAAGFRARPAPLVRGSSRRITIMRFRPANIRVINRRANRLGHLRCCVPAKRTTEDPR

SEQ ID NO: 293903 - protein, 387 aa, unidentified
MRVKPYAFSPPHLTLYENDFDHNNRETVRTWQIDLTRSPKGARGRARIATSFSKKPEQLSGPYEPASARKGLGENAMSQSKRSVGIDVSKANLDVAVVPENDTWSTANEESSVDELVKRLKALRPRLIVLEATGGLEIPVVAALAAAKLPTVAVNPRQVRDFAKATGTLAKTDAIDALVIARFAEAIRPQVRPIKDQDAQHLSALVARRRQLVDMLTAEKNRLSSASKPVQKNIKEHIAWLEQQLTNINKELKKAVKGSPVWRHKEALLKSSPGVGDVLAISLLAGLPELGTLNRKEVAALVGVAPFNRDSGKFRGKRAIWGGRKDVRDVLYMATLSAVRFNPVIKKFYDRLTDAGKAHKIAMTACMRKLLIILNAMVKSDTPVMVK

SEQ ID NO: 293904 - protein, 440 aa, unidentified
MNQEDGSRLEEFRQFRREVRGSREYLLVGIDIAKEKHYAFFGMATGKTLLRRLVFENNLEGFGKLLDQARALRDQNGLRRMVFGMEPTGNYHKPLGEHLIRCGHLVVLVSGVAACENRKTLDGRWDTNDTRDAANVADLMSQGKCLFYEFPVGPLSDLRNLLSLKRRFKRVEQGYQVRIRNHLLAKYFPELDRYYRRPTPTNLAIVRWCLDPSVIAGLEYNRFAEMVRSRRGRYSQEKRLQEIWRLAVDSVGCEAGPTVEFEAKVMVEGLKQIRESLGEIEEKIQEICSSFPEYECLLSIPGFGPDVASKVLGAVGNPDRFQNRRQVLKLAGFDLCAKRSGKSSENAVPVISRRGKADLRNGLYQAALIASIKNPGFIAYYTEKLRGREREPGIKFKMRVKLAAKLLIIAWTLMKKRKPFHPGFLRAAGPSFSVGRREER

SEQ ID NO: 293905 - protein, 347 aa, unidentified
MRFYNRQHRHYCGIDLHVKTMYVCILDATGQVLLHRNVPSTPAAFLTTITPYRDDLVVAAECMFTWYWLADVCAAEGIAFVLGHALAMKAIHGGKAKNDKIDSHKIAVLLRGGLLPQAYVYPAAMRSTRDLLRRRLHLVRKRGQLLAHIQNTRAQYNLPAFEKRLAYPGNRDGVVDHFADPSVRKSIEVDVVLIDQYDALVNDLELTIVREAKRHDADAFHRLRSVPGIGKVLALTILYEIHDITRFDRVQEFASYARLIKCTKESAGKKLGTGGAKMGNVHLKWAFSEAAVLFLRHTTDGRRLLARLEKKHGKGKALSILAHKIGRAVYYMLSRGTVFSMEKFLAA

SEQ ID NO: 293906 - protein, 312 aa, unidentified
MYYIGIDVSKKVLSVFNGKKDLKFINKEGLKSFKKYLKKKYNFSDLVIIFEPTGIYSQYLKEFCAENSIKAYIVNPKRSHSFARSLGIRPKTDKIDARILYQFHKLIDLNDVKIPEIDQQAKTLASYLTSYEFALKQRVALSNHLESLRDKRLIAFIKKDLKRAKMLEDKILNNIKEYIEQNQNLKEDYERLLTISGVGEKTAIALLTLFKTYQGTNRAQITALAGLDPVRRESGTSVRDRVKISKNGKGIYRKIPYLPTICATVHNQKIRVFYQRLLANHKPKKLAIIASMRKILLVAHAMYRDKTEYVAA

SEQ ID NO: 293907 - protein, 344 aa, unidentified
MTIVEEKPAITGGVDTHSEVHVAAALDPVGGLLGTAEFPATGAGYASLLGWLGKFGDVALVGVEGTGSYGAGLARYLAKRGIRVVEVDRADRQDRHRKGKSDPLDAVSAARAAQSGRASGEPKGRDGAVEAIRALMVAKRSARHERTQTINQARALILTGPDELRARFAGLRAGALAEAIAALRPRPGDAADYSVRIALRELGRRVEFLDEQNGRLDDLIVPLVTVRAPGLLSLYGVGPDTAALLLIAAGDHPQRLRSEAAWAHLCAVAPIPASSGKTRRHRLNRGGNREANHALWRIVITRMSAHPATRAYVQRRTAEGLSKKDIIRCLKRYVAREVYPYLRG

SEQ ID NO: 293908 - protein, 430 aa, unidentified
MNNMNDTNDTNPLDPFAAFVAVDWADEKHAFTLQAAGQKKKESGTLEQRPELIGAWVAALRERFGGRPVAVAVEQSRGALIHALLSYDFLVIFPIHPTTVAKFREAFKFSGVKSDPLDTDQILEILTKHLDLLKPLRPDTEATRLLARLVADRRKAVEQRASHIQALKASLKEYFPQALEILSQNVTSRLAYDFLKQWPTFVEFQQAKPSTVKRFLYGHNVRRPELIEKVQQVAQKSQALTTDTAIVASGVRLSQMQAEVIHTLNPLIEQYDRKIETVFHDHPEAKLFRGVPGAGPALAPRLLVAFGTDRARYEAAGNLQSFSGIGPVTRSSGKMRVVYARCACPKFLRQTFHEFARLSVAQCQWAQNYVEYYTGKGKKYHTIIRALAFKWIRILFRCWKDRTPYDDQQHMKTLEQRGSIFATLHLQKNS

SEQ ID NO: 293909 - protein, 487 aa, unidentified
MHPRTTNKFLETFDVYRFSFESAGALALDNEYSGFAVLPAHYIAFAERKRARPWTSIYHCGRYDVKPLATQQFTAYVGIDWADTKHDICLQAPGNELREFDCIRHQMSNIDQWAHSLHQRFGGPIAVALELAKGPIVYALQKYDFFVLFPINPLTLAKYREAFMPSRAKDDPTDAELALDLLMRHPERFTPLRPQSVQMRTLLSLTEHRRELVGDKTRFTNRLTNTLKQYYPHALDWFEQHDTLLFCDFLTRWPTFPQVKRARRASLEAFFYAHNGRRPNVISARLGAIKAAIPLTEDMGVIAPCRLQVLVLIEQLRTTLQAIDRFDREIAQLAPRLPDYCLFQDLPGAGPHLAPRLLAAFGEDRQRYQHADELQKYAGIAPVTERSGKKNWVHWRLRCPTFLRQTFVEWAGQTINKSFWAGAYYRQQRDKGRSYQAAVRSLAFKWIRILYRCWQTRTPYDESRYLNALRKRGSPLLKHLESNAQNA

SEQ ID NO: 293910 - protein, 348 aa, unidentified
MAIVGGFDIHRRQVTFDYLDTVTGQVCRGRIDPACRATLRAWLGRFAGRADVMFAVEGCTGWQFVAGELARAGVRAVLAEPAETAHQRGPKKRAKTDKADARHLRVLLAEGRVPASWIPPEQVREMRALLQLYRDLREEHTAWTQRIHATLFHQGVPSLAGRLSDPRARAVLRRGEEIGLSPAGARAVAVALRRMDDLEAELGPVHAQIAAFARRQLGCKALQRELYGVGPLVAAIVWAFLGDPRRFSSSAQAVRHTGLDITVYSSDDKRAPGRLSHQGPPILRWALFEAGHQGSRTTSPDHRYYADVAARIDPNRAALSVARKLARRSHHILRALGDQAYAPVPSGR

SEQ ID NO: 293911 - protein, 421 aa, unidentified
METAMDEVLEVLYTRCCGLDVHKKTVVASVIITPPQGRVQKHLHTFSTTTTGLLALLDWLGAFQVSHVAIESTGIYWRPIFNLLEGECEVILVNAQHMKAVPGRKTDVKDSEWLASLLRQGLLQASFIPPKAIRDVRDMVRYRKRLVSQRTQEINRIQKVLETANIKLASVASDVVGVSGRLMLQALIDGKADATALAELARGTLRRKLPQLQEALEGRVDDHHRCLLKHLLAHIDWLEKALEQLQREIEKQLSSYQKALDLLMSIPGLKLLSALTILSEIGDDMSRFPSAKHLASWAGVCPGNKQSGGERMSGKTTKGNAHLQAALAEVVWVISHTNDNYLSAQYHRLAKRIGKAKAVVAVSHSLLVIIYHVLRDNKPYQELGADYFDHLDTQRIANQSVKRLEALGFHVTLEPQKEVTA

SEQ ID NO: 293912 - protein, 325 aa, unidentified
MDIVGIDISKAKFDVALLLGGRVRHTAFSNTEAGFQQLLIWLDKHRPDPVAPMHACMEATGNWGLELADFLHAQQVRVSVVNPARIKAYGDSELARNKTDKLDAGLIARFCRAHVPPVWTPAAPHLRELRELVRRCDALKSARVQELNRQKSGFASPAVARSIAAHLDWLNGQIDAVMEEVRHLVGADATLSKNLALVRSITGFGEVSATILLAELPNIAEFTPKALAAFVGLSPSDHNSGTSVRRPGKISRIGTERLRSTLYMCALSAKRNNKPLAAFVARMSAAGKPPKVILIAVARKLLVYAHAVIRAQKAFDSSPNAPLPA

SEQ ID NO: 293913 - protein, 352 aa, unidentified
MCALKYVGMDVHAATTVVAVRDGRGHLLSTSTLKTEAGVLRDYVRGLSGQVHITFEEGAQADWLFDLLSPIAHRVLVCNPRENRSGASRNKNDRIDADRLCEWLYKGSLKPVYHGERSTRQLEAAVRTYQCLVADQTRVKNRLKAIFRSQAIPVSGERPYHPAHRQLYLAKLDQPGLTQRARMLGAQLDALRPLLLEAKRALRRHARAHAAYPVLASIPGLGPVRVAALIAAIKTPHRFRRTRQLWAYAGLAIDTSASSEQEFVDGTLRRRKGAVLTRGLNTNYNRRAKEALKGAAEAAIRREFKDLYAAMLAKGIRPQLATLTVARKIATLVLTLWKKGECFDAAKLTTAQ

SEQ ID NO: 293914 - protein, 398 aa, unidentified
MEVMDAAGRRLSAAKLPEGIAGMARFHAMIAAQLDPDADLDAQAGQVLIGIETDRGPWVQALIAAGYQVYAVNPLQAARYRERLGVSGAKSDPADAHLLADMVRTDSHQLRVVAGDSDLAEAVKVVTRAHKTLIWERTRHTLRLRSTLREYFPAALAAFEDLTDADTLELLAKAPDPASAARLTTTQIMAALKRARRHHRDRRAGEIQAALRTEQLGQPAVVAGAYAVAVRAQVAILGVLNEQINLLQEQVEAHFGRHPDAEIYTSQPGLGQILGARVLAEFGDDPTRYDDTRARKNYAGTSPITRQSGKKKVVLARYVHNDRLLDALGGQAFAALTRSPGARAYYDKQRDRGLGHRAALRQLANRLVGILHGCLKTGTRYNEATAWSHAQQDQQVAA

SEQ ID NO: 293915 - protein, 327 aa, unidentified
MKFDFFIGIDVSKNELDYSVVKAGVELFHFKAANNLDGIRAFVKMLKSKGGKPSNALFCMEHTGIYNNPLLNYCTKQKIAVWVEPAIQIKQFSGLQRGKNDRVDALRIALYAYKNRGEVKLWEPKRYAVQRLKYLLSVRSRIINVLKQLSIPLKEEKDFTDSRVYNAKMNSHSIKVLKREIKDIEKEILLILKEDKELLVTSVEGIGMVTATCIIITTNEFKDITEAKKFACYSGVAPFEHSSGTSIRGKTRVSRMANKTVKTLLHMAALSAIKMKGELRDYFERKVAEGKNKMSVINAVRNKLIQRIFAVIRDNRKYEKIYTNSLA

SEQ ID NO: 293916 - protein, 353 aa, unidentified
MKRDKYIGMDVHQATTVVAVLDANGKVIWETIIPTQAGPIIEMLESLSGTLHVTFEETTQADWLYEVVRAHVAEVVVCDPRRNKLLSEGSKADKVDARRLAELLRVGMLRSVYHGNEGTRQLKQLARAYQTLLSDTQRTMARIKAIYRGRGIHTPGRGVYQAKQREQWLSQLTEPGLRQRTAWLYEQLDQLGPLRRQAKLAMLAESRKHRAVGLLRTIPQLGPIRGALIVAILDTPHRFRTRRQLWSYSGLAVVTHMSSEYELKEGRVVRTHKPIATRGLNRNCNRVLKDVFIGAATGGSQRAPYRQYLQGLHDRGMRKEMARLTLARKISAIALTIWKKGEAFDPKKLNWVT

SEQ ID NO: 293917 - protein, 324 aa, unidentified
MQSTPLFACLPSHRQVGIDVSKERLDTALRPSSERWATPNEARGISTLCRRLQPLAPALIVLEATGGLDLPVVGALAAAGLPVVVVNPRQVRDFAKATGQLAKTDTLDAAVLAHFAEAVRPPVRPLPDAETQALDALLTRRRQLLDMRTAEQNRLGSAPQPVRKEIQAHLTWLDRRLAHLDTELGRTIRESPVWRAQDDLLQSVPGVGPVLARTLLAGVPELGTLNRKQIAALIGVAPLNRDSGTKRGRRSVSGGRASVRAVLYMGALTASRCNPVIQAFYARLRAAGKATKVALTACMHKLLLILNAMVKHQTPWRENLASTS

SEQ ID NO: 293918 - protein, 343 aa, unidentified
MEAYVGQQFVGIDLHRRRSVIVRTTAAGDVLETVRIVNDADRLTEVITRAGQAPEVVLEATYGWYWAVDALQAAGATVHLAHPLGVKAFEYRRVKNDERDAIDLADLLRMGRLAQAWIAPPATRELRELVRHRAKLVAVRSHCKAEIHAVLAKCGVQVPMSDLFGVAGTDLLDRLELPAPYAARVGSLRRLTDHLDFEIDVFAGLARRRLATDPGYTAVQAIPGIGATLGAVFVAEIGDVGRFAAAPQLACWAGLTPRHHESDTHVRRGSITKQGSRLVRWAAVESVQRLPATTKVGQIRDRIAERRGHNIGVVAAARRQLEFVYYALRDHHVRALHPLPAAA

SEQ ID NO: 293919 - protein, 337 aa, unidentified
MERQYVAVDLHGRRSVIVRENAAGEELAVTRIDNSVEALAAALADAGPNPEVAIEATWGWYWAVDALQELGATVRLVNPSGLVWEDRRVKNDYLDCKELITRMRINKLPEAWIAPTEWRELRELVRYRFKLVCLRTGLKAQVKSVLAKHGLHPPVNDLWCVTGPRWLDGLELPDAYHHRIESLRDLVGVFDREIATLERMIHHQLKDHAGYRAIQHIDGVGPVLAAIFVAEIGDVHRFSSPAALCSWAGLTPKHRESDVKAHRGKVTKKGNRLVRWAAIEAISHLRGGPKLQGDYHRIADRRGKNIARAAVARKVLTLVYYGLRDGEIRSLARAETA

SEQ ID NO: 293920 - protein, 404 aa, unidentified
MELKPLYRCVAALDVHQAKLTVCVLREDAAGELQVELREFGGFKRDRRAMAEWVASFHPEEVVMESTGIYWKSPYAALERYGIRALVVNARHVKQVPGRKTDIGDAQWLAILARSGLLRGGFVPPSNFRALRLTARQMQKLTGMLAAEKNRLHKVLTDAGIRLAVVVSDIHGQSARAMVKGLIAGEGPEQVLTYASKRLKATEAELLDALDGELSGEHRFVLAELMDHIEELEQRIVRHGNHLLQGLAPQQGLLQALQTIPGLDERGAAMLLVEIGDDMDAFGSGEKLASWAGVCPGNHESAGKRKSGRKRKGNPYVRRILCEAANAAARTRSALAELFKSLLIRRGRKRAIFALAHKILKIVFVLISRGDYYRDATVDYEAMSVERNAPRWMRMLRKYGYISA

SEQ ID NO: 293921 - protein, 336 aa, unidentified
MRYIGVDLHTTQITVCYLKAEADFEIRKYQLVEMEKFVNSLELSDEIAVEATGNTRWFAEQVAEKVRRVVVVNPRQFEVVKNSCKKTDKHDALNLARFLRADLLPEVRAKREEATSVQSLVQTRTKLVRLKTSLINKIHALYVANGRKLKKASLASEKGLEKVLLSEWSAIERIELEIIIEQIRSLKVSIKKLDTAIAAESEKLKGYESLVSMSGIGSLSAGILLSVIGEIKDFATADKLASYFGIVPRVSNSNETVNHGRITKRGNKTGRTTLVQCSLSAIKKSEYLKKYYEQVKARRGHGKAKIALARKYLGIIYNTLTNNWVFADFNNFELAE

SEQ ID NO: 293922 - protein, 396 aa, unidentified
MLYLAIDQHRKQLTVNLRNEQGDVILKRQVSTEWKRVREFMEDVRNRSVPEGGFVAIVEVCGFNDWFLKLLAEYGCREVVLVQPEKRTKNKTDRRDANALGELLWTNRQRLLEGKKVQNVRRVVPPSQRDAEDRQLTIMRHRLGRLRTRTINRVQHLLLKHNLQQECPTKGLKSQSARNWLAKLPLGVVDRAELDQLLAQWELWDRQIEELEPKIRERQAENTTAAIVATVPGAAAYSSLALACRIGSIERFPHARSLPHYWGLTPGCRNSGDATRRLGSITKQGSAMARFILTQMVVHVLRRDARMKEWYQRIKRRRGSKIARVAVMRRLATILWHMLKHQQPYRPGGTSTAGNDPGCGCKPPDRNAFFEAQQGRSRGRKQKGCHSSVTAAAARP

SEQ ID NO: 293923 - protein, 342 aa, unidentified
MDHFAGLDVSVKETSICIVDDAGKIVREVKVASEPEALLAVLKNPAYHFKRIGLEAGPLSQWLFSALAEAGLPLICVETRHMQAVLKAQINKTDRNDARGIAQMMRAGLYRPVHVKTIRSQKLRMLLTHRKLLQSKAIAIENDLRGTLRNFGLKVGMVGKVKFEARIKELVENLPDLAALVEPMLIVRRTLREQIVILHRRLLAIVRDDEVCRRLMTTPGVGPVVALTYRATVDVPARFRKSKAVGAVFGLTCAKYQSGEVDRNGRISRCGDEMMRVMLYEAAQSMLRSKKWSWLKAWAMQIARRRGMKKAIVALARRLAVIMHRIWVDGTEFRCTRQAATA

SEQ ID NO: 293924 - protein, 342 aa, unidentified
MKDTMIGVDLAKNVFQLHGATMTGHLRFRKKLTRSRFRQFMACQPPAVVVMEACGSASYWAREMVKLGHEVKLIAPQYVRPFVKRQKNDAADAEAIVVAAQRPEMRFVQPKSEDQQACAVLFRGRERLLHQRTELVNALRSVLYEYGHIIPKGIAHIKRIETILEEPNSDLPALVREECFDLLEQIAEKTARIDVKTAKAKALSLATDTARRLQTMPGVGPQTALAISGFAPPMESFKRGRDFAAWLGLVPRQYTSGGKERLGRVSKAGQTDIRSLLIIGAMSRLTVLARKSIVEGSWLARMLRRKPLMLVAIALANKMARAIWAMMTKKEDYRNPARVVAA

SEQ ID NO: 293925 - protein, 385 aa, unidentified
MEKTQRTLRKEDSTKLVTLYMACELSHNTWKLAFSNGEKIRTVTMDARDMDQLQRAIEGSKSRFKIEGEVEIRSCYEAGRDGFWLHRYLLNCGIENMVVDSSSIEVNRRKRRAKTDRIDARKLLNMLMRYHGGERKLWSVVNVPSVDAEDGRHLHRELEALNKERTIHRNRIKSLLIQQGIAVKNPSSRKFVLDLGSFRTWDDRALPVDLQSRIIREHGRLRMVEEQIYTLKRERERRLVEEGDHPSIRKVSQLMTLRGIGVNSSWKFVEEFFGWRDFKDRRELGSLSGLTPTPYDSGGYQREQGISKAGNKRIRTLSVEMAWVWLRFQPQSKLSQWFIERFAGGGSRMRRIGIVAVARKLLIDLWRYLEHGVIPEGAVLKSEAS

SEQ ID NO: 293926 - protein, 417 aa, unidentified
MNHPKMQWTYIGVDSHADTHTAVFLDCFFEKLTEITFANLTSEYDTFLREAWQWKMEGTDLLFGLEDATSFGRTLAVFLTKQGQTVKHVNSTLVAQERKHQTITQKTDSVDAECVARVLLSRYSTLPNVEPNDKYWILRTLVVRRDQMVKNNTSAKIYLHSLLLQHYPNYREFFANIDGKTSLHFFKNYPSPSTLKDVSKQELTEFLLTTSRNRFGLKKAEFILDSLEHTTADYQEIRDLVVQSTIRQIEFNLTELEQLECSMEVCLDRFDCTLTSMAGLDMVSACQILSCIKDIKRFPTSAKLARYCGIAPVTYASGRKDQQYNNQRGNRELNSLFFALAVRLTSPTGPNNKIINPFIYDYFQRKKSEGKTKRQAMKCVERRLVTIIWNMLYHNEEFVNPPVIDMPVEKDGSEKAE

SEQ ID NO: 293927 - protein, 443 aa, unidentified
MTVRKRELTVMFPNAAGIDVGSASHYVAVPSDRCEEPVREFASFTEELIALADWLASCGIDTVVLESTGVYWIALYELLESRGFVVYLVHAKHVKNVPGKKSDVLDCQWLQQLMSFGLLTRAFRPDDKVCALRAVVRQRDTLIDAQASETQRMQKALTQMNVQLANVITDIMGKSGQAIIRAIVAGERDAQKLARLRNYRVHASEEQIAKSLHGNWREEHLFCLAQSLKLFDTCQELIAESDAKIETMLARMQKHTTHLAPNKNKGRNKNAPNFDARTALYAWAGVDLTRIGGIDVSTALKILAELGTDFSKFKSAKHFASWLGLCPGTRITGGKRISGVTKRIANRVTQALKLAAQGLQRSRCALGAYYRTKAARLGAGKAITATAHKLARLVYAIITKGEEFVQRSQDHYEEQVRARTVRYLQKKAASLGFTLQPNAAVCA

SEQ ID NO: 293928 - protein, 323 aa, unidentified
MSPVVGIDVAKRSFDLAIDLANGKYRTKAKLPNDPKGFQVLQTWLQTHAQADSWIVMEATGTYHEALAEFVYGLGYRVCVLNPAQMALYARSQLTRVKTDRSDAKLIASYGQRHAAQLRPWQPDPPALKRLKTLVRRRDDLLQMLQMERNRLDVAALVVRDSLLENIGQLQARIAQIERAIDDQIDQDPTLRGQRELLVSIDGIASTSAALMLAELGNVERFAHASAVTAFAGLNPRLQESGKRQGQVCISRTGSPRLRAGLFLPALVAMTHNPVVRALKLRMRERGKANKQIICAAMRKLLHIAYGVLKSRTPFDPQKTLAC

SEQ ID NO: 293929 - protein, 410 aa, unidentified
MTVITIAQNTPVLVAIDIAKARHEVLISVPGKKRHRRLTVLNELADFTRLIAALKDYGHPVRAAFEATGNYHRALAYHLATAGFEVKLVSSVALARTREALHNSWDKNDPKDAQVILHMMEIGNEQFYHDPLVRGTNDIQELSKTHDIVSKSKTELWHRILTHYLPLYFPEADRFHRSSRSDWFFAFLERYPSPHFISAMSKDAFIADAWDVVGRKVAKERLLADIYETSKVSVGLPVGLDSDAISMFRLVLGEGRSLIAQRNQIEDRAVALLKDLPDYQLLTSIPGIGPINALTILAEAGDLRRFGHHRQFLKFCGMDLATIQSGTFRGQTKLSKYGNARLRRTLWMAGQVAILQRANSFRDKFERYITKDRHNTHLRRKAYTAIAAKMARTVHGIIKNGEPYRPFFEG

SEQ ID NO: 293930 - protein, 371 aa, unidentified
MKSILSVGMDVHKNSFSLCAYDGYTGEIVSESTFASDVKLVIKFIETLKSRHENDVEIKCGYEAGCLGYSLYKLLTARGVDCVILAPTTMQVSAKNKMVKNDRMDALNIAKNLASGSYKAVYVPDEEAVEIKEYIRMIHDFKKELKRVKQEICAFVLRHGYQYDGKSKWTIRYMNWIRELEMSEIQRETLNEYIAEMENLNDKIDRFMNRINEIYQSERYHEKVSKLRCFKGIETFAAMTIQVETADFERFPNAKAYASYTGLTTGEHSSGDKNNRIGITKQGNTVIRKTLVECAQALAKGNVYAKKSQRLKSRQKGMDVNIIVYADKATERLKKKYQKLIERNVPRNKAIVAIARELACFIWGMETGNIH

SEQ ID NO: 293931 - protein, 349 aa, unidentified
MIRNQPRDAAVFGVDIGKNIFHIVGIDEAGRPIQRVRVRRDTLLQFFARAKPAIVGMEACPGSQWLARKLNVFGHTVRIIPAQFVKPYLKSNKNDTLDAEAIAEASTRPTMRFVDVKLVEQIDVQALHRARDMMVTQRTRMISQMRAFCLEYGATIRQGAGVFKLDLPRVISDTSNDLSPAIRRLLAELFDDMMRLEHRIGEITREIEALVAQSDVARRLMTIPGIGPLSASALLAAAGRGHQFKRARDLAAWLGLVPRQYSTGGKSTLMGISKRGNGYVRRLLIHGARSCVLHLDRTKSRLGVWVDQLQRRMHINKVVVALANKIARIAWVILNRPGALYERVDPAFA

SEQ ID NO: 293932 - protein, 361 aa, unidentified
MTTMTRPAASTQAFGQTGVEVTGGVDTHTAAALDRAGRLLGSSSFPTTPTGYAALLGWLRSFGTLLLVGIEGTGVYGAGLALHLHTAGVAMVEIDRPDRKARRWQGKSDPVDAEAAARAAQAGRRTGTPKHRDGHVEALRALRVARRSAVSQRADAQRQLKALIVTAPDTLRSALRGLADRQLIEVCAAKRPDRGAAGDPTTACVIASRALARRHQHLSAEIDDLDTLISPLTEAVNPTLCALMGVGPDTAGQLLVTAGQNPERLRSEAAFSMLCGVSLLPASSGRTQRHRLNRGGDRHANAALYRIVLCRLRWDPRTRAYAQRRTTEGLSKKEIIRCLKRYIAREIYTALTTQHDHETAA

SEQ ID NO: 293933 - protein, 472 aa, unidentified
MAQRKRKTSPSTPTLPPQLAAANLHAAGIDIGAEGHFVAVPPSDDPQPVRGFGAYTADLEALADWLATCGITTIAMESTGVYWIPLFELLETRGFAVLLVDPQQVQKIKGRPKSDVHDCQWIQRLHTFGLLAGAFRPDDQVCVLRSYLRQRAMLLTYAAQHIQHMQKALTQMNIKLQHVVSDITGVTGLAILRAILAGERDPATLAQLRDYRCKHDEATIARALQGTWRDEHLFALAQAVALYDVYHQKITECDRHIEAYLQTFADRNEGQPLPPPPRPRKRGGNQPAFAVRAPLHRITGVDLTQIEGLDETTSLVILSEIGLDMSRWPTVKHFTSWLGLCPHHRVSGGKVLSRRTKPCANRAATALRLAAACLHHSQSALGAFFRRMKARMGAPKAITATAHKLARLIYTMLKHGTAYVRQGMDEYEQQYRDRTVKNMTRRAKALGYILVKTPEGPPRLTGTPGSSSLGTS

SEQ ID NO: 293934 - protein, 429 aa, unidentified
MNYNTQNAKIASITEKTLIVGIDVGSETHYARAFDWRNYEYSKKPFAFNNDEAGFAAFKAWMEDMADKHGKEVVIPGMEPTGHYWLNLGAYLQEQGMKPVHVNPHHVKKSKELDDNNPNKNDRKDPKTIAGLVNEGRFSYPYIPTGIYAEIRNLSNLRIQTQEELTRIKNRIARWFSIYFPEIKDVYKNPDAVSGMMVIKKAPLPCDIKELGVDGVNQVWRNAKLKGAGLKRARTLVSAAEHSIGSTEAPGSARIEIRNLLNDYEVYKNRMDDLMREIEAKLSEIPYIDKLMEINGIGLKTVSCFIAEVGDIRRFDNPKQLQKLAGYAIVADSSGKHNGESRISHRGRKRLRYALYEAAISVIGKNKEFREIHDYYRTRKQNPLKKMQSVIAIACKLIRIFYTILTKGVDYDGQKMLSDIVRPETIMAA

SEQ ID NO: 293935 - protein, 480 aa, unidentified
MRPHITLMEDAMDKNKKQKRKYKRHRKVNTSHLEQLNINAAGIDIGAEFHYVAVPNGRDPEGQDVRHFSTFTADLHQLADWLRQCNIDTVAMESTGIYWIPVFEILDSQGFDVRLVNPRNVKNAPGRKTDVLDCQWIQQLHTYGLLQSAFRPEDRICELRAYLRQRAMLVSYASHHIQHMQKALEQMNVKLTQVISNITGVTGMKIIRAMISGERNPVKLASMRDARCNNSETIIAKALEGNWRSEHVFALQQAVELYDFYEKQIIECESRIQDHLESFDDRSNGTPLEKPRRKSRGSSNQFHFDARRYLHRMTGVDVTRIEGIEGPTALNIIGEIGIDMSPWPSEKHFASWLGLCPGSKITGGKVLSSKTKPSANRAAYAFRLAAYSLQRSKSAIGAFLRRKKAQKGAPKAITATAHKIARIFYNMLKYGTEYVDLGQEYYEQRYQDRVIANLKRKAKQFGFDLVNIKEHKLLTGLPAN

SEQ ID NO: 293936 - protein, 323 aa, unidentified
MMAQDDLVVVGIDVAKDKVDACIRAFALRQVFPSAAQGHRKLIAWLRKHKVTKAVMEASGGYERDWAKVLRQAGIEVRIVDPKRVRSFALSAGRLAKNDAIDAEMIAWFAETFSEAPSQRHDAAHEELLALVKARKGLLDLKTRLQSQNEHAAPGPVQKAHARVVKSLATEIAKLEAAISAKIKATPDFAERTEIIESVPGFAETTSANLIAGMPELGQVSNKIAAALLGAAPYDDDSGHRRGERHIKGGRRWVRNAIYMPCLGAATQNNPVLKAFYHRLIAKGKPPKVALVACMRKLIIILNSLIARRQKWDPSRYPHSERA

SEQ ID NO: 293937 - protein, 345 aa, unidentified
MKIVGCDLHTRYQQIAMLDNETGELIERRLEHANGEAKEFYSKLTGPVRVGIEATGHTRWFERLLAELGHELWMGDAARIRAAEVRKQKTDARDAALLLELLVSGRFPRLWRPTTEQRDLRHLLWHRQKLVWMRNAVGNQLHALAMGEGLCKKKQLFTKKGRAELERLNLDPWASRRREELLRMLDQIDASLAQFNAAVNQQAAQNQDALRLRTHPGVGPVTSLAFVLLVGPVIRFQRSKQLVSYLGLNPSEHSSGGRQKLGAISKQGNPMLRGLLVEAGHSAARLDPELRQDYQRLRLRRGGSVAKVAIARKLAVRMYWMLRREVNYTQLVRMQGSSRGTLVQH

SEQ ID NO: 293938 - protein, 387 aa, unidentified
MPKQNDLSRCLVALEQDATLIAVVEMGQSSWLVAGIVPGLDRYPLKKLGADRDALLQLLHRWRNEAAQAGRTIERIAVAFEAGRDGFWLARWLRAQSIEAYVIHPSSVPVSREHRRAKTDRLDTELLKRAFLGWLRGEPKHCSMAAIPTLEEEDARRPGREREVLVGERTRIVNRLKANLARLGIRGFRPNLARAQSQLEALRTPEGLAIRTNTLAEMRRDMDRLQFVKRQIKEIEKTRAERLAKAPSEQRHAMVRQLMRVVGVGVETADTLVQEVFSREIRDRKALARYAGLTGAPDESGQKRRERGLAKAGNARVRRGMIELAWGHLTHQKGSPLTAWFWRRTADARGGTRKTMIVALARKLLVVLWRFATTGETPAGLRLRPAA

SEQ ID NO: 293939 - protein, 342 aa, unidentified
MELSVLGIDLAKQVFELYGINARGQEVLSRRVTRKRLLASVAQVPACLVVMEACGTAHYWAREIEKLGHRVKLLRAKDVKAYVQGDKDDRHDAAAIAEAGTRAHLRAVAINSVEQQDLQSLHRIRELLVKQRTALANQLRGLLAEYGVVMGKSLGVLRRRVPEVLEDADNGLTAGFRASVAEMYERLREFDERVVVYDRRIGAAARADARCERLLEVEGLGPMSASALVAAVGDARQFDSGRQLAACLGVAPAHRGTGGSNRVLGLSKRQGNRYVRTLLIHGARSVVRHAANKTDPRSRWINRLVARSGVNVAAVAVANKNARIAWALLTRAERYRAVEATA

SEQ ID NO: 293940 - protein, 351 aa, unidentified
MDRYIGLDAHASSCTLAVIGPSGKRLGSHVVETNARALIEVLRGMPKSRHVCLEEGTLTEWLHEVLEPHVEELVVTGVSKSRGPKSDKRDAFGLAEQLRIGAIKTRVYKGRGQFRRLGNLAKAYGFLVGDTVRVKNRLRSVLRSRGVAYGAGQSVYAKRDREQWLAQLPEAMRAQAELLYEEHDLLVALRQKAEKTMLAEARKHREWHVLTTCPGLGPIRIAELLPVVVTPYRFRSRSGFWAYCGLGIVMRSSSDWVRSLSGHWAKTPVQQTRGLNRNFNHTLKRIFKGAATTVIGRAEDGPLYRHYLSLLDGGTKPNLAKLTIARQIASIMLALWRTGERYDPTRLEATE

SEQ ID NO: 293941 - protein, 333 aa, unidentified
MKKLIHFIGIDVSKLTIDVAIIINNDIGKIIQLVFTNDSKGFKELKNRLNKEKISFPETVFCMEHTGYYSKQLSRFIIAQRGNLWMEMSLKIIRSLGVQRGKNDKLDAKRIALFAQRNQQDFVPYNPPRLIVENLKTFLMLREKLINSKTALVVPVNELTSVDKTAGKIALKAISKALQGIENNIGTLDAKIDELIASDKELFEKFKLVSSVPGVARITFCYLVYFTNEFKNYTQAKQLACYCGVVPFEYTSGSSVKGKPKVHNMANKKMKKLLHTAALCAVTYYPEFKQYYERKIKEGKPKMLILNNVRNKIVLRIAAVIKNNLPYKTNTAA

SEQ ID NO: 293942 - protein, 431 aa, unidentified
MEVIHPRVAGIDVHKKIVWVAVRLPGERPGERTVTAKRFKTFWRSLRQMAAWLAELGVTDAAMESTGVYWWPVYHALVQAGIEVCVCNAAHMRNVPGRKRDVIDCQWIAELHEHGLLRPSFIPAGAVAELRSRTRYRKKLIEQRTSEGQRLSKVLEDAGIKIDSVASRLLLKSGRAMIEALIAGERNPGRLADLALGRLRRKTEELQLACDGRFTAAHGQMCRLHLDAYDHLTAKIAELDELVAEAAAPFAALIARLQTIPGVGRRTAEVIVAETGGDMARFATAARLAAWAGLAPGDNESAGKRKHAAARKGNRHLRVAMVESAWATARTRTRPGARFRRLARRFGKGNEKKAAVAVAHTLICIAWALLSRGQDYAEAGEDYYEQRDHRDREHLIRHHQQALARLGYQVTLIPPGDGSPPPSATSPQPAA

SEQ ID NO: 293943 - protein, 334 aa, unidentified
MENIALIGIDLGKNSFHIHCEDRRGKAVYRKKFTRPKLIEFLATCPATTIAMEACGGSHFMARKLEELGHSPKLISPQFVRPFVKSNKNDFVDAEAICEAASRPSMRFVQPRTESQQAMRALHRVRESLVQDKVKTTNQMHAFLLEFGISVPRGAAVISRLSTLLEDNSLPLYLSQLLLKLQQHYHYLVEQIKDLESQLKRKLDEDEVGQRLLSIPCVGTLTASTISTEIGDGKQYASSRDFAAATGLVPRQYSTGGRTTLLGISKRGNKKIRTLLVQCARVFIQKLEHQSGKLADWVRDLLCRKSNFVVTCALANKLARIAWALTARQQTYVA

SEQ ID NO: 293944 - protein, 428 aa, unidentified
MLNKLDRLQQFQDLRGTIRGSDSILIIGVDVAKDKHYAFFGTSNGRTLWKKLIFDNSIQGFNKLLSMTQDLSIQHSLNARVFGLEPTATYHKPLAEHLIKKGEQVVYVSNVAAKNNRALLDGRWDKNDTKDAANVADLVGQGRCQYYDLAEDSLRELRSLLAYRAKLKKQEHALRMRIRNSLLAQYFPELDKQMPQGGQDGLILDIIAHDFAPARIAALPFEVFRQQYQMEKRHLIQEQRLRTIWEISQSSVGCALPASAAWEGRMLVEQLRQIRQTKRELEKQLKEVGQTFPAYAYLLSIPGFGPIVSAMTLAAIGDAHRYTSRKQVLRLAGLDLSASRSGKSSNNAIPVVSKQGKAGLRYALVQAAQIASYKDDVIRSYFTGLLKGRELERGIKLKMRVKLAAKMLVIAWTLMKRNEYFDSGYFRT

SEQ ID NO: 293945 - protein, 348 aa, unidentified
MQILSLDLGKNKTVGCDYERESGRHRFKTAFSTRAGLAQLVKEVKPDRVVIEVCSIAGWVCDLLREMGIEVQVANTSDDAWRWRKVRKKNDRRDALKAAQLSAVNQIREVHIPTIDVRQWRALIAFRQQLVRRRTRVKNHVRDLLLREGQILPRGGKCWTQLGVLGLEAMAQPLSQVGMNELWRGELAIELRQLRAVQEEIDVAEEKLDAIGAADPRVRLLRTIPGVGPRLAEAIVALLDRPERFRKASEVSAYIGMVPKELDSGETQRRGKITRHGSRLVRSLLVEVAWAGLRHNPWVRETYQRISGGKKSRKKIAIVAVGRRLLVRCWAMLRDGTSWQWPPAAKVA

SEQ ID NO: 293946 - protein, 338 aa, unidentified
MKYKRIAIDTSKHVFTLHGVDEQERPVLRRELRRGQVEAFFGKQDATEVVLEACGGSHHWGRLFSRLGHRVRLIPPQYVKPFVKRAKNDRNDAEAISEAASRPCMRSVVVKTVDQQADGIILKHREMLVSQRTQAINALRGHAAEFGVVAAKGTVKVAALLTELAADGAIPATARAMFEQMGAHIETLDQRVAAVDSELAALHKANPVSQLLAEIPGVGPLGAITMALTVEPGNFASARHFAAWLGLTPKEHSTGGKQRMGKISKAGNERLRQLLFVGAMSVIRFAKPGGKSASAWLLQLLERKPRKLAAVALANKMARIIWAMMARGEAYRRQPVAA

SEQ ID NO: 293947 - protein, 405 aa, unidentified
MNAVGIDVSKGKSTVTIRRPGDIVVMSPRDIPHTQSAINDLIAQIKELDGDTKVCMEHTGRYYEPVAAWLSDAGIFVSAVNPMLIKEFGDDSLRSPKTDKADSKKIARYTLDRWAKLKQYGSMDKTRNQLKTMNRQFGFYMDQKTAMKNNLIALLDQTFPGANNFFDSPARSDGSQKWVDFVYTYWHVDCVRSKSLDAFTEHYQNWCKRKGYNFSAAKATAIYQLSSDMIAVFPKDDGTKMLVRQAVAMLNTASETVESLRVKMDETASTLPEYPVVMAMNGVGPTLGPQLMAEIGDVTRFTHRGALTAFAGVDPGKDESGQHVRKSVPTTKKGSPYLRKTLFQIMDGLIKRSPVDDPVYAFMDKKRTQGKPYYVYMTAGANKFLRIYYGRVREYLSALAEAENS

SEQ ID NO: 293948 - protein, 349 aa, unidentified
MDRAWVGIDVGKEFHWVHVLDASGRELLSRKLENDEADISKLVGKALSLAEEVVWAVDQPGGSAALLLALLWERDQRVLYIPGLTVNRASDAYRGESKTDARDARVIADQARMRPDLSELEPGEEEVAQLRILLGRRRDLVIDQNRTITRLGGALLLLSPALERALDLNRRGPLTLLTHYQSPAQLRRAGHKRIAAYLRNRGVKGFDSVASKALTAAKSQSITLPGESIAARIVAELAAEVLALKDHIELIDEEIEQRFFDRPEAEILASLPGMGSLLGAEFLVAVGNLSAFDSADHLAAYSGLVPAANDSGKRVGNNRRMRGGNKNLKRVFYQAAFQLAQLTGVQGLL

SEQ ID NO: 293949 - protein, 427 aa, unidentified
MKEKNVSMKVVNPHAAGIDVGSRSHFVAIGQDDDQVREFGAYSEDLNSLAQWLIANDVKTVAMESTGTYWQNLYTVLQGAGLEVILCNGKFTKNIKGRKTDVQDCQWIQKLHTLGLLSGSFLPDEASEQLRTYCRHRTNLLGLAASTTHKMQKYLQLLNLRLDIVVKDVTGLTGLSIIHAICNGESNPEKLASLRNGNCKKSEKEIAKALQSNGRKDYLFTLTQEYKLYLSVQEKIKECDEEIEKMLQEQINGDEEKKQHFIGKKVHKRVNKNTPKNIDINLLAYQYYEGVDLLAIEGVSHATILTLMSEIGTGINKFSTAKEFSSWLRLSPNTKISGGRVLSSKVAKGSNRLKIALRNAANAIGNLKDTALSNFFRRIAFRKGRVSAISATARKLAVIIWNMLVKKVPYKPEKKKEESNGNEEANS

SEQ ID NO: 293950 - protein, 443 aa, unidentified
MTTLPYDLVIGLDRSDKKADLCLIDSHTGQRRTVLIDTAPEALWEWLAELRQQHPGARVGLCLEQPAVHLIVFLEAYDWITLHPINPITLQKYREAFVTSRAKDDTKDAEYLADLLLTHHAQLPVWAPEDSATRALQQLVFHRRAVVDERTALTNRLQALLKQYYPQALLLCGQNLWRPLATAFLLKWPRLSTVQKAKPATLRQFYYLHGSRSATLQEKRLALVARAVPVTDESAVIDSFVLRVQLIAHQLQQLQRTLAQFEEQIATAYAAHPDRLIFASLPGAGAVLGPRLLASLGANRERFATSATQLQRYSGVAPVTKRSGGSCRIHRRYCCPKFHRQSFHEYAKESVLWSLWAAAYYLQQRTKGSAHHTAVRALAFKWQRIIWRCWQNRQPYDEQIYQAALRQRGSDLVKLFDRVELGKSPWKTQSRNLKKPLVGLPQR

SEQ ID NO: 293951 - protein, 370 aa, unidentified
MRHPSTLFVGLDVHKETIAGAYVSEDREAEVIFLGTIGTRQCDIDKLIRQLHAKGKKLHFVYEAGPCGYWLYRYLSKKNLKCWVVAPSQIPKKAGDRIKTDRRDAVQLARLLRSGDLTPVYVPAVDDEAIRDLVRAREDALKDIKAAKARLKAFLLRQDIRYGGRATWGPAHLRWLAEVVCPTPAQQIVFQEYVRAVSEHAERLQRLEAELQTQVQTWRWVPVVEAIQALRGVQFTVAVTLIAELGDLSRFDNPRQLMSYLGLIPSEHTTGERRRQGGITKTGNSHARRALIEGAWAYRYPAKVSRHLQLRLEKLPTVIQDISWKAQVRLCKRYRRLMARGKNANQVVVAIARELAAFVWAIAREVAVAH

SEQ ID NO: 293952 - protein, 356 aa, unidentified
MTQKTDVVGIDVWKATLDAYALASQQARQFANDPVGHQGLVAWLQGLGVGVAVLEASGGYEQAAARWLRRAGLVVHVVDPKRVRHYARAAGQRAKTDRIDARMIAAFGAAFLLAAPGGMVGADDPARQALADLVAARQDLLDHRTSLQQQADALPPGAARRALLAVLKPIARAVEALERRIAVAIARHPPFAELARRLDTVPGLGPVSIAALIAWLPELGQLTRRQLAALVGVAPFADDSGTRTGQRRIQGGRMKLRNVLYMATMSAATRHNPVLHACYRRLLENGKEPKVALIACLRKLLTILNVMVARQQDWNPTCGQTAEPAVACQGAVQPVGAVRRPHAEQSEPAGRPGQGR

SEQ ID NO: 293953 - protein, 322 aa, unidentified
MSAPILGIDVAKQRVEVALLVEGKVKHKSFKNAPDGFEAMAVWLRKLGIQQVSACLEATGNYGEDLATYLHEAGHTVSIVNPARIKGFAQCELLRTKTDKVDAGIIARFCLAMKPASWIPPSPEIRSLRALVRRAGSLIEMRSQEKNRLGTAHESVTPLIKEHIDYLDKEIKKVRDQIADLIDRDPNLRQKKDLLASIPGIGKATIAALLADLDNLVKFNHVRELVAFIGLAPKETLSGSSIKGKPRLCKTGNARLRKALYMPALVSIRYNPMMIAFYNRLKKRGKNGKVIVCAIMRKLVHVIFGVLKSGKKYDPNYKPIYA

SEQ ID NO: 293954 - protein, 321 aa, unidentified
MNKYKEIYGIDISKDVFDVYGSETGHNQFKNDEQGFKSFLKHLPNGVLVVTEATGYYHYRLAQFLFKSNVLVSVVNPLSVKRFIQMKLAKVKTDKSDAKAISEYGQMNDVPLYTALNEVQSECLQLFRLLDSYLKHRTATKNKLKGEEVLGVPSKFVYSSLKRNLKHLNKEVDALETRLLMLVKQDQQHQLTLLKSIPGMGVKTALFLIVVTDGFKKFETASQLCSYVGITPTIRESGSSVRGRSRISKVGNKKLRNLLFLCAFSACKHNKACREIYERLVAKGKSKKLALIAVANKLLKQAFAIAKSGRPYDENFVSRLA

SEQ ID NO: 293955 - protein, 349 aa, unidentified
MNKHKTIGIDLAKRVFQVCVVDTRHPRVQVNKELKRHQVLDFMRRQPTCRVFMEACGGSHYWARQLQALGHTVALISPQFVTPFRKGHKTDANDALAIVEAGLRPDMRFVPLKSVEQQDIQSLHRIRERYIHQRTQVINQVHGLLQEYGIISGRGQKALKQRVWRVLEDADNELSMLMRDLIAEQMAELERLNERIQSLDKRVEQMSRAMMPCRQLLAIEGVGPVVATQLYSALGNGEAFKKGRQASAYLGLTPKQHSSGGTTSIRGIGRTGQVSLKAALIRGAHSVINTVGDKPDGKSHWLRALVARVGKNKAAVALANKTVRTAWAVLHSGQSYCKELNERSALMES

SEQ ID NO: 293956 - protein, 370 aa, unidentified
MKQYSEAFVGFDTAKKKHAVAIADVGREGEIRYLGEIDSSSAAVERMIRKLAGRYEELHFCYEAGPTGYGLYRQVRGLGHPCTVVAPSLIPKKSGERIKTNRRDAVTLARLFRAGELTSVWVPDTVHEAVRDLVRAREAASQDLRRKRQQLLSFVLRHGRIFSGRQHWSRAHLRWLAQQKFDHSAQQIVFQDAVDAIDDAAARLRRLDEQVAAIVPSWSMAPVVAAYQAMRGVSFVVAVTFVAEIGDLRRFDNPRQLMAFLGLVPSERSTGERVRRAGLTLAGNKRARRVLIEGAWSYRYPARVSQTLQARLEGLPKAVREIAWKAQIRLCARYRRLNAAGKKLPVVIAAIAREMAAFLWAIARHVAPAA

SEQ ID NO: 293957 - protein, 354 aa, unidentified
MIIIGCDYHPGFQQIASVDNETGELKEQRLGHPESAEKFNRELAGQGRSIRVGMEASGHARWFERLLAELNIELRIGDAAKISAKRVSKRRTDRLDAQPILKLLLKDDFPQIWVPSGENRDLRQLLWHRHRMVQARTRIMNQLQAVALNEGVRCKKKLWREKGRKQLEAFRLAPWASRRREDLLKLLDGVNPTIAELTQALDQEVEKSAAAGRLMTHPGVGPLTALAFVLIIGTAERFKCGKQIAAYIGLVPLEDSSGERRRLGHITKQGSSMLRFLLVEAAQVAARSIPQWRNQYFHLAMRRGRKIAKVAMARKLAVRLFWMMRQGWDYEQLKKFGSNVGQPGHRDGVKSNTE

SEQ ID NO: 293958 - protein, 353 aa, unidentified
MRILGMDLGQSKSAWETLDLQTGEVTRGQVRMDDDQLRKLLARSGPDQLVIESGPLAARVHDLARVAGVSVLVADTTQDAWQWKNVKRKTDADDAGKLVRLAALGQINPVHIPAPPVRERRHLLEYRQALVAEQTRCKNRIRATLTLQGRKLPSGKTGWSAAAREKLAAETRPLAECGPEELWRGLLKTELEHLQQVEALVATVTAKLDALAQGDPGVARLQTIRGVGPRTAEVLVTVLDQPRRFATRRQVSAYVGLVPRRYQSGQMDRSGRITKRGSPLLRQVLNQAAWAAVRCNPELRAFYLRLGGGQKKRRKAAIVAVMRKLLVIAWALLRDGTVYQAQRLRPKNAKAAA

SEQ ID NO: 293959 - protein, 347 aa, unidentified
MQFYTQQRQFYCGIDLHATCMFVCVLDDRGNILLHKNFLCKDANLFLQAIEPYKQGLVVGCESTFNWYWLADLLEEKNIEFILGHALYMKSIYIAKVKSDSIDSEKIARLIRGGTFPQAHAYPKEYRASRDLLRRRAYLVRRRAEALTHIQQIHHQHNQGVTTNIRYKSNRQGLGESLPSEHAKLMVSIDLEMIDAYTIQIKRIEDELVRSVKLTHFQSYYRLTTIPGVGAMISLTMIHEIETIQRFAAVGKFLSYCRLVKGSHSSAGKKLGAPGGKIGNPYLRWAFGEAIQLLKRESKEVLEYARRLEKKHGKARATNILAVKLGRSVYYMLRDDRAFDLNKFLQH

SEQ ID NO: 293960 - protein, 394 aa, unidentified
MKLVGIDVGKNSHHFCVMDKETGEFNVAPSSFSNNKEGFDFLINSLKPYSKKSILIGMVDTGHYHVALLKFLLSNGYPVALINPKTTDLTRKMEGGITKNDKLDTITICDVLDTPERKKQYRITKVDRFDLYEQRQLTRHHHNLKEELNVYCNRLQKSIDLVFPEFNTLFSSKYSIVYMNLLKTFGSAEAIASTDIRTIRKCFEIKGRGNRISLTPEKLKECAKNSIGISSEVETIQIKHLVSQITLIKEQIAEIDKKIEEFSITNNSPILSIPGISHFSGTSILAELGDIGNYSKPSQIIKFAGVAPYHYESSQYNAQHTGITKKGSKYLRKTLYQIILTVINNNPVFKKYYLLKISQGKGHRCAQGHCIRKLLRIIYHLLETGQSFDPALLR

SEQ ID NO: 293961 - protein, 459 aa, unidentified
MIRKRKTMRSGHVGRPENIPILNPNAAGMDIGADEIYAAVPTDRDGPPVQCFGTFTGELYRLSEWLKHCRVDTVAMEATGVYWIPVYQILETSGFELCLVNARYFQNVPGRKTDVSDCQWLQRLHSAGLLRGSFRPAQEVCVLRSLTRHRDNLIRLASTHVLHMQKALDQMNVQLHHVLSDITGLSGLAILDAILAGERDPRVLARLRDGRVKASEDTMVEALTGDYRGEHLFTLKQSLTAYRQYQKFVRACDREIEQQLKQFDAKVDVKAVPLAPPKVRRKKLFSNEPKFDLRSHLYRVFGVDLTAVPGISVLTAHTILAEVGPDISKFRSASAFASWLGLCPHNDISGGKVLSVKTRRVNNRAALAFRMAANALLRSQSSLGDFFRRMRAKLGAPAAITATAHKLARIVFHMLATREAYDEAILRSNERGFRARAEARLRAQAKALGYSVVAMTMAP

SEQ ID NO: 293962 - protein, 358 aa, unidentified
MQRNEISFKGQKIFIGIDVHAKSWKVAIAPEVGFVKGHSQKPSAKELFDFLKKNYPDGEYKAVYESGFSGFSTYYALTEVGIDCIVIHAADVPTTQYEEVMKTDRIDAAKLARSLKAGQLKGNYVPEKQFIDDRSVVRIRRTIQKQLSGYKSRVKHLLHCHGVEMPERFSKIQTHWSRAFITWLMNDVKLMSDTRMSLDLLIRQVEVLRGTLLEATRQLRKMSQTERYKRRYDLLRTIPGIGPIVSMCILTEVCDVKRFHNENEFAAYLGLVPTSHSSGEKTVHGEKTFRGNKQLGPMVVEAAWVAIGWDAGLGAQYFQYKKRMQPQEAIVRIARKLSNIIFSVLKNEKEYVPYNTGN

SEQ ID NO: 293963 - protein, 391 aa, unidentified
MINIGIDVGKFKHCATVLDDSTGEVLIKPFFLTNDRKGFDLLYSKTKQFIRRKHSVGMEDTGHYMINLTNYLLDKKFTVKYINPRATCLRRKELGVSAKNDRKDALLIAEMLSEKRFWRSISPRTIENSKFRDITRLYHQLQEQQNQDMNRLQRALDIVFPEVNLLSWTRYSKAYMKFLSTYPSASSIAFEDIRNLRKALKTEGKGRQSKVTAEEIRELAKHSVGEDNSSIELEVKSIIAVIITREEQLRILEKKIEEFSHKLNSPIISIPGISHISGMTILAEIGDINHFQNTGNLISFAGMDPLVYQSGKYDAAHMPISKHGSRYMRKALYQAVFTVCKYSPTFHAYYTKKRNQGKSHRCAQGHCARKLLRVIYKLLSTNSLYNQNHIH

SEQ ID NO: 293964 - protein, 341 aa, unidentified
MKSTTIAVDVAKEVLEVAVCVQPGQVSEQRRLSRAAFMKFCADQPTATVLLEACGSAHYWSRRLHSLGHRVVLLPPHATRPYVFRNKTDRTDTRGLLEAFRNEDIRPVPVKSVSQQTLTALHRLRSTWLATRTARLNTVRGLLREFGCTIPVGAHHVLARTSLLLADADSGVPDALRPALAGACTEIREMEDRISVVELQLQALADQTPAVARLRSIPGVGLITATALVAFVGDVQRFHSGRHFASYLGLTPRERSSGLVRRLGSISKRGDVYLRMLLIHGARAVLWAAAKRRTHDRLRAWALRLQHLRGHNKAAVALANKLARIVWAVWKHDADFREIAA

SEQ ID NO: 293965 - protein, 454 aa, unidentified
MRKPQVIPDEDHEVVYERVAAVDVAKASGVVCLRTPDPARPGRFVNRIWDNVPATRARIAELGGELLRRQVQMVTLESTSGYWRVWYYVLESVGLAVQLVSASQARNLKGRPKTGKLDAMWLARLTQHGMLRPSFVPPAAIRRVRDFTRARTDLVRERTRVLQRLEKLLEDAMIKITSVARDGLKAKSVVAMVAALTAGERDPRTLADLAKGPLRGKRDALAGALDGMFDSRHGVIAQLLLDQVAFLDQRIKQMEDQAIAALAQVTESWGVDAGGETGPGRGTTPDSQVLAAAHRLAEIPGISVWLAIVIIAEIGLNMTLFPTPAHLVSWAGLCRSAAQSGTRHGKGKQKKGNSYARAAAGQAAIGAAGTATFPGERYARIARRRGGAIAQVAVARSIMIIAWHLLSDPAARYRDLGPDWHARRTNRDKKIRTHIRGLQALGVTVAITDDEHAA

SEQ ID NO: 293966 - protein, 346 aa, unidentified
MRFYNRQHTYYCGIDLHVKTMYVCILDGAGQVLVHRNVPSTPAAFLEEVAPYREGLVVAAECMFTWYWLADVCAAEGITFVLGHALAMKAIHGGKAKNDKIDSHKIAVLLRGGMLPQAYVYPAAMRSTRDLIRRRLHLVRKRGQLLAHIQNTRAQYNLPVFGRKLAYRTNREGVVEHFPDPSVQKSIAVDLALIDQYDALVIDLELTIVREAKRHNADAFHRLRSVPGIGKVLALTILYEIHDITRFDRVQEFASYARLVKCKKQSGGKTLGTGGAKMGNVHLKWAFSEAAVLFLRHTEGKKLIARIEKQHGKGKALSILAHKIGRAVFYMLSRETVFSMEKFLAA

SEQ ID NO: 293967 - protein, 428 aa, unidentified
MNCNTQNAKIASINEKTLIVGIDVGSEAHYARAFDWRNFEYSKKPLEFSNTEAGFQTFKAWVEDIAEKHGKTAVIPGMEPTGHYWFALGKFLQDNGMKPVHVNPHHVKKSKELDDNNPNKNDRKDPKTIAALVNEGRFSYPYIPTGIYAEVRSLSNLRFQTQEELTRIKNRIARWFAIYFPEYKDVYGDLKAASGRMVLKVAPLPDDIIKLGVEGVNRIWRDAKLRGVGMKRAKTLITAAEHSVGSKEAPEAARIELKNLLGDMDLYTSRLEGLLRSIEEKLGEIPYVDKLMEIKGIGLVTVSGFIAEVGDIGRFDNPKQLQKLAGYAIVANDSGKHNGESRISYRGRKRLRYVLYEAAISLIGKNAEFREIHEYYRTRKENPLKKMQSVVAVACKVIRVFYTILTKGVDYDAGKLLGDIRRPQVQAA

SEQ ID NO: 293968 - protein, 359 aa, unidentified
MAKARTLVGLDVHAAKVVAAMLDVVTGELRFQRLGGDSEPVVRLCGSLVGPVRASYEAGPTGYGLARALERAGVECLVAAPGKIPRGATERVKTDRRDAEHLVRLLLAGKLCPVRVPGPAEEALRDLVRAREDLRGDLMRARHRLSKLLLRHDVRFAGRAWSERHRAWLSKVELPEQAAQATFCDYLGAVEALLHRKAELERQVAAAVPDSPWAREVGRLRCLRGVDTLTAVGLCAEIGDFARFARAGQLMSYLGLVPSEHSSGESRRLGQITRSGSRHARRLLVEAAWHYRNQPRVGLELERRQEGQPPAAVAIAWSAQRRLHRVWSRMRRRSKRSTVITVAVARELAGFCWSITQIE

SEQ ID NO: 293969 - protein, 316 aa, unidentified
MAETTVRSFVGIDVSKKWLDVALIPSGETWRTENTIEQIGVLVERLKETGVARIVVEATGGFEVRLVAELYAAGLPVARVNPARVREFARSIGQLAKTDKLDSIVLARFAEAVQPPLTRLPSEAEQALSALLARRKQVLDMLTAEQNRLGTAPAGIRSSLQEHVQWLKDQCRKLDREIDQFIQDHPDFKKKDEILQSTPGVGKITASMLMANLPELGECDRKQIAALVGTAPFNRDSGFKKGRRSVQGGRSNIREVLYMAALSATRYNSAIKTFYQRLLAAGKKKKVALVACMRKLLTILNSMIAHNSFWKPSLST

SEQ ID NO: 293970 - protein, 455 aa, unidentified
MSKEKAKNQKIRTSVDMTIVHPFAAGIDVSVSEFVVAVPEGFDKETVRKFGTMTADLKDLSNWLKQCGITSVAMESTSVYWKPLFSHLLSEGFDLCLVNARIARNISGRKTDENDAMWIQKLHSCGLLPSSYLPESEQEALRTLVRFRRSLVQDGSRHINRIQKALELMNIKFHTIISDIMGQSGRAVLDAIVRGERNPEAFLPLLSPRIKADRQTIIKSLEGTWQSEHQFTLTLSYELWKHHQIEIARVDAEIERHLIRYEAKQNEGQVLESAEKKQPHSPKKKDKNHPKIDVRNYLKHIHGVDVLAIYGLSDIGGLELLSECGTDLSKWPTESHFVSWLNLCPKTKISGGKVLSSKLAKKKTNQASQALKQAANAIQRSDHWLGDYFRRMKSKGGNKYAIVATANKLARIYYKMVTQKIEFKPLDLKQYQSQYTQAKISYLERKLQLLKNQVD

SEQ ID NO: 293971 - protein, 403 aa, unidentified
MNAVGIDVSKGKSMVSVLRPFGEVVATPFEVRHTASELKKLADYLKSLDGETRIILEHTGRYYEPVAQLLHDSGLFVSAVNPKLIKDYGNNSLRKVKTDKADSRKIARYGLDNWVELRQHTPIDTIRYQLKIMNRQYGLYSKSKVSMKNNLISLLDQTFPCVNTLFSSPAREDGSQKWVDFAASFWHLDCIRELSLAAFTQRYQKWCKRHGYNFSSGKAAEIHESTKNQIALLPKDAMTKMLVHQAIEQLNAVSKAVELLRTEMNRLAQQLPEYPVVMAMGGVGKSLGPQLMAEIGDVTRFAHKGSLAAYAGVDPGANQSGTHEAKSTASSKSGSPELRKTLFMVMSSLLQTSLANDPVFQFLDKKRAEGKPYYVYMTAGANKFLRVYYGRVKEYLLSMGSAD

SEQ ID NO: 293972 - protein, 357 aa, unidentified
MGKSIRNLSTVTRVGLDLAKNAFQVHAVDATGAIVVARRLTRGRLVPFFAELAPCVVAMEACASAHHWGRALIELGHEVQLLPPAHVKPYVRRNKSDQVDAAAICEAMGRPGQRFVPVRSIDNQADLMRHRTRELLAGQRTAALNALRGHLAEIGLIAPQGAQHAYGLKRMAADGFNENGEIVVPDCVRGALRSLVGQIDALDEAIGAIDRELAASVKADETAKRLMTIPGVGPVTASAIVATIQDAGAFASGREFAAFLGLTPRQNSTGGKTRLGRITKMGDRYLRKLLVVGACATLRHRRGHNDALRLWASGMLERKTVKYKFNLTAVALANKDRRIVIVLMTRGGHYDDRPVAA

SEQ ID NO: 293973 - protein, 350 aa, unidentified
MKKDTTIGMDLGDKKHEICVLDATGKVIVRTQIVNTKQAVVKFFKPYKAALVAIETGTHSPWIARELEMLDCEVLVGNARKLRAIWMAKDKSDVHDAEMLARIARMDRALLYPVHHRGEAAQQDLAVLKARDMLVSTRTDLVNHVRSVVKASGHRVTKCSADAFAKRARQEVPPGLMPALLSLIEQIESMTVHIRAYDKQITDLVKHRHGDAKRLSQVPGVGPVTSLGYVLSLEEPGRFKKSRSVGPYLGLTARRDQSGQTDKQLRITKAGDEFVRRLLVGCAHYILGAFGPECDLRRFGLKLAARGGKNAKRRAVVAVARKLSVLLHRLWVTGAEYDPDYREHTLKKVA

SEQ ID NO: 293974 - protein, 343 aa, unidentified
MEEYIGLDVSMKETAVSIRRAGERIWRGKCASDPSVIAALIRKRAPAVKRVVFETGPLSVWFYHSLRTEGLPAICVDARHDKAALDMAANKTDANDADGLAQLAEVGFFREVRVKGFNSMLTRTLVAARTRLVRITTELSNQIRGVMKTFGLLVPAGKGSTFENVRNLLVDQDGLASIVLPMLEAWRGIRIRAAELGRQLVRDARESQACRILMSIPGIGAITATSFATAIEEPDNFRKSRSVGAWIGLTTRRYQPGEVDYDGHISRRGDRHLRGLLYEAAAVILTRSSTDSALRTWGRHLRERIGFKRAAVAVARKLAVISIRCLRPASCSIRMPELPHKLG

SEQ ID NO: 293975 - protein, 322 aa, unidentified
MEMLSFGGIDVSKDRLDITVLPDEQCSSVSNDAAGWAELIEQLRGSLITAIGVEASGGYERGVVRALLAAGMSVRQINPFKLRQFAKASGILAKNDRLDARMIASFVAIMPTRPAQRQTPMIEQLAAMLTVRRQLSDHKVATENASRLLEDAMLQRLSRRRVARLTADIDLLDQRLVEIVTADPALAHRFRLLTSMPGVGAVLACTLIALLPELGQMSRKQVAALVGLAPYDFDSGKLKGRRCIWGGRARVRHVLYMAALSASNWNPALKAFHDRLEATGKKPKVVIVAVMRKMITTLNAMLRDGTTWVDRYSGRRSASTAR

SEQ ID NO: 293976 - protein, 321 aa, unidentified
MSDSVTVGIDVSKLTLDVHVSPAQLHQTVSNNESGFAELKTLLSMQQVSLVLLESTGGYEDAVVCFLQSLGYDVSVINPRQARDFARSMGRLAKTDRIDAELLAQLASVIHARPDRERFVKKITDDRRRKLACMVARRRQVVNMISTEQQRKSAASNYSTDSINKVLSFLRSELKSIDADISLHVRSHFADISGLLASFKGIGPATIGVLLGEVPELGRLNRRQISALIGLAPFNRDSGFMRGRRTVWGGRAMVRNALYMPTLSAVRFNPAIRVFYMRLISQGKPRKLAQVAAMRKLLCIINAMLSSGTMFNPALHPGPGA

SEQ ID NO: 293977 - protein, 309 aa, unidentified
MGSYIGIDVSKDRLDVHVLPQDEAFVVERNGKGLAELVERLRPFAPSLVAIEATGGFETTAAAAVAGAGLPLAVVNPAQIRHYARALGKRAKTDPIDAAVIARFAADVKPESRALPDELTAMLADLVARRRQIVEMIGAERQREKRATLKRVKKSIARLVAALEKELAELDREIDDSVRGSPVWREKEDLLASVPGVGPQTARTLIAELPELGALDRKQIASLAGLAPYTRQSGRWRGKSMIGGGRKAVRSALFIAAMVASRHNPVLKAFRDDLIARGKPKLVALVAVARKLLTILNAILRDNRPWQHA

SEQ ID NO: 293978 - protein, 367 aa, unidentified
MSRMKRLTVQQLDVSKDYLVIGLDLAKTDTAVIAITTDGELYAIDRLKYPVLLNQAKQLGPTIFAMEPCNGMTYLVHELEELGHECRVITGEAVKDYVKSHFAGQKNDLNDAQAIAFLAQDEMLRFIRAKAKSEMTMQTLQVIRQQLIKQRTCSVVCIKGICQNYGLVISKSIMSEAKIRPIIEESQRLPEEIKEPLKTLLRNAARFTIDIKQIDKAIEQGLKGNETAERLLEVPGLGPQCVSRLLTTIGDINRFEGPKNLAAYYGLVPRSHTTGHNEQMGKITKHGDRLMRTFLVQGAHAVLVLHTKGRLPKSALKKWIDKKLSAGMPCSKLGIALAAKLLRIAFAVLKHKEKFDIKRASVARCNL

SEQ ID NO: 293979 - protein, 373 aa, unidentified
MAITHVALDDSKRVIVAGILRAEATQPELREIPNDPRQVRRLFERLLHDGPVRACYEAGVSGYDLYRHLTGLGVECAVIAPALTPRKPGERVKTDRRDAAKLVRLFRAGELTEIHVPTEAEESVRDLTRCRDDIRADIVRWRHRVLKFLARHGRVYQTGKNWSQAHWTWIRAQRFEDIALERTLEASLDALEHAMRRRTDLDRVIEALAGDAPYRDAVNALRCFRGINTLSAMILVAEIVDFQRFRRPRALMAYLGLVPSEYSSGERHRRGALTKAGNSHARRVLVEAAWHYRHRPGLGNRLARHTADQPPTVVAEAWRAQQRLHRRYRHLVGHGKRPTVAVAAVARELAGFVWAAMTQARWHARRPEAPITV

SEQ ID NO: 293980 - protein, 402 aa, unidentified
MNAVGIDVSKGKSMIAVMRPFGEIVFSPFEVNHTVDELSKLSKMLRKLNGETKIVMECTGSYHLPIAYALDEAELFVSTVNPIITHNYDNNSIRKSRNDSADAIKIANYTLTNWLKLQQFIPEEDVRHMLKVYSRQYTKYKKILTMLKNNLISLLDSTFPGVNEIFTSQPRKSDGHEKWVDFVAHFWHCKCISSVSQEVFVARYRKWCKRAGYNFSQAKAEDVYIDALGHCYIIPMNETAKLLITQATSQINTISETINILASEMKALAASLPEYPVVMEFRGVGDILGPQLIAEIGDIYRYFQKSSLVRYAGLEPVENQSGKFRGDESISKQGSPHLRRTLFLVMDCLLKHAPADDPIFQFLDRKRAEGKHYRSYMCAGAAKFLRVYYARVREYLEKHYTD

SEQ ID NO: 293981 - protein, 412 aa, unidentified
MELLHRRCCGLDVHKETVVACLRLVSDGKVTTEVRTFQTTTADLLRLSEWLAANECTHVAMEATGVYWKPVWRILDDGEFALVLANAAHVKNVPGRKTDVNDAMWLAELLAHGLIRASFVPDAQTQEMRNLLRTRKQLVREQSSHVLRVQKTLEDANIKLDSVLTDLMGKSGRAIIEALIAGETNPVKLAGLADRRVKASFEEFREALRGRVTRHHRFLLRLHLNQIDALDAAMATLDAQVEANLGPFRTAVELIGSIPGIKNLGAHVIVSEIGIDMSRFPSAAHLISWACICPRNDESAGKRRSNRVRKGGTWLKTTLVQCAWAAVKKKDSYLQAQFYRIKARRGPKKAIMAVVASILTAIYHMLKDGTMYKDLGRNHFDRRSSDQQKNRLVKRLVDLGYAVEIKPLATTA

SEQ ID NO: 293982 - protein, 312 aa, unidentified
MQDAKPESNVWVGIDIAKRHFDVAVWPGGQTCRLTYDEEGLAQLLEWLKQWDHCFIVLEATGGLERRVAGELIEAGHQVAVVNPRQVRDFARGQGQLAKTDRIDAFVLARFAQQVQPRTREKTSEKQVELAALVARRRQLKTMTVSETNRRETAQASRAGRSIDNVLRLLRKETTEIDEAIAKLIASDDTWRDQTQRLKSVPGVGPAELGRLNRREISALVGVAPYNHDSGKLRGKRSIWGGRAQVRSALYMATLSARRCNPVIRAFATRLKQAGKPFKVILTACMRKLLISLNAIAKCQQPWSTEKITSTT

SEQ ID NO: 293983 - protein, 333 aa, unidentified
MLPPNCGTATPYILRNTVGLDISKLTFDASAIVGNAEYSAKFDNDSKGLNQFSDRLKSLGCQNLHICMEATGNYYEEVADYFAQYYSVYVVNPLKISKYAESRFKRTKTGKQDAKLIAQYCRSAQESELVKRQKPTDEQYRLSRMTAAYAQIKSECAAMKNRHHAAKDEEAAKAYAQIIKAMNEQLEVLKEKIKEQTEKPNCKEGVKRLETIPAIGRMTAAVLFHHLTSSKFETSNKFAAFAGLSPQQKESGTSVRGKGKLTKFGNRKLRAVLFMPAMVAYRIRAFPDFIKRLEEKKKPKKVIIAALMRKLAVIAYHVHKKGGDYDPSRYKSA

SEQ ID NO: 293984 - protein, 349 aa, unidentified
MGKFLRQSVGIDVGKEELVSRYARLDESFHQEVASSLTVRNDRQGFGKLLTWANKLKTTDIEIRFVLEATGVYYEALACYLVDQGQRVSVILPNRAKAFSKTLVNKTINDMTASESLAVMGLEKKLDDWQKPGEEINHLKQLNREREQLIQERSTIKNQLHAEQHSAWPVEGSLKRMKDRILYVNKQIKQVEKEMHQILESNTALKERVEKICTIKGVGYITVLGVIGETNGFNLIRNNRQLTSYAGYDIVEKTSGTSVRGKPHISHRGNKAIRKAMHFPALTAIKHDPNMKQLYLRLVTKHGIKMKALVAVQRKMLVIIYTLWRKNEVYDPDYYNQGKYLGQPMKELP

SEQ ID NO: 293985 - protein, 340 aa, unidentified
MKHIGIDVHSTTTDACVRNDKGTIVLRRRIQTKASELEKFVLGITGKKRIVLEEDQMADWVTRVLQPLADEVIRCQPQYNRLIIGSEDKCDKMDAESLSELLYLNRIKPVHHPAMHFRTLREAVRAYWIASRDLTRAKNRLKGWFLFNGLHEPGRRIYSSRKRTKYLKPLQEQGRNIELAELLYERMDVCRQLKAKHIRMLRKVSRPVKDLVELVQTIPAIGPISSYTLVSLLEDGRRIPNKRKLWRYAGLSLRRHESRDIGFQGASKTGNRLLKHVVMSAAITIVSRGERNGLLNLWERDIRKNVDPKRARRNLARKIVVIAQHLLRSKQEYIDELIRA

SEQ ID NO: 293986 - protein, 391 aa, unidentified
MIYIGIDVAKDKHDCFITNSEGEVLFNAFTIPNNADGFHDLFQKISSLTNDFSNVKVGLEATGHYNYNLLGFLIDKGLPTFVINPLHTNLFRKSLSLRQTKTDKVDAHTIALMMMSGVNLQSYSDTSYHNEELKSLTRYRFDKVQERAKLKTSISRLVNILFPELEKLVPSLHMVSIYALLAEFPSSAQIASCHLTRLTNLPANASKGHYNKEKAIEIRNAAKHSIGSNMPAKSLELKHTIRLIQELTSEIDEIECSIKSIMDEIRSPILSIPGINYRMGAMIIAEIGDFNRFSSPDKILAYAGLSPSTYQSGQLDGCYSHMEKRGSRYLRYALFNATKFVCIWDNQFSAYLAKKRSEGKHYNVAISHAAKKLVRVIYQLEKSGQLYHRAA

SEQ ID NO: 293987 - protein, 398 aa, unidentified
MEAAHGVVVGFDVGRYSHHMTAIDAHTGEVTASKPVGQDESEIRSALEPYAGTDAIAVVDQPGDLSSLLFAVAREMGLDVGFITPKAMAKGIDLYGGEAKTDRRDSFVIADLALRIPSLVHGVSARRGDAEELAALMSYDRELTDDARRAAARIHGLLLATCPALNGVFAGQRVKRRLPLALLARYGGANGLASAGKGRVRRWVGAQRGFGHRGLLFVEEVFSAIASQSVEIVSSAFYDELIKIEAASLRSALDARERVGRRVDELLASMPDARVLLSMPGLGRVTAATFIAEVGDVSRFSSAAKLAAYAGLAPRVRQSGRSLNSVTKPRAGNKRLKRAWVLSAARSIDFCEESRAYYDRKRAEGRCHYSAVIALARRRINVAYAMLRDGQRFESRIG

SEQ ID NO: 293988 - protein, 355 aa, unidentified
MKQGRQLDFSGQNIFVGMDVHKNSWKVCIRTEQMELKTFSQQPSVKTLSNHLKENYPSATYKVVYEAGFCGFGYQREFTAAGIDCIIVHPADVPTSDKDKNRKSDTVDCRKLSKTLSNGDLTGIFIPGVEQQDDRGVIRVYQQMIKDQTRFKNRIKGWLAFQGIIIPDDDVYKHWSNNFTGWLKALSLTPSARISLDILIQGYLQVRAMVLTATKQVRVLSRQPRYLKDIKLIRSVPGIGEITALLIITEIGDITRFKTLDKLCDYTGFVPKIHGSGDKETVLGLTHRGHHPLREKFIEASWVAVRLDPALTMAFNDYCKRMKKNRAIIKIAKKLLNRVRYVLINKMEYVTAVVQ

SEQ ID NO: 293989 - protein, 351 aa, unidentified
MNEYIAFDSHKRYTWVDRREVATGRVRQYRVEHAPGAIRQALAGCAPGTAVAIEATANWYWITDEIEQAGCVPRLVHPRKAKLMMGQINKTDRLDTQGMNLLQRNGTLPTVWIPPGPLRELRELTRTRVVLVAQRTRWKNRITATLAKWGLPASEYSDAYGKAAREELETRLERLPEQTRWATRQMLGQLDLLNEQIRQFEKRLEELVKVTPEMQRLETLPGVGVILAATIWLEIGEVSRFLSAERLASYAGTVPRVHASGGRVCYGRTRPDVNRYLKWAFAEAANSVAVHHRRSPERHVSQLYGRLRARKGHAKAVGAVARHLAEAAFHVLSRQEEYEDPAAAQGRTREV

SEQ ID NO: 293990 - protein, 344 aa, unidentified
MKVTTVGIDLAKNVFQVHGVNGHGKPVLKKQLRRDQLVAFFVNLEPCLIGMEACGGAHHWARKLQSLGHEVRLMAPQFVKPYVKSNKNDAADAEAICEAVARPNMRFVPVKNIEQQSVLALHRVRQGLVKARTAQGNQIRGLLAEFGLVIPVGLANIAKRVPELIEDASNELTGSFRMLIDRLMERLKEVDKQVKELELLIRSWHRANDASRKLEKVPGIGPITASALVATIGDAKNFDNGRQVAAWLGLVPRQHSSGGKANLQGISKRGDTYLRTLLVQGARSVILSAGKKLDAASWLNKLTERRNTNVAAIALANKNARTVWALLAHDRDFRPDYSPSAVPA

SEQ ID NO: 293991 - protein, 413 aa, unidentified
MDAISVGIDVSKGKSVVMAMRFPRAVVFQPREIDHSAAGLKQLVALVKKLDGESRVTMESTGHYHIPVASALHEAGIFVSVVTPMLIRRFADVSLRQAKTDRQDSITIARYGLKYWDELRAFSPLDITRQRLRDCSRQYHLYVDVKIRLKNNLVALLDQSFPGSNSFFIGPPKADGHEKWVDFAEKFWHCECVCNMSEKAFVEEYSEWCKHHDYCFNRDKALLVYEKSQGLAPCLPKNAYTEFRIQDIAKRISNISHGVEIYRAEILRLAQRLPEYPVVKKMFGMGKTFGPLLIAEIGDVRRFTHKKALVAFAGIDPGSEQSGKYINKNSVAITRSGNEKLRSVICRVAICYVRSKKKDEPVYQFYLKKRSEGKDYYLSIVAAANKLLRIYYAKVTAYLDELDDPIEKIPSPC

SEQ ID NO: 293992 - protein, 375 aa, unidentified
MSDHSEAFVGLDTSKLRNAVAIAEGVRGGEVRFLGEFENSAAATAKLVKKLAAKYQRLTFCYEAGPTGYGLYRQIRNLGAECIVVAPSLIPKKPGDRVKTNRRDALNLAKLLRAGELTAVWVPDRGHEAMRDLTRARETAMMDLRSKRQQVSAFLLRQGLHYSERKKTWTKTHINWLASQKLEYAEQRLVFEEMMLAMRQAQDRLERLEQAIRVAVPDWSLAEVVTALMAMRGIDLISAATFLAEIGDLSRFQHPSELMGYLGLVPSENSTGDKIKRGPISKAGNRRARRMLVECAWSYQHPPRVGQEKQAKVAAAPRAVREIAWKAQCRLHGRYRALVRRGKLKTVAVTAVARELAGFIWAVSRAITAARVVAK

SEQ ID NO: 293993 - protein, 348 aa, unidentified
MKNNTPKRAVKVLGIDLAKKSFQLHGVDKHGHVVLTKKLTRAKLKAFVAQMPACLIGIEACGGANYWKRVFESYGHTVKMMAPQFVKPYVKSNKNDAIDAEAICEAVQRPSMRFVPSKNIEQQDIQSLHRIRSQVVARRTAQANQIRGLLMEYGIIIPKGIAYVRKEIPGILEDADNELTGLFRSLLRELYDEMVHLDERLEKLEDELKIICRDNVHCQRLLTIPGVGLLSATALVAAIGDISTFKSGRELAAWLGLVPRQHSTGGKPTLLGISKRGDSYLRTLLIHGGRAVVRVSGKYLDKRSQWISDLEKRRGNNITAVAVANKNARIAWALLTNQTSYQASVIKG

SEQ ID NO: 293994 - protein, 389 aa, unidentified
MASVPIGSGLVEEASAASRRDQTGRREIENPLVNQAVGERDPRRACGNSPNSRLSRQRTTRTSSSHRQDRENAMTDTLYVGIDVAKDSFDVASDPAGLQLSLPNDPTGRQTLLDTLQKHAVALIVLEATGGYEREIVAALLQAGFKVVVANPRQVRDFARGIGKLAKTDRIDAQVLARFAHVVQPKPRPQPSEQIAVLAEFVTRRRQLSNLLTQERNRLPKARHITVRKSLQKNIQALKQQILKLDKLIRQGIESDDGLKHKDQVVQSAKGIGPGTSAMLLSHLPELGTLNRQEIAALVGVAPWDVQSGKWAGKSRIWGGREEVRTMLYMAALAAIRSNPAIRAFYQRLVSQGKLFKVAITACMRKLLVILNTLVRNDCLWSPQPTKNA

SEQ ID NO: 293995 - protein, 344 aa, unidentified
MQIASIGIDLGKTTFHLVALGERNKLLVRKKFSRTQLLAYTAKLASTLIGLEACAGSHFMGAKLREQGHEVRLIPAQFVKPYRKSNKNDFKDAEAIAEAVSKQNMRFAQIKTQEQLDIQAMHRVRDRLVGRRTALINEIRGFLLDRGITFAADPKQLRKNLPGVIEDAEQNLTPRLRWLLDRMWSEWKQVELDIKGMTEELERISEENELCRRLLRIPGFGPLVSTATVAAIGNGAAFRCGRDFAAWVGIVPRQHSTGGKQKLLGISKRGNRYLRRMLIHGARAVLFRVKYDTGGFGEWFRRLAQRAPRNKVVVAIANKLARMAWAVLSSGKEYQHRPLQATAA

SEQ ID NO: 293996 - protein, 392 aa, unidentified
MYIVGIDIGKNHHEASIVSPEGKQIGRSLRFATTHKGADSLMSFIFKNIGNSPCVFGMEATGHYWYPIYSFLKAKGYTIYVTNPIQSDSLRKMYIRQTKNDSIDSFLIAEVIRFGQFGTTSMADENILAMRQLCRYRDSVISSRTEIKLRIGTIMEQIFPEYEKQFSSLWVSTSMGILEKYLTPENIENTPIDELFEIIKDKSHNRLTKAKAISIKEAAADTFGIKIAQDAFSFQLKQLIDRMNFHDKQIEALDIEIMKYYEQFDCYLHTIPGIGIIGAATILAEIGDISRFKNSSALVAFAGIDPTVRQSGEFNSTHNHMSKRGSPYLRHAIFLAATTCSFHNSPLNAYYKKKRDQGKHHLTATGAVARKLTTVIYAVLRDSKPYEPKKFC

SEQ ID NO: 293997 - protein, 334 aa, unidentified
MEKITTAGIDLAKRVFALHGVDGAGRVGLRKTVRREQLMQTVAALPPCLIGMEACSGAHEWARRFQELGHTVRLMAPVFVAPYRKSGKNDGNDAEAICEAVSRPNMRFVPVKSAEQQAILALHRVRQGWIGERTATINRIRALLTEFGVVLPNRAQHVRRDAMAAAEGLPALARRALEDLRSHLGALDERIGAYDRELEAQARASDAAQRLMQIRGIGPITAVAIVATVGNARDFESGRQFAAWLGLTPRQHSSGGKQRLGHISRRGDAYLRCLLVQGARSVLYTAVRHHDRLSRWVCTLRARRGDHKTLVAIAAKNARIAWALLAKNQTLQTV

SEQ ID NO: 293998 - protein, 354 aa, unidentified
MTSTKYIGMDVHKESISIAVLNFAGKVVMECVIETKASTTLQFIHGLSGDVRVTFEEGTWAAWLHDLLKPYVTELVVCNPRKNALLKEGSKSDQIDARKLAELLYMNKIKSVYHGEHGLRMLKELSRSYLTISKDLGRVMNRLKALYRSWAIPCVGTQVYAPRYRSEWLSKIREAGVRRRAELYYQQLDALRLLRQQARKELLAEARKHSATKLLRQISGIGPLRAAHLVALMQTPHRVRSKRQLWNYSGLGLETHDSAQYRVVEGQLQRSKKPVTLRGLNTNHNHDLKAIFKGAAMRASTCDGPFRDFYEALLAKGRRPTMARLTLARKIAAITLIVWKKGVSFDANYLKQAA

SEQ ID NO: 293999 - protein, 359 aa, unidentified
MLTQINKIDFSGQHFYVGLDVHLKSWKVSIMAEKLTLKTFSQDPNPELLHHYLVKNFPNGIYHSAYEAGFCGYWIHNRLIALGISNIVVNPADIPTTDKEKVNKTDKRDSKKIARSLRNGDLKGIHVSSLKSLEDRCLLRIRKTLVKDLTRYKNRIKSFLYFHGIEMPEAFSKSATHWSKRFMNWLGSIELTEISAKKSLNLLIVESQHLRLTLLNALRGIQELSRSEAYANNVRLLQTIPGIGTLTAMIILTEMDTINRFASFDQLCSFIGLIPSTNSSGEKENIGEITHRGNNFLRSAIVESAWIAARWDLSLNKCFHDYCKRMESNKAIIRIARKLLNRIRFVLKNNQPYVCTVIK

SEQ ID NO: 294000 - protein, 413 aa, unidentified
MKSARDTLSEEPANGLTCGIDWARDDHAVSVVDAGGRQILRLTAEHSAAGLRQLRTTLARHGVEEVAIERPDGPVVDALLDAGLTVVVISPNQLKNLRGRYGSAGNKDDRFDAFVLADTLRTDRARLRPLTPDSPATAALRATCRARKDLVAHRVAVANQMREHLKRVFPGAVGLFTDIDSPISLKFLRRFDSQDRADWLSTKRLAAWLASVGYCGRVDPAVLHARLAAAPRGATGDAGAAAAHITRALLATLDTLVEQIKALTEQITEQLDTHTDAHIFTSLPRSGTVRAARLLAEIGDCRARFPTPESLACLAGVAPSTRQSGKMRAVGFRWACDKQLRDAVCDFAGDSRHANVWAADLYSRAIARGHDHPHAVRILARAWLYIIWRCWHDGVAYDPTKHRALQAHQQHAA

SEQ ID NO: 294001 - protein, 420 aa, unidentified
MNHLNHNSFSAYVGIDWADSKHDICIQAAGGQQREFDCILHKVDKIEQWAQSLHKRFGGVIAVALELSKGPIINALQKYDFFVIFPINPSTLAKYREAFKPSRAKDDPTDAELALDLLLRHPDRFNPLKPQSVEIRTLISLVEQRRGLVNDRIRITNRLRSALKQYYPQMLEWFDRLDTVLVCDFIVRWPTLKKVKRARKSTLEKFFHEHHMRYSNVLDARLKSIKAATPLTLDAAVVTPYSLQALVLTDQLRVTLQAIRRYDDKIAEIAPKHPDYGLFSALPGAGPSLAPRLLVAFGEQRERFDSAAAIQKYAGIAPVTERSGKKHWVHWRWQCPTFLRQTFVEWAAQTINKSFWAGAYYRQQRDKGRTYQAAVRALAFKWIRILYRCWQTRTPYNESVYLNALKRRGSPLLNPSTNLK

SEQ ID NO: 294002 - protein, 548 aa, unidentified
MGGGDPFFHFTQGGGPPRQGGTSLALGYYLPAPDTLSKVIHHRGKGPGQDPSPKVVNNFAAGYSGGGEQSATSETRPFAPYPTRVSRRLPTPTTAPGPSAKRTPPHEGSGIRSRPPQVPAPLRAARIMNANWSEQPFFAALDWAKEHHDVIVVDRVGTVVADFQFEHTAQGWDEFSQKMQAFGQCPVTIETSAGMAVDQLLQRGYTLYPINPLAAKDYRKRKAPSGTKTDRHDAWSLADALRTDGHAWRPLHPQDEATMTLRLLCRDEIALIENRTALVNQLQAALSDYYPLALESFKDWAKPFTWAFLRAFPTPQALAKAGQRNRQKFLHTHKLWRPDTSAERLALWERGQQLNASPAVLSAKSLLALSLATVLETLQRQIQEYRSRIEAAFAKHPDHDVFGSLPGAKEVLGPRLLSLIGSVREVFPDADSLMCQAGVSPVSYQSGKVCKARIRFVCDHFLRHTVHLWVDESRKTCDWAQTYYRAKRDQGHEHASALRCLGKRWLKVLWRMWRNHTRYDEAEHLKALQQHGSFVWQSLKYQLAEAAA

SEQ ID NO: 294003 - protein, 412 aa, unidentified
MEVMVERPAALDVHKAQVTACVRVPGKGGAREQEVVQFQTTVRGLLTLRDWLKAQRVTQVAMEATGVFWKPVWAVLEDDFELLLVNARHVKQVPGRKTDVSDAAWLCQLLEAGLLRASFVPPKPIRALRQLTRYRKAQIKERQREANRLHKALEDTGIKLDCVATDILGVSGRAMLDALVRGTTDPEVLADLARGRLRKKLPALREALEGRFDSLHALLIGSILAHLDFLDEQIERLSDAIEEQLRPFAPAVELLRSVDGIETRTAQNILAEIGIDMSVFPSAAQLASWAGQCPGNDQSAGKRRSGRTRKGSKWLDDALKDAAMAAIRTNDSYLQAQYQRLRPRIGHGRALGAVKHSIICACWHMLTTGELYRDLGGDYFRKRDPERQTKRLVAQLERLGHKVTLETLPEAA

SEQ ID NO: 294004 - protein, 339 aa, unidentified
MELCCGMDLHSSNTVIGIIDEKRKHLIDRKLPNDPELIRNFLKPYKPELKGIVVESTYNWYWLADLLQEDGYRVHLSHPVANEQYNGLKHSNDKHEAFWLAELLSLGILKEGYVYPRQVRSLRDVLRKRAHLVRLRSGLLVSLQHMISRNCAVKVKTGDMKRLRDDVISPLLSRDEALLLAGQTSKGVIDCLTRQIDKIERWALKRLHREGIFMGLVTLPGIGDILGMTILLETGPISRFREVGNYASYCRKVSSQWISNDKVKGRGNIRNGNKYLAWAFSEAAEHARRTNEACRRFYDRKLRQTNTKVAHNALAHKLARAAYYIIKDHVSYQEEKMFA

SEQ ID NO: 294005 - protein, 380 aa, unidentified
MPDVSSIAPAEVETWIVFDVHKNSLVAGVLPAAGGSPEVTRLENTERAVRRFLRRLGDPQGLAAAYEAGPCGYDLLRLLSRIGVACDVIAPSLVPVRAGDRVKTDRRDAKRLVRLYRAGELSFVEPPSPEHEGLRDLVRARDDLRRARTAARHQVAKALLRHGHAYREGKHSWTKRHEAWLGRQRLADPLAQRALSHMRSHLAAIDAQLAAIDHELCQVAQSEPWCDPVRFMCSFRGIGLITALGLIAEIGDFRRFSHPRELMSYLGLTPSEYSSGESQHRGHITKTGNRHARRLLVEAAWHYQHPPRRSRLALSLQKEVPPEVSARAWQAQVRLHHRHRTLTDHGKRSTVANVAVARELAGFVWAAMTHQPLREDALAA

SEQ ID NO: 294006 - protein, 425 aa, unidentified
MGEPISELPAAAVAAYIGIDWADQKHDVVLRSAFEPAKIEHSQIAHEPDALMEWLGELQQRFAGKGKVLVALEQSRGGLIYHLMGYEFLELYPINPAQLASYRETFSPGGAKDDRPDAELLCELLYCHRDRLKAWKADSELTRKLAFLNEGRRKAVDQRTQLANELKSQLKVYFPLALQLLDNNTTTALAADLLLQWPTLASLQKQSAHKLRKFFYGHNCRNEQKLLERLELIKTARPLTADAAVIEPAALRVQLLAQQLKSLLPYIARYEREIAELFEAHPDSFLFRDLPGAGPALGPRLLTAFGTDRQRFERPGELCSLSGIAPVRRASGKKASVHFRRACPKFLRQSFHEFAECSIRYCSWAQGCYQAQRDRGKGHHAAVRAVAFKWIRILFACWKQRLPYDPQGYLQTLQTRGSQYAHIAA

SEQ ID NO: 294007 - protein, 374 aa, unidentified
MPRYFGLDLHKRYVHGCEWQVDVQKGRHFRFPNTDAGWATFVEQLRADDEIALEVTGNAFNVHDLLSAYAGKVLLANPLELKRLGAGRHTDRVEAERLAKMLALGMVPAVWVPPREVRDVRCLLQYRDRLVRNRRRYLTQAKSVFQRHGLPIPRKVDPRQWLDREALTPLPQAERVILLSALRQLEAVDIEIQAIEAEIARQVADQPAVQLLTITGVGLITAVTIWAYLGDPSRFRTAKQVTRYAGLDASVHQSGEQDHRGRISRNGCKLLRTTLVEAALAVARHDQGPLGAFFHRKQRQIGHQKAVVALARKLLIVAWRMLLTGQPYRAAKPLLVQRKQRRLLNVAQAAVDWDAVTKALWPEDIKTHRRRKVA

SEQ ID NO: 294008 - protein, 345 aa, unidentified
MKPQQQYVGLDVSLEQTSVCVVDDAGATIWRGKCSSTPESIHAVVAKHASEAVRIGLETGQLSTWLFHELRARQLPVICIDARHAKAALSLQINKTDANDAHGITQIVRVGWYREIGVKSMDTHAIRAMLVARAQLVTQKVKLMNCIRGLLKTFGIVLGGGKGRRFEAMVREQIAENPMLISILEPMLIVLLTTREQLAVFDRLVRQRARADGDVRRLMTAPGVGAVIALAYTTTVEDPARFKRSSSVAAYLGLTPRRFQSGEMDRTGRISRCGDAMLRTYLYEAANVMLRRSTRPSQLSIWGRALSERIGARKSLVAVARKLAVVLHTMWRHRMEFRFEQAAAR

SEQ ID NO: 294009 - protein, 318 aa, unidentified
MTFTPIGIDIAKAKFDAAALRNGKYKTKVFQNTPEGFKAFLAWLQAFPAPHVCLEATGRYGEGLALFLVDHGLAVSVVNPAQIHAFGKAELSRTKTDKTDAKLIARFCHSQRPLLWQPPPPAVRPLQALVRRLESLLEMRQMEKNRLDGADPTVRPSIEAVLATLDAEIAATQKRIREHIDHDPDLRQRRDLIDTIPGLSDATIPVLLAALGDVHRFENARSVAAFAGLSPKEHQSGKWKGHTRLSKTGDALLRKALYMPAIVARRHNPLIRAFCERLKAQGKNGKLIVGAAMRKLLVLAYGVLKSGQPFNPNHGLAS

SEQ ID NO: 294010 - protein, 316 aa, unidentified
METSQIFVGIDVSSQRLDVDTAPLSQPVVESNTEDGIASLAVHLQALNPKIVLLEATGGYEIPAAYALYEAGLPVVIINPKTVRHFAKALGRLAKTDKLDAQILALYAQTVQPPVRPLKEQEQLELAHLMSRRRQLQGMIGMEENRRRTCTPRVRGNIDQHLAYLRQLLKDLDRDIQDSIRRTPLWHEKADILQSFLGVGPKVSACLVADMPELGTLPKNKASALAGRAPMNRDSGHYRGQRKIQGGRPAVRQALYMAALVASRRNPVIREFYQRLRQAGKPAKVALTACMRKILVILNAMLKNRTYWNPQLPLAA

SEQ ID NO: 294011 - protein, 371 aa, unidentified
MTKEQLTIHVGIDVSKDKLAVAIAGGGVRDEVLSLGTFENTPASVDRLLKKLSGRGLPVSVCYEAGPTGYGLYRQVRAFGIECCVVAPSLIPVRAGDRVKTDRLDAIRLARLFRAGELVPIWVPDATHEAMRDLVRARESAAEDQRHKRQLVSAFMLRHGRIYHRTKPWTMRYRRWLQSQSFAHPAHQLALQEMLQAERNATERHDRLTGHIEALVPEWDLAPAVTALQALRGVALISAVTFMAEIGDVRRFETPVKLMAYLGLVPSEYSTGKTTKRGGITRAGNSRVRHKLIEGAWTYRLPARPGARKLYILQEQSAEIQDIAWKAQSRLTARYRKLSQRGKKSTVVTTAIAREMAAFMWDIARRTMPAG

SEQ ID NO: 294012 - protein, 420 aa, unidentified
MEDIIEEPAELVERVAALDIGKASLVCCVRVPHESKPGARRQEVRTCDTVTPALLELRDWLICQGVTRVVMEATSAYWKPPFYLLEDDIECWVVNARDVKNVPGRPKTDKIDSVWLCKLAERGMLRPSFIPARPQRQLRDLTRYRRTLTQERTREKQRAEKLLEDAQVKLSSVISDIFGVSGRDMLAALIAGQRDPHALADLARKSMRAKISVLRQALTGHFTDHHAFLLGMMLDRVDALTGQIDTLTTRIEDAIAPLAGQVAQLDEIPGIGVTTAQEIIAEIGTDMSRFPTPGHLVSWAKFAPKARQSAGRSKAAATGKGNPWLGGTIGEAAASAARTSTFLAGRYKRIVKRRGKKRALVAVGNSILTICWHLLSDPGAHFTDLGPDWHDRLAPQRRKHQLIAELERLSGKKVTLNDAA

SEQ ID NO: 294013 - protein, 319 aa, unidentified
MTQSATLPPPRRFIGCDVGKETIAVHDSHGGETRVLPNAAEALAAFAATLDEDCLVVCEATGGYETALLEAAVSAGVPAHRADARRVKAFIRSLGTLAKTDALDARALARYGAERHAALTRWRPRDKARERLRQLVAARQDMVRDRAACRNRLSAPGAEAIAPRLKRIAAVIDAEIAGVDDDIARLIDSNPRLKEAVATLRAIKGLGATTAASLLALMPELGTLGRRQAAALAGLAPHPRQSGKADAYRRTKGGRPQVRRALFMATLAAVRYNPVLKAFYQRLRANGKKPLVAITAAMRKLITIANAKLRDAQIDNFAN

SEQ ID NO: 294014 - protein, 320 aa, unidentified
MSANSVVVGIDVAKAHLDCAVLGAALETRRFANDSDGHSALAAALQPLGVSLVVMEATGGYESAVACALQAAGLAVAVINPKQARYFAKAMGRLAKTDRIDAEALAELAAILLRRSDLMRFVRPLPDLQQRELAALVTRRRQLLTMLVSERLRLPLATPKVRPSIEALITAIRAQLDDIDAQMQAHVEEHFAPLDQLLRSARGIGPVASATLIATLPELGRLTRREIGALVGVAPIANDSGTAHGRRRIAGGRFQVRRTLYMATLTATVHNPTIKAHYQHLLAVGKLPKVALVACMRKLLTILNAMVRTHTRWSDAIHCA

SEQ ID NO: 294015 - protein, 387 aa, unidentified
MCERAVPTNRPSLDLSPIALKGRKSLSGSEGQIRWLPQPEQLHGLRARTEQGREWMMAQDEVVVVGIDVAKDKVDACIRSWSQRQTFPNTVEGRRALSRWLRQHKVGKAAMEASGGYERDWAKALREVGIEVRIVDPKRVRSFAKSAGRLAKNDAIDAEMIAWFAETFPDAPGQTDDAAREKLVQIVNARQRLLDLQTSLQNRNEHSTPDVVRKMQARMLKQIALEVAKLETAITALVKATAHFAELAEIIESVPGLGKITSAGLVAAMPELGQVSDNIAAALLGVAPYDDDSGQRRGNRHIKGGRRKVRNLFYMACLGAATRHNPVLKAFYDRLIARGKEPKVALTACMRKLIVILNTMIARRQKWDATRYKLSDPARLPPSACPA

SEQ ID NO: 294016 - protein, 445 aa, unidentified
MSESLTAAPSEPQWAAFVAIDWADQKNFWRLLPADSRRYEQGELENTPEAVEVWAASLQQRFGGRPVAVCLEQSRGPLVYMLTKYPHLVLFPVHPTTAARYRETFSPSGAKSDPNDTASLLDLLLHHRDRLRPLRPDTPETRLLHFLVEERRQVVDEKTRQSNRLTDCLKLYFPQILRWFPDVTSPLVGALLERWPTLEQLQHAHPGTLRRFFHEQNCRHEDVIAERIAAIYPATPATQDQAVLEAGALTAKGLAALLASLRQQIADLERRIAELVNSHPDAAVFASLPGAGAVLVPRLIVAFGTQRDRYQSAYEMQCYSGIAPVTEASGNSQWVHSRFVCPKFLRQTFHEFAAHSISRSEWAKAYYRHLRDDQKKDHHAAVRALAFKWIRIIYRCWKDGKPYDEEIYMQSLRRRGSLLGGLLALATQGGCTTGAGLQKFSENNA

SEQ ID NO: 294017 - protein, 333 aa, unidentified
MDTETGDYGEPRFEHSEGAEKFYRDLAGQEKKVGVGMEASGHARWIERLLSELNFELWIGDATEIARKRERKQKTDGQDAQHILQLLMENRFPKIWVASGENRDLRQRLWHRHRMVQMRTRIMNQLQAVALKEGLRCKKRLWRQHGREQLEGFQLAPWASQRRVDLLELLDRLNPTMAKLRQAIDGEVEKCPAAQRLQTHPGVGPLTALAFVLIIGKADRFQCGKQIASYLGLVPLEKSSGNQRRLGHIRKPGNSLLRFLLVEAAQVTARSIPEWRSTYVHLTLRRGRKIAKVARARKLAVGLYWMMRKEWDYEQLRKFGSHAGKPGSGDGGK

SEQ ID NO: 294018 - protein, 327 aa, unidentified
MAKHVIGIDVSKLTLDVILTDGVTSHFMQVDNTPQGYARVVTWLKKWDGANAHVCLEATGQYGDPAAEYLHFLGYPVSVVNPAQIKHYGQSKLQRNKTDKADAKLIAEFCLRENPAIWTPPSTSFKDLQALVRHLADLQAMRLQESNRLGSGVHTAFVVASLNQLVTIMDHQIQQTKQAIQDHINQHPELKHRQELLITIPGIAHLTAAKLLGEIRDILSFENARQLSAYAGLTPRRFFSGTSVHRKARLSKTGNANLRQTLYLPAISAKRWNPIVHAFCDRLTASNHNSMEVIGAAMHKLLHLVYGVLKSDRPFDPDYLGLSQVPA

SEQ ID NO: 294019 - protein, 366 aa, unidentified
MKDCITWVGIDDAADRLDVAVFYGNEGVPRHEFPVANDPQGLAKLVRKLKSMPGQVRCVYEAGVNGYHLYRVFEKHGIACDVAAPALTPRKPGERVKTNKIDARKLAIMHRAGDLTSIAVPKEQQEAVRDLMRAREDALEDLQRTRHRLGLFLLRRGLRYRDGKTWTAGHLKWLKALSLKDAHGQEVLEEYRLAVDEAAERLERFGVRVEEAAKEVPYKKLVEFLMGLRGVKVITAMTIIAESVDLKRYLTAPGYMDAVGLVPSESSTGDRRRRGPITKTGNAHLRRVLVESAWNYRWAPGLSKTMKSRRKNLPPDVLAIVRKADQRLHKKYRALLNKGKSSKIAAVAVARELAGFIWAVGQAQAA

SEQ ID NO: 294020 - protein, 374 aa, unidentified
MMFKAWVEDIAEKQGKTAVIPGMEPTGHYWFCTGEIPAGQRDEACTCESAPMSRSRKSWMTTIPIRNDRKDPKTIAALVNEGRFSYPYIPTGIYAEIRSLSNLRFQTQEELTRIKNRIARWFAIYFPEYKDVYGDLMAVSGRMILKEAPLPEDIRILGVNGVNQIWRNAKLRGTGMKRAKILVSAAEHSVGSKEAPEAARIELKNLLNDMDVYVSRMEELLQTIEEKLKTIPYVDKLMEIKGIGLITVSGFIAEVGDIGRFDNPKQLQKLAGYAIVANDSGKHNGESRISYRGRKRLRYVLYEAAISLVGKNAEFKEIHEYYRTRKENPLKKMQSVVAVACKIIRVFYTILTKGVDYDPMKLMSDIRRPQLQAA

SEQ ID NO: 294021 - protein, 387 aa, unidentified
MERSNQRVVGLDVHPDSFAGAILEGSDPWRARVVRTSTRVALGELEGWAARQTGPGDVLVLEASGNAFCVAERLRSLKRKVVILDSHRAGKVGKAYCATDRVDAIKIARIYLSALSPVVWQPDAKTRERREVFSAYQGVVKETVRLKQQLKSMLNEHCVRLEKGFRLSHPSALGRLRKRREWSGAQAMLLGQLHAGLVGACQRRQQLRHYMAGEILAEPELLRLTRLCGISLITLYGLISSIGQITRFENAGKLSAYFGLNPSVCQSGNYEGATALKRHGRGAMRALLVQSAKKLLQVENPLRKWGLAVAARRGRNKAAVAVARKLCVAVWHVLQGHSIGALERLDTLHTKLHKFATELGVPAIKALGYETKEAFVQKKLYLLKSYP

SEQ ID NO: 294022 - protein, 341 aa, unidentified
MSDYSYFCGIDLAKNHFSLHAVDQNGKVILHKSVTRSKLLTTIANMPLMRIGVEACGGAHYWVRTLNKLGHDARIMAVKYVIPYRTKGKNDLNDAVAICEAVQRPSTRFVPVKSPEQQAILSVHRMREHWVRERTALMNRMRALLSEFGLIIPVGRSSLMTHVPLMLEDAENELPHLARTVVADAYHHLGELNQRIADTEQVFDSFAKVSANVQRVMKVRGIGPQTATAILASIGNGSQFDKSRDFSAWLGLVPKQYSTGGKPRLGRITKHGDKYLRTLLVHGARTVIANLGDKQDKLSQWCRGVLERRGMNRAIVALAAKNARIIWSLLHNQTEYENYAA

SEQ ID NO: 294023 - protein, 431 aa, unidentified
MEVIHPRVAGIDVHKKIVWVAVRLPGERPGERTVTVTRVQTFWRSLRQMAAWLAGLGVTDAAMESTGVYWWPVYHALAGAGIEVCVCNAAHMRNVPGRKRDVIDCQWIAELHEHGLLRPSFIPAGAVAELRARTRYRKKLIEQRTSEGQRLAKVLEDAGIKIDSVASRLLLKSGRAMIEALIAGERNPGRLADLALGRLRRKIEELQLACDGRFTAAHGQMCRLHLDAYDHLTAKIAELDALVAEAAAPFAALIARLQTIPGIGRRTAEVIVAETGGDMARFATAARLAAWAGLAPGDNESAGKRKHAAARKGNRHLRTAMVESAWATARTRTRPGARFRRLARRFGKGNEKKAAVAVAHTLICIAWAVLSRGEDYAEAGEDYYQQRDRRDREHLIRHHQQALARLGCQVTLIPPGDGSPPPSATSQQPAA

SEQ ID NO: 294024 - protein, 425 aa, unidentified
MREHDTRAEAGTVNTPGRGTMFEIEDVGAFLGLDVGKSNHHGHGLTPAGKKVFAKPLPNSEPKLRAVFDKLTAKFGTVLVIVDQPASIGALPLTVARDAGCRVAYLPGLAMRRIADLYPGEAKTDAKDAAVIADAARTMPHTLRSLELTDEITAELTVLVGFDQDLAAEATRTSNRIRGLLTQFHPSLERVLGPRLDHQAITWLLERYGSPAALRKAGRRRLVELIRPKAPRMAARLIDDVFDALDEQTVVVPGTGTLDIVVPSLAASLTAVHTQRRAMEAQINTLLEAHPLSPVLTSMPGVGVRTAAVLLTTVGDGTSYPTAAHLASYAGLAPTTKQSGTSIHGEHAPRGGNRQLKRAMFLSAFACMNADPASRAYYDKQRARGKTHTQALLRLARQRVSVLFAMLRDGTFYQSRTPNDVELAA

SEQ ID NO: 294025 - protein, 371 aa, unidentified
MNHVTSIGLDVHARSVTAVALDSITGEVRSQKFGYSPAEIAGWILQLDSPKAVYESGVTGFHLVRELREMGVDCIVGAVSKMHKPASDRRKKNDRNDAEFLARQLMAHNIVEVFVPDVETEGARNLSRALEDIRDDLTRAKHRLTHLLIRWGYIWNEFNEDGKRRGSWTHAHWEWIRGIELPDAAARESLDYYISEVRHIESQKKAIEKRVAQCASRPRWRDRVEALRCMKGIETVTAFALTVEAGVFSRFDSARAFASWLGLVPSEHSSGERASRGGITKAGNSHLRKLLVEASWHYTRATKERKRSLCDESVPASISNHAAVGVKRLVERRRHLSCELRKRPVVANVATARELACWIWALGRMSEGALA

SEQ ID NO: 294026 - protein, 336 aa, unidentified
MALYCGIDLHSTNHLVVIIDDEDRRVLEKRLVNDVSITVNTLTPYRDQLAGIAIESTFNWYWLVDGLQDAGFVPCLANPAAIKQYEGLKYTDDPYDAFFLAHLMRLGILPTGHIYPREQRGVRDVLRRRLSMVRMASRLLLAVQSQIWRSTGINISNNCIRRPDFELPLPAGPVLEGAAAQWRLFQQTQVEIHGLEKLALDLYQGEEYYQLLQTVKGIGVILGLTIGLETGSIKRFKKAGNYASYCRCVKSERISNGKKKGQNNRKAGNRYLSWAFSEAAHFAVRWEPKVQRFYEHKRQKKGNNILAIRAVAHKLARAVFHMLKKNEPFDVDRAFG

SEQ ID NO: 294027 - protein, 417 aa, unidentified
MNTENYAALVALDWGETEHAFATQVGESPVDTGTMPATPETLHGWLEELHERLGGRPVALALEGGKSAVLHALVAHPWLTIFPVHPATSERFRKAFVPSGAKDDVPDAMVLLTILTQHRDQLRPLKLDSAETRKVAALVATRRRAVDERTKLACELGSTLKTYYPQALELCGREPGTALALDFLTRWPELRSLKATRPATLLAFYASHNSRHSDVLNERLAIIAHARALTEDRAVIEPAILQVKMLLDILRPLQKNIALIEERIAEAFDSHPEAALFQGLPGAGPATAPRLLAAFGTDRSRYPDASSLQKYAGIAPVKQKSGRQLWIHWRWNAPKFLRQTFVEWAGQSVPKCAWAKAFYRQQRAAGKHHQATLRALAFKWIRILWRCWQDRVPYDEARYLASLRKQKSPLAARLAAT

SEQ ID NO: 294028 - protein, 314 aa, unidentified
MKMAMLSFCGIDVSKDRLDVVVLPEGWFFSVSNDTAGWAELVVRLRPLTVSAIGLEPSGGYERGIIRALLAAGMSVRRINPNKLRQFARARGVLAKNDRLDARLIAEYVAIMPTRVVQRDAAVERLAEIVTMRRQLCDEHVAAENQAAHLEDAMLRRLSKRRQTRLEADIRLLDKRLAEMVAANVALAQRYELLTSMPGVGPVLAFTLIALLPELGKMTRKQIAALVGLAPYDFDSGKLKGHRSIYGGRMPVRNVLYMAALSASRYSPALKAFHNRLADADKKSKVIIVAVMRKMITTLNAMLRDNAAWQPQSA

SEQ ID NO: 294029 - protein, 342 aa, unidentified
MRMHKVTEITTTGKLGQEYDHYVSIDWSLSTMAIAHMGRRDNIPRVFERPSELKELKTYLRSLKGRIIITFEETGCAHWLYLELVDCADRILICDPFQNKLLCHGPKTDKIDARKLCELLRAGLLKEVYHSNSELYELRLLVSAYEDVVRSGIRVLNQKAALTLGHREKGKSSAFIGGILKENIDLYRRSKEQYEQRFNVVARGNKLVRFQREIDGIGTIGAVKILACVVDARRFPYSGKYMSYCGLVKHEKLSGGRSYGWRKPRYSRVLKSVYKTAALAAIRGHNPIREYYDHLLAHGVAEHNARHAVARYIARISYGMLKSGTRYDPDTVGRRDAERKSA

SEQ ID NO: 294030 - protein, 449 aa, unidentified
MSRPQVIDDQEHERVHERVAAIDVAKDTGMVCTRTPHPARPGARRATVWTVKARMGAVRALGRQLHKDGIEVVTLESTSDYWRIWFFVLEACGLAVQLVHAAQAKNLPGRPKTDKLDAMWLARLTELGLLRASFVPPKAIRDLRDYTRARTRLVQERTRCWQRLEKLLEAALVKVSSVASKLTTVSAQEMIKAMIAGQRDPEVLAGLARGRMKAKHDDLVQALDGMFDDHHSELAGLLLDQIAFLDHRIEVLGARAAELTAAMPAAWGVEPDGTTGPHAGATADAPVLNAVARLAEIPGVSDNLARSIIAETGLDMTRFPTAAHLVSWAGLCPSARQSGPRSRPGKKGQGDTWLRGSLGQAAVGASHTATFLGERYSRIARRRSKAKAQVAVARSILVIIWHLLADPDARFTDLGYGYYQARTDTDRKLRNHIRQIQALGFTVTVTKTG

SEQ ID NO: 294031 - protein, 354 aa, unidentified
MNEITTVGVDLAKSVIVVCAGDAAGKTVYFRQFSFGAFAVWAANLPPCVFGMEACSSAHYWARRLASFGHKPRLMAAELVKPFRKSQGAKNDRKDARAILSAVREPDMRFVAPKSADQQAILAWHRMRDGWMAERTALVNRLRGLLAEFGLWFNRSPNKLLWALPELASSTTLPERFKPILAQVREQIEALDQRIEECEREINVHAKASPDAQRISAIVGIGPLTSSAAVATAGDTTNFRNGRQFAAWLGLVPRQHSSGGKDRLGAITKRGNAYLRGLLTQGARSTVQVALRRPPEQRSRLEQWIVALHDRVGYRKALVAVANKHARIIWAILDKGEDYDPNAWQRLAADSANA

SEQ ID NO: 294032 - protein, 325 aa, unidentified
MQGKDRSEQETKTKSTVGIDVCKLWLDIHILPSEESFRVPNTKAGSKEISRRLQHYDVQLIAIEATGKWHRDLHRNLVEQGHAVRVVNPLRARLFAEAMGLLAKTDRLDARMLAIFAASLTEARPPTPEIIEALKELVQARSSAVEEQTSLTNQLKSATIAFLRRQLKLRLTHIAKQIKALETEALKRIKADPGLARRYDILVSIPGFGDVVAMTLLAWLSELGSCNDKQIATLCGLAPWPDESSDRVGARHIRGGRELIRKILYLAALTAKSFNQPMKAFFRRLTANGKAKKLALVAVARKLVVLANTLVRADRLWQIEAPKCA

SEQ ID NO: 294033 - protein, 346 aa, unidentified
MSHYVGLDVSVKSVSICVVDTHGAVLTRGETASDPDRIVSFIREHAPDPERVVHESGILAIWLTRELERRGLPIICIDARLAHKALSGRINKSDPGDAEGLAHLARTGWFTRVHIRSEASERVRVLIGTRERLIRMRKDLEGHVRGILKTFGICMSAVHRTKMRQGFRDQLAAAAATDPAISVMAEMFNPIHRALCAATDAMDEELKAIARDSDLARRLMTVPGVGPVVALSFIATLDDAGRFKRSRDVGAFLGLTPRRHQSGDMDWSGRISKCGDRDLRRLLYSAATTLITQVRKPSPLLAWAKRLQDRKGFKKAAVATSRKLAVILHCIWRDGTVFEPDVEVKA

SEQ ID NO: 294034 - protein, 481 aa, unidentified
MGEKKSAPRGKSGHGGKRRGRGVQKALQVVNPDAAGIDIGAESHYVSVPEDRSEEPVRQFGCYTPQLEEMAGWLIECGIKTVVMEATGVYWIPVFRVLESRGLEVLLVNPKHVKHVPGRKSDVADCQWLRQLHTFGLLRGAFVPPQDVAAMRTYWRQRRTLVEAASREILHMQKALTQMNLHLHVVLSDVTGVSGMKILRAIVAGEHDPVRLASLAGTQVRASREEIAQALSGHYTGEHLFVLGQALELFDVFQAKIRDCDGQLAMHLSRFEGKAGAGAPPSNPKRSRRVSRRKNEPYFDLRAELWRLTGVDFNRIDGIDSLTAFTVLSETGFDVSAFATEHHYASWMGLCPNNSITGGRVKRRHTRRVINRAADALRIAAQSLWRSKSYLGAYYRRLAARMGAPKAITATAHKLACIMYRAVKYGQQYVDKGEQYLEEQHRKRNLKSLVHRAKDLGYMLVHSETGECLSLTNQPLTRCVS

SEQ ID NO: 294035 - protein, 392 aa, unidentified
MSKCTIPSFVGQVIFCGFDVHKDKWSVCVRHCGREIAAYPAPADARAIAGKLRRDYPDAEIRSVYEAGFSGFEAHRILVEEYGIRNIVINPADVPTNNKERTRKSDRIDCRKLARTLEAGLLEPIYVPSRDHLQFRNLVRRYTRTTSSLTRTINQLKSHWYFNGEPVPTRACRRVLASRREQALRNGDYTSVSLIDQYFFLIELRKTIRTWEHETILQLNLSAKMKNLVSIPGIGFRTATVILSEIWDVRRFPDKDHLASYAGFAPYLVGSGEKEETVGADCRKHKLLHYILIQAAWRAARSDPEMICLYGKLQKRRHSPQRIACIIAKKLLFIARAVLLEDREYRSAGAGKKKDPLRTGSGAAASCPPPSPTGQGGVPFPPPAEPSISRGD

SEQ ID NO: 294036 - protein, 396 aa, unidentified
MNDITYVGLDVHKTTVCVAIAESGRGGEVREVGVFENRPDVLRKMVARLGKHRRRLNFCYEAGPCEYGLHRLLTGLGHDCVVVAPSLIPMKAGDRVKTDRRDALMLAKLHRAGELTPIWIPDAAHEAMRDLVRARATSVRALSKARQHLQGFLLRHDRIYHGARTWTLAYRRWLTTVRFDHPAQQIVLQDYIHAVEDAEFRRDRLTRQIEELMPSWSMAPVAAALQAMRGVALVVAVTVVAEVGDFRRFTNARQLMAYLGLVPSEHSSGSTVRRAGITKAGNALARRVLIEGAWTYRMSARVSRKLHDRLEPLSAVIRDIAWKAQVRLCARYRRLAATGKPKVVVTTAIAREMVGFIWAIARVAQTMFPVRFQSVHCWIRLNATRAGTEPTMVGLF

SEQ ID NO: 294037 - protein, 389 aa, unidentified
MKIYVGIDIAKLNHFAAAISSDGEIIIEPFKFTNDADGFQLLVSKLESFDKNSIIIGLESTAHYGDNLVRYLVAEFYQVCVLNPIITCQMRKNNIRKTKTDKVDTFVIAKTLMMQDDLRFVSFYDLDMMDLKALGRFRQKTIKQRTRLKIQLTTYVDQVFPEIQYFFKSGLHQNAVYALLKEAPSPKEIASMHMTHLANLLKVNSHGHFTKEQAKELRVLAQKSVGANDSAISIQITQTIQQIELLDSQLDKIEAEMTDIMKFNDSVIMTIPGIGYINGGMILGEIGDIHRFSNPNKLLAFAGLDPSVYQSGNFQAKTTRMSKRGSRVLRYALVNAAWNVVRNNVTFKAYYDAKRAEGRSHYNALGHCAGKLVRVIWKMLTDEVEFNLE

SEQ ID NO: 294038 - protein, 350 aa, unidentified
MIIIGCDYHPGFQQIAYVNTDTGDLSEERLGHKEQAEQFYQGLRTRGLTVRVGMEASGHARWFERLLNELQIELWIGDAAAVRTKRVRKQKTDRQDAQLLLRLLVENRFPRIWMPDAENRDLRQLLWHRHRLVQMRTRVMNQLHVVALNEGLRRKKALWRPTGRAQLESLALAPWASRRRQDLLDLLDQFTPKILELTRGLEEVVEKRPVARRLQTHPGVGPLTALAFELVIGTPEGFQCGKQIASYVGLVPSEESSGDRRRLGHISKQGNALLRFLLVEAAQVTVRSDPQWRSQFFHLAMRRGRKIAKVAMARELAVELYWMWRRGWDYNEMQQLGSHAGEPGNRHGVQ

SEQ ID NO: 294039 - protein, 430 aa, unidentified
MKSNTQNAKIEAITEKTLVLGIDVGSETHYARAFDYRGIEYSKKPFKFSNTEVGFATFKEWILDLKERHEKDKVVPGMEPTGHYWFNLGKFLQDNEMKPVLVNPHHVKKSKELDDNNPTKNDRKDPKVIAGLVREGRYMIPYLPDGVYADLRTASNIRFQLQAELTRIQNRISRWFNIYFPEYKTVYRKPDAKSGMLILKAAPLPEDILTLGIDGVNQIWRDAKLRAVGKARAKTLIEAAEHSIGSKEGTMSARMEIRMLLEDYESKNMRLQEVMVLIEELVKEIPMAEKLLEIKGVGIRTVSGFLAEVGDISRFNNPKELQKLAGLAVVENSSGKHKGKTTISRRGRKRLRYLLFEVAMSLVAKNPEFRELHNYYTTRRLNPLKKMQSLMAIAAKLIRVFYAMLTKGVDYDPKKMISDIKRPTVYLQAA

SEQ ID NO: 294040 - protein, 421 aa, unidentified
MDIVVERCAGIDVHKDTVVTCVRTPGADGQREVVTKTFGTVTVELLALRDWLVAMGVTLVGMESTGVYWRPVFYMLEEVTECWLLNARHMRNVPGRKTDVADAEWICQLVEHGLVRPSFVPPPPIRELRTLTRHRKSEIEEHTRVAQRLDKVLQDAGIKLSSVASDILGKSGRDMLDALVAGTSNPDVLAELARGKLRKKIPALSQALEGRFGTTHALVVGEILAHLDFLEEAIERLSVRIDEVIAPFGSERDLLCTIPGIDRRLAEAILAEVGVDMGRFPSAAHLASWAGMCPGQHESAGKSRSGRTRHGNSWLQRHLAVAAMAAARAKDSYFASQYARLVRTRGKSKARKAVGHSILVAIWHILEAGVPYEELGADWFEKRNSPERRARRHLADLKSLGWIFTDTPEGIVLTQPQPAAA

SEQ ID NO: 294041 - protein, 331 aa, unidentified
MDPAVVIGIDVSKAELVIAAHPAAETWTSETTPAAIDTLVARLRDSRPQLIVMEATAGYELPLAAACAAAQLPVAIVNPRQVRAFAQAIGRTAKTDAIDAAVLALFGARVQPAPRGVADAATRALAGLITRRRPLLEMLGAERRRLEQAPPTGPITRDLRTHIRWLERRVGDVDDEIGTAIHQSPVWRVQEDLLRRVPGIGPTTARTLLAELPELGRLDRRAIAALVGVAPFNCDSGQFRGQRRIWGGRASVRASLYMAALVAARHNPVLAPFYRRLRQAGKRAKVALVAVMRRLLTILNAMLKHQSRWNPKVASTPASPSGPARAATVVA

SEQ ID NO: 294042 - protein, 322 aa, unidentified
MAMLSFGGIDVSKDRLDVMVLPEEQSSSVSNDAAGWAELVEQLRSSSIVAIGIEASGGYERGVMRALLAADLPVRQVNPFKLRQFARASGVLAKSDPLDARMIASFVAIMPTRPAPRQAPAAERLTEMLAVRRQLSAEKVAAENASRLLEDAMLRRLSRRRIGRLGADIDLLDKHLVEIVGTDAALVHRYQLLTSMPGVGVVLACTLLALLPELGRMSRKQVAALVGVAPYAFESGTLKGRRCIWGGRAHVRQVLYMAAMSACNWNPRFKTFHDRLKAAGKLPKVAIVAVMRKMITTLNAMVRDDVSWADRLTGRHSVPTAR

SEQ ID NO: 294043 - protein, 341 aa, unidentified
MNTTLIAVDLAKDVFELACANQASRIVDRKRLNRKQFHRFCAQHPPVTVVMEACGTAHYWARELDTMGHTVRLLPAQYVRAYRRRSKTDRNDAAALVEAARNPEILPVPVKTVEQQCIQTLHRCRSQWLATRTARINVLRGLLRELGHPLPLGARAAITGARACREVVPTVLQPAIDALLDEIATLETRMADIEAALARHARDSEPVQQLLSVPGIGLLTATALAASAGSPGYFRNGRHLAGWLGLTPKEYSSGSRRLLGSISKRGDGYVRMLLIHGARAVLNRAKQLHRAGQSLSRLQQWVVRLEQRVGHNKAAVALANKLARIAWAVWLRSTPYQATPI

SEQ ID NO: 294044 - protein, 363 aa, unidentified
MNATAALPVVGIDLAKSVFQLAVADASWRVVELHRLTRAQFERWFSNHAVGLVVMEACGSAHHWARWLNRLGIEVRLLPAAYIRAYVKRNKTDAADACALLEAARCAEITPVRVKSIEQQALQGLHRTRSLWMATRTSRINALRGFCCEFGIVIAQGSRLGVEQIGRVLADPQAAVPMLIRRTMTLLVEEIRLLEVRIAQLERELTTLARQSPACTTLLSIPGVGLLTATAMVAATSGNVTHFHDARHFASWFGLTPKEHSSGCTRHLGRISKRGDRYLRMLLTHGARSVLRAASVAVRAGKTVDGLRQWALGVQGRSNHNKATCALANKLARICYATLRDGEPYGAARLNKKLARTAFALPA

SEQ ID NO: 294045 - protein, 384 aa, unidentified
MEKSITLHVGLDVHKESIDIATADPGRSGEVRHVGSIGGDLASLDKALRKLTSKGHQLHVVYEAGPCGFVIWRHLTARGQACDVVAPSSIPKRAGERIKTDRRDAMMLARLDRSGDLTAVRVPGAADEAVRDLVRAREDGVRECRNARHRLKALLLRNGIAYAGKSSWTAAHLRWLATLKMEHAAQQIGFQEYLHSITEATARIQRLEQAMRDALADWTLKPLVQALMALRGVQLIAAMTLVAELQDFLRFESPRKLMAFVGLVPTEHSSGPKRRQGSITKAGNSAARRMLVEMAWHYQHSPRVSPIIAARQDELPKEVTDIAWKAQLRLNAKFKRLLARRVMKNKAVVAVARELTGFVWAIGCEVQASGWQGLAIEPASARVN

SEQ ID NO: 294046 - protein, 428 aa, unidentified
MQNRKAHRMKNWKDLTHYAGFDWAKDHHVVVIVDAQGQLVADFEFAHSLEGWKGFVEKTAAWPNLGVAIETSQGAAVDQLLQRDYTVYPVHPVAAQRYRERKAPSGTKTDHLDGWGLGDALRVDGHGWKPLQPLDPLTQQLRLLCRDEVSLIEQRTALVNQLQQALSEYYPAATEAFDDWTDSFTWEFVLAFPTPDRLVGAGKGRWEKFLHTHRLWRPETAEKRLKLFAQADQFKASKPIVLAKSQLAVSLCKLLCTLGQQLKLYRQQIEKLFAEHPDHDLFGSLPGAKKMLAPRLLGAVGSDPERYGSQEVLQCIAGTAPVSYQSGKISKVRVRWSCDKFLRHTIHLWADCFRKASAWGQAYYQKKRKDGMSHACVMRCLGQRLLKILFRMLKERTPYDAELHARNQLKHGSWVLQLIDKQATEPGQ

SEQ ID NO: 294047 - protein, 412 aa, unidentified
MEILYRSCGGLDVHAQTVVACLIKDGRKETRTFSTMTDDLLGLLDWLTAEGCTHVAIESTGVYWRPVFNILEGDMEVILVNARHVKAVPGRKTDVKDCEWLADLLRHGLLKASFIPPLEIRELRELTRYRRTLVREQAAVANRVQRIIESGNIKLAQVATDALGVSGRRMLRALAQGESDGAKLAEMARGRLRGKKVELQRALTGRLTAAQRFVLHELLDRYDELEAALFRVNEQIKQEVAEGTDPFVREALQLLQTIPGVWERVAEAIVSEIGVDMSRFPTDAHLASWAGMCPGNNESAGKRKSGKTTKGNIHLRAALTQAAWAATHTKQTYLAAQYRRLVKPKGKKRALVAVGHSLLVIAYHLLSRRASYQELGGDYFDQHNAEVQRTRLIRKLEALGVKVTIEALPVAA

SEQ ID NO: 294048 - protein, 351 aa, unidentified
MTIVDEFNACITGGVDTHLDSHVAAALDAKGGLLGVEHFDAGRAGETRLIAWLHELGPIDRVGVEGTGSYGAGLARRLRAAGVSVVEVDRPNRQTRHRKGKSDPVDAIEAARAAQGGRATGLAKSRDGNVEAMRALLVARRSARSSRIKAMTQIRHLGFCGPDELREHLDGVSAIMLGRTAAAVRPTEGSRNLVMHATATSIRILGRRVESLEAEIEMLEHVLEQLVRETAPSLLALYGVGVDTAASLLVAAGDNPERLRSEAAWANLCGVAPLEASSGKVTRHRLNRGGDRNANQALWRITLCRMASDNRTKTYVERRTAEGKSKREIMRILKRYIAREVYPHLRSTMIN

SEQ ID NO: 294049 - protein, 363 aa, unidentified
MPTEALPSLYAGLDLHKRNAFCGTITQEGQPIYRRRLLAELPTILQALEVYRPQLKAVAVESTFNWYWLVDGLQAAGYPVHLANPAAMQQYSGLKQTDDETDALWLAEMLRLGILPTGYIYPKAERPVRDMLRRRLLIGRQATQTLLSLQSMVTRHTGQSVGATKLQDWRLAEVRATFADAYSQQTATALLELLGDQRRLQHRLEKQVLAMAKPTTPFQRLVSLPGIGQILGMTIALETGPIARFASAGDYASYCRTVNSRRQSAGKKKGQNNRKNGNQYLAWAYVEAAHFAQRYSPRAHAWFASKTARVGRVVAIKALACKLAKAAFYVLRDQVDFNEDKLFGSVTDGDRKPVPSLVQNRSV

SEQ ID NO: 294050 - protein, 317 aa, unidentified
MTQTSMTTAGIDTSKSKLDIALHGRAEQWQVANTLPGWRSLTNKLTKAGVSRIGIEATGGYECGVVQHLRAAGFTVQVLQPVQVKAFGRMHLRRAKNDALDAVMIAACTAALDQVRDAPDPRLAELAEQLTFLEQIEEDIKRFKTRLEHTGEPRLRRMVLHEIARMTTRRLAQLRYIAKQLRAHHDLAARLDLVLSIPGIGERTALAILIRMPELGRISREEAAALAGLAPFDNDSGQQKGQRRIAGGRARLRRSLYAAALPAAFRWNRALIALYQRLTAAGKAHNAALIACARKLLIYANTVVQRGTPWTESPLGV

SEQ ID NO: 294051 - protein, 414 aa, unidentified
MDVIHGRCAGMDVSKRDAKVCVRIAGRGRRKTVETVRTWASTTNAVLALREHLVEEQVSLVVMEATGDYWKPFYYLLEDAGFEVMLVNARQVKNLPGRKSDVSDAAWLAQLGAHGLVRGSLVPPAPIRELRDLTRARTMMTRERGRDIQRLEKLLEDAGIKLSSVASDITGVSGRLMLQALIDGQRDPAVLADLAKRRLRHKLPELTEALTGRFADHHAFLARMYLEAIDQRSRAITELTARIEVVIEPFRSFCNLIGTVPGIGVRCAEVIAAETGADMSVFPTAAHLASWAGTCPGSNESAGRVKSTVTRPGNPYLKAALGAAALSIANTRGTYLAAKYRRIAARRGPKKALVAVEHAILIAIWNMAHTGAEYDDLGADYYTRRDPERVRLHAMNQLQRLGYHVTLSPAATSA

SEQ ID NO: 294052 - protein, 344 aa, unidentified
MNYYAALDVSLRSVNACVIDEHGEIKAEAKLPAEFEDIATYLQALDVDVSEVGIEAGTLTQYLSYGLQAAGLEVICMESRQVKAALSAMRNKTDKNDARGIAQVLRSGWYSRVHVKSMDSHLIRALLSSRKAVLSKCVDLENEIRGLFKVFGIRLPPKLGHGSFDDRVRETIENDPALSHALLPLLDARLLLYRTYRELDNRTRKLALQDPVCQRLMGAPGVGYVTALTFKAAVDDPTRFKRSRTVAAHFGLTPRRFQSGEIDHAGHISKAGDPAVRTTLYNAANALMTRSSKWSSLKAWGMQLAKTRGHRRAVIAVARKLAVILHQMWINDTKFRWGSEGASV

SEQ ID NO: 294053 - protein, 387 aa, unidentified
MIYYIGIDISKYKNDFCIISNTGEVIVENSSFENNKKGFQSLLELLKPYNKSEVHIAFEATGHYSKNLELFLIDQGYSFMKMNPLVIHQFLKARSLRRTKTDKADSLTIANYLMSVPYKPNSDLLYNIFTLKSLCRSREQLIKERSKYQVLLTNQLDLTFPELKQFLNNRISATLLFILEKYTNTDHISLMRDYDSIKNISRGKFSYAKFAKLKELAKNSIGHHDENTDLLISTYTSIIKTFNEKIDPIEKQISTIIKELNPKMLTIPGLGEISAAAILSEYGDINNFSSPNKMLAFAGLEPSIIQSGTIENNGKMVKHGSGHLRYSIMNTTMIILRYSPTFYDYYLKKRSEGKCHRVALSHVCKKLLRIIYTLEKNNIDFDPSLLK

SEQ ID NO: 294054 - protein, 339 aa, unidentified
MVAVGVDTHKERHYAAALDQLGQLLGERTFAASAAGYDELQRWAEGTAAGHELVFGVEGVGSWGAGLRQHLQHAGHTVVEVERPRRRDRRAGKSDRIDALTAAKCALNNENVSTPRRRGTLTALRALLIARRSAVAERTRLLNQLQALNATAPIALRERIGEGTGKQLQRRILSTRARPGADVETRTVFGVMRDTAARSRALDIDARRYKNEIAELVRSLDPTLLDEPGIGPITAAKLLACDPARFKHEAAFARCNGTAPIPASSGKTVRHRLSRGGDRQVNNAIHTIAIIRAKHQPQTRAYLDRRIQEGKTKREALRALKRHISRDVFKRLNEIPLTS

SEQ ID NO: 294055 - protein, 351 aa, unidentified
MIIIGVDYHPSFQQIAFMDQETGECGERELNHSDGEAERFYRELKERGVSVRAGMEATGHARWFERLLAELGFELWIGDPAEIKTKRVRKQKTDREDARLMLKLLLENRFPRIWVPSPENRDLRQLLWHRHRLVQMRTRIMNQLQAVAMNEGYRWKKKLFGQQGRALLEKLSLAPWASRRRKELLELLDQLDPKIAELTAAVEREANKRPEVVRLMTHPGVGPITGVAYVLVIGTPDRFPCGKKIGSYTGLIPCEDSSARRQRLGHISKQGNTLLRFLLVEAAQAAARCNADWRRRYMHLMMRREKRIAKVAMARKLAVRLYWMWRNNWQYSQLVEFGSNAGKLGIVHGMK

SEQ ID NO: 294056 - protein, 322 aa, unidentified
MGVRNLSESMFVGIDVAKDTFDAALGVGGEVVQFSNDNAGFEALLARLRGFDVPLVVMEATGGYQAALACALQAGGYTVAVVNPRQARDFAKAMGYLAKSDRIDAGALSQFAQTLNGHPKRDSFIKALPDPEREQLAALVTRRRQLVEMLTAERNRLAMSHRAARKSIEAIIKALQRQLDDLEGSMANHIAKHHADLAALISSAKGIGPTTAATLLGELPELGHLSNRRIAKLVGVAPLNRDSGPQRGKRSVHGGRANVRAALYLPTWVAVQHNPVIRKFYSRLIAAGKPKKVALIACMRKLLTILNAMVRSGQAWNDALHT

SEQ ID NO: 294057 - protein, 351 aa, unidentified
MEMVGGLDLHRRQITFRTVDLRTGELQRGKIYPGAREAVREWLDQFQSGTDAHFALEGTTGWRFVVEEIERRGFTAHLADPAELSERRGPKRRAKTDHADCELMVNLLLEGRLPQSWIPPAHILELRTLVRLRKTLVDQRIEWQQRLQAQLFHQGVVPGLHLCRPEDRRRLAEMEMSPAGRQTMQRGLVMLDAFDSQLKPLSAQVVSLAKAQPGCRALERLYGVGWLTSAAILAELGDCRRFTSADQAVRASGLDVTVYESNGKRPGGHLARQGPQVLRWALFEAAQCAARRSSPDHDYYVRVRDRIDHNRACLSVARKLCRRACHILKDLGEAAMAAPELPSASHEPKAA

SEQ ID NO: 294058 - protein, 336 aa, unidentified
MILHFNYVVGIDISKKTFDVCISENNLNSELLQFKVFQNNAKGFKAFVKWLSRYDISLKGTLFCMENTGLYHRSLASYLCNLKATVWVASGSQIKWSIGIQRGKTDKVDAKRIMVYAIRHIDKLKPYSDKDVDLQQLADLLALRRRLKDSYTKLLVPLKELKATGLTDHVETIEQAMSASINALKNDIKDIEKRIKNLIEQSKQLKETYSYVTSVKSIGLIAACHLMIYTDCFTRFKSAKQIAAYSGIAPFEYKSGTSVKGRTRVHHLANKNLKTILHMCAISSLAHNEEMKIYAARKVGEGKNKMLVLNSIRNKLLSRVFSCVKNKKMYTPHIAV

SEQ ID NO: 294059 - protein, 348 aa, unidentified
MIVGIDVHKHTHAAALLDERGGEIATLIFANSPKGYQRLLGWLAEHDAASAVIGVESPGSYGRCLVAALVAAGHETLQVPAWRTHRERHRQGPGKTDPGDAISIAQVVLRKRSELGPALEPEIVRVLGMLELQRRRFVRDRTKAIQRLRSDWTQFDPVSEAGVVRCDRQRELARLKRLRLGDGLAERTAARCIRELARDIENLNRQIKALDAEIAELLDGHGNPLAELQGAGTNLTATIIAQAGDVRRFRDAGAFARFCGAAPIPCGSGQTAGRHRLHRGGNRQLNAALYRIAIVQSRHHPQARAYLARKAAEGKTPREARRALKRHLANVLYRRLYAWAEQTPVMNT

SEQ ID NO: 294060 - protein, 448 aa, unidentified
MQIVHTHCAGLDVHKKTVVVWCRIVSPDGTSTTHIRTFSTMTAGLLALVDWLLSLGITHVAMESTGEFWKPLYNLLEGNFTVLVVNAQHIKHVPGRKTDVKDAEWIAELLAHGLLRASFVPPAPQRALRDLTRQRTHLVQERAQVVNQMQKVLEWANLKLSSVVTDVTGVSARKMLEALVGGQTDVRLLAELAQGRLRAKRAELEQALRGTLQPHHAFMIAQHLAHLDFLEEQIAAFDAQIESMIQASGLPPSDPGAGECAASQAPAAPDTPPAAPAQSTSTWLAARAICDAVPGIGQKVAETILAELGTDMSRFPSAAHAASWAGLAPGQHESAGKRRAVRIGKGNRYLKGALIQASWAAIKGKDSFLAAFYRRLAARRGKKKAIVAVAHKILVIVYTLLKSGEEYQERGAAALDERQKDRLLEQMQRRIERLGYKVSLEPITAAAA

SEQ ID NO: 294061 - protein, 350 aa, unidentified
MGKHNKSGTTQKGQVTFLGIDLSKKSFQLHGVDAKGHVVIKKKLNRKALLPFIANLPQCAIGIEACGGSHYWCRKFTELGYDVRIMAPQFVKPYVKSNKNDAADAEAICEAMQRPSMRFVPTKTIEQQDIQSLHRIRSQAVARRTALGNQIRGLLMEYGVIIPKGIAFIRKQIPLILEDAENGLTVLFRELLSELYEEMKHLDERVEKLEQKLETIAANNEACKLLLTIPGIGLLSATALFAAIGDISAFKNGREMAAWLGLVPKQQSTGGVPTLLGISKRGDTYLRTLLIHGSRTVVRVADKHDDRRNNWIKELDQRRGKNISAVAVANKNARIAWAVLTKKEPYKAAA

SEQ ID NO: 294062 - protein, 309 aa, unidentified
MEFIGIDVAKAQLEFAGRPSGATGMVPNAVDGIEALVAQLRALAPALIVLEATGGYEAAVVAALATAGLPVVVANPRQVRDFARATGQLAKTDAIDAQVLALFAERVRPVPRPLPDEAAQALDALLTRRRQLIEMLTAERNRLLIARPAVRRDLQQHIRFLERRLREADDDLHSAVKASPVWRVKDDLLQSVPGVGRVVSLTLLAELPELGRVSHKEIAALVGVAPLNRDSGTRRGKRLVYGGRAPVRAALYMAALVASKCNPVIRAFYQRLRTVGKPPKVALVAAMRKLLTILNAMLAAQAPWRPEPA

SEQ ID NO: 294063 - protein, 427 aa, unidentified
MFFEILQCVCGVDVHKEFLQVCILRRDEDPDIFRVFNNFSGVQDLKQRVEEEGCECIACESTGVYWYRLYLSFEGQIRVIVGNAYQIKSIPGRKTDVRDSQWIAELAMNGLINPSRVFPKKDRELRELTRTRESTVHTRTQIKNRIHRTLDSAGIALGKGVNDIFGKSGTHLLWGLLNRGSIEDVITTIPSARVKKKVNTLREILSGSLSDLQIMLIKKNLDLMAHINEHIRALDEQIIARIGDQERIRDVDIACSIPGVSVTTAVTALAEIGDYHDFVNPEKLASWAGLVPSVYQSAGKNCSGKITKHGSEHLRWILVQAAKSAGRTVNTTFRKFFNRITYRKGANTATVALARKILCILWHLLMKNELYVDPLKSAKLTKPRPVQKFSKNSPSDIQKAIDFILDAGFKVIYPDTTLDQNFRRLSR

SEQ ID NO: 294064 - protein, 412 aa, unidentified
MEVVHRRCAGIDISKKDAKVCVRVQGSGRRATTASVTTWGAMSNEIMALREHLVAEKVTCVVMESTGDYWKPFYYLLEDAVNVMLVNPRDARNRPGRKTDVSDAAWPADLGAHGLLRASLVPPPPIRRLRDLTRARTDLNRDRVRQIHRLEKILQDAGIKLSSVATDIMGQSSRAMLEALIEGKTDPAALADLAKRRLRSKIPALTEALTGRFTAHHGYLIRMHLNLIDSYTTALRDLDTKIIDALSPSLAAARDLLCSIPGWSTTVAEVFLAETGGDMTAFPTAGHLASWAGVCPGANESAGRVKSTKTREGNRNLKGALGIAALSATRSRDTYFAAKYRRICAHRGPMKALVAVERAMVVAAHGMLTNGDFYRDPGANYFTARRPGSIKANAIRQLQALGYAVTLEPATA

SEQ ID NO: 294065 - protein, 408 aa, unidentified
MSGVIIGMDPHKRSATIEVMASDETVVGGGRYGTDAAGYAAMLAEVKRWPERTWAVEGCQGIGRPIANRLLAGGEDVVDVPPKLSARTRVFATGPGRKTDATDGHSVALAATRMAGLRRVVDDQQLAVLRILADRRRSLGEDHTRMVSQLHHLLLELIPGGAQKSLSAAQARVLLATVRPRDAAGKARRRVAAELIGDLERIYQRKKDANRELSMLLAATGTTLTGLHGIGPSGAARLLAEVGDVTRFPDKAHFASWNGTAPIDASSGDHVRHRLSRAGNRQINRVLHIMAVVQLRNHTEGRAYYDRKVAAGKTPMEAMRALKRRLSDIVYRQMITDARAAVTGPGGHLGAATGSSAAGLHPSAGTSEKSLPGPASDDLTPGKPAHSPGRSRHSPQAPDRRRRQAQPA

SEQ ID NO: 294066 - protein, 457 aa, unidentified
MKIRLGIDVACRAAHQASCADETGVFAWSGHRFRTDPADLEVLWAKLPAGAEEVMVIIEPTRNAWVPLAAWFRRHGATVVVVPPEQSADLRDYINKHAKSDRLDSKMLARLPMLHPEGLHVEKTIGPGDALKRAVKIRSGLVHRRTTAMQRVDSLLELMGPAWTDALGTDLSLTAFRFLARYADPNTVRRLGHRRLTEFLHRSSRGAWAAERATEILDAAATSIALWGDEFAFDELAADIAAEARLALGLCDEIHTLDKRIGRLYAAADPAGIVRSAPGVGIVSAPQILGRLGDATRFANLAGVRSFSGLVPRQNDSGVAAHAGGPTKAGDACLREALFNAADHARKIDPTLAARYHRLMTAEGKHHTSALCTISTVLLTRIAACLRSDRPYQLRDVDGTPITEPEGRTIVAQRYTIPAATRSARRAITINRHPRRNERAQKGVAERSEAPPVPAPA

SEQ ID NO: 294067 - protein, 408 aa, unidentified
MNHTLCVGIDVAKLSNHVYALNFNRDKLLSVNIPNTQDGANLIETHILKLLDKHHLSKVIVILESTGVYSGHLATYLSASKFLSVFDIKVYLINPKISKNYRKSFADMDKTDPKDAYILADIARVGRTDELTPFKGGQRLALERLTRHRLHIAEKLSNEKVYALNNVFIKFSNFETIFSNNFGSTAVDLLLDYKTIDDIIDSSLEDLSDFVAKSSKNRFDNSLDIAAKIQKAARDSYRLDKVSYDPINTALASSINVIKCYEHEMKDIDKAILRQVAGFNHDHYQILTSIPGIGKVYAAGILAEIVDISQFESNDALAKYAGITWRKNQSGKFTADETYMTKTGNKYLRYFLIQAANMARIHIPEYRDFYHKKYDEVTTHQHKRALALTARKLIRLIYGLLSTNRLYK

SEQ ID NO: 294068 - protein, 281 aa, unidentified
MSLIKVLGIDLGKSTFHLVGHDHSGREQLRRKFNRKQLLQFLVKHEPVTIAMESCGGSHWLARKLVSFGHQVKLIPPQYVKPYVKTNKNDFIDADAIAEAATRPSMRFVSIKTEEAQVIAVIQRIRASYIKERTACMSRIGAILLEFGMSFPRGHSQMKQLFQWLAEHKASISPMLMLELVEHHEYYTHLNTLIQKQDKKLTELVSKDERAQLLKTIPGVGDLTASRCLSDISNAQDFKNGRHMASWLGLVPHQHSTGGKSTLLGISKRGNKSLRTLYQLN

SEQ ID NO: 294069 - protein, 362 aa, unidentified
MRIIGCDLHARQQTLAVLDTATGEVMEKTLTHSGSNVEEFYAALPGPVRVGIEATGTMQWFLSLMEELGIDCQVGHPAKIRAAEPRKQKHDRRDADLILKLLVENRFPSIWRPSKELVDLRALLLHRHQWVRMRTRIQNALQAIALANGLRRGPGLWSQTGQCTIASLPLAPHTAHRRSELQAMYAKFDNDIEKLNQRVQEQAGKRPGATLLMTHPGVGPITALATDVFLGNPKRFADGKTLASYVGIIPSEYSSGGRQRLGGLSKQGNPLLRFLWCEAAAHAVRRDPGLQRFYRRKLVQKGLGKARVAAARKLGIRLWIMLRDQIDYHEFCRRGQMQQNSGDACAGMPGTRYGANSHRPID

SEQ ID NO: 294070 - protein, 411 aa, unidentified
MEIVYGRCSGLDVHKETVVACVLIRDGNEVQKEIRTFRTMTADLLVLHDWLMAYGVTHVAMESTGIYWKPIFNLLEGSFAVLLVNAAHIKTVPGRKTDVKDCEWIAELLSHGLLKGSFIPPEPLRDLRDLTRYRKSLTDERIREVNRLHKLLETANIKLASVATDVMGVSGRAMLEALLSGNTDPQVLADLARGKLRKKLPLLQQALEGRFRPHQRFLLGQILSHLDYLDEAIEILSKEVENRLTPFTEQVKLLDTIPGVDQKVAQAIVAEIGVDMTQFPSHRHLASWAGLCPGNNESAGKRKSGKTRHGDSWLKRTLMEASWAVTRAKETYLNTLYHRVARRRGRKKAAVAVCHTILVMAYHILKNHVPYQELGADYFDLLNATHIKHHFVHRLEGLCFKVTLEPLEAVC

SEQ ID NO: 294071 - protein, 323 aa, unidentified
MRNESTPGARGPVFCGVDTHADSHWLCVLDWRGRKVLSRQFPADAAGYEALAGAIAAAGEPACVAMEGTSSYGAGLTRHLASLGMPVREALSPARTQRRRPGQGKCDEADAERAARAAMSGSKLGTPKSQDGWVDGVRCMLAARSGAVKARTSAINTARSLLTTAPEGLRSRFRGMAGPRLMEELPSVRAEGALGAALGALADLWAAARDAALDMERAIEASLEENCPALLAMYGCGPVSAAKLAVAAGDNPGRLRSEASFAAICGACPIPASSGKTVRHRLNRGGDRQALCTRSRGRGSCATPRPPSTPRGPGRGGSATGRS

SEQ ID NO: 294072 - protein, 341 aa, unidentified
MTEVSIVGVDLAKQAFQLHAAARDGSVVFRRKLSRSKFVEVMAKLPRCVVAMEACATAHHWGRVLGAQGHEVRLIPPVYVKPFIKRQKNDAADAEAIVEAAQRPTMRTVAVKSTDQQSRAMLFRTREMLIGQRTQLANALRGHLAEHGHLVPQGLGNVARFSAIIASAENDLPDLVRDLARLYLDQITHLSERIKTLEARMADEAEKSAVATRLRRMPGIGPVTAMAIETFAPAMANFRRGRDFAAWLGLVPRQHSSGGKQRLGRSSKMGQRDIRRLLIVGAMSVVTWKGRRSSPGSWLARMLARKPRMLVAVALANKMARAIWAMITYERDYREPAAAVF

SEQ ID NO: 294073 - protein, 433 aa, unidentified
MLKINYMSTLFVGIDVSSKTNAVYAMDFEENKYISSSFGNNQPGADQHVTMIAECMHKHKNLDTVLIVLESTSVYSVHISSFLSTSEVLMPYKPYVFCVNPKATSKYRKSYIGMEKTDPTDAYLIADLGRVGRTKKLEPWRGGQFIALKRLTRHRMHLSECITREKTYMVSNLYLKFSELQLLEGDDKPFGSLYGAASSAVLTEFLSPQEIIDMPEEDLLTFLAQKSRNRISDLSKTSELLRKAARDSYRLGKCMYEPLNISLASSFNCIHAYQKEIKLIEQAIEKCINGMNPNALIILQSIPGIGPVWASGILSEIGDITAFHSSDALAKYAGLYWPKGDSGDFTSEDNKMSKSGNPYLRYYLGEAANSVRKHIPEYADFYARKYAEVTKHQHKRALALTSRKFVRLVFGLLVKNQLYTGEKLDAEYNIESN

SEQ ID NO: 294074 - protein, 479 aa, unidentified
MIDDRRLVGIDLGIASDHTVRVLDGRGGEVCRRRARPTVESLAAVETAALAGVAPGTRLEVVIEPTGPAWLPIAVFFTARGHQVFRVSSATAADLRRFLSRHAKSNGIDADTLARLPLLAPASLHPLELATTAETAALDRRVRACDRLTQQGALHQRRIKDLVRQLMPVTPLTGELTKTDLAVLGRWPDPRALLGAGRARLLTVITTVSHGHQGLDRAEQWRAAAAAAVELYAGHPAMAWADLAAEVATEVALLAAARAELAGHAAARAEAYRFTDPARLAASLPGLAEVGAPTVTAIVGRAARFRTGRQFRSFTGLAPRASETGQTDRKGQPMSKAGNRLLRTTLIRAADNARRHDPQLAKIYYVQMVERGAEHLKACCVVAAHLAERLHAVLVRGMPYVVCDTDGTPVDPATAKQIIAEHWTVPREVRARRRSRKPEPGSRAGKAPQHVLAGHDRSDPRRVDRRGDLPRAASCSRPA

SEQ ID NO: 294075 - protein, 391 aa, unidentified
MIYVGIDVAKDKHDCFITSSNGEVLFKAFTISNNQDGFNVLYQRIESVMEDVTKVKVGLEATGHYNYNLLGYLIDKGLTTYVINPLHSNLYRKSLSLRLTKTDKVDARTIAYMLMSDVNLKSYSDTSYHNEELKSLTRYRFDKVKERAKLKTSVSRLVCILFPELEKLVPTLHMASVYALLSEFPGAKHIAGAHLTRLTNLLSDASKGRYGKDTAITFREAARASIGSNVPAKSLELKHTIQLILELGSEIEEIENEIKIIMDEINSPILSIPGINYRMGAMIIAEIGDFSRFDSPDKILAYAGFSPSTYQSGQLDSAYSHIEKRGSKYLRYALYNAAKYVCHWDSTFAGYLAKKRAEGKHYNVAISHSVKKLVRVIYHLVKSNQQYIKVA

SEQ ID NO: 294076 - protein, 345 aa, unidentified
MPIVGGLDIHRKQITFDYLDTETGQVRRGQISPADRLHLRGWLARFAGREDVAFAVEGCAGWRYVAEELAAAGIAAHLAEPAGTAARRGRKRHAKTDKTDARHLRMLLAEGRLPECWIPPGHILECRALLETYHDLRREHTAWVQRIHAVLFHQGAPALGVGTLRTGQGVAALRAAADDCLSPAGQLQVATALEVIEALEARMHVVRHQLTDAARHLTGARVLAARLYGVGPFAALALTCWLAGAGRFSSSRKAVRFAGLDVTVWSSDRKGPPGKLSRQGPPVLRWALYEAGKTHARASAPDHAYYAQVKDRKNSKRAALSEARKILRQAHHILAELGDDALAAA

SEQ ID NO: 294077 - protein, 405 aa, unidentified
MAVVIGVDPHKGSHTAVAVDQAEKVLGELRVRSSPGQVDRLSSWAAQWPERTWAVEGAGGLGYLLAQQLLSAGETVVDVQPKLGSRVRLLATGNVNKNDPNDARSVAIAALRSKGLRPVAAEDHAAVLKLWSKRRRDLGSLRTQVVCRLHSVLCDLVPGGHPRKEMSADQAARLLSELEPLGAVALARYELAMDFLADLRRTDAQMREAKKRLEVAVKASGTTVTEVFGVGPYVATVVGYVGDVSRFADRDRFAAYNGTAPIEVSSGGHKVFRLSRRGNRRLNHAVHMAAVTQVAYRHSEGRAYYDRKLREGKTKKEALRCLKRRISDAIFAHLVADAKRKAEAAKAGPRGQRGNGSVFSVAGSHPERQLFGQATPRPVPTIRPTPTTRGPRAQEPVRKKPRKAS

SEQ ID NO: 294078 - protein, 346 aa, unidentified
MQFYTRQHKFYCGIDLHAKKMYICILDEKGEVREHCNIRTDGNIFLQMITPYRENIVVAAECIFTWYWLADLCQKEGIPFVLGHALYMKAIHGGKTKNDKIDSHKIAVLLRGGMIPMAYVYPEKMRATRDLLRRRNHLMRKRAELFAHIQNTNTQYNLSESFGCIAKPPNRNGIVEQFKNPAVQKSVAVDLEVVRTYDTILTDLERTIIKLANHHDPVSYALLQSIHGVGRILGLVMLYEIEDIGRFPRVQDFASYSRLVKCSHESNGKKYGTNGNKIGNAHLKWAFSEAAVLFLKGNDPAKRYFDRLIHKHGKAKALSILAHKLGRAVYFMLKNKEAFDQKKFLG

SEQ ID NO: 294079 - protein, 394 aa, unidentified
MKLVGIDVGKNSHHFCVMDKETGEFNVTPTSFSNNKEGFDFLINSLKPYSKKSILIGMEDTGHYHVALLKFLLSNGYPVALINPKTTDLTRKMEGGITKNDKLDTITICDVLDTPERKKQYRITKVDRFDLYEQRQLTRHHHNLKEELNVYCNRLQKSIDLVFPEFNTLFSSKYSIVYMNLLKTFGSAEAIASTDIRTIRKCFEIKGRGNRISLTPEKLKECAKNSIGISSEVETIQIKHLVSQITLIKEQIAEIDKKIEEFSITNNSPILSIPGISHFSGTSILAELGDIGNYSKPSQIIKFAGVAPYHYESSQYNAQHTAITKKGSKYLRKTLYQIILPVINNNPVFKKYYLLKISQGKGHRCAQGHCIRKLLRIIYHLLETGQSFDPALLR

SEQ ID NO: 294080 - protein, 312 aa, unidentified
MDTTVIGIDVAKDRLDVCVRPSGESFVVARTGAGIEDLAGRLSKLMPRVVAIEATGGFETVVAAGLAAAGVPVVVVNPAQVRAFAQALGKRAKTDPIDAAVIAHFAEATKAVPRVLPDAMTRLLADLVTRRRQIIDMMIAEGQRERRLTDKRLKKSIARLRKALEKELAEIDGEIDDHMRGSALWVEKENLLASVPGVGPVTARTLIAELPELGSLDRRQIAALAGLAPWTRQSGKWRGKSFIGGGRKTVRNALFMAAITAAHHNPILKPFRDKLVAVGKPKLVAIIAVARKLLTILNAILRDKRPWHPKTA

SEQ ID NO: 294081 - protein, 343 aa, unidentified
MQTVSTIGLDIAKSVFQVHGVDDAGQVVVRRQLKRRYVLTFFQKLPPCLVGIEACASSHHWSRQLKGLGHTVRLMAPAYVKPYVKRQKNDATDAEAICEAVRRPTMRFVETKTLEQQSCLMLHRTRHLIIRQLNAITNALRAHLAEFGIVAPVGRRGIEELLQIVADANDQRVPEVARACLAPLGEQLRVLKAHVLKFDRLITAWHRSNETSGRLDALPGVGPALATALVASVGDPNAFRSGRHFSAWIGLVPRQSSSGGKQRLGSISKQGDRYLRSLFTAGALAVIRYAKIHGAGHRPWLTALLTRRSTKVAAVALANKIARMAWAMMAKGERYREPVALAA

SEQ ID NO: 294082 - protein, 465 aa, unidentified
MRTDERLRRNRKAKKELARRLQSENPGLEVVHPHAAGIDVGNGAHYAAVRPDRDSQPVRRFECFTADLYRLADWFQSCGVKTVAWQSTGVYWIPLYDILEERGFEVYLVNARHTKNLPGRKSDVQESQWLLKLHTYGLLNNSFQPLSKIRTLRTYWRQRLQHVTGAATCVQRMQKALTQMNIQLANVISDLSGVTGQLIVRAIVAGERDSRKLAELSHPRIQASRVEIAKSLEGNWRLELIFVLQQELEMYDTYQRRVAECDQQLQMHLRAFSGTVPLPVKEELPPKKKKKQNKNNPHFHLADELERITGVDLTRIDGIDVIVAQTVISEVGLDMSPWKTEAHFASWLGLCPDNRISGDKVLARGTRHVLNRAATAFRLGASTLLKSQTYLGAQYRRLRSKLGAPKAITAMAHRLARLVYRMLKYGQHYVDKGAQYYEQRNRQQQIEFLRKKAARLGLQLAPAIP

SEQ ID NO: 294083 - protein, 326 aa, unidentified
MEHELHYIGIDTAKEKLDVDVLRPDGRHRTKKFANTTKGHDELVSWLKGHKIDHAHICIEATGTYMEPVAECLYDAGYIVSVINPALGKAFAQSEGLRNKTDTVDARMLAEFCRQKRPAAWEAPHPLERALRALVVRHQALTDMHTQELNRTETAREVQRPSIDAHLLWLEAELKRLEKQIKDLTDDDPDMKHRRKLLESIPGIGEKTSAVLLAYIGLKDRFAHARQFAAFAGLTPRRYESGSSVRGASRLSKAGHVSLRRALYMPAMVATSKTEWGRMFRDRLAANGKKGKVILGAMMRKLAQVTYGVLKSGVPFDASRHNPVAA

SEQ ID NO: 294084 - protein, 412 aa, unidentified
MTQETLSWFAGVDWGSERHHACLLDAQGNVVGEREFPHSGAGLAELGDWLLSIAGEANAVAVAIEVPHGPVVDSLVDRGFVVHAINPKQLDRLRDRFSVAGAKDDRRDAYVLGDGVRTDRRLFRRLHVADPRLIELRAWSRLAEELKEEQRRLSNRVGQQLWRYYPQMQKLTDDLAAPWFLELWTIAPTPAKARQLRKPTVERLLREHRIRRLDADTVLATLREPAIKVADGVAEAASIHLRSLVARLRVVNRELHEAEGQLDKLCTTIGETEAASRDCLRRQDVLILRSMPGIGRINLAALLCEASGPLGSRDYQALRTLCGAAPVTRRSGKSHIVVMRYAAHVRLRNTVYHWARVASQRDSKCRARYAALRRRGHSHGRALRGVADRLLALACVLLQRGTLFDPHFAGCG

SEQ ID NO: 294085 - protein, 355 aa, unidentified
MLNTKYIGMDIHKETISIAVMNAAGKVVMECVIETKANTVLQFIHGLRGDLHVTFEEGTWAAWLYDLLKPHVTEVLVCDPRKNALLKQGSKSDKIDARKLAELLRLNHLKPVYHGEHGVRTLKELARSYLTITQDLTRVRNRLKALYRSWAIPCSGTQVYALRHRSEWLGKITEAGVRRRAEHFYQQFDALRPLRQEVRRDLLTEGRKHKAWKLLRQIPGIGAIRATLLIALIQPPHRFRTKRQLWNYSGLGLETYDSAQYCVVEGQLQRSKKPVTLRGLNKNHNHDLKAIFKGAALEASSGAGPFHDFYEALLAKGRKASMARLTLARKIAVIALIVWKKEVSFDAKHLKQQAA

SEQ ID NO: 294086 - protein, 435 aa, unidentified
MEEVTDEPLYRDRVCGIDIGKAGLVATIRVPSDRDPARRAAETRSFGTTKREVLALADWLRCWQVPAVVMEATSDYWKGPFYRLEAEGFECVLADAKQVKNLPGRPKRDPADSRWLAACFERGAVTACFVATPEFRIIRLYTRYRRDLTEERTREKQRAEKLLESAAIKISSVLTDLHGVTGRDIMGQLIAGQRDPKVLAQLARAAARRKISQLEEALEGAEFFTPAHATLLATVLARIDRLTADIEDLTEVIEQLLAPYEEQLQQAESMPGWARRAAQDAVAETGVDMTRFRTGPHLASWGGRAPQDHQSGKRAGRAKAKKGNKYLGAILGETAVAAGRTQTREGVRHRRLARKRGTAKACVATGNTQLKVYHKLLSTPGMRYQDLGPDYYDRQRDIRRQIAHHVGKLGSLGFEVTLCRLPEPDPDPTGPTKAA

SEQ ID NO: 294087 - protein, 339 aa, unidentified
MELYAGIDLHSSNIYLGILDGKNKRIFGKRLPNCIEKIKMALEPFKKDIADIAVESTYNWYWLVDGLMAEGYPVRLANPAAMKQYDGLKYKDDKTDAFWLAQMLALKILPEGYIYPKEGRPVRDLLRRRLRYVNHRTSHILSFQSLITRNLGIKMSARQIKRLKTEDIHQLFDAPHLILAADSSRAAIEFYKSRIKIMEKQVLPQVECKPEFKLLRTIPGIGLILSQTIMLEVGDIRRFKKVGNYVSYCRCVKSVNISNKKKKGAGNRKSGNRYLSWAYVEAAHHAMRFCPDAHRFYQRKKAQKNGAVATKALAAKLARASYYIMKDRVPYNGEKLFGK

SEQ ID NO: 294088 - protein, 464 aa, unidentified
MANQKLWRNRKERKEWARRLQSEDPGLEVVHPQAAGIDVGNGAHYVAVRPDRDPEPVRRFECFTADLYRLADWLRQCGVKTVAMQSTGVYWIPIYGILEECGFHVYLVNARHTKNLPGRKSDVQESQWLLKLHTYGLLNNSFQPPSQIRVLRTYWRQRGEHVQGAATCIQRMQKALTQMNVQIANVISDVSGLTGQTIIRAMVAGERDPQKLAELSDPRIHASREEVAKSLEGNWRPELLFVLQQEVEMYDTYQRRIAECDQQLQKHLASFVGTVPLQATETELKRKKSKPAKNAPRFELHSELRRITGVDLTRIDGIDVMVAQTLISEVGLDMGRWKTEAHFSSWLGLCPDNSTSGDKVLSRGTRRVANRAATALRMAAVTLMRSRTYLGAQYRRLRTKLGAPKAITAMAHRLARLVYRMLKFGQQYVDKGAEYYEHRYRRQQIEFLKKKASKLGFRITLAQT

SEQ ID NO: 294089 - protein, 341 aa, unidentified
MKQYVGLDISMEETSICVLNQTGGVTFEGCASTNPEAIAKLLRQHAGNAERIVFETGSLSNWLWHQLKALGFPVICLDARHANAALSMRINKSDQNDARGLAEMARMGWYREAAVKGAENWKTRSMLAARNRLVNLRRDIDNQMRGLCKGLGIVLGKAGSTNLGRKVDAVLAEAPDLQDIFAPLLLVQACLTEQIEKFDRLLLAAAKADQTVRRMMTVLGIGPLTALSFVVTIDDPTRFRHSADVGAYLGLTPRRYQSGEMDRTGRISKRGNHQMRTYLFEAANVLLTVVRRGSSLKRWGSKLAKRIGTKKAKVAVARKMAVILHAIWTDGTEFQAEMRTA

SEQ ID NO: 294090 - protein, 416 aa, unidentified
MNAVGIDVSSRKSTVAVLRPLGEVVCLPFDVTHDIAGLASLVEKLKALDGETRVVMEHTGRYYEAVAKALHEAGLFVCAVNPLLIKEYGANSLRRVKTDKADAIKIARYALDNWADLRDFTPMDAIRYDLKTLNRQFQLASKQRTASANNLIALLEQSFPGIRKCFDSPVRSDGTQKWVDFAYSFWHVDCVRKQPFPAFCERYRKWCKRHAYFFKLRNAEEVYALAKSAVVLTPKSKVVKVLVQEAANQLISISRSVEVYRAEMDRLAAMLPEYPVVMAMYGVGKSYGPQLMAEIGDVRRFERKQALIAFAGIDPMPNQSGDKNVRSNKSSKRGSPYLRKTLFNVIRTYLQCAPQDEPVFQFLNRKRAEGKPFYVYMLAAANKFLRRYYAKLRDYFASLDTLQPVDPIPTILKATL

SEQ ID NO: 294091 - protein, 425 aa, unidentified
MRLVYPVCCGVDVHKTFLVATIITTTNSILPKYQQKRFSTYYSGLLDFKQWLLANNCKDVCMESTGKYWVPVWNVLEAASINVVIANPKWVSAVKGNKDDKKDSKWIGDLFRMGLVPPSYIPVRDIRILREFTRYRSKLVSMRSSEKNRFQNAFTVCNLTLDAVASDMFGVSATSIENYLLDTDDVDPNHCVYLLRGSLKKKASDVVEAVKGFNMTAEQKERVRIIQGHFDDIDKRIAQIDYVILRLTADYEAQISLLCTIPGIDRRLAITIISEIGTDMSVFGSSKRLCRWAGLTPGNNESAGKKKSVRISRAGVYLKPALVEAAHAAVKATQKSPYFRIKYERIMKRRGKKRAIIATARMMLTAIFAMLQSGEVFHPCDLLKFDMPDELKRKQTLSSAKDAVKLLVSLGLVPEGSISLDPLAG

SEQ ID NO: 294092 - protein, 346 aa, unidentified
MKTVAAVTTIGLDLAKSVFQVHGIDADGKIVIRQQLKRGRVIAFFKKLPRCLIGIEACASSHYWARELTALSHEVKLMPPAYVKPYVKRQKNDAADAEAICEAVQRPSMRFVPIKSPEAQAGMVLHRTRHLFVRQMTAVGNAIRAHLAEFGIVAPTGRTGLQQLVAIINDIKDDRIPGLVRTCLVALVIQLDALYKQIAILDRRLMGWHRTNETCKRLDAIPGVGPALATALVASVADPKVFRSGRDFSAWIGLVPKQNSSGGREKLGNITKAGDRYLRSLFCAGALAVIRYAQKHGTKHRPWLTKLLERRPARVAAIALANKLARMAWAIMATGETYREPAALAR

SEQ ID NO: 294093 - protein, 353 aa, unidentified
MRIVVALDVHRRQITYKTLDRESGEVRRGRIVPATRGAVREWLEQFAGWEAEFALEGTTGWRFVVEEIERAGQRAHLADPAETAGKRGRKRRAKTDNADCDLQLKLLLAGELPESWIPPAHLLELRTRVRMRKVLIDQRTAWQQRLQAQLFHHGVAAGLKPRTRAGREALAQAELSPAGRELVALALRMLETIDRELAPLDRALRAFARRQPGCRSLIANLYGVGAITATAILAELGDCRRFTSSDDAVRHSGLDVTVHQSDSKRAAGHLSHQGPELLRWALFEAAHQSARRSSPDRDYYLQVAGRIDHNRACLSVARKLCRRAHHILRELGDQALAPVEPEPQAEEAIQAAA

SEQ ID NO: 294094 - protein, 434 aa, unidentified
MNDTKSSYDLIIGLDRSDQKADLHLIDTTTGLARAETVASSPENLRPWLLDLRQRHPKARVALCLEQPAGHLVPFLETYHWITLFPINPISLQKYREAFVTSRARDDGLDAQYLAQLLLHHPDKLKAWKPQDSQTRLLQQRVAHRRAVVDERTALTNRLQALLKAYFPQALHLCGEDLWRPLATAFLLKWPTLMAAQKTQPAALKQFYYLNGSRSQTLIAQRLKLLEQAVAVSDEPALNQSFALRVQLIGRQLQDVVRTIKSYEQQIAQAFDPHPDRQIFASFPGAGPVLAPRLLTAMGADRERFDSATNLQCYTGVAPDTKQSGKMRYVHRRYLCPLFERQSFHEFAKESVLGCRWAAAYYLDQRTKGKSHHTAVRALAFKWQRIIWRCWQDRTPYREETYEAALRKNGSPLVALFDRVELGRSPFKNPAKKS

SEQ ID NO: 294095 - protein, 368 aa, unidentified
MGLGRIVVYKLNFMNKYSVGIDISKNDFHACFSGIDSNQKVKVLRSGTFKNNNNGFVELAKWVKDTASEKNIPVVIIMEATGVYFENCALSLFKNCFNLSVILPNKAKKYIAALGIKTKNDKADAKALSRMGAEQALQLWQPMDDYFYELRALTRLYQTFQENITATKNQLEAAELGMYPSKMIIHSLKKIISETEKQLLLIRETIYKHLASNESIAAKVKCIAEIKGVAALTIAVLAAETNGFLLFENASQLVSYAGYDVVESQSGLRVGKTKISKKGNSRIRRALHMPALNVVRYKVKKFQVFFERNLERHGIKMKSYVAVQKKLLTTIYALWKKGEIFDPEYDSKNTTRDAEAVQSSRPNFAEVG

SEQ ID NO: 294096 - protein, 255 aa, unidentified
MTKDIIGIDISKTTLDVHCLTDSAKAQFSNNKTGYSSLQKWLKGYNLTCIVYEPTGSYHRAFEEAFVQRFPLAKVNPLQARRFAQAHGTRAKTDQVDARMLAVMGQALSVKPQAPTSKEQRNLKELQVARQALIKDRTRALNRLDTLTLAVLKRQTKARITQLKNQLNQIDKVIVELLQNTPNTSRAHSIICSIPGLSRVSAAALLTEMPEIGTLNEKQVASLAGLAPMTRQSGQWRASLDSGAVKLLFREGENT

SEQ ID NO: 294097 - protein, 501 aa, unidentified
MKTKRSKAKIQAERKSRAVPYSEPAQELQVLRPDAGGIDCGAQEHYVAVPPDRVKAGQPTVRSFSAFTEGLDAAVEWLKACRVSTVAMESTGVYWIPLYQKLEAAGIEVYLVNAGHVRHVPGRKSDVQDPQWLRQLHRCGLLNASFRPEDIICQLRSLNRHRDNLVKSSASEIQHMQKALQQMNLHLHHVVSDITGLTGLRIIDAILAGQRDPEQLVKLRDKRVHKSTPQQMQAALVGDYRAEHLFVLNQSLQAYRFYQARIEECDRETEPLLEKLAQQVEAASARLKLDALKAADAQHGVRLPESPHESKASASSLKAKRHRKPRANEPKMELAGLLERICGVDLTRVVGLNVLSVLLIVSEIGVDMSKWRSAKAFCSWLGLCPGNKISGGKVLDSRTRQVVNRVANALRMAAQSAGRTETCLGIFYRRKQAHLGAPKATTATARKLACLVYHLLKYKQPYQEPDLALYQLRLQKAALTKLQRQATALGYTLLATAPAAA

SEQ ID NO: 294098 - protein, 331 aa, unidentified
MKNKQIVGIDVSKNTLDAFIFKANHLFQVTNTPAGFVRLLQESIRISGFSKDSLLFCFENTGCYSKALSVFLQDAGIAFYAIDALDLKRSMGLSRGKSDKKDAKAIAMYAWRRRDELVCSKLPGPLIDQLSALLSHREMLIKQRTALKNANKGHYNTYSDNEFKFLKDSQIRMIKQLSEEIKVTETEILCIINHHAELKTSFDLLVSIKGIGKILAFYLISLTHNFTKFTDPRKFACYAGIAPFEYSSGTSVKGRTKVHPCANKQIKSLLNMAAMSSIQLPGEYQIYYLRRTAEGKNKMSTLNIIRNKLVFRAFAVIKRGSFYVDLHKFAA

SEQ ID NO: 294099 - protein, 354 aa, unidentified
MKRTTKYVAFDVHQATTLASVREESGRVIARSVLPTDPSALTEFVRGMRGARHVTFEEGTQAQWLYELLAPLVDRVIVCDRRGAPRQGNKGDQVDADHLSEQLRRGALRAVYHGSADRATLKELTRTYRNLVEDATRVMLRLKALFRARGIATAGTAVYHPRHRARWLAQLLEDGARFRAAALYAELDVLRTLRPKAKAVMVTEARRDPAWRVLRTIPFLGPVRVALLLATMQTPWRFRTKRHLWAYAGLAVVTRSSADYTLLAGALVRRRRPPMTRGLNRNHNRVLKDVFKGAATAATARPGPLQDFYHGVMARGTREELARLTLTRKLAALTLRLWKTGERYDPTQLTTPAR

SEQ ID NO: 294100 - protein, 315 aa, unidentified
MTITLEKYVGIDVAKDKLDLAVLGEKATSEATNTKKGISALVKKMCQMNPRLIVVEATGGYEEALVLRLFEAGLPVALVSPQRVRQYARARGLLAKTDKLDAQNLAEYGKNIQPRLFVAKSGEGRRLSAIVGRRRQLGDMHKAEKNRLRTAYSEMKSSIQTVIECLEAEMDRMDHEMRKFMKEHADFQEQEKLLRSAKSIGPVTAATLLADLPELGKLDRKQIAALVGVAPMNHDSGKKRGYRKTKGGRPEVRSVLYMSALSAIRYNPTIKAQYEQLVKRGKEKKVAITACMRKMLTILNAMLREQQPFRAVAMV

SEQ ID NO: 294101 - protein, 340 aa, unidentified
MEDVSVIGIDLAKSVFQIHGVDARGEVVVRQRLTRAKLLPFFARLPRCLVGMETCASANYWARELVALGHEVRLMPPQYVKPYVKRSKNDASDAEAICEAVTRPTMRFAGVKSPEQQSVLVLHRTRSILTRQRTQLGNAIRAHLAEFGIVAPVGRQGLDRLMAIIGDESDDRLPQAARACLTMLVDQYRLVLAHLLETDRAIRADSRATELGRRLQEISGVGPLVASALVATVPDPQMFKSGRSLSAWLGLVPRQHSSGGKERLGGITKAGDIYLRRMLFVGAMAVIRHAERHGTRRPWLMKLLSRRHPRVAAIALANKIGRIAWAMMTSGERYREPVAA

SEQ ID NO: 294102 - protein, 314 aa, unidentified
MKIVNEINVGIDTSKTQLDLYVRPMGQFFSVENTTAGAREAIRELKKIQPTRIIIEATGRLELPFVVAAQKAGLSVTIANPLHIRKFAGAIGQLAKTDRLDARIIAHFGDAVKPEPTVLKPEKVCLISDLLARRSQLLEMSTMEKNRLSILPKALHASLNRHLKQLVTEVKKIEKQLDLLINQTPEWQEKKDLLMSVNGVGKILTYTVLSDLPELGLLNRKQIASLVGVAPMNRESGNYKGKRRIRGGRARVRTVLFMATLSAIRSNPKLKRKYLALQDAGKPKKVALVACMRKMLTILNVMMKTGQHWDPKLA

SEQ ID NO: 294103 - protein, 363 aa, unidentified
MNATAALPVVGVDLAKSVFQLAVADGAWHVIEQQRLTRTQFERWFSNRAVGLVVMEACGSAHHWARWLNGLGIEVRLLPAAYIRAYVERNKTASADACALLEAARCAEIIPVRVKSIEQQALQGLHRTRSLWMGTRTSRINALRGFCREFGIVIAQGSRLGVEQIGRVLADPHAPVPTLIRGTMTLLVEEIRLLEVRIAQLERELTTLARQSPACTTLLSIPGVGLLTATAMVAATSGEVSHFRDARHFASWFGLTPKERSSGGTRHLGRISKRGDRYLRMLLTHGARSVLRAASVARHAGRTIDALRHWALAVQGRSNHNKATCALANKLARICYATLRDGEPYGTAQLQKKVTRTAFALPA

SEQ ID NO: 294104 - protein, 390 aa, unidentified
MKAENVTEIETDAVHTTLGAIFLSLELSRSSWLVTSLLPCNGEKMSKRVVKAGDTAGLFDLISQLKSTVRRRTGRDVPMIAIQEAGLDGFWIHRILERDGIESHVVDAASIATSRRKRRAKTDKLDGETLLRALLAYKRGEPRVCAMVVPPSPEQEDRKRNSRERRALIAERIKIVNRVKGLLFSQGIVGFEPLKRDRRTRLEELRTGDGRELPSNLKAEIVRALDRIELVLRQIKDVEAARDEVARNECDPSKVANGMSMLKQLRGVGADFAEVLWSEGLYREFANRRQLASYAGLTPTPWQSGSISREQGVSKAGNPRLRTVMVQLSWFWLLHQPRSALAQWFQERVALDGGRRRKPAIIALARKLLIALWKYVHHGAVIEGAVMKPA

SEQ ID NO: 294105 - protein, 255 aa, unidentified
MNGIGIDVSKRQLDVGMTDGQILKVSNSAAGFAELDAWLRERPTSQIVLEATGGYEQCVLDFLHKAGHPVVRANAFRARKLAQGLGHIAKTDRLDAYALAKMAALVKLPPYQPLEPWQQKLREFVRARRQTMDALAVARQQQQMVTDRELRRLLQANITRLQTLVQRLGNQIAEQVAQQPQLAVLKSMKGVGTGLQAVLASYLPELGRINGKAIASLVGVAPMSHDSGTMRGKRSIHGGRAEIRQVLYMASMSAL

SEQ ID NO: 294106 - protein, 312 aa, unidentified
MLKIVYPICCGIDVHKKFVVATVGKTNKSGVTEYQTKQFSTFTEGLHQLLDWLKSQSCKHVCMESTGKYWHPVFNILEHDCEVVVANPKYVKGIRGKKTDKKDSIWLCDLHKHGLVPGSFIPPLPIRQIRDLTRYRFKLINFKSSEKNRVQNSLTVSNIMISSVVSDTFGVSSMRIINHILDHPDDTDFDVSSMLHGKMKDKTDTIVKSIQGYLTEPQADKMRVCLDHMEGIEKHIAEIESVVLKLAQPYMPQIELILSLPSIKDIFTAIAILGEIGIDMSVFLSDKHLCSWAGLTPQNNESAGKKKSVRVS

SEQ ID NO: 294107 - protein, 326 aa, unidentified
MQGKEVSEQETKVKSNVGIDVSKDWLDVHVLPADERLRVPNTCQGVSQLKRWLRRFDLALVVVEATGKWHRHVQRSLAASAIPVSVVDPFRVRMFSKAQGIFAKTDRLDARVLAMFASMMTPSVRPPAPPALSELAELVTARMRAVEAQTSLKNQRAAATVNFLKRQLDRRIERGDQDIAALDAAIVKRIKADEGLARRYAILTSIPGFGFVTAAILIACLAELGSISAKQSGMLAGLAPIADQSGKREGARVIFGGRPQVRRVLYLAALAGARFNADMRAFYQRLRAAGKPPKAAIIAVARKLVVLANTLISQDRFWQPQGPKYA

SEQ ID NO: 294108 - protein, 381 aa, unidentified
MLYLAIDQHRDQLTINLRNEKGDVILKDQISTKHDDINDFFDNLTRQAGRCRGYMAIVEVCGFNHWLLEKLKEHKCNEIVVIQPDSSSNKKTDKRDANALGELLWNNRKRLQNGERPNGIRRIFPAGQEDAEARQLSNFRQFLITQRTRLINKIKGILNKHNMLQDAPTERYWTNKFRKWLETVELPCIDRLEVDAHLESWKTYDKQIITVETKLVQRTENNKEVAKIAAIPGISAMGAITLLSRIDDIKRFKNPDSLANYFGLTPGCHNSAGKQRLGCITKAGSPVARQVLNFAVIHIVRKDPEMKAWHKKIKTRRGAKIARVAVMRRLATIIWHMLRWGKPYQFRYEAVLPQKKAKAKGKINKGFLRHGNNNPQKKKRL

SEQ ID NO: 294109 - protein, 357 aa, unidentified
MGKSIRKLSSVTRVGLDLAKKVFQVHAVDANGEIVVARKLARGRLIAFFSELPRCVVAMEACSSAHHWGRQLLALGFEVRLIPPAHVKPYVRRNKNDAVDAAAICEAAGRPGQRFVPVRSIENQAELMRHRARELLAGQRTAALNALRGHLAEIGVIAPQGVQHAYDLKRLAVDGFDVYGEVVVPDCVRVALRPLVSQIDALDAAIGAIDNEIAMSVKADETAKRLMTVPGVGPVTASAIVATIQDMGDFASGREFAAFLGLTPRQSSTGGKPRLGRITKMGDRYLRKLLVVGACSTLSHRKGHSDALRRWASGMLERKTVRYKFKLTAVALANKVARIVFVLMTKGGEYDDRPVAA

SEQ ID NO: 294110 - protein, 355 aa, unidentified
MNQEKYIGMDVHQATISVAVMDASGKLIMECLLETKAATIVEFIRGLQGTLSLTFEEGTSAAWLHDLLKPHVSRLVVCDPRKNALLKDGSKSDRIDARKLAELLRTNQLKPVYHGEHGMRTLKELGRSYLTLTQDVTRVMNRIKALYRSRAIACAGATVYASRHRAEWLAKITEPGVRMRAERLYQQLDLLQPLRQAARGDLLVESRKHPAVKLLRQIPSIGPIRSALLVALLQTPNRFRTKRQLWAYSGFAVQTHDSGEYRYVRGKLQRNRERMTVRGLNDNHNRELKNLFKSAAVSASTRPGPLRDFYVARVENGMRPTMARLTLARKIAAISLAIWKKGAEFDAQQFHRQAA

SEQ ID NO: 294111 - protein, 373 aa, unidentified
MKNTTNKTSSTPSLVSDSTPAVISGFTLGLDLGDRAHHVCVLDAAGQIVREASLPNTRPALAQLLADFPKATVALEAGTHSPWISRYLTDLGATVLVANPRKLHAISRNERKCDRRDAQMLARLARVDTALLHPIQHGSAQAQHDLLGLKLRDALVRTRVSLLNAVRFTLKSLGHAVRNPSSESFHKNVLQDIPADCLPVVQPLLTVLAHVTEQIKAMERDLVQRSKQDYPVTQRLQQIAGVGPLTALCFVLKIGDPERFSRGRDVGAYLGLCPRRDQSGGTDKQLRISKCGDGLLRRLLVSAAHYVLGPFGPACALREHGQRLTGTGSAREKKRAVVAVARKLSVLLLSLWKYGPDYEPRNTASPALVLIPA

SEQ ID NO: 294112 - protein, 337 aa, unidentified
MTDVYILAIDLAKRSFQVCATNRGGVVIFNRMVSRSKLELLLKAQAPGIVAMEACATSHYWGRFAQDHRHEVRLIPPIYVKPFVKRQKNDAADAAAIAEAALRPNIHYVSVKSAEHQARAVAFRTHQCFVGQRTQLINALRGHLAEFGVVVAQGPANLKSVTGLLAGDAVDLPDGVKDIARLYLDQIEALTSRIDELTLGLREATKANDEMRRLCTAPGVGPVTAGAIMAFAPDLKTFSSGRNFAAWLGLVPRQRSTGGKTRLGGVSKMGQSDIRKLLIVGAMSRIRWIVRKGVLPDNWLGRMLGRKPRMVAAVALANKMARTIWAMMTREENYRLA

SEQ ID NO: 294113 - protein, 326 aa, unidentified
MKTTTVGLDLAKNVFQVHAIDAAGEVVVRRALRRRQVIPFFERLEPCLIGMEACGTSHYWARELSALGHRVKLMPPAYVTPYVKRGKTDAGDAEAICEAVTRPTMRFVAVKSPEQQAVLALHRLRDLLIRQRTQLVNMIRGQLAEFGIVLAKGIQHALRLVERLLDGEALELPELAAKIMITLAAQVRDLQGRLRDLDKELMAWFRGSEVARRLETIPGIGVITASALAATVTDPHQFTSGRQFAAWLRLTPRANSSGGKERQGRISKMGDRYLRRLLVSGLTSQLQSVRRHPDRHPWTTGLLHRKPAKLVAVAMANKAARTAWAS

SEQ ID NO: 294114 - protein, 427 aa, unidentified
MDRFLLISQQVVTFSSTRNVRNLNMRRAYTMYIVGIDIAKRKHEAAVIDGEGTVIIKPFSFTNNCSGYNRLLAMLTKAKLPLDEVSFAMEATGHYWLALFTRLQKEGFRVQVINPVQTNSIRSFYIRQAKTDPRDALLIAEVIRFGHFSESTLHPENIYELRELCRGRHAIVSMQADVKRKVVALLDQVFPEYETAFTNMFGDTSMAILQTCPTPKELSEMRLEELCHLIEVSSHKRFRMAKAQELQELARNSFGFAMAGDVFSTMIRLYAKHLDFLKQQVREMDRKIAEIMETLDTPITTITGIGLTLGAYILSEIGDISRFSSAAKLAAYAGIDPTMRQSGEYNGVRNRMSKRGSPYLRHAIWLAASSAVLHDPALKLYFQKKRDEGKPYMASVGHACRKMVSIIYAVMRDNKAYTPYIPNEISA

SEQ ID NO: 294115 - protein, 422 aa, unidentified
MERMIERCAGLDVHQASVVACILISERGKRRRKEVRTFGTMTHELEDLRDWLASEGVTHVGMESTGVYWRPVHEVLEEHFTVIVGNARHIKNVPGRKTDVKDAEWIADLVCCGLIRPSFVPPKPLRELRELLRYRRKLMEAQAAERNRLQRLLETANIKLASVASDVLGVSGRAILRALIDNTGTPAEMADLARGRLRRKRDELVLALNGRMDDTHRFLLSMQLRRVEGIETLVEELDQRIAEKLTPYQIEMALLMQIPGVDWVVAAVLISEIGVDMSVFLSVHHLAAWAGVCPGSHESAGKRKNTTARKGNVHLRTVLVAAAMPDVRTKGSYFKDKYHRLRARRGAMRAAVAIAHKILVAAYHMLARRTEYRDLGEAYLDQRDQTRTAANLKRRLERLGYVVSMTPRSPEPEAKPPTAVSS

SEQ ID NO: 294116 - protein, 382 aa, unidentified
MRFYTQQHPFYCGIDLHARTMYLCILDQAGETLLHRNMPATPEALLKAIAPYREQIVLAAACMFTWYWLADLCADHGIPFVLGHALSMKAIHGGKAKNDKIDAHKIAVLLRGGMLPQASVSPAEMRATRDLLRRRMHLARKRGELLAHVHNTNSQYNLPAIGKKIAYKSNRDGVAERFADPAVQKSIAVDLALITYDDALLRDVERTIVNIAKHHDAHTLYLLQTVPGIGKILSLVLLYDIHQIDRFPRVQDFASSCRLVKCAKESAGKRSGTSGTTIGNAHLKWAFSEAAVLFLRDNPAGQKFLTRLEKKHSKGKALTILAHTLARAVYDMLQHKTAFDMPTFLNSSGRGVGKLDASRDNHGMTLTIHALQGTKDCVSERR

SEQ ID NO: 294117 - protein, 345 aa, unidentified
MFVAGIDAHATYSVIAIVSNTGQLVQEPVRIKNTDEERLHELFEPYRPLEVVVETSPAWPWLFDRLEGKGIHFVLAHAKRLRMIAESNYKSDDIDSELLARMRLAGLIPEVHPKAVEQREQAVLLRNRARLVRERTRMVNRIHAQIHNVGLHLERGRLLTQDGRQWVRDVAWPLLGAERRLFIDMQWALIDQIVPMIRTLDRRVEHMGQQIPAVALLETVPGIGPYRALLIATETLPIKRFRTPAHLVSYAGLAPRSSQSGLRPIRHGSIPAGANRWLRGTFVRAVVSHVTHAPDSWLSLSYEQIKGRLGWQVARIATARRLARAVHAMLRTGEVWHDEPVTQLN

SEQ ID NO: 294118 - protein, 367 aa, unidentified
MPNAKITNRGRIHLGLDVAKNSIAVAILRPDEVEPDTEKTAHDEASIRRLIARFDHPRELVACYEAGPTGYELHRLLTSIGVRTDVVAPSLIPKTPGDRVKTDRRDSRRLARLHRAGELTAIRVPSIAEEAIRDLCRARQVVVEDRRRARQRLGSFLLRHNEIYREQTAWTQKHEEWIAHRHFTDQATKTAFAFYRAAVAERDVTLSSITAELAPYFDRSPFADPVHRLAAYRGIDHLGALTIVCEVCDFRRFAHAGAFMGFSGLVPSEYSTGESVSRGHITRAGNVHVRTQLVESAWAYQHAASRGVVLARRQEGLPPETVERSWRAQVRLCGRFRRLGQRKDSRNTVVTAIARELAGFVYAEMTD

SEQ ID NO: 294119 - protein, 351 aa, unidentified
MMIIGCDLHTRFQQIAMLDTGTGEIVERRVEHANGEAQQFYAALAAPARVGIEATGYARWFERLLREQGHELWIGDASAIRAARMRQQKTDARDALLLLDLLVENRFPKIWVSSPAERDLWQLLRHRDKLVRFRTSLRNQLHALAMGEGVCRKKKLWTQRGRQELESLALGEWAGRRRQELLELLDRLDGSLEGLNQAVAQQAAQHPAAVRLMQQPGVGPITGLALALAVGPIQRFANSRKLVSYLGLNPREDSSGGKQRLGSISKQGNSLVRWLLVEAAHTASRKDPELRRVYQRLVHRRGRAVAKVALARKLAVRLYWQLRHAGAQPTPPTRTQGSPASPVVEVTRPTS

SEQ ID NO: 294120 - protein, 335 aa, unidentified
MKSWSVTVLSENSVLKRFVQDPDPDALHKFLTRNYPDADYHSVYEAGFCGFWIHERLTALGIENIVINPSDVPTTAGERIQKTDAVDSAKLARSLRAKELKGIYIPDSTSLEVRSLIRLRSTITKDVTRQKNRIKSHLRFLGYEIPAEYCNRYWPKRFITWLRELDMKTQSGRQSLDFMLDLLDNLRKEKLDMTRALRALSRTEQYEEPLELVMSVPGIGQQVGMALLAEIVDIKRFKDAEHLAKFVGLVPMCHGSGENEGVGDITIRKHAFLRTLIVEAGWQAIRQDPAMTLAFETYCKRMKPSKAIIKIARKLVNRIYFVMKWQTPYVTSVVS

SEQ ID NO: 294121 - protein, 350 aa, unidentified
MIIVGCDYHPGLQQIVFVDTETGELKEQRLEHCEPAERFYRELASRGEKVRLGMEASGHSRWFERLLGELHIELWIGDATVIRAKRGRKPKTDRQDAQHILKLMLKDDFPRIWVPSWENRDLRQLLWHRHRMVQARTRLMNQLQAVALNEGLRCKKRLWREKGRKQLEAIRLAPWASRRREDLLKLLDGLNPTIAELTQAIDQEVEKSAEARRLMTHPGVGPLTALAFVLIIGRAERFQCGKQIAAYLGLVPLEDSSGERRRLGHITKQGSSMLRFLLVEAAQVAARVIPPWRNQYFHLAMRRGRKIAKVALARKLAIRLFWMMRQGWEYEQVKQFGSHAGQLGNRDGVR

SEQ ID NO: 294122 - protein, 392 aa, unidentified
MEPVVGVDVAKGFSVVQAFIKRNEPWRKAISISHEKSGLEHLGRFLSELQAQTEQSPVVILEATGHYHRGLVAYLKCSGWTYFILNPLQAKRAKGTQLRKVKTDAADAWHLAEMYYRGDVTPHRTWEEGHTELQHVTRQHEFVTGMFVQAKLNMRALLDQVFPEYEKVFSNLFSATSLHVLACCLEDQAEDLHGVIQKNAGKSHSKKWAEVKTEQLREVLSRWSEEPRSPAQTTVLRSMVGLVLAFTEQLSVLEKQMDELATGLPEVELVKSIPGIGDKLAAAIVAEIGDVRQFKEAKQLVAFAGLDPGIFSSGKFTATSSRITKRGSKRLRRALYLAVQCGIRGSTNLRIREYYEKKRKEGKPYKVVVIACANKLLHHVYAILSKQQPFQP

SEQ ID NO: 294123 - protein, 338 aa, unidentified
MKAYAGIDLHSSNNFVGIIDENDQRLYSKRLPNRLGNVLLALEPFRDKLEGVVVESTFNWYWLVDGLQDNGYQVHLANPSAIKQYEGLKHTDDKWDSFWLAHMHRLNILPEGYIYPKQHRAVRDQLRRRLLFVRHRTANILSLQSMITRNLGFKMSGNDIKKLKQQDAEGLFDCHNLVFMAKNNIMVIEFLKKIINDIEKKVKSQVKLRKEFEMLLTIQGIGDILGLTIMLEVGDINRFEKVGNYSSYSRCVSSNKFSNGKRKGENNKKNGNKYLAWAYVEAANFARRHCLKADRFYQRKKAKTNGIVAIKALSNKICRASYYVMRDQVAFDEDNLFR

SEQ ID NO: 294124 - protein, 339 aa, unidentified
MGLYTGFDLHSTNTFVGIIDENGERLWKKKLRNDPSLISETLRPFKKDIEGIVVESTYNWYWLVDLMMEEGYQVHLANPSRVQQYSGLKHGDDEDDAFWLAEMLRLNILPEGYIYPKEQRPLRDLLRKRGHLVRLRTSLILGLQNILARNLGAKMNTHHLKSLKTDHVTPLLKGNDDLSLAGKVSKDAIDSLTRQIQAIEVAVEKKIDIKKPYDLLLSLPGVGRVLGLTIMMETGPIERFKDVGNYVSYCRKVPAARFSNDKKKGTNNRKNGNKYLSWAYGEAAELARRFDPQAKAYYDRKLRRTNAPIAHSALAHKLARAAYYIMRDGVPFMPERTFA

SEQ ID NO: 294125 - protein, 397 aa, unidentified
MIAIGIDVSKSKSTIAILNGDGTIRVKPFDVHHVADELQALVDYIKRISEPSTILMEPTSHYHYPLLKAFQEAELPVCLINPYQMKKYGDTELRKAKTDKRDALRIAQYALEKSYSLVPYTPQDQKYEDLRFLSRQYGQRISTLTVAKIQLLSLLDETMPGITTILPLKSRDPDNCVLLRFIKRFKSFDVIRKMGKTRFLDSYQVLVKKTKDRFAGAKGLAIYELVLNSITTRGENPLTAMSQDQCVDLVSTSQKAADEINLQMRIIAETIPEYKILRSMAGVGDRLGPIILGEIGDIRRFHSGKALNAYAGNDAPPYQSGQFESRNRHISKRGNPALRKACFEVMQALKLTRPQDDPVYLFMLKKEQEGKPYNVAKMAAVNKFLRIYYARAMELYK

SEQ ID NO: 294126 - protein, 342 aa, unidentified
MESAVTMGLDLGKSVFQVHGVDAGGAVVVQRRLTRGKLLHFFGKQAPCLVGMEACAAAHHWGRELRKLGHRVRLIPPRYVKPYVKRQKNDAADAEAICEAVTRPNMRFVEIKTCEQQGTLVLHRVRLMLMRQRVQLSNAIRGHMAEYGLVAPVGRNGLQRLIAILGNPDDERVPAVARASLAQLVCQFGLLNDQVLENDRRVRASARSTELGCRLMEVPGVGPVLASAMVATVPDPAAFKSGRNLAAWIGLVPRQNSSGGKEKLGGITKQGDRYLRQLLVAGALAVIRYAQRHGTKRPWLVQLLSRRTPKIAAVALANKMARMIWAMMMTGERYREPTVAAA

SEQ ID NO: 294127 - protein, 344 aa, unidentified
MAMHYIGADVDCNTTALAVRCGRKIVAEYRVPTSIPALAAALDRISGPRHLTIEEGSMADWLYRNLRGRVEEMTVFDPRRNRLIVGDGDKTNAIDAKKLAELQQGGYTRAVYHGATQERLELKQWVGLYHDRVKEAVRQVNKIRARARMHGARLPAGFLKRPKTRGAWLKGSCPAAVAGQLEVLLAGYDSTAAQARRCRAELARRGAGEEVLARWQAVPGIGLIRGVTFLAYLDTPWRFAHRSKRWKYCGVGLERASTGTDRHGRDKPGRRSVCQACNHRLKDVVLGAALSAVAQGHNKYRLLYDTLIQEGVHDGNARRAVARKLIDTLVGMWKTGSAYMPELA

SEQ ID NO: 294128 - protein, 352 aa, unidentified
MITIGVDAHKHVHVALALNDAGREVGDWRGPNSEQGWADLARWAASLADERQWGIEGAWNYGRGLAQHLVALGETVFDINPRWTAVRRRSARHPGKTDRLDASAVALLVRQEPESLPRVLSEDQTSLLDLLTTERDSAVAEATRLRNQIHALLMQIDPRYQEHIPSLTSRAGLKALLAYESPKPDSLQSERADAVRRLARRLQLASSEADELEKRIKGLAKASFFPMTTICGIDLLTAGALAAILGPGNRFATDAQLAAYSAAAPLETSSAGLVRHRLNRGGNRHLNSILYMIVLTQAHYLPEARAYIERRLSQGKTKREAHRALKRFVIRAIWHRWQECMAVPQTSFGVAA

SEQ ID NO: 294129 - protein, 407 aa, unidentified
MHIFGIDISKASAFVAHYEDETFVKELDLFYDSKNLLQFYTYLKCFEDKLLIFEATGVYSTIIRQFCINHNIKHICINPLEAHFKMKSLRRYKTDKVDAHKLAHLGFTLDEKYIIHHTSDEDIERKSYTRLIMRIEDDLTKLKTRLKERLSQVFPSLQDLLKHNYNIPNLRLINLFAHPQFVLNLTKQQLKKLIKQHNNCQKTHLENLTTKLVEWAQNTYITVHEEHPLVEEIKDITEDLIRLIGRKKNYVAKLKKLCADQKLYHVLLSINGVGEQNAALLTGELGNIDRFETNKQLNAFVGIDIVRYESGTIYKKDRINRRGSSVARKILYQMVELFIMNQHRQQNHICDYYYKLKEPPYNKHHKVAMIACVNKLIKVMHYLNTTNSRYDFERATRHLKANSIKPS

SEQ ID NO: 294130 - protein, 372 aa, unidentified
MISIIYVGMDVHTTNYTLCCYSMEDDRFFAEVQVEPDAKNILKYLARIEKQQSRDCRIVCGYEAGCLGYSLYHQLHAHGIDCVILAPTTMMTKPGKRIKTDRRDARLISKCLAFHTYSPVYIPTEVDDAVKEYIRMRDDANSALARVKQQIIAFCIRHGKIHDGKSYWTNKHLEWLSSLDLGNKILSEVLQEYLIRYYQLREQVDMYDMRINELAQAEPYRQKVEKLGCFRGIAAHTALSFCVEVGDFRRFATAQQFASYLGLVPGECSSGDKQQYTGITKAGNSHLRKLLVETAQVFGRSATKSGKSAALKERQAKCDSLTVAYADKANARLKKKYFKIAMRSKVNIAKTAVAREMACFIWGMMTDNISCA

SEQ ID NO: 294131 - protein, 367 aa, unidentified
MEKLSTAMAGKSEKVEGQRLTVGLDLGDRSSWYCVLNEAGEVVVERKLATTPKAMKEVLGGMPRSRIALETGMHSPWVSRLWSELGQEVIVAHARQVRLIGESRRKDDRFDARTLARLARIDPELLGPVQHRSRKAQADLTVIRARAGLVRARTSLINTARGLTKSYGERLRGCSPRKVNRELAEGLSPELQHALQPLLDEIESLSERIREYNERVQQIAQESYPEVARLEQVKGVGTLIALTYVLTLEDPGRFRKSRDVGCYVGLQPGRRNSGQSEPQLHISKEGDPYLRTMMVQSAHHILGPFGADSDLRRWGLKLAERGGKNGKKRAVIAVARKLAVLLHRLWVSGEGYEALRQSNRDMLSAAA

SEQ ID NO: 294132 - protein, 355 aa, unidentified
MKQGRQLDFSGQNIFAGIDVHKSSWKVCIRTEQMELRTFSQEPSAKTLSNHLKENYPSAIYKVVYEAGFCGFGHQREFAAAGIDCIIVHPADVPTTDKDKHRKSDTVDCRKLGKSLSKGELTAIFVPGIEQQDDRGVIRVYQQMVKDQTRFKNRIKSWLAFQGITVPGGDVCKHWSNNFTLWLREIPLSASARINLDILIQGYLQARAMVLSAIRQVRALSREPRYQRMIKLVRTAPGIGEITALLIITEIGDIGRFQTLDQLCDYIGFVPTVHGSGDKETVLGLTHRGHHQLREKLIEASWTAVRLDPALTMAYNDYCKRMKKNRAIIKIAKKLLNRVRYVLKNQTGYVAAVCG

SEQ ID NO: 294133 - protein, 463 aa, unidentified
MKAEIFLGQDPVYKTSLQFSDAGMRPGTRMGICTLEDYYLPVSGQAIVMETQRNKVCGADIHKKFLVATILSRDNTKITERFGMTLDDLLKFKSWVIENQCEQVAVESTGVYWIPLHAVLDGSVDLIVANAYKIKHIPGRKSDLIDSEWLAELCLNGMIEPSRIFPKEDRELRRLTRAREGYVNDMTREKNRIHHALESCGIKLSSVLADVFGKSGRYLLNCLLNGVELEEMIKGIPVKSIRQKADLIREAVRGSLETTQIILIRGGLEQIGSIQRRIDELDSEIKNRIASRGEDLRIAMSIPGIGFTSAVTILAEIGNFKDFSRAEQLAAWAGLVPAVYQSADKLVTGSITKHGSRHIRWILVEVAQAIARSNRSKLKRFFRRVQAKKGYNVAAVALARKVLCILFHLLMNREVYQEDDVIKTKSVDIDTVLLSKKIGFEEMIRVLAQAGYEIRKTNLDAGG

SEQ ID NO: 294134 - protein, 358 aa, unidentified
MSKRSGKLAEVKSLALSQEDQVVVALDVHKRSVYAALRRNGREECTWVMPMRVESVVAALQPFAGALKKVVYEAGPTGYGLARAFQQAGLPISVIAPGKTPQPANPGSKSDRLDCRQLAEYAEKGLLKPVAIPTQQEEDDRQMVRLRSQLTDKQRRVKQQIKSLLLQQGVPEPEGLDHWTQAGMNALKALRLRRAIRYALDTLVTELELLMALRKQTEQGIERLVAQKRHRRDHEILRSHPGVGPISASAFALEVYQPERFERSEELASYVGLAPRVRQSGQTRREGPLIKAGREKLRALLIEASWRWIRDDARARRVYRRLVCNTGSGKKAIVAMARRMAVNLWCMLLRQEVYRRAA

SEQ ID NO: 294135 - protein, 359 aa, unidentified
MEQKRFVGIDLGKRTYEMKVIGSNGKVTGTNGQTNPSGRKSLYRKLLATDRVAIEVCSLAMIMAKELQKEVGCEVVLLNPSQLALIYRSLKKNDKEDALKLARLVQKYTNEELPKVELPTEHEENLRQILTEIRQLKHDRTKEINRLHAIFVECGITEIKRKDLATIDNRNNCIKMLKGIALSQAERILKKMELIESQIQDVEVLLDKEIDGDKNIGKLTEIPGVGKQLASAYVAFMGDGSRFSNASKIGAAIGLVPRLDMSSTVCKLGHITKCGNKNLRTLLILAAWSHIRSKEGGALKDKFLYMTRFQSKEKKIAIVAVARKLAELMYILLKNDTSYEKRPSPTISQLVDEALEKAS

SEQ ID NO: 294136 - protein, 395 aa, unidentified
MQRDAKEVMEEVLGKLTAKLDAPTVCTRAKEDRRGNTVGPNRDRLTVGVDLGERWRQYCILGLAGETLAEGQLRTTQEDVREFFQALTAARVVLEVGTHSAWVQDVIAERGHEVLVANPRLMEGSKGRKRKSDRIDAHKLARLGRVDAQSLYPIRHRSREVRQDLVVLRARDGLVSVRTELINTARGLVKSMGTRLPRCSSPSFAQKVKDAIPVEVREALLPLVQLTEAVNDCIARYDQKIEELGQKKYGHTTLLRQVKGVGPITSLAYVLTLEDPQRFSSSREVGPYLGLVPKQEDSGDSQPQLGISKTGDRMLRRLLVGSSQYMLGAFGPDTDLRRYGLRLCERGGKNAKKRAVVAVARKLAVLLHHLWVTGDVYEPLHPSGAETRTAQAMAA

SEQ ID NO: 294137 - protein, 412 aa, unidentified
MLFIGDDWAEGHHDVVAQDDAGKTLARRRLPEGADGIARFHELVASCLGEDAEPDPARVIVVIETDRGPWVKALAAAGYRVYPANPRQAARHKETVANSGKKDDFFDAGCLADMGRTRRHQMRELAADSDIAEAVKIAARAHQKLVWERTRHLLRMRSALREYFPAALEAYADLTLAGKDALELLAKAPDPESAARLTVTQITAALRRAGRRGDLAQRARDIQAALRAPHLAQPDVIAEAYAASVQAAAAVITALNEQVKIMEAKVSGLFRRHPDAGLYLSQPGIGDITGARILGEFGDAPRRYATAKARRNYAGTSPLTIQSGKKKTVHARYIRNRHLIDALHAQALSALSVSPGARAYYDELRAHDAGHDDALRRVASRMVGILHGCLKTGRGYDEATAWSHRAETPQAA

SEQ ID NO: 294138 - protein, 495 aa, unidentified
MGCCGLDSGDAVSAIPFRNVTNCAAQPFRSYQQEVMMNRNRSKSKVARTMPLVNPNAAAIDIGATMHMAAVGADRAPEPIRSFGTFTADLYRLVDWFTECGVETVVMESTSVYWIPIFELLDERGFTVFLVNARDAKHVPGRKTDVSDAQWLQRLHSFGLLRASFRPKGQIAELRSYVRQRERLLEYAASHIQHMQKALTEMNVQLHHVVADITGATGLRIIRAILAGERAPEVLASLRDFRCQASAETIAKALTGNYRSEHLFALEQALTLYDTYHEKTSACDVRIEAVLKELSIHRGRGHGAVPPPRRRHRTDQANALAFDVRAALFALLGRDITVINGLGAYLSLKLIAECGDDLSSWPSAKHFTSWLGLAPCHKISGGKMLSSRTRRSGGRAAALLRLAAITVGRTDTALGAFYRRLSSRIGKAKAVTATARKIAVLFYNAVRHGMEYLDPGASSYETRYRTRVVNNLHRRAKAFGFVLQPIEPEAGAAVS

SEQ ID NO: 294139 - protein, 370 aa, unidentified
MSDLSKVFVGLDVHKDSISIGVAQAGQQPARFVGKIVHDVPKLLKQLERIAQAADILIVYEAGPTGYGLQRALTARGYTGQIIAPSLIPRRPGERVKTDRRDCLRLAELARAGELKAIWIPQPEDEAIRNLARAREDAVNLRTQARHQLKAFLLRGGVAYSGKTTWTKTHARWLATLSFAHASDQIAFTEYCQAVSSADERVQRLTSALSQAIAGWRFESVVRALQALRGIDEVAAIGLVAEIGDIGRFAHPRQLMGYLGLVPSEASSGDRVRKGAITKAGNAHARRLLTEAAWNYRFTPRLGYRAQRRQEGLSESIRAHAWKAQLRLTARFAKLRARNVQINKICVAVARELAGFIWAIARTTAQPATK

SEQ ID NO: 294140 - protein, 341 aa, unidentified
MNKTSIIGIDLAKSVFQAHGMTSSGKQTFARQLKRAEVAKFIAKQPKCIIGIEACSGSHYWAKLFKQYGHDVKIIPPSYVKAYVRVNKNDKRDAAAIAEAASREQAPVVAVKTTEQLDLQALHRVREDSVNNRTRTGNRIRGLLAEQGIVVKRGHAATRYEVALILEDASNGLSCSLREIIADLREEWLRCDDRVDYYTSRIEKIARSDARCKRLMTIPGVGPVISTLLVAYAGNGQSYRGSRDLAASLGLVPAQHSSGGKDVLLGISKRGNRQLRKQLVHGARAAYRSLEKCPESSRLGLWAQSLRASGKHVNKIVVAIANKLARIAWSCLVNERDYKAL

SEQ ID NO: 294141 - protein, 343 aa, unidentified
MSNLTTNFSHTVGIDIAKSVFQIHACDTQTGEIVDRQLRREQVLEHFANRAPCLIGMESCGGSQYWARKLVELGHTVRLMDGKLVKPFVSRNKSDKADAEGIWVALTQNVRCVAVKGKMERDIQTLLTMRSRLVSHRTACVNHVRGLLMEYGQVIPKSLPRFESTVDECINALEGDAAPLVIETFRSIVKQIRESSEQIVQLTKEIRKLAKQTRHGDNLESVPGVGVVTMAYMCVLLADPGIFSSARQFAAYLGLVPMHVGSGGKTMNTHIPCRCNKALRALLIECAHSVARMRNPSPWVKGILEKKPGKVALIAIANRIARQCWAVAKNNQPWRNIPQATAA

SEQ ID NO: 294142 - protein, 337 aa, unidentified
MSYLGIDLHSNSLTVCYRTQQGKERLCTFALKDLDAFGKTLRKRDRVAVEATGNTRWFVEQIRRRVKEVIVVDPNKFEVITKSVNKTDKHDAKTLAYFLSKDMLPQARIKDEQTAQLHSLAETRDKLVKQRTALVNKIHNVLNSHGLKWRKETLTQEKGLKSIAAREWKPIVRVELEVLADQIRSLNKNIKTLDQQMIDNGQKLKGHKNLASIKGIGEKSATVLLSVIGNVKDFADENKLAAYFGIVPRVSNSNETVHHGRITKRGSKLGRTTLVQCTLIAIRYSPYLRRFYDRIKLRRGSGKAIIATSRKFLGIIYNTLINDWIFEDFPNFILAKT

SEQ ID NO: 294143 - protein, 433 aa, unidentified
MPTNHPYDLLIGLDRSDRTADLHLIDTRTGKVQKQTVATSPEALHDWLAGLRQDHPQDRVALCLEQPAANLIVFLETYSWLTLYPINPITLQKFREAFVTSRAKDDGKDAQYLAELLLSHHDKLKAWQPDDSQTRQLQQLVLHRRAVVDQRTGLTNRLKALLKQYFPQALDLCGEDLWRPLATAFLLKWPTLQSLKKARKESLKQFYYLQGSRSQTLIEQRLERIDKAVPLTDELALLQSYTLRVQLLCKELQLLLKTLQQFDQQIAKVFQQHTDRPIFEAFPGAGPVLAPRLLASMGSERERFAQPENLQSFSGVAPVTKQSGGKCSIHRRYLCPKFLKQSFHEYAKESILHSRWAAAYYGQQRNKGCGHHTAVRALAYKWQRIIWKCWQTRTIYKEAIYEAALKKNKSPLIGRLDQIELGKSPVKSRAKKS

SEQ ID NO: 294144 - protein, 398 aa, unidentified
MTESSDYESVQVFIGVDVGKDTHHAVAINRSGKRLFDKALPNDENKLRSLISDLKQHGQILLVVDQPATIGALPVAVARSEGVLVGYLPGLAMRRIADLHAGEAKTDARDAAIIAEAARTLPHALRTLKLADEQIAELSMLCGFDDDLAAQTTQASNRIRGLLTQIHPALERVLGPRLDHPAVLDLLQRYPSPEKLASLGEKKLAAQLCKLAPRLGKRLAADIAQALAEQTVVVPGTNAAAVVLPRLALQLITLRKQRDEVALAVEQRVLAHPIYPVLTSMPGVGVRTAARLLTEVACRAFASVAHLAAYAGLAPVTRRSGSSIRGEHPSRRGNKALKRALFLSAFAALRDPLSRAYYTRKMSQGKRHNQALIALARRRCDVLFAMMHDETFYTPQAS

SEQ ID NO: 294145 - protein, 382 aa, unidentified
MQVYTGIDWSESKHDVLFMNEAGAVVTYFVIPHTPDGFRHFDDTRKKLGVSTAECLVGLETAHNLVIDFLWSRNYTQVYVIPPNVTKSCQGRYRQSGAYTDKSAAFLLADLLRTDKQRLQPWHPDLPLTQQMRARVSFLLYLTRTAVRLSNRLRAVLLRYYPAAVNVFSSLDGVVTLEFIRTYPTPQAAAALSRDDFEAFARQHGYIQVKKLPACFARLQTPQPLAAPAVIESYRMEAVSLATLLLNTVRTKKTTYKELGKLFVQHPDHEIFASLPGVGALLAPALLIKFGDDRDRFPSPASVQALAGTCPVTKQSGKYKYVQFRKACDRDFRYISQQWALRSLDVSVWANTYLQRARSRGHSKSHALRCLANRWLAVAWKL

SEQ ID NO: 294146 - protein, 358 aa, unidentified
MSIVAHLYNFFIGVDTHARNHVYTIITNTGLLVATRSFPASRAGIKRALTWVGRRTDGDLDTLWVVEGTASYGAVLTGHITADGYSVVEAGRMDAKARYGVGKSDELDSYRIAKSVLALHTDQLRWPRQGEGVRQGLRVLLAARDAMSKERTRMINSLTALVRTVDLGIDARNSLTDAQFVEISKWRSRKEDIGLATSRDEAVRLAKRVLDLDDDLQDNHDKLAELVEASPAAVLLAEPGIGTFTAAVFFTAWSHPGRVRNAAAFAALAGANPIPASSGNTHRHRLNRGGDRQLNRALHTVITNRMIHDETTRAYVAQRFGEDPTKKSKRELKRKLKWYLARRVFKILNGLETIPTPA

SEQ ID NO: 294147 - protein, 345 aa, unidentified
MQPMYYIGLDVHKKKISYCVKDSSGKIYAEGWIPATRFALDRWMKTLPQPWSAALEATMFSGWIYDHLKPQATELKVAHPLMLRAIAAAKKKNDRIDANKICDCLRCDFLPECYMAPTAIRERRRTLRYRNLLVRQMVQMKIKIGTLLMEAGVSYNKQQLHKVGYFRELLTSNPDINEGLRPLLRLCRETVVRLSKLESALVRSLERDQFLVERVERLMSIPTIGPITALTWALEVGDVQRFSSIKKAISYCGLCGAEKSSGNTVQRTPLSKQRNKHLQTTLIEAAKMAPRYSPTLALLYDREKQKGNANRATLAVARKLVAYLMVVDRGQRNFQVLETSSSVAA

SEQ ID NO: 294148 - protein, 362 aa, unidentified
MRIIGCDLHARQQTVAMLDTATGEVVNRTLTHEGNNVREFYSTLPRPVRVGIEATGSMHWFVNLMEELGIECRVGHPAEIRAAEPRKQKHDRRDADLILKLLTEDRFPAIWLPSKELQDLRSLLRHRHQWVRMRTRIQNALQSIALANGLRRGPTLWSHDGQNMIASLPLAPHTAYRRSELQAMYEKFAAEIEKLNQRVEEQACGRPGARLLMTHPGVGPVTALATDVFLGDPARFADSKALASYVGMIPREYSSGGRQRLGGLSKQGNPLLRFLWGEAGAHAVRRDPDLQRFYRRKLVQKGLGKASVAVARKLGIRLWIMLRDQIEYNEFCRRGQKQQKSSGACAGMPETPYGAKSHRPID

SEQ ID NO: 294149 - protein, 313 aa, unidentified
MAQNTPSVGIDVCKARLDVAVYPPEEAFSVSNDAAGWRELCHRLRALGARAIGLEASGGYERGAIRALLAAGLPVRSVNAWKLRQFAKAAGHLAKNDRTDARVIAQFVATLPTRPVRLDPAREQLAELVNARRQAVDQKLLLGNQLEHLRDDALRRMAMRRIRALGADILLLDRRIVQAIQATPAFVARWRLLCSVPGVGPVLAATLLALLPELGDIPNRAIGALVGVVPYDFDSGKMRGLRCIFGGRAAVRGVLFMAAQVAAMHNPVLHACRERLRAAGKPPKVAIVAVMRKLLTILNAMLRDGREWQPSGG

SEQ ID NO: 294150 - protein, 369 aa, unidentified
MEHLRFVGLDIHKGRISITVAESGRSGAVEYLGEIANDPDAISKLCDRLGRPGKLLAFCYEAGPCGYGVYRQLTSLGHRCDVVAPSLIPMKPGNRVKTDRRDATMLARLHRAGELTPVWVPDADHEAMRDLIRLRSVVRQIVTRARQHLQGFLLRHGRKHGRGTAWRMAYRRWLSTLAFEHPAQQIVFQDYVDAVMDAERRLQGVEEQIFSLLPEWNRRPVVDALQAMRGIALINAVVLVTEVGDFTRFSNPRQLMAYFGLVPGEQSSGETIRRGGITKTGNTHARRALVESAWAYRMKACIGRHKVDRIEALPKVVRDIGWKAQVRLCARYRRLSARGKTPNVVNVAIAREMVGCSATIWMRTARQSG

SEQ ID NO: 294151 - protein, 369 aa, unidentified
MNKFSKYVGLDVHQETIAVAVADTAGEVRYMGEIVNTPEAIAKVVGQLKRGTGRLAFCYEAGPCGYTICRQLRQLKLDCQVVAPSLIPKKPGERVKTDRRDALSLARLHRAGELSPVWIPDEAQEALRDLTRAREDMKHLQRQAKQRLLSFLSRHGHRYTGRSRWTQAHWRWLEGIKFARPEQQIVLQEYIDTVQACGGRVASLDREVETAAHASAVWPVIEALMALRGIGLLAAVTVVAELGDLARFSGAPQLMAYLGLVPSEHSSGKRERRGGITKTGNGHVRRVLIEAAWTYRHAARKTAILQRRAERTPPEVQEIAWSAQKRLCQRFRNLMARGKLKNQVCTAIARELVGFIWAIGQHVIPLSRA

SEQ ID NO: 294152 - protein, 396 aa, unidentified
MESLIVGADVSKESFSAAGLGGTGTRCFSVDCSMDSDGFSKFLKAIRSQQPDLSAVVVGMESTGCYHINLFSYLTSQGIRAVVINPLLISNFAKLSLRKTKTDKKDALTIAQFLLAHKDKISQMSVSQDMQDMRDLARERESLSHLISATKTEIKRVLQTTFPELERLCGVYSGTMLEFLKEFPSARLISLAKPQRIAQALEPRGQGNRISAFTADDVIKLAKNSVGTVSPAKETILRGKISTLLHLEARRDELTDMLRDYCNSLLVDDLEIVTSVEGISDGTGTTFLAELGKIDNYETHKHLIAYAGIDPTVYQSGKYQGKSKISKRGNKHLRHVLWLMTVSVILHNENFRAYYKKKKQAGMPYKKAVMATMHKLIRMLFAMLSQRKRYAVSPVN

SEQ ID NO: 294153 - protein, 399 aa, unidentified
MEQFIGCDAHKKYSVFVTVDERGEASPAIRVGHDREQYRQFLEGLPAGSQIALEAGEHYYWMVDDMEAAGHHPRLAHPLEAKKRMGKTSKKTDKIDANGLGILLRNGTLPEVWIPPALLRDQRESLRLRMFLVQQRTRLKNRIQGTLARYNVEIGGVSDLFGVEGRLRLGKRLGELPEHTRQSVEVELVAVDFLEVQLEDIEKRLEALMKVTAEADLLKTLPYVGRILSMVMTLEIGKVERFPTAAHLASYAGLVPRVHSSGGHTRLGQICGDVNQYLKWAFIEAGNLVVIHQKHLAGQHVVRLYQRIKRKKNHQKAVVAVARHLAEAAYWILKKQEVYRDPQTKPKAPVKAQAANSLFGAGVSAEPYVAHAGPSAATSVPGIRVEVQPGTSVGGKRCA

SEQ ID NO: 294154 - protein, 402 aa, unidentified
MNCVGIDVSKGKSMIAVMRPFGEVVVSPFEVRHTANELSELAGLLKSLDGETRVVMESTGNYHAPVAWLLHDAGLYVSVVNAMLVHDYGNNSLRRAKTDKKDAVKLANYGLDHWLTLPRYIPEEDTRLMLKICYRQYQQYSKVQTMLKNNLISLLDTTFPDANRLFTSPPRADGSEKWVDFVATFWHCECVCGRSEKAFTTQYQKWCRKHGYNFSEDKALDIYASACRHFGVIPKTDTAKLLVEQAISQLQTTSSALAALKQEMQSLAASLPEYPVVMGMFGVGPTLGPQLIAEIGDVRRFHSKKALVAFAGIDAPPYQSGQIDVRSRSISKRGSASLRRTLFLVMGVLLQCAPMDEPVYQFMNKKRSEGKPYRVYMMASANKFLRIYYASVKAYLDSLEHD

SEQ ID NO: 294155 - protein, 365 aa, unidentified
MKKGSTATATSKRNLDQKLTIGLDLGDRSSWYCVLDEAGEVIDEQKLGTTPKAMKEVFATMPRSRIALETGMHSPWVSRLLSELGHEVIVAHARNVRLIGESRRKDDRFDARTLARLARIDPQLLSPVKHRSAQAQADLTVIRARASLVRARTALVNAARGLTKSYGERLRGCNPRNLDTEKAQSLSPELQAALGPLLQALESLSERIAEYNQQIEGIAQHSYPQTALLKQIKGVGTLIALTYILTLEDPHRFRKSRDAGCYVGLQPGRRNSGQSEPQMHISKEGDPYLRTLLVQGAHHILGPFGADSDLRRWGLKLAERGGKAGKKRAIIATARKLAVLLHRLWISGEVYEPLRNTKRTMSAAA

SEQ ID NO: 294156 - protein, 423 aa, unidentified
MMKLKYSICCGLDVHKNVIVATIVTTNKDGISEYLQKSFSTINSDIQRFHNWLIENNCYHVCMESTGKYWIPIFNYLENDIDVCLTHPKYVKAIKGKKTDKKDSKWIADLYKFDLVRCSFIPPKDFRQLRELSRYRFKLVCMKSSEKNRIQNCMTISNVGIASVLSDPFGKTATEIISYLLEHTADSMDEKAVRKLIKKGAKSKSDEIIEAIKGYTIETDQAKKLELARGHLEYLDDMITQTEVELYVRIKPYYKFVEFVSTMPGMTELSSTIVLAETGVDMDIFDDAKHLCSWCGLSPANNESAGKKKSVRIAKAGDYLKPMMVQCALAAIKSKKQPYFAIKYGRIKKRRGHKKAIIAIARMMMVCIYHMVSEKKPFTPTDYEELMDPQNHVESVVLNENNVFAYLESLGYDSSKLVKRNDN

SEQ ID NO: 294157 - protein, 337 aa, unidentified
MDYFAGLDVSMEETHVCVVDRDGAVIHEVKVPSTPADIKTALAGAPACRRVVFETGRMAPMLHHGLTGCGVPVICIESRQAHQALKSFATHKTDRNDARGLAHLARTGFFKPVHVKSLPAHAIRSLIIARKKLVGQRVTLENQIRGLAVVFGVRLPRALSSAFIAKALRASEGIDGLSAAMRGLVAARAAVLSAIAAIDADMKKLVRASHACRRLMTIPGVGHLTALAFAAAVDDPERFRRSRDLGAYPGLVPRRYQSGEVDYTGSISKCGDRRMRTLLYEAANVILTRYKQPLKLKDWALAIARRSTLRKARIALARRLAIIMHAMLRHGTEFKPA

SEQ ID NO: 294158 - protein, 318 aa, unidentified
MLIHYIDIAKRNFVIAVSSLSKTKTETNNPKGIAHTVEYLKKHKVALVVTESTGGLEIPAAKAIRRAGIAVIIANPRQTHQFAQSQPLTKTDAKDAKMPAFFAQMKAQKEDWQTMPYHPPTEAEEVLEALVNRRNQPADMRTAEKNRLHQVHETQVESVKQLIAHFDRLIDELDKQIDDHTHTHFDGKAQVAEQIKGIGSITTATLMAMLPELGRLSHKRIASLVGIAPHPRESGETKFKSRCFGGRSAVRKALYMATVAATRFEPLIRDFYQRLPSEGKPYKVAVTACMRKLLTISNARMRDYFAENDTAENGIRTA

SEQ ID NO: 294159 - protein, 456 aa, unidentified
MRTSQRVDPQVKKILPQQFQHVNLNAAGIDVGSEFHFVAVPPDRDKQSVRKFSAFTGNIITMADWLQKCGVDTVVMESTGVYWIPLFELLESRGMKVLLVDPRRLKHVPGRKTDVVDCQWLQQLHAFGLLSGAFRPEEQVCVLRSYMRQRGMLLQYAAHHIQHMQKALHQMNIKLDKVITDITGVTGMAIINAILAGERDAERLAALRNERCQNTEATIAQALQGNWREEHLFVLQQALTLYRTYHEQVAQCDRKIQAHLSTFEDKSGGEPLPLRPKKTKRNRNDPALDSRTLMYQASGVDLTRIDGIDGHTAMKIISEIGLDMTPWRTYKHFTSWMGLCPGNKESAGRKMSGRTKPCANRVATILRIAAQTLHRSKTALGAYYRRMKTRLGASKAITATAHKLARLVYFILKHGWGYVDPGQDWYDKQYQERIMKSLQKRAKDLGFQLVPLIQAI

SEQ ID NO: 294160 - protein, 339 aa, unidentified
MNEVTVIGIDLGKHSFHLHAQDAAGRMVFRKKLSRQQLLRTLANVPSCRVVMEACAGSHWLARQLAGMGHEPRLISPQFVRPFVVGNKNDFGDAQAICEAACRPSMRFVSPRNEAQQTVSAMHRLRERLVRERTATVNQIHGFLLEFGISLPRGAALMSRLPTVLDHETLPPRLVGLVVRLRAQVHYLEEQIRQVVQDLKAALREDDKSRRLLEIPGIGPITASALAVELGDARQFANARQFAASIGLVPRQYSTGGKPTLLGISKRGDRNLRRLLVQCARAVMQHTASRTDALSLWVKTLSTRRHSNVVACALANKLARIAWAVLARGTHYQARALTT

SEQ ID NO: 294161 - protein, 370 aa, unidentified
MLSIGIDVSKGKSTVCGMKPGGEIVYTPFEVQHTREGMSELVSLLRGSGEEVRVVLESTGSYHCPVVAALLENGIFVSVVNSLRMKRFCSQSIRKVKTDRIDAMQIALYGLAYWQELQPTRLPENTYRELQLLARQYYQMTSLLIKAKVDFNALCDQVLPGMQELMSDHAGRHKLSDFVLRYRHTTHILEMGETRFRKDYCKWAEKKGYRNHERMAALIFATAQNGIPVLPDAPSTQIVITEAIRVLHTVEASRDAILTQMQALAKTLPEYSLVREMPCIGDTLAPRLIAEIGDVRRFHSKRALIAYAGIDAPPYQSGKFCANNRHISKRGNRYLRKTGYEVMQSYVMHKPANDPIFTFIEKKRGEGKEW

SEQ ID NO: 294162 - protein, 428 aa, unidentified
MNKTEDTRLEEFRQLKKGIRGSKEHLIVGIDVAKDKHKAFFGTATGKTLLKRLVFENTAQGFERLLIQTEALKVHHGLTKIVFGLEPTANYHKPLAEFLIKGGHQVVLVSAVAVNKNRELLDGRWDKHDTKDSANVADLISQAKCLYYDYPSARLRDLRSLLSLKRTVKKHEHSVKVRIRNHLVAHYFPEFDRHFAKGCAEGLAIVKWCLHPTMIAGMEYDKFTILVAPRIKTLGQEKRLKSIWELAKNSIGCDGGDAVGFEATLMVKDLEQIRATLRAVDERIKVICLHFPEYRYLMSIPGFGPDVSSKVLGAIGNPFRFTSGTQVLKLTGYDLSARRSGKSSDSAVPVISKRGKASLRYALYQAAFVASTSNRHFSAYYTNSLRGREREKGIKTKMRVKLAAKMMIIAWTLMKKKEPFSPEYLNID

SEQ ID NO: 294163 - protein, 321 aa, unidentified
MNKYSKIYGVDISKDVFDVVCSDDAHHQFDNTPKGFSSFLKAIAQGSLVVMEATGYYHYRLAQYLFKHGVVVSVVNPLSVKRFIQMKLAKVKTDKSDARAICEYGRVNDVPCYTALTDVQAECLQLFRLLDSYLKKRTATKNKLHGEETLGIPSRFVHQSLKRDLKHLDKEVKALEERLLLLVKQDQQHQLTLLKGIPGLGTKTALFLIVITDGFDKFETAGQLCSYVGITPTIRQSGSSVRGKSRISKVGNQKLRNLLFLCAFSACKHNKACSEIYERIVAKGKSKKLALIAVANKLLKQAFAIAKSGLPYDEKFVSKLN

SEQ ID NO: 294164 - protein, 387 aa, unidentified
MQAPTVSTPITDRISTIFVAIELSQKTWLVTMHSPDKDKISRHKVQGGDHAGLLALIDRVRDRAARTLGAVPAVVSCYEAGYDGFWLHRLLMAAGITNYVFDPSSIAVDQRARRVKTDRIDGEKMLRTLMAYLRGEPRVVRTVRVPTPEQEDARRDTRERDRLTKEQTAHTNRVKALLRLHGFAVGHPRRRDWLSWLAAQRDWQGQGVPPRVLSEIENEHARLMLVRKQLDARARTPAAADPAPAVAEMVRRSELLQRLKSLGPAFATTLTQEVFYKDFRNRREVASYFGLAPSPWQSGGTDRDQGISKAGNPRARCSAVELSWLWLRHQPGSELSRWFRQRTLNAGTRIRRIAIVALARKLVVALWRYLTTGLVPAGAVLKSAEAQ

SEQ ID NO: 294165 - protein, 458 aa, unidentified
MPKKLSKKAKSQRSRERALLEKVHLNAAGIDVGANTHWVAVPEDRDENAVRSFGVFTSDLKALCDWLKGCQVETVAMESTGVYWIPLFQMLEKNGFEVRLVNASHAKNVPGRKTDVNDCQWLQELHTFGMLRGSFRPEAHMCVVRSYLRLRDTLSKDCNSLVQRMQKALTEMNIQIHRVISDITGVTGMSILRAILAGERDGIKLAQMRHPQIKSSAEEIAKALEGDYCEEHLFALQTALELYDSYQFKIMECDQHVEKALAAFEPKVRVSAPDLSRLRSAEKRQEALQRHHLEQMTGADLTKLPGLDLLSVQRILSEIGLDMSRWPSEKHFCAWLNVAPNNRISGGKILSSKPRKNANRAAAALRLAAQGAMQSKTAIGAFIRRIKSRLGAPTAINAGAHKLARLLYRMLKFGKAYVETGQQAYEKLFKERILRNLQRKARELGFDVTPMASTALVS

SEQ ID NO: 294166 - protein, 359 aa, unidentified
MEQRRCVGIDLGKKTYEVKFIAADGKVTGTNGKTCPSGRKALYEKLLPTDRVAIEVCSLAMVMAKEIEKHVNCEVVLLNPSQIALIYRSLKKNDKEDALKLARLVQKYTNDELPKVELPTEHEENIRQILTELRQLKHDRTKEINRLHAIFLECGITEMKRKDLATSVNRNESIKILKGLPLVQAERNLKKLELIDEQITEVEKLLDKELEDDKNVETLMEIPGVGKQLASSFVAFLGDGSRYSNVSCIGAATGLVPKLDMSSTVCRLGHITKCGNPGLRSLLILAAWSHVRSNGGGAIKDKFVYMTTVQSKSKKIAIVAAARKLAELMYTLLKNGTSYEKRSSIDIEKLAEESLSFAS

SEQ ID NO: 294167 - protein, 326 aa, unidentified
MQNQTIVGIDVSSATLDICVSNTSDQRSFVIKNDVKAINKFFRTYEQESLLIGMENTGRYNWALYEALRDLHHRVFVVSPLHLKKSLGLVRGKNDKIDAVRIAAFILKNHTDLPQWKPSSTAVQKLKILLTERNSRIKAKRKILNQQKDHMKMKHLGLGKYLQGLDKQQLAVLNRQIQQIEGEIEILVKADESMQKQAKLIRSIPGVGKILCWTMLAKTENFTLITEPRKMACYSGVVPFSNRSGTSIKGKDRVSTYADKAIKTILHMAAMRAVRLKNDLQIFYLRKVAQGKNKMSVLNAVRNKIIHRIFAVIKNQKAYENHLLLS

SEQ ID NO: 294168 - protein, 363 aa, unidentified
MKKHTTVQQPLPADISACTTIAIDLAKRVFQVAGEDALGQVLHEQRIKSREAFQAFLCKLPAAITVLIETGPGAQAWARQLQSQGNPVRILPAQHVADHRSGPKNDRNDALAILRAGRDSRISAVPVKTATALAMQALHRARQGCVRRRTAVGNQMRGLLLEHGIAMAQGEASIRQRIPRVLEDATVPLPDLLRELVDELMTEWLFLSESVSRLTGRLEKAAKEDETARRLMTIRGVGPIIATALLAKQTQPERFANARMFAAYFGVVPSQNSSGERVRLGRMSKQGDAYVRSLAIQGAHAVLKQLRPDSQQPDDRRLQRWVSRLGTREAAVRVANRNLRIIWALLQNNQSYRRDPGHDQEAA

SEQ ID NO: 294169 - protein, 348 aa, unidentified
MTVYCGVDFHARKQTISYLTTEDGEVQQVELEHEQDNIRGFYAKLRSQGPVIVGFETSGYAAWFEEMLEELGCEIWIGMPAAIRRQARRRQKNDRRDADLILELMLRGDFPRLHRYTPASREVLQQLRYRHRLVKLRTIVVNSLQYLALSRGVSLRTKLLTGRGQQRMKELKLPSHLAKQRDEMCELLKELTEKIETAESWLNLRAEQDTRVGRLRTHPGIGPLTGLCLVYTLEQVQRFANPRKVTAYVGFDPVEDSSGERQRIGSISKQGSRLLRFLLVEAGQVALRTDPDLKAAYWRVQLRRNHQKAKVAVARRLLVRAFIMLRDEIDYAEFQRRGVAARSTRRTA

SEQ ID NO: 294170 - protein, 421 aa, unidentified
MPNIEIGVDFMVKENFIYVGIDLHKETHTAVMIDCYNQKLGEITFPNRPADFPKLVTKVKKCNTDAKEVVYGLENAYGYGRPLAVWLIDKGYFVKDVNTAISHRQAKHRGAMYRKSDSDDAEAIALATLNMLDKLPDACPNDAYWSLGQLVHRRDNIMKQRTRLVNQLHEQLCIAYPSYKQFFNDISRPTALYFWEHYPSRKYLKGKSVEDLRAELVPVSHNKCSTRTCEKILDAIAGDKVKNNAYQDARDMVTLSIVSDLQHYDKQLAEVDKMLEQMYKMLGCTLTTIPGVNVITAVKILAEIGDIKRLSNANKLAQFAGIAPLHLSSSGKGKDLATKQGNRRLQATIYFLAIQMVHISSKGTPRNPVVRAYYEKRKAEGKTSQQALICISRRLISIIYGMLKNGTEYRMPVMENAGENR

SEQ ID NO: 294171 - protein, 346 aa, unidentified
MLYAGLDLSRKRLDFHLLDGDGATVEVGASPPDADGLRRLSERVAHRGAPIWAAIESMNGARFVHDRLELHGWQVEIADAQKVKGLAPLACKTDRIDAWVLAELARRDLVPAIWLPDPQVRAERERARWRLHLVHHRSSLKQRVHAVLLTHGKPCPVADLFGVRGRQLLARLGLPEPWQGTIEASLRLIDELEREISECERELRRLGVDHRYVPLLCTVPGISWVLAYTIAAEIGDIERFASPRKLAGYSGLCPRVYQSGERDLRGPLSKQGPRYLRWALVEAATHACTAPVYRDRYQQTKARIGKQRGAKVAQIDLARRLSEAIWHMLRRGEAFAPKGATDPLAA

SEQ ID NO: 294172 - protein, 375 aa, unidentified
MGDYSEAFVGFDTSKLRNAVAIADAGRSGEVRFVGEIENTAAATAKLVRKLSAKYQRLTFCYEAGPTGYGLHRQIKDLGFECVVVAPSLIPKRPGDKVKTNRRDALSLAKLLRADELTPVWVPDGGHEAMRDLTRARETAMLDLRTKRQHVSAFLLRLGRPYPESRKTWTKAHVSWISSQNIEHPQQRLVLEEMMLAIRQAQERLARLEQAIAAAVPEWSLAPVVTALMAMRGIDLISATTMLAEIGDLNRFRTPTELMAYLGLVPSESSTGDTIKRGPITKAGNRRARRMLVECSWSYQHPPRVGQAKQPKVDAAPPAVREIAWKAQCRLYRRYRTLIRKGKLKTVAIVAIARELAGFIWAVARAVTTAPVVAV

SEQ ID NO: 294173 - protein, 297 aa, unidentified
MEEYIGLDVSMKETAVAIRRAGERIWRGKCASDPSIIAELIRKRAPSVKRVVFETGPLSVWFYHSLRTEGLPAICIDARHAKAALDMATNKTDANDADGLAQLAEVGFFREVRVKGFDSMLTRTLVAARTRLVRITTELSNQIRGVMKTFGLLVPAGKGGTFEKNVRSLLADQDRLASIVLPMLEAWRGIRVRAAELGRQLVRDARQSRACRILMSIPGIGAITATSFTTAIEEPDNFRKSRSVGAWIGLTTRRYQSGEVDYDGHISRRGDRPLRGLLYEAAAVILTRSSTHSTLRT

SEQ ID NO: 294174 - protein, 393 aa, unidentified
MICVGIDVAKDKHDCVILNSEGKILAGVFTIPNNADGFDTLLQKIRSCTSSDDKIKVGLEATGHYSYNILGFLLNQGLPTYVINPLHTNLFRKSMSLRKTKTDRVDAKTIAAMLMSNVDLKSYTDTAYHNEELKSLTRYRFDKVKERAKLKSSISRLVCILFPELEKLVSSLHLATVYALLEEFPGSKQIAKAHLTRLKTLLGNASKGRYGRDMAVTIRSAAQNSVGSCMPAKSLELQHTIRLIRELDAEIAEIEAEIETMMDKIQSPITTIPGMGSRMAAMILAEIGDINRFKSSSALVAFAGIDPTVRQSGEFSSTHNHMSKRGSPYLRHAIFLAATTCSFHNIPLNAYYKKKREQGKHHLTATGAVARKLTTVIYAVLRDGKPYEPKSFC

SEQ ID NO: 294175 - protein, 338 aa, unidentified
MTECKSSAWIGLDVGKKTFSAAIDLPADGRRRKLTDIPCREFARTPRGVEDFLAWAEKTAAGLPAGIVMETTGCYSQHLADWIGKSRPSIPVTIENARALHAFIQSLNLPHKTDRLDAQAIARFGTERRPEPSSRPSPAILTLRELSRERAALIKVRTELQNRRDSLSTEVARRHNARTLATLTTQIEMLDDEIKACVVEDTQLLAEVHVMTTMPGVKFVSAYSILAEIGSLKQYSAKELSAISGLCPRILDSGTSVHSSYLSRRSSARLRQILYLDSVIATRKIPVLSEFYSRLVSKGKRKMTARCACMRKMLLMLRAMVVAATPYSENFEKNSASA

SEQ ID NO: 294176 - protein, 394 aa, unidentified
MKLVGIDVGKNSHHFCVMDKETGEFNVAPSSFSNNKEGFDFLINSLKPYSKKSILIGMEDTGHYHVALLKFLLSNGYTVALINPKTTDLTRKMEGGITKNDKLDTITICDVLDTPERKKQYRITKVDRFDLYEQRQLTRHHHNLKEELNVYCNRLQKSIDLVFPEFNTLFSSKYSIVYMNLLKTFGSAEAIASTDIRTIRKCFEVKGRGGRISLTPEKLKECAKNSIGISSEVETIQIKHLVSQITLIKEQIAEIDKKIEEFSITNNSPILSIPGISHFSGTSILAELGDIGNYSKPSQIIKFAGVAPYHYESSQYNAQHTGITKKGSKYLRKTLYQIILTVINNNPVFKKYYLLKISQGKGHRCAQGHCIRKLLRIIYHLLETGQSFDPALLR

SEQ ID NO: 294177 - protein, 345 aa, unidentified
MKHYAGLDVSVKETAVCIVDEGGRICREMKVASHPDDLVEALKNPAWNLARIGLEAGPLSQWLFSGLAGAGLPAICIETRHAKAFLKAQVNKTDRNDARGIAQMMRVNLFRPVHVKTLMSQERRALLTARKLLQEKAIAIENDIRGLLRNFGLKVGIVGAAKFADRIQDLSGDIPELRDIMEVLLAARQKLREQFTVLHERLLSIVKGDTVCRRLMTVPGVGPVVALAFKATVDIPARFKNSKAVGPALGLTPRLHQSGEDNRVGRVSLCGDAMMRTLLYEAAQVLLTVVKKWSWLKAWAMNVAKRRGRQRATVALARRLAVIMHRIWSDGSEFRWAREEATAVI

SEQ ID NO: 294178 - protein, 364 aa, unidentified
MRRQTADAMMRWCYSLPMKTNITKTSPTPSVVPTSSAAVSSGFTLGLDLGDRQHHVCVLAAAGNIVREASLPNTRPALAQLLADFPRATVALEAGTHSPWISRYLTEQGATVLVANPRKLHDISRNERKCDRRDAQMLARLARVDAALLHPIQHGSAQAQHDLLGLKLRDALVRNRVSLINAIRFTLKSLGHPVRNPSSESFHKTVLQDIPADCRPVVQPLLTVLAHVTEQIKAMERDLVRRSKKDYPATQRLQQIAGVGPLTALCFVLKVGDPQRFSRGRDVGAYLGLCPRRNQSGGTDKGWLRAVNKLSKLAKSTHGRQAAKKFEIRWPEILPLTEIAQAKNEKIISFRKNQMARGFGLESE

SEQ ID NO: 294179 - protein, 410 aa, unidentified
MSLYCAVDWAGKNHQAILKDAAGRVLHEGSFAHSAAGIAGWLSTLDTLRHGQAVALIYEATKHGLIDVLLEVPWIELLPVAPVKTKMLRKLHGEARGKSDRRDSDLLCDHLRTNYADLRGRYVETDPAHRRLRERVDQERDLIARCTKSVNRLHALVRRLCPEWDALVPDLDHVVYRQFFLHYAPWDQPRESTLRRFLGTHNVRGEDAVKRVIELSRTAQALGTDRAFQELLLEQIRSEVRLLAAERAELDRVTAEIATLFEAVAHAPIYRSMPGIGSALGPRMAAWFGSAPVRHFPSKNQALTYAGQTPLTEQSGLTRSVHKRVACDRTGRHLCYLWARSCQCLRTTRWQREYLAERKRHGDSVPTRYRKLGLKMLGILYRCLETGQLYDEKIFLQHRHHAPQNQPAST

SEQ ID NO: 294180 - protein, 406 aa, unidentified
MQVVYQRCCGLDVHKKNVTACVITPNGKEIRTFGTMTDDLMQLADWIKRHRCTHVAMESTGVYWKPLYNLLELEELHVMIVNAQHIKAVPGRKTDVKDAEWIANLLRHGLLQGSFIPNREQRELRELVRYRRSLIDERSREVNRIQKVLEGANIKLSSVATDTLGVSGRAMIEAMIQGVEDPEALSDLAQKRLRSKKADLERALKGLIGPHQKMMLETQLQHIDFLDEQIAKLDEEVRNRMLPFEEDLERLDTIPGVGRRATEQILAEIGADVKNQFPSAAHLCSWAGMAPGNNESAGKRKSGRTRKGNKKLRHALVEAARSAARTRNTYLSAQYHRIAARRGANRAAVAVGHTILTIIYYLLVRKQDYVELGSDFYDQRRKDIIIKQSIKRIESLGVRVSIEQSA

SEQ ID NO: 294181 - protein, 427 aa, unidentified
MPYKIAGIDVHKRMLHVVVSDVQVDGEYDFTRRVFGSLPEALRSLAAWLVEQQVEEVVMESTAQYWKPVWGALERYWKPICQTRDRALATSGTLHLAQALSNRGRRGRKKDFRDAERLVKRLVAHELTLSFVPDVEQRLWRTVVRTKYQLTRNRVQLQNRLEALLEEAHIKLSSLVSDLLGASARRMLEAIAGGETNRETLAALADRSLRATQEQLQDALGVCQDLNPVYRRLIKMVLDEVASIDKRIDQLNQEMASLLRPREDQVKRLAEVPGLGVDSAQQIIAEVGATAATFPSEKHLSSWVGACPGDEESAEVNYSRRSPQGNRHMRRILNQAANAAAKHKGSIFQILYGRYVPRLGHNQTIGIIAHKLCRLVWKILHRGIRYEERGPEVSKASKQKRTRKMILQLRRLGYRIEPSPSPSAITA

SEQ ID NO: 294182 - protein, 414 aa, unidentified
MKYNKKMEEIKGVKVFAGVDIGKEAHFMSLIAKDGEVIESGMRIVNSKEGFKEMLEMLKSIGTEKEVAVGMEPTGHYWKPLGYYLHEKGYRVYLVNPYHVKLSKEMRDNSQRKTDKKDSRLIAYLLMEGKFLNSRLLSGNYEELRRLTTARERIVQEIVRCRIRLISILDEYLPEYERCFCKITTKTSLKLLNKYGIRGLREKSNAKEVLEDIVKFSRHKILEARALEIVGKLENTIGLKEGLKGAEIELKLWIKQLEGYMADLKNIEEEIERVLNETEESKYLLSIKGVGYITAAIVLGQTGSFRNFSNAKELEKFAGLDLVERSSGKRIGEKSVSKRGRKLLRHGLYRVAIVAIARCKEFKALYEYKVNILRKNKMVAVTDITVKILRIMFAVVKNQTMYDGNLVLKAIAYS

SEQ ID NO: 294183 - protein, 397 aa, unidentified
MYIVGIDIAKRKHEAAVIDGEGTVIIKPFSFTNNCSGYNRLLAMLTKAKLPLDEVSFAMEATGHYWLALFTRLQKEGFRVQVINPVQTNSIRSFYIRQAKTDPRDALLIAEVIRFGHFSESTLHPENIYELRELCRGRHAIVSMQADVKRKAVALLDQVFPEYETAFTNLFSDTSMAILQTCPTPKELSEMPLEELCHLIEVSSRKRFRMVKAQELQELARNSFGFAMAGDVFSMMIRLYAKHLDFLKQQVREMDRKIAEIMETLDTPITTITGIGPTLGAYILSEIGDISRFSSAAKLAAYAGIDPTMRQSGEYNGVRNRMSKRGSPYLRHAIWLAASSAVLHDPALKLYFQKKRDEGKPYMASVGHACRKMVSIIYAVMRDNKAYTPYIPNEISA

SEQ ID NO: 294184 - protein, 372 aa, unidentified
MTSMPEPTPIDRARDEREEVVLGVDTHKDLHVAAVLSGLGALLATRAFPTTAAGYRGLVAWARSFGALRRAGVECTGSYGAALTRHLQAEAIEVVEVNQPDKATRRKRGKTDAIDAEAAARAVLSGRATATAKTSNGPVEAMRVLRMARNSAVNASTKAINQLKAVLVGADPALRDSLAGLGPATLVRRCAELPDPTPGSGLSEVDRAVVFTLRTLAARIMALKAEAYQLHKQLRALIAAHAPELLERRGIGPDSAAALLIAAGDNPERLCSEGSYAALCGTSPVEASSGKTQRLRLNRGGDRQANAALYRITVSRLRWDSRTQDYLRRRLTEGKTRREAIRCLKRYIAREIFTLITPKAATALANQTANAA

SEQ ID NO: 294185 - protein, 313 aa, unidentified
MIISPRCVGIDVSKRYLDIFDEAVGVPERIANTPHAITELVARWRCDALVVFEATGIYDLELREALRRAGIRFARINPARARDFARACGQLAKTDPIDARVLAAFARAMQPVTEPVGTPARDALAWLAKRRDQMVHMRSQEKNRRSEATDCAIVSRISRFIDVLDNEIAEIEAEISALIKAEPEISQDAQLLRSLPGIGPVASMQLITQMPELGRIGPKQAAALAGLAPFNVDSGTYRGKRKIGGGRKRVRDALYMAALNAVRRADPFKAFYTKLRAAGKPAKLALIAVARKLLTILNAMMRDRKPYRAAPST

SEQ ID NO: 294186 - protein, 342 aa, unidentified
MEKVSIIGLDIAKSVFQAHGADESGDVVFRKKITRLKLLEFFASVPTCVVAMEACGGAHHWAREIGKFGHEVRLIAPKYVKPFVKRQKNDAADAEAISEAATRPTMRFVSPKTEAMQASGLVFRTRDILVRQRTQITNAVRGHLAEYGLVVPQGAGHFKKLVAQLEDSSSHLPEAVRSILSLLTRTATELDEKISQLDKEIARRTREDDVARRLMTIPGVGPITATAIAALAPPASAFRKGRDFAAWVGLTPLQKSTGGKQKLGATSKMGERTIRRLLITGAAAAIHHATRRGASPTSWLGSMLARKPRMLVTVALANKMARIVWALLINGEEYRAPGRAVA

SEQ ID NO: 294187 - protein, 372 aa, unidentified
MENIIYIGMDVYKESFSLCALHGTTGEIIREARCASNVSLVKKFVEKLKTKYGEDIKIKAGYEAGCLGYSLHNLLEQNGIDCDILAPTTMYSSSKNKMVKNDKFDAKMIAINLANGTYKEVYVPEEEDVAVKEYIRMLGDFKTSLKKIKQQIKAFLLRHGYIYEGKSSWTIAYMKWLKNLDLQGLFKETLDEYLLQYDVLVDKIERFSMRLEELSHSERYEEPVANLKCLKGIDTTSAMTVHVEIADFTRFPTAKAFMAYVGLTPSESSSGEKISRSSITKQGNSIVRSTLVECANALVKGTIGLKSKRVKARQKGQRSEVIAYADQAVERLQRKYHRMMYQGKPRNVAVTAIARELGCFIWGLETGKIHRK

SEQ ID NO: 294188 - protein, 389 aa, unidentified
MQVAHQPEASSAIRSDLGAIFVSLELSRSTWLITSLSPGAGEKMSKHSVPAGDICTLLARFSELKQKAFARTGKSFEIIVIQEAGLDGFWIHRVLQKEGIESHVVDPASIATSRRRRRAKTDRIDGEALLRALLAYKRGEPRVCAMVKAPAPEDEDRRRLCRERKVLIAERVQHVNRIKGLLFCQGVSGYEPLRRNRRQQLDALKTGDGRVLPDHLKAQISRELDRLELLLGQIKAVEAERDALFTAAKAAAPTPAPVTMLLEIKGIGPEFAAILWMEAFFRSFANRRQVAAYAGLAPTPWQSGSVDREQGVSKAGNPRLRTTLIQLAWLWLRHQPQSALALWFKERVTRNGGRLKKTAIVALARKLLVALWKYVTAGVVIEGAVMKSA

SEQ ID NO: 294189 - protein, 423 aa, unidentified
MMKLKYSICCGLDVHKNVIVATIVTTNKDGISDYKQKSFSTINSDIQKFHNWLIENNCYHVCMESTGKYWIPIFNYLENDIDVCLTHPKYVKAIKGKKTDKKDSKWIADLYKFDLVRCSFIPPKDFRQLRELSRYRFKLVCMKSSEKNRIQNCMTVSNVGIASVLSDPFGKTATEIISYLLEHTADSMDEKAVRKLIKKGAKSKSDEIIEAIKGYTIETDQAKKLELARGHLEYLDDMITQTEVELYVRIKPYYEFVEFVSTMPGMTELSSTIVLAETGVDMDIFDDAKHLCSWCGLSPANNESAGKKKSVRIAKAGDYLKPMMVQCALAAIKSKKQPYFAIKYGRIKKRRGHKKAIIAIARMMMVCIYHMVSEKKPFIPTDYEELMNPQNHVERVVLNENNVFAYLESLGYDSSKLVKRNDN

SEQ ID NO: 294190 - protein, 383 aa, unidentified
MQALTTGTPTADHCGTIFVAVELSQKTWLVTLHSPDRDRISRHKLEGGDHTELLALIERIRAKVAEKFGSAPGVVSCYEAGYDGFWLHRLLEAAGVTNFVFDPASIAVEQRARRAKTDRIDGELLLRTLMAYLRGEPRVVRIVRVPRVEAEDARRASRERDRLVTEQTAHTNRIKALLRLLGMAVGNPRRRDWLAWLERQRDWQGEPLPPHLLAEIKREHARLMLVREQLAALEQAQAADASPAVTTPMVERRDQLQRLKALGPAFTATLVNELFYKDFRNRREVASYCGLTPSPWKSGGIDREQGISKAGNRRARHKAIELAWLWLRHQGDSALSRWFRARTADAGKRAKRIAIVALARKLIVALWRYLTTGLVPELATMKA

SEQ ID NO: 294191 - protein, 396 aa, unidentified
MQRVAGIDVASQTHVVAVMTEADQVLVKPTSFGEDATGYDKLFQLLGPPTEMLVAMEATGHYGRNLFAALCERGYPVAVLNPLRTRRFAQEDLRRAKSDSIDALGIARFALQKRPQPTPTFDEPTGQLREFMHLFDRLTQDYGDRLRQLHRLVCLCFPEFTRHVPSLSSQRATAILAAYPTAEAFSDSCLRKLAGLRYDGRHAVGPTLAHDLVDAAKVSVGRHHGPAYRTEMEYLCQDVDRLRSKLHELHAEVDRRLGEHPVASLLATIDGLGVTTVARLVAAVGDPARFRDGAAFAAYAGAVPGTYESGLRQGGSASLCPLGNARLRSALYMTTVAAVRLNPWLREFYQRLRARGKPPKVALLATMRKLLMAVYSVAKHRQPFVPRMRSNSGPSK

SEQ ID NO: 294192 - protein, 353 aa, unidentified
MIIIGVDFHPEFQQIASVDTDTGEFQEKRLGHGEDAEAFYRALAGQKVRVGMEASGHAGWFERLVAELQFELWIGDAAENRTKRVRKQKTDRQDAQLILRLLLEDRIPQIWVPSWENRDLRQLLWHRHRKVQARTRIMNQLQAVALNEGLRCKKRLWREHGRQQLESFRLAPWASRRRRDLLELLDRLNPTIAELSQAIEQEVEKCPEAERLSTHPGVGALTALAFVLIIGRTERFHCGKPVASYLGLVPLEESSGNRRRRGHITKQGSSMLRFLLVEAAQVTVRSVPEWRSKYLHLMMRRGRKTAKVAMARKLAVRLYWMWRKGWDYEQVKSSVRTRDSPEIAMVCRRTPSN

SEQ ID NO: 294193 - protein, 338 aa, unidentified
MDIKTLGIDLAKNVFQMHGVDAQGKVVLRKRISRSDLANFVLNLPPCLIGMESCGGANYWARKFQSYGHEVKIMNPQFVKPYLKSNKNDRNDSEAICEAVTRPNMRFVSVKEIAQQDMQMLHRIRSQLVANRTAVANQIRGLLSEYGIVFPSQIQNVRKELPQIIDDMNNELSEFARGLFRELQEDLVTLDKRIDACEAKIKALFKSNEQCQRISEIEGIGMITATALVSAIGDPKTFKDGRELSAWLGLVPKQASSGGKTLLLGISKRGDRYLRTLLIHGARSVVCRASNKKDKRSQWINDIRYRGGMNKACVALANKNARIVWSLLAHNTEYRKAA

SEQ ID NO: 294194 - protein, 359 aa, unidentified
MKKDSRKAKCMDKPAITVGLDVGDRFSRYCVLNEDGEVVEEGKIQTTEVALQRHFDKEPRQRIALECGTHSPWISRLLERLGHQVIVANARKIRAITASESKNDRNDAEKLAHFAYCDPFLLSPIRHRSPERQQDLNLIQVRSTLVRARTMVINSVRGLVKSAGGRLPKCSTADFAKQALPLISAELSLVVAPLVEQVGTLTDQIRRLDKQIENLSQRYVEIKLLRTAPGVGPVIAAAYVLTLDSPDTVANSRQAGAFLGLRPRQSQSGDSNPQHSISKTGNIYLRSLLVQSAHYILGRFGQDCELRRWGLKLAASGGKRGKKRAIVAVARKLAVILHAMWRSGHPFEPFLLPATTAVA

SEQ ID NO: 294195 - protein, 311 aa, unidentified
MMDMVFVGIDVAKQRLDVHILPEGTAFAVARDGEGLVDLAGRLKGLAPQLIAVEATGGFETVVAAAMAAAGLPLVVVNPAQIRHFAQAVGQRAKTDPIDAAMIARFIEATRPAPRPLADEATQLLADLVARRRQIIAMIVAEKNRERRTAVRRIKKSIARLIAALEKELASVDTDIDTAVRGSPAWREKEDLIASVPGVGAIIARTLIAELPELGTLDGKKIAGLVGLAPYTRQSGQWRGKSMIGGGRKAVRSALFIAALVASRHNPVLKQFRDRLVAAGKPKMVAIIAVARKLLTILNAIVRNQKPWQSA

SEQ ID NO: 294196 - protein, 443 aa, unidentified
MVHATGGRLSRGDRRRNEKLRRLREAVPESVAILAIDLAKAKQVVVVTGPGHQVLARRTFVCSPWGVDQMIEFAQMAASDHGLEHLVVACEPTGHRWKPVLERCIRRSLTLVCVQPMLVAREREREDYTRDRSDPKDATLIAHLARDLRCYLVVAPDADWARLRHLGVRRHAKLVERGAARQQLADLMGAYWPAALEAASDLDSKTLLACLAVSTDPDVVAIMSYPAFAAAVAEVLPRVGGERRCHRVMQAFYAATSDPRKIPWEQPGAAERAAFALADLLHATTQVAEVEDRMAGMLRAFGYAELASDIPGLSEVGAAAILAETGDPARYDSGRAWAKHAGACPRDNASGRHQGKTRVSGRGRPLLRTAAWRAVWPLVQRNEVFAARYRHLTGREENKLTDAQARTALAAALLRQLWWVLRHRVAWDPVAAGGIAEEVVPAA

SEQ ID NO: 294197 - protein, 364 aa, unidentified
MWHRPGRLAWHGRSPMLKKQKKTQLRGLSPAPMLEPNAAGVDIGATEIDIAVPADRDAQPVRRFATFTEDLVAAADWLQHCGIEAAAMESTGVYWIPLFQILEACGLKVCLVNARYVKNVPGRKSDVSDCQWLQYLHAVGLLRASFRPAQQICTVRSLMRYRESLVQMAAVHLQHMQKALDQMNLQLHHVISDLSGTTGMAILDAILAGERDSLKLAELRDGRIKASEATIVKSLVGDYRREHLFTLRQSMVAYRHYQKQMADTDVEIEQMLAEFSDGAGPETPALPQPKDTHKPRRNDLRFDLRAHLYRIFGVDLTAIPGINAMIAYVLLSEVGRDLSGFRSAAAFASWLGRCPDKRVSGGRC

SEQ ID NO: 294198 - protein, 343 aa, unidentified
MKIYALGIDLGKTVFHLVGLDASGQVVVRKRCSRTQLLAFTANLEVKLIGMEACSGAHFLGRALRAQGHEVRLMPAQYVKPYVQTNKSDYIDAEAIAEAVQRPRMRFVPIKTEEQLDLQALHRVRERWVMRRTAVVNQIRSLLLERGLTLPKGRSHLDERLPRILEDAELNLSDSFRVLLAQLKLELEQLAGRIEQMDRVIQKTAKENEACQRLTQIPGVGPVTATALIGAIGNASAFGKGRALSAWMGIVPGEHSSGGKQKLLGISKRGNKYLRRLFVQGARSVLQQRLKQAPVLRDWLARLLGRTHQNVVVVALANKLVRMAWAVLCKNERYRAPVLAMTN

SEQ ID NO: 294199 - protein, 402 aa, unidentified
MNNPALCIDVSKSSSFATGFLSYNKPHSKPFDFPHTPEGMKSALHCLKELQTDTSRKPDVVLEATGNFYKPVTQYFTNLGYSVYVLNPLQTSMEKRKSIRKIKTDPVDTYRIAQVYYTNNLKPFKEQSYDVQELRSLCRQWDGFNALNTETQLRFRSILTLVFPKYDTVFDHLCNPTSLRVIASFPSPEAVLSAKQEELFNLMKLSRHSNDWCNQKVDMLIAAARESLSYVGAQQSNIRILQSYVKSLLTHKEILSDIRAQINEWTRLSPDFYLLLSIPGVGEVTAATILGEIGDISNFGSAKQLVAYAGLDPSVYQSGNFRAKNTKISKRGTPYLRKALFQAASAAVRKRPNGPCNSALYEYYINKINAGKPPKVALVATCSKLLRIIFGMLNTKTEFRAK

SEQ ID NO: 294200 - protein, 412 aa, unidentified
MQDILTCAMGLDVHRDVIVACLARGELGTEPEIEIRSFSTLIPEMRKLRDWVLEVECRHVAMESTGIYWQPIYEMLEPCFDGQINILVVNARHMKNVPGRKTDMRDAQWIATLLRAGLLNGSFIPDKTFRELRHLTRYRKSIVHDITAQKNRIDKFLQSSGFRFTAFLSDAFGASGRNIIRHLMEYGDISREALDKCLKTQTRKRIDEILVALNGSLSEHQRSFLRMIFEHLESLERHRHTVEDAISEEIVKHEAALSLLCSIPGIDVTAAASIIAEIGTDMSAFPDSQHICSWAGLSPGNNESAGKRKSAHINKGNPYLKSMLCEVGWVISGKRSLYLSGWYWRIKQRKGAKRATIALARKLLALIYTMLKTGSPYNEDCFEIRRKQSERKRASRMVNELQKLGYFVVAPG

SEQ ID NO: 294201 - protein, 422 aa, unidentified
MNEQEALGYSVYVGIDWADKKHDVCICPRDSDTREFDVIQHRAEAIDAWVKYLHQRYGGRIAIAVELSKGPIVSALQKYDFIDIFPINPATLAKYREAFQPSKAKDDPTDAELAVDMLLRHPEHFKVLKPQSAKMRTLATLVEQRRCRVGERIRITNRLRSALKQYYPQVLEWFEHIDTPLFCAFVKRWPTLTQARHARANTLKRFFHEHHMYRESVVESRRQAIHAASPLTLDEAVIVPYRMQVLVLVEQLELMFKAIDQFDDEIAKLASQHPDYALFQPLPGAGPSLTPRLMVAFGEQRERFSSAADIQKLSGIAPVTERSGQKHWVHWRLQCPTFMRQTFVEWAAQTINKSYWAGAYYRQQRDKGSTYQAAVRALAFKWIRILYRCWQTGVAYDESRYLKALERRGSPLVKRQEMLESA

SEQ ID NO: 294202 - protein, 331 aa, unidentified
MLTGTGELMEEGRIQSTAAALTKQFGNEPRMRIALETGTHSPWVSRLLEGFGHQVIVANARKIPTVTASESKNDRNDAEQLARMAAFDPRLLHPVEHRSLGRQQDLNLIHTRSVLVRARTMLVNSVRGLVKSAGSRLPAACPEAFPGKARTAMPSELKTACEPLLGQIEQMNATLAAMDKQIENLKEKYTEIALLRTVPGVGPVVAACYALTLDGPQAIATNRQAGAFLGLRPRQQQSGDSNPQCGIAKTGNNYLRCLLVQSAQYILGRFGPDSELRRWGLKLAAGGGKRGKKRAIVAVARKLSVLLLSMWRNRKPFQPFPQGAPQLSATA

SEQ ID NO: 294203 - protein, 388 aa, unidentified
MYYVGIDIAKYKHDCYICTSEGVTVLESFSFDNSNTGFKELQSALDHLDHSQQIKIGLEATGIYGKNLKLFLSSIGYDFHEFNPLLVKRFHDSLSNRKTKTDKIDARIIALYLSTGASRTYLYSSYHTQALKQLSRTRNKLIRSRSDQYVIITNVLDVEFPEFKAFFHNKLSDTALFLLNKYKTVDRMKRLTYQDCVLLHNKSRRIPTSSFEELRDLAKHTIGHHFNYNDLILSSALQIVNTLERQIESIEKEILAIMEELHSPIDTIPGISTLSAATILGEFGDFSKFSNPKQLCAFCGVEPAIYQSGTSSHKGKMVKHGSSQLRYVLFNAVPYLVIHNITFREFFYKKLHEGKNYRVAQSHVVKKLLRVIYHLELTGESFDPTFLY

SEQ ID NO: 294204 - protein, 398 aa, unidentified
MLSIGIDVSKGKSTVCGMKPEGEIVYAPFEVQHTREGMSELVSLLRGSGEEVRVVLESTGSYHCPVVAALLENGIFVSVVNSLRMKRFCSQSIRRVKTDQIDAMQIALYGLAYWQELQPTRLPENTYRELQLLARQYYQMTSMLIKAKVDFNAICDQVLPGMQELMSDHAGRHKLSDFVLRYHHTAHILKMGETRFRKDYCKWAEKKGYRNHERMAALIFATAQNGIPVLPDAPSTQIVITEAIRVLHTVEASRDAILTQMQALAKTLPEYSLVREMPCIGDTLAPRLIAEIGDVRRFHSKRALIAYAGIDAPPYQSGKFSANNRHISKRGNRYLRKTGYEVMQSYVMHKPANDPIFTFIEKKRGEGKSGKLAMVAGLNKFLRVYYGKVTELYRSLPQ

SEQ ID NO: 294205 - protein, 373 aa, unidentified
MKKRSISQKIQKRTVKTKRAQESVTIGMDLGDRTSRYCILGSEGEILREGQVQTSKAGMVETFGSLGRARIAIEVGTHSPWVSRLLESLGHEIIVANPRQVKLITESSRKDDRLDAQTLARLARIDPQLLRPIRHRSEMAQTALTVIRVRAALIAVRTSLVNTARGLAKAMGERLPKCDADQMGVLRAESVPPKLRQLLEPLLKEVESLTEKIKDSDREIEQIARKDYPETALLQQVGGVGPLIALTFVLTVDDKTRFQKSRDVGCYIGLRPRRSDSGQRQPQLRITKEGDPYLRTMLVQGAHYILSRRGPDTDLKRWGLRLAERGGKRAKKKAVVAVARKLSILLHRLWVTGEVYEPLRNQNLRDLQKKSAA

SEQ ID NO: 294206 - protein, 419 aa, unidentified
MRTTIQEFAAYIGIDWADQKHDISLSTSVDGKAEYTKISSTPEALTEWLFQLRHRFPEGKIAVCLEQSRGSLVYHLMTYDFIILYPVNPITLSRYRTAFNTSGAKDDKPDANLLRELICVHRKHLRPWYPDDVTSRSLALLAEARRKAVNDRANYTNRLQAVLKTFFPQALELTGTRLYDKVSLAFLGKWERLEDIQRAQDKTIRKFYTSLGSRPIRLMEERLQLIRSAIPLTKDEAIITSSIITVRMLVHQLVCLQESIREYDMALAEVFEQHPDKDIFSSFPGVGDVLKSRLIAAFGSDRNRFEKAKNIQEYSGIAPVTKRSGKTTIVHRRLACSKFLLQTFHEFARCSLKKSIWAKAFYDMQRDKGKGHHTAIRSLAFKWIRIIHRCWRERVCYDEVIYLKSLQRNQSPLLKYIAN

SEQ ID NO: 294207 - protein, 405 aa, unidentified
MPYILALDVSMGHSYSVLYKDDTCLFEDEIEHTQRGFHALLEEIQHLPERPLIVFEATGIYSRPVEKFFQDHHFSYCLLNPLEAKKQMEENTLRSWKTDKSDAHRLAQTHLKNQRQPKEVQSNFYLEMRDLARFYQEIEKKITRLRMDLHNCLQLTFPELEQFFLNRLTPYALILIRLFPHPDFVLASTRTKIKNKLINETRKKISANRAEQKADQIIHYAQCAYPAVEKDSIHCQKTIYYAELLQDLLEQKEALATQMIKKAEGSPCFLLYQTFPGIGALTAALLLGELGDITRFKTHKQLNAFVGIDIRRYHSGKYTGQDRINKRGNPKARKIIFFTIRNMIRQQRAAPNHIVDYYYKLKKQPIPKKDKVATVACMNKLLKCMHAMVRAHTEYDYAYAVSVDH

SEQ ID NO: 294208 - protein, 344 aa, unidentified
MDHFAGLDVSVKETSVCILDDAGKILKEVKVASEPQALLKVLGNPAYCFKRIGLEAGPLSQWLFSALAEAELPVICVETRHMQAVLKAQINKTDRNDARGIAQMMRVGVYRPVHVKTLRSQKLRMLLTHRKLLQSKAIAIENDLRGTLRNFGLKVGMVGTVRFEARVQELIETIPDLVVLVEPLLVVRRALREQIVILHRRLLAIVRDDEVCRRLMTTPGVGPVVALTYRATVDVPARFRKSKSVGAVFGLTSCRYQSGEIDWSGRISRCGDEMMRTMLYEAAQSMLHSKKWSWLKAWAMQIARRRGMKRAIVALARRLAVIMHRIWIDGTEFRWTREPATAAA

SEQ ID NO: 294209 - protein, 369 aa, unidentified
MVSSRFLNGVKCATMEGVTHHLNEEQEETDMNITTIGLDLAKNLFHIVGLDAHGHEKMKKRLSRSQVLRHFAQCPACVIGMEACASSHYFARELRKLGHAVKLIPPQYVKAYVRGQKNDTNDARAIAEAVRAPQMRFVAVKTVAQQDLQAVIRLRVGAINARTATANRVRGLLGEYGLVMGKSLGALRRALPEIQEDTSNGLTEIFRGLLNQQRQHLLELDAHIDTLTAELTAVSKQDDRVQRLQTAPGYGPIVASVFASVVGDGAQYRRGRDASASIGLVPRQHSTGGKNVLLGISKRGDRYLRSLLIHGARAVVHAARKKDDPLSRWLNRLRETRGMNKATVALANKLARIGWAILRHGTIYQPAQA

SEQ ID NO: 294210 - protein, 316 aa, unidentified
MGPSPLLVGMDVAKATLDIAVRPTAETWSVSNDATGIDALVLRLGAWAPTLIVLEATGGSQGPLVAALVAAALPVVVVNPRHLRALAQAVGLLANTDRLDARVIAPCAEAVKPAPRPLPDAETQELRALLVRRRQLVEMVSAERARLDTVPPRIQDAIQAHIAWLTTQIAGLDDALTRASQTPPVWPAKDDVWQSIPGVGPVLARTMLGQGPELGTLGPKPLAALIGVAPVNRDSGTLRGRRPVYGGRAEVRAVWSMGALVATRHHPVIKTFDERLLAAGTAKQVALTACMHQLLTIMNAMVRDLKPWQPQEVPSA

SEQ ID NO: 294211 - protein, 369 aa, unidentified
MEKDTTHVALDDSKRKIVVGILRPTADDPELREIANDPRQIRRLFERLKPEGRLAACYEAGVSGYNLHRQIMALGVPCSVIAPALTPRRPGQRVKTDRRDAAKLVRLFRAGELTAIHILDEREEALRDLVRCRDDLRRDVLRWRHRVLKLLARHGCTYLAGRNWSRAHWRWIREQHFDLPPLQRAFEATLFALEQALARQAELDTELATVATTAPYREPVAALRCFRGIDTLSAIILLAEIVDFQRFPRPRQLMAYLGLVPSEYSSGETQRRGALTKAGNSHARRVLIEAAWHYRHRPTLGRALANRSQGQPDEIVSHAWRAQQRLHRRYRHLVGHGKRTPVAVAAIARELVGFIWAALTRHESRRQAA

SEQ ID NO: 294212 - protein, 402 aa, unidentified
MYNAVGIDVSKGKSTIAVLQPGGVIVRKPFDVFHTSQSLKELSNYLASLEGDTRIVMECTGRYHESMANSLSNAGFFVTVVNPHLIKNFGNNTLRKVKSDPADAKKIARYTLDNWAELRQYSCMDNTRNQLKTLNSQFSFFMKQKVAAKANLIALLDNTYPGVNKLFNSPVRDDGSEKWVDYAYSFWHVDCVRKIGLKTFTERYQAFCKKHHYNFQPAKPAELFLASKDLIAVFPKEASYKLLIQQSIQQLNLASSHVEELRSKMNELASTLPEYATVMGMYGVGKTFGPQLIAEIGDISNFSHREALTAFAGVDPGVDQSGTHNSKSNKASKCGSNHLRKTLFQIMSTLLQTAPEDDKVYQFLVKKRAEGKPYYVYMTAGANKFLRIYYGKVKECIRNLEQ

SEQ ID NO: 294213 - protein, 313 aa, unidentified
MNNQEINVGIDTGKHQLDIYIRPLGEYFTVTNDAKGVKEAIKRIAIHQPTRIIIEATGRLETAFVCAAAKANFPVVIANTYHVHNFAVSTGKRAKTDKLDAKMIAHYGEALKPRLSDIKPDNIQQISDLLVRRAQLIDMRTMEKNRLSILPKTLHRSIKKIISTLQKEVEHIEETLDELMQDTAQWQELKEILLSVKGVGKVLAYTLMSDLPELGQLNRKEIAALVGVAPMNRESGAYKGKRKIKGGRHRIRTVLFMSMLSAIQSNAKFKGIYTGMVAAGKPKKVAIVACMRRLITILNTMVKNNRQWDEKLV

SEQ ID NO: 294214 - protein, 463 aa, unidentified
MKDKKPTGKRSRRSRPLLERVNLNAAGIDCGSAMHYVAVPPDRDPEPVQCFKTFTDDLHRLAEWLVACGIKSVAMEATGVYWIPIYEILEARGLEVLLVNARHVKNVPGRKSDVTDCEWLRDLHRVGLLKGSFRPTAEITALRSYLRHRETLIQGAATTINRMQKALVQMNLQLHVVISDIAGATGLRILRDIVNGQTDPRHLATHRDARCQASEAEIAAALTGHYRPEHLFVLRQNLELYDTFQLQIESCDTQIEAHLKALATSTTPPAALSSIPRTRRKASSNEPHFDVRTSLHQLSGVDLSQLDGIGPYNALRLISEIGTDMSRWRTEHHFTSWLTLAPDNKVSGGRLLSSRTRPSANRAAAILRMAAMCLGRTQTALGAFYRRLAYRIGKAKAITATARKLAILVYRCLKRELVYQDPGAADYDRKHRAAVLRQLRQRAGALGFHLVNGQTGEILEGVS

SEQ ID NO: 294215 - protein, 408 aa, unidentified
MNPLFVGIDVSSRNNVAYLMKPDGSKHSSFSVQNNLGGAKLLSERIVSALNAMQLSDVVIGMEATSIYGNNLVYALREDGSLSRFQRKIHVLNPKQVKKFKEAYPELPKNDWVDAFVIADHLRFGRINKEVYMDDYRYKALQTLTRARFDVIQNLTREKQRFANYLFLKCSGIAQDKDIQNTSATTIALMERFETVDDLANADLDELTAFIAEIGRGRFADPESTAEAVRAAAKGSYRLPETVNDTVNQAMSVSITSMRALEKQVKVLDKAIQQQFQIIPNTLTSISGIGKVYSAGIIAEIGDIHRFDSQASIAKYAGLVWTQHQSGEFEAETTRLIKSCNRYLRYYLLEAANSVRRCDSEFRRYYDLKFKEVNKYQHKRALALTARKLVRLVFRLLKDNRLYIPPEG

SEQ ID NO: 294216 - protein, 423 aa, unidentified
MFSPSVDDEQIIARVAALDVGKAEVVCCVRLPAPGGGKRRLQEVSTHSTMTRSLTVLAEHLVELGIERVVMESTSDYWRPAFYLFEAHGLDPWLVNSKDVKHLPGRPKTDVLDAVWLCKVAERQMLRRSFVPPVEIRVLRDLTRYRTDLVNARTAEKNRAEKLLEDACIKLSVVASDIFGVSGRSMMAALIGGERDPKVLADMARAALRKKLPALEEAFTGRFDDHHGFLLGRMLAGVDAINADIAAVDAEIEAHLAPFVDVVQRLDEIPGIAPVAAAAIIAEIGVDMSRFPTPGHLSSWAKFAPRVTASAGNSKGSGSTGHGNPYLARALGEVAVNAGRSPTFLGARYRRIARRRGSRRAVVAIGRSVLVIIWHLLDNPDTHYRDLGRDHYDRQRDTETVRRQHVRQLESLGYKVTLQPAAA

SEQ ID NO: 294217 - protein, 422 aa, unidentified
MLQETADREEIIARVAALDIGKAEVVCCVRVPHESRPGRRLQEVQAYSTMTRSLLGMADHLRSLGVTRVVMEGASDYWKPAFWVLEAAGFETWLVNARDVKHLPGRPKTDKLDAVWLCKVAERQMIRPSFVPPPQIRRLRDVTRYRIDLVGARGAEKNRVEKLLEDAGIKLSVVASDIFGVSGRAMMAALIAGERSPAALAQLARTRMRTRIPALQEAFTGHFTDHHAFLLGKMLARVDGIDADIAELDARIEEMIAPFAQAAARLDEIPGIGRIAAAIIIAEIGVDMTRFPTAGHLASWAKFAPGVKESAGKKKGSGSTRHGNSYLARVLGEAAAGAARTDTFLGERYRRIARRRGSKKAAVAIGRSILVIIWHLLSDPEARYTDLGSDFFDTRINPERRKRAHIHQLEALGYKVTLEPAA

SEQ ID NO: 294218 - protein, 351 aa, unidentified
MPHKSTVHAVTAIGIDMGKNTLHMVGLDLRGAIVLREKVSRGRVASRLANLQPCLIGIEAGMATHYVARELAALGHDVKQVPPTYAKPFRQGHKNDFRDAHAVAEAVQRPTTRFVPAKTNEQLDLQALHRVRSRLVSERTAVINQIRGFLLERGIIVRQGVRFLRQQLPDILAKRTDVLSPRMVRIVADLAGDWRQLDERIETVTDEIETLAKSDDNCRRVMTVPGIGPIISSAMVAAIGSGAAFARGRDYSAWLGLVPKQMSTGDRTILGRISKRGNGYLRTLFMQAARVILLRPANWPKHGFGAWLIRAAQRLHPNVLAAALANKLARIAWTVLAQERSYEARVTKAAA

SEQ ID NO: 294219 - protein, 475 aa, unidentified
MVVMFLSKKLFVGIDVSLKSNQVCLMDHDGSVMGKSLSFDNNLPGTLAMVEHLNSVLSNGDFEKLTIGMEATALYWFPLFNFLNNSSRVFVEKEAEIIPLNPKVVSHFRDAYTDMDKTDIKDSFVIADRLRFGRVHSGRIPSVDFLALQRLTRFRYHLVQYESRLKNYARSFLFLTFSEWNRVKAFSDVFGATAKKLLKKFCSAQELSELSIEDLKELLNEFSKGHFKNLDEKARLVNQTVKDSFPIPPELAEQVHLLIKQTLQQLELLEKHIARLDKKIEKLMNKFHNPLMSIKGIGPVLAAGIFAEIGDISRFPGQAQLAKYAGLTWRKNQSGNFNGDITPLTKTGNPYLRYYLIQAAQCLVNHNPEYREYFTRKFNETPRHPHKRALSLTARKLVRLVYALLSKNQLYLAKERQLAKDREVNSASVPEVQAEVLEVSEKTAAKKVKTQRLPHASRTLPCGQEHMRGRRAVNT

SEQ ID NO: 294220 - protein, 458 aa, unidentified
MPRKSSNKAKSQRRRERALLQKVHLNAAGIDIGANAHWVAVPEDRDASPVRSFGVFTRDLVALCDWLKSCQVETIAMESTGVYWIPLYQMLERKGFEVRLVNAHHVKNVPGRKTDVKDCQWLQQLHTFGMLAGSFRPEAQMCVVRSYLRLRDTLSKDCNSLVQRMQKALTEMNVQIHRVISDITGVTGMSILRAILAGERDCLKLAQLKHPQIKSSAQDIAKALDGDYCQEHLFALGTALEFYDSYQLKIMACDRHVQDALSAFELKGKAPAPDVSRMRCAEKRLEALRRHHLEEMTGADLTKLPGLDLLAVERILSEIGLDMSRWPSEKHFCAWLNVAPNNRVSGGKILSSKPPKNANRAAAALRLAAQSAMQSKSAIGAFIRRIKSRLGAPTAINAGAHKLARLVYRMLKFGKAYVEIGQEAYEKFFKERILRNLQRKAHLLGFQVTPITVTVPVS

SEQ ID NO: 294221 - protein, 468 aa, unidentified
MQLCLGIDIACRAAHQATLADERGEFVWSGRRFRTTSADLDELWALLPSGTEPGAVTVVMEPTRNAWVPLAAWFRRRGATVVVVPSERCADLRDYYNKHTKSDRLDSRVLARLPLLHPEGLHREDGLGPADALKRAAKHRSTLVKRRSQCLARLDALLELLGPGWDAALGGDLANVTPLRFLAAGYADPYVVRRLGRARLSRFIYRHSRGAWGEERAIELLEAADATLALWDGELDYTELAEDIAIEARLALQLTTEVKELDERVTALMTKLDPNRILTSAPGVGDITAAAILGRLGDPNRFRSLRGARAFSGLVPSLDASGIAGAHGGPTKRGDAVLREALFLAADHARRQDPTLAARYHRLMTVTGKHHNSALCHIAMALLTRIIACWRNGVPYQLRDVDGRVVDVAEARAIIAERYCIPEDVRRKKRSVTHTQHVKRGRADRVKESLGAPSADPPTRRLEAPARG

SEQ ID NO: 294222 - protein, 364 aa, unidentified
MKRKVYVGMDVHKETIQIAILPSNTKALVKEQQIKHEEGQIKKFIQKLKSEGTEIHCCYEAGVTGYPLYRYLKTLGVNCIIAAPGKIPRQSSDKIKTDKRDAIKLARLLRSGELESIHVPSEEDEAVRDYLRSRDSLRLDLGRNRQRLMKFLLRKGITYSTTKYWTASHYKWLNNLHFENEILQATFNDYYSRVRVQEENLKATDQKIQEIAKSEPYREKVGILRCFRGVDYLTAMFLLSEVNDFKRFKTAGSFMSFLGLVPGEYSSGPKRKQTGITKTGSPRLRRILVEAAWQHRFPGTGSKVVVARRVGQSALVVSLAEKASLRLHKKFKSMQLRGKTPQVMITAVSRELSGFLWAAMNLVA

SEQ ID NO: 294223 - protein, 367 aa, unidentified
MKKLYIGIDTHKENNVIGLAFAGNAAPEVYGKVSADVGRFVIVLRKLLKKYDMEKDDVSICYEAGPTGFVLARRLIKLKYECHVIVPTSIPKNTDRIKTDRRDAKKMARLLRSNDLKFVNIPSPLDEVIRDVSRARTDITNALKQAKQQLGGFLLRNGYHYTGKIRWSEAHMRYIRELALVNPAQKLVLEESLQRIDLLVEQKERITNEMGKLTDTWYRKPLLDALMGFRGFRAVSATSIMSELGDLRRFKHPRQLMSYIGVVPSENSSGTKRSQGPITKCGNTHVRWMLIEIIHSYRLPPKVSKALSKRQEGLSREVKAISWRAQNRLCAKYYHLRQRGLHENKIKVAVARELLGFIWELGQVVKV

SEQ ID NO: 294224 - protein, 329 aa, unidentified
MSFPNSVLMTKDRKIYGIDISKNVFDVYCVATGHTQLKNDEKGFKSFLKTLPKTALVVMEATGYYHYRFAQFLHKHDVTVSVVNPLSVKRFIQMKLAKVKTDKSDAKAICEYGTMNELPIYNAYTEVQAECLQLFRLLDNYIKQRTATKNKLHGEDVLGIPSRMVYSSLKRQLKHLDKEIVMLEKRLLELVKQDQQQQLTLLKSIPGMGVKTALFLIVITDGFKKFETAAQLCSYVGITPTIRASGSSVRGRSRISKVGNKKLRNLLFLCAFSACKHNRACREIYDRIVAKGKSKKLALIAVSNKLLKQAFAIAKSGLPYDENFVSRLA

SEQ ID NO: 294225 - protein, 369 aa, unidentified
MSDYIWVGLDVHVESITAAILEGESQEAEVVKLSGDLNKVRRLLRRLSKKGPVRCCYEASGAGFVLHNRLKKDGFHCEVIAPSLIPRKPGDRRKCDRLDAVMLARLYRSGHLTAVHVPDEWQEAVRQLIRLRCSYQWQCKSTKLRIYGILKVHGYIYRDGKTLWTKKHRVWLAKLRRELEGPLHTVLVTELEHLEYLEMQRGALDEEIDRYAQQHPYRKAVEALCCLRGVKTLTAMTLLSEIGDIERFPSPRALMAYFGLVPTERSSGERERKGPITKAGNSHARRILVEAAWNNRHRAAADLIMSRRRQGQPAEVVAISVKAQHRLSKRFYHLDQKKHRNKVVVAVARELCGFIWAMMKAAPLCRDAA

SEQ ID NO: 294226 - protein, 398 aa, unidentified
MTRKNTLKSLPTDTDFRVVGLDLAKSDVSVAAIPVDDNTPSLVDRMTYADLLDWAGKISPTLFAMEPCNGYSLLCLQLENLGHEIKVISGSTVSMWINTHLSGQKTDLNDAIALARLAVSDAELTPIRHKSITEIRIQTVQAVRQQLMSQRSKSIVSFKALAQQWGIPCAAGHRNLKKLRESIEAKVDLITRPVANAMLFLLDAVKSLDRQIGQLNQTLQELVMSDERGRLLQSVLGVGTQISARVITVVGNVERFNSPCSLVAYVGVAPRNFITGHKNLTKKKHGNCPDLSHKGQGKISRRGDKLLRSLFIQGAACLYMQFCKDQLPECQLKRWILKQLASQKPYGKLIVSLAAKLIRIVWAVLTYGEKFNIQKAGMTRSMWSEMALETPLNKEVPA

SEQ ID NO: 294227 - protein, 370 aa, unidentified
MEQGIKFFVGLDTHANSISVALAEAGRAPARVLGKIAHDVAKLLKLLARYGDPTRVQVVYEAGPLGYGLQRALSKRGYVCQVIAPSLIPKRPGDRVKTDRRDCLRLAELARAGELRAVWVPDPADEAVRDVARAREDAVNARTQVRHQLKSFLLRHGVRYPRRTSWTKTFYRWLATLHFDSAGAQTAFTDYGHAVSAAEERVTRLTTALAGAIGGWRFEPVVQALQALRGIDQISAIGLVAEIGDLSRFSHPRQLMAYLGLVPAEHSSGERVVRGSITKSGNAHARRLLTEAAWNYRFRARVGYEAQRRAEHLPQALRDLGWKAQLRLTARFARLRARGVHHNKVCVAIARELAGFVWAIGTAAQQLRTD

SEQ ID NO: 294228 - protein, 430 aa, unidentified
MEEVDEQELHVERLAALDLGKAVLEACVRVPHASKPGRRMQEVRTYPTTTAALLQMADWFRCWSVTRVVMESTGDYWKGVYYLLESEGFECWLVNARDVKNVPGRAKTDKLDVVWQAKVAERGMCRPSLVQPRPIRELRNLTRYRRSLTRDRTREMQRVEKLLEDAQIKLSSVVSRLFGVTGRLILDALVAGQRDPKVLAQLAKGRLRPRIGQLQEALRGFFTNHHGAILAMMLTNIDRLTAQITTLDTMIEQAIAPFTHQVQQLAQITGAGPTAAQEIIAEVGVDMGRFPSAAHLVSWAKFCPQTHESAGKRKNKGRAKGNPWLAATLGNIAAANARTGAGFLGARHRRIARRRGPQKAIVATGNAILVIVYHLLSDPAAQFRDLGADYCTTRIDTNRRARNLAAALQAVTGQKITIRDGQAVIEAQAA

SEQ ID NO: 294229 - protein, 470 aa, unidentified
MKHNSTPERKEKPARLSVSLLERIQPDAAGIDCGQNSHFVAVPPNRDPQPVREFRTFTADLHRLANWLAQCGVKTVAMESTGVYWIPLYEILEERGFEVLLVNARDVHNVRGRKSDVTDCEWLRELHSVGLLRPSFRPAAAIVPLRSFMRQRETLVEEAATRIQRMQKALTEMNLKLHTVLTDLTGQTGLRIVRSILEGERDPERLAANRDYHCHASQAEIVAALTGNYRAEHLFALRQNFAAYEFLLKQIAECDGEIEGLLTTLAARQPPPSAPLPAARRKRASKHQPQFDIRGPLHRLTGGVDLSQIDSIGPQAALHLIGEIGTDMTRWPTEKHFTSWLALAPNNKISGGRLLSSRTPPSANRAAVILRRCAMTLTKTSTALGAFYRRLAMRVGKPKALTATARKLAVLVYRVLSGSLVYNDPGAIEYHQLNRNRELKSLRKRARLLGFELFDPSTGEVLAPNLQPVF

SEQ ID NO: 294230 - protein, 387 aa, unidentified
MQKPHDNSKASPAAFMQDNTLIAVIELSLSNWLVAGLIPGVSREPLKKLEPNPEDLLKLLHRWRDEAIKSGRLITRIAVAYETGRDSFWLARWLRERGIDAHVIHATSVTVSREHRRAKTDRLDTAMLKRSFLGWLRGERGHCTVAIVPTMEEEDAKRPHREREGLVHEQTRVVNRMKSALIQFGVRNFNPKLRKANVKLETVRTPEGKSLPSNTIAALQRDMERLRIIKEQIKAIERARLQQLERKPEALANRMVYLLVRIYGLGLETADLLVHELLSRTLRDRKAVARYAGLTGSPDESGSKRREKGLSRSGNARVRKIMIQLAWRMVKFQPDSALVQWFKQRTENAKKSRKPMIVALARKLIIALWRYANDGLIPEGFRLHSAA

SEQ ID NO: 294231 - protein, 342 aa, unidentified
MSLVMGMDQHRAQISAEWIDTITGEISRARVAPADRAAVRAFLAPFKHEALEVALEATTGWRFVVEELQRVGAEVHLAEPAETSALKGKKKRAKTDWADARHLRELLLIGRLPESWIAPAHLLDLRARVRTRHLPSHQRCEWQQRMQAVLYHHGFPQQRNLLTLERRDWIAGLTMPAAAREQLTISLHMIDAIDLQLVPFDHDLSAYARKQAGCRAMIDQIYGIGVLTGVTILAELGDTRRFQNSRDVVRYSGLDITVYQSDEHRAPGHLSRQGPPALRWALYEAAQVARAGARSPDRQYYLQAKERIGGNRACIAIARKLLKRAYHLLRELGDQALEPIAS

SEQ ID NO: 294232 - protein, 402 aa, unidentified
MGRIIIGVDPHKLSATIEVVDHQERKLGHGRFTTDKAGFAAMRKYAKTWPGRVWAVEGANGVGRPLAQRLLEAGEDVVDVPAKLAARARLLDTGHGRKTDAHDAHSVAVAAVRAKDLRVLAIDPELEVLRMLVERREALTRRRVQTVARLQALLAELLPGQAKKDITTGQAKRMLTSVRPRDIAGKTRRRIAAEELAELIAVEAKMKKATAELKTIVASRSPHLTDIHGVGPVVAARVLADVGDVARFADRNRFASWTGTAPLDASSGENNRHRLSRAGNRRVNHMIHIAAVSQLRAATDGQAYYRRKRAEGKKPLEALRCLKRRISDAIFRQLLFDAAAAQLESVDAGPGGHRGASLQSNAAGSHPHTDTSDQPLPGPADPTLRPTAAPRKSPREGLKATA

SEQ ID NO: 294233 - protein, 340 aa, unidentified
MTVIIGIDPHKASHTAVAISGDEQKLAEVKVRATCQQTAKLLAWAEPLGERTWAVESAGGMGYLLSQQLVGAGELVLDVPATLASRVRVLGTGKSDKNDPNDALSVAIAALRSPGLRSVEPANHREVLRLLAKRNNEIGRLRNIIVSRLHAALINLSPGGISKELNASDAMRLLNDFDPMTPVEQIRYDLAHELLDDVERLDAQLKVSHKRIKDAVKASGTSLTDLYGVGPILAAALIGYTGDVRRFSNRDQFASYAGVAPIEHSSGGRITHRLSRRGNRQLNHAVHMVAICQIRQKDSEGRVYFEKKVAEGKTKREAIRSLKRQVSNAVYRQLLIDAHK

SEQ ID NO: 294234 - protein, 465 aa, unidentified
MAKKRNNKSKDSKRHRLSLKTIQPNSAGIDLGSREHWVAVPPSKDGTPNVESFGTTTPELLRLADWLKEQQIVTVAMESTGVYWIPIFEILDSRGFEVILANARQISHVPGRKTDILDCQWLQLLHACGLVRGSFRPSDNICQLRALIRERNKMVQQRSDWIRRMQKNLDQMNVCVHHAVSDITGVTGMAIIRAIVDGERDPHALARLRDSRCRKSEKQIAEELTGNWRPEHLFNLRQALKVYDQLCAVITDYDSEILTYIATLQPQDATDISAPPPASKTKANNISKRGQEPLRQALYGLSGFDLTSIDGIGVDTATVIVSELGLDFTAFPDESHFVSYLRLAPNLSVSAGKKVPSKFKATTCTRVSTALRMAALTLRYSNTALGAFYRRVSWRKGASVAVFATARKLAQLIYRLVRYGQAYVDAGAQAYETRFNQRRLIFYTTALNKMGYNVEPLSTGEVIPT

SEQ ID NO: 294235 - protein, 445 aa, unidentified
MHYKRLLALIDSVSSYLSVGLDVGADFTWMSIALPNGSFIGKPFKIVHSDPGSRDLAVAKIKEAQETYSLKSRCFLESTGIYHIPLLCFLRDKGFDCSVINPIITKNSTNINIRKLHNDKFDSKKAALVGLNVSLKTSILPDDSVVDLRNLVRDYYYFKDLQSAVALKLTAELKVSFPAYAKVFSKVTTQSSLKLLSSYPLPEDMLAASKEDIVDIIRSTARFGEAYALRKYDAIIAAAQDAAVFGRALPSNAVRIRLYIDTYQEYQKHLDALLKALHETVEKLQDTLIYDQICLLQSLYGIGFLSAVVLVAEMGDFKLFSSPKKLYAYFGLDPAVKQSGKLNGDKVHMSKRGSSLARRVLHMAALNNVKVAKGSGTPVNPVVYDYYTRKCSCKKKPVAMGAVMHKICNIIFAMLRDNKPFEIITPEEHCRRFATEHPDKIRKAA

SEQ ID NO: 294236 - protein, 345 aa, unidentified
MPIVGGLDIHRKQITFGYLDTVTGEVKRGQIAPADRAHLRAWLARFAGWEDVAFAVEGCAGWRYVTQELAAAGIAAHLGEPAGTAALRGRKRHAKTDKTDARHLRTLLAGDRLPGCWIPPAQILEYRALLETYHDLRRAHTAWVQRIHAAFFHQGAPALGEDGLRTERGLAGLRAAAAAHLSPAGQQQVATALDMLAATEARLGPLRHQLADAARHLTGAKVLAARLYGAGPVTALALTCWLAGAGRFSSSAKAVRFTGLDITVHSSGRKGPPGRLSRQGPPVLRWAVYEAGKTHARSSAPGHACYAAVKDRKNSKRAALSEARTIVRQACHILTEPGGDALTAA

SEQ ID NO: 294237 - protein, 337 aa, unidentified
MNVTLIGIDLAKTVFQVCGVNRSGNPAFNHQVRRNRLIEKLLQYPEATIAMEACSGSNYWGRELKKLGFEVLLIPPQHVKPFVKGNKNDRNDAFAITEAARRPRMRFVEPRSLEQTDILVLHKLINRKVQARTALINQIRGFLNEYGVIVAPGKERLLKALPELLEDAENPLTCAAREALQSLLEEWREANRQIQMHEAKLKQTAKQLEPARRLMGVKGVAEKTATAVVAYAGDGKAFKSGRHFAANLGLVPNEHSSGGKQKLGSITRRGNNYLRRLLVQGAWSVIRYTDKATDRLSRWAAGVIERRGKHKAVIAVANKLARILWAMLYHQTEYRAA

SEQ ID NO: 294238 - protein, 348 aa, unidentified
MTEAYDGRQVVGMDLHRRRSVLVRMTEDGRKLGTVRITNSPAALRAEIAKAGEHPRVVLEATYGWYWAADVLEEAGAEVHLAHPLGVKACSCRRVKNDQRDAADLADLLRMGRLPGAWIAPPEIRELREITRYRHKLVKARTSVKDQVHGVLAKLGIPVTCTDIFGAWGNTWLDGLDLPQPYAGKVASLRQLAGALTGEITLLDKVTADLLAGHEGYAAIQALPGIGPVLAAVIVAEIGDIRRFPGPGQLGSWAGLTPRHYESDTKVIRGHVTKQGSRVLRWAVTEAIQRQPAGSRPRQVKDAIIARRGKEAKNIAKVAAARELLTLVFYGLRDGRVRRLDKPRQETA

SEQ ID NO: 294239 - protein, 365 aa, unidentified
MNQYISVGLDVHAESITAAILEGDVQVPEIIKLPGDLMKVRRLFRRLSKKGPVRACYEASGAGFVLQRVLSADGFHCEVIAPSLIPRKPGDRRKTDRLDAAMLARLYRSGHLTPVHIPTEDQEALRRLLRLRYTYQVYCKATKNRIGGMLRNHGFVYREGKSYWTKTHRQWLTKLRLEIEGPLQTALAAELEHLEYIDTQRGALDAELDRFAHADPYRAKIEALCCLRGVKTLTALTLLCEIDDVHRFRSPRSLMAYFGLVPSERSSGERERRGPITKAGNVHARRLLIEAAWNNRHRSGADLILKRRRQGQPPDVVAIAMKAQHRLYKKFWRLDERKHRHVAITAVARELSGFVWAILKAVPQN

SEQ ID NO: 294240 - protein, 455 aa, unidentified
MAVSVNRQIEGNLSRVMGQFDPAGLIRPRSHTGPIRACGLAPPAKIPWGLAEGSLACSPLASTWGLPMKQRLDSHPILITPDYNETLILAIELSNSKWVLAAQVPGLANVKNKRTIEPTVEALMAAIDGYRARAAKTGRKVQRIIATYEAGWSGFWLARWLMRQAIETHVIQPSSVPVDRRARRAKSDGIDAELLLRTLLAWLRAEPRVCSMVPIPDEADEDARRLVRERSELIKERIKLVNRIGAVLATLGVAEYDPLKRNRRRRLDELRTALGEPLPIQARAEIARMLDRLELLLEQIADLERQRDAVLGEERPDKAAEMIQQLASLRGIGVQSASVLVREGFVREFANGKALGSYAGLTATPYSSGGVEREQGIGKAGNARLRTMMVELAWIWQRYQPDSAQVRWFRDRISSTGRRVRKVMVVALARKLLIALWRFATQGVVPEGAVMKPAS

SEQ ID NO: 294241 - protein, 323 aa, unidentified
MIVVAGIDVSKATLDVSVSECLVRRFENSCRGIRSLLKHIDRMYVTRAVCESTGGYERLLVSRLRATAIGVQVAHPLRVRAFARACGYEAKTDPLDAQVLSRYGLVFSESDTHKQEADEEREELQQLLSRRRQLVEQRVQDRSRLDKGISAIVGKSTRRHIRWLDKEIERLNKEYIELLKHSENLCRQADLYRSVPGVGQLTAATLVAYLPELGQRDGKALASLVGLAPWSRDSGKKRGNRSIRGGRSTVRAVLYMAAMSVIKVEGVHRRFYQGLRKRGKVGKVALIAVMRKMLLHLNAVARRRTPWVKQEAWQSTSQTFIPS

SEQ ID NO: 294242 - protein, 352 aa, unidentified
MEIIALDAHKHYSQVCVQDGSGRFLCEKRIEHAKGQIFGFLSQWTPGTSVAVETVGNWYWIVDEIEQAGMVPKLVHAHKAKLMLGSINKTDKLDARGLNRLQQTGTLPTVWIAPGEVRDHRELPRTRMVFGNLRTRLKNRIHSVFDKYGLHTDFAGISDIFGKRGREQMTSTIKQLPSETRYTLSCLLRELDMAESQIVRIEKRMKKVFLKTEMVKRLMTLPGIGFILAVAIANEIGDISRFATPQRLASYAGTVPRVHSSGGYTRYGKLRSDVNHYLKWAYSEAGNSTAVNHKRFPFRHTSELYRRIRERKGHAKAVGAVARHLAEASFWILSKSEDYKEPKSKSVSSTAV

SEQ ID NO: 294243 - protein, 415 aa, unidentified
MALKIVYKICCGIDVHKTFVVACIASTNDKGVTSYESHRFSTYTSGLKTLLQWLLDRNCKDVCMESTGKYWIPVYNILEKDCSIVLAHPKYVKAIRGKKTDKKDDKWVADLFKHDLVAGSFMPPAGIRQLRDLMRYRFKLTCFKSSEKNRLQNCLTVSNIQLGNVVSDTFGKSAQAILDKILENPADTSFDLEPLVFKSLKKKLPELRDAIDGYITPEQAGKLKVIKSHYENLEARKAELEELILALATPYQQELAILQTAPGISSDFTAIGIISEIGTNMEAFPSAKHLCSWAGLTPTNNESAGKKKSVRVSKAGCYIKPLLVQCANAVVKSNKHPEIRNRYLRIKKRRGHKKAIIAIARMLLTALYYMLKNGENYNAELYRKSDLPPVDREITVEQALMIARNQGYKIKSATA

SEQ ID NO: 294244 - protein, 377 aa, unidentified
MSLVMGIDQHRAQITAEWLDTETGEVSRARVRPADRAGVRRFLARFAGQQLEVALEATTGWRFLVEELRAVGAVVHLAEPAETAALRGNKRRAKSDRADARHHRELLLAGRLPESWIPPDHILDVRARVRLRHTLIEQHTEWQQRIQAVLYHHGCRQRRRLMEGDGREWLASQALSETAREQITVAMAIIDALDVQLAPLTKELCAWARRQAGCKALIDAYYGIGELCAVTVIAELGDCRRFQNSRDAVRYSGLDVTVYQSDRHRAPGHLSRQGPPALRWALYEAAQVARRPGSPDRGYYEQAAERLGGNRACLALARKLLKRCYHTLRELGDDALTPPVERPQPGPGSAAARRASSGSPRSLEPTTTNQRADVLAA

SEQ ID NO: 294245 - protein, 407 aa, unidentified
MLFVGDDWAEDHHDVEIEDADGQRLGKRRFPEGVTGLSGLHSLIADHLPEDADPAEVIIGIETDRGPWVQALIAAGYTVYAVNPLQAARYRERHGTSGSKSDPGDAHVLAELVRLDRAHHRPVAGDSDTAEHVKVLARTHQSMIWSRQRQANMLRSMLREFYPAALQAFGDDLTGRDALAVLAVAPSPEQGRRLTTARVVTVLRTAGRQRNHQAAAERVVSALHSEQLTARAGVVPAYAASVAALVAVLNELSRQVDALAEQVGAGFGRHPDAEIYLSQPGLGEILGARVLAEFGDDPKRYVDARARKNYSGMAPVTRTSGKSRVVLARHVRNRRLADALYQQAFSALTNSPGARAYYDVHRARGNTHHQALRALGNRLVGILDGCLRHHKKYDEHIAWPNVTTTAA

SEQ ID NO: 294246 - protein, 354 aa, unidentified
MESINFNNLQLYVGIDVHKKQWSVSIFTDAAHHRTFSQPPSPTALKTYLDRSFPGAPVKCAYEASKLGYWIYRELTRLGYECLVVNAADIPTSDKESSSKTDPIDSRKIAKSLRAGLLTSIHIPDQTTEGDRQLFRYRKRLLADLTRVKNRIKDKFLCTGTLIPEKFDNSNWSKAFLRWIKDVQLPDPTTRLTVDRLLEQFHFLHKHFLKVSIEVRKLQREARYKKPAKLLRSIPGIGPLTTVELLCEIEDIKRFSSFKKFNGFIGFRPGSHSSGEHDWKGRLSYRRHKALRTSLVECAWSTIQKDPIMSERYNQLTQRLTGKRAIVVIARKLVSRIYTILKNEKPYEIGFVKK

SEQ ID NO: 294247 - protein, 593 aa, unidentified
MGAAVSITRLELTAAQLRAAAGREKDGSAARRMLAIAMVLDGADRGTAAETCGMDRQTLRDWVHRYNAEGIRGLHDLKTPGPKPKLTADQQAKLAELVEAGPDPARHGVVRWRRVDLRDELQRCFGVELHERSVGKVLAKLGYRRLSVRPRHPQTDEAAQEAFKKTSPQWSRHGCPTRPKTSPSKSGSRCYGDGLSRYFGSPNQSDGDATMQPNDPVNPTILLAIELSASTWLVAARVPGAEKPHLHRIDGGDTAALLALISSLRARVTRRLAAPQIGVVCCFEAGRDGFWLYRLLTAHGVASHILEPTSILVNRRARRAKTDRLDAEGMLRVLAAYLRGDHQACSMVRVPTLDEEDAKRTHRERENLVHERLRIENRIEALLFTQGIRKRPSLRSWERDLAVLRTGDGREIPRHLRAELDRLRRRLVTTLELIREVEAERDQAAEAKPQDQACRKIAALCRIRGIGANFAAVLTREIFYRSFDNRRQIASYVGITPMPYQSGGMDRDRRISRAGNPRARTTMIQLAWLWLRYQPGSELAEWFRERVGTLAGRTRRIAIVAMARKLLIALWRYAETGVIPAGAEIRAETTVAA

SEQ ID NO: 294248 - protein, 425 aa, unidentified
MNFTQNEKISQVTNETLVVGIDISSETHYVRAFDWRGMELTKTFKFESTSYGFKQMMEWLEETCKSNNKTKVIIGAEPTGHYWFTLAEYLKENNIKFVFVNPMHVKRTKELDDNHPSKNDRKDPKVIAKLVTEGRYLIPYIPEDIYAELRVANESRMRITSEMVAIKNRIQRWFAIYFPEYTQVFGSWECDSSIEVLRNCPLPADVLSLGTEAINQLWREKKIRAVGIKRANVLIETAKTSVGVKNGTNAARFEMSMLIEDYLIKKEQEARIIEILETLCIQVPNSEKLLSIKGIGILTVASFFGEVGDIRRFNSPKQIQKLAGLAIANNESGKHRGKAGISKRGRKLLRCILFQAITSLVLHSPEFRYLHHYYTTRVNNPLKGKQSKVALCCKLIRVFYAILTKGVEYDSEKLMSDIVRPELAA

SEQ ID NO: 294249 - protein, 390 aa, unidentified
MDVLYQSCAGIDVHQANIVVCILHGPLTSTRPKREMATFDTTTKGLRACHDFLSQFHVEAVGMESTGVYWRPVWHALCGDFKLILAQPAHMKAIPGQKTDKKDAHWIAKLTRIGLLPRSFVPDETIQELRELTRQRKHYVESRNRETNRIHKILQSGGIKLTTYIEDIMGLSGRNLLQLLVDGTPMTPRIVHQSVYTSLKKKVPQLLEALDGYFSDHHRFMLKQSLEIYDFYQKQIELLEERMNVYLSQYESHVEILDSIPGIDVITASVIISEVGVDMSQFPTAGHLASWAGLCPGNNESAGKKRSTKIRHGNSYLKKCLCQAAFAVKKQKGSPLADRFYQIQSRRGSQKATIALAHQLLKIAYILLKKQITYSEFLAQKKTTRDELVA

SEQ ID NO: 294250 - protein, 339 aa, unidentified
MTRCIGVDLHQTCFTVCVLAGTGEQSFQDYKLGELEQFTASLRRGDRLAVEATGNTRWFCEQVRGRVKQVVVVNPRRFEIVKRSTNKTDRRDAANLALFLSKDLLPEARMKEPAHAQLSHLCQTRDKLVKQRTALVNQLHALRNAHGLPGKKEASASERGLAAVLAEAAFTEIERVEVEVLVGQVRSLNAGIHRLEQEIGKQGPPLDGHDNLTSIKGIGTKAATILLSVIGDIHDFADEAKLASYFGVVPTVKQSNETVHLGRISKAGSKLGRTTLVQCTLVAKKYSPYLKQYYERVKARRGAGKAIIATARKFLGIIYQTLKNKWVFEDFPNFVLAEK

SEQ ID NO: 294251 - protein, 453 aa, unidentified
MSQFQTLEAPSAAPEFAAFIGLDWADQKHSWKLVVAGSAECESGELKNTPEALHLWASDLYSRFDGRPVALAVEQRRGAIVSQLGNFPHLILYPIHPTTAARYRQAFFPSGTKNDPLDSALLLELLVQHRDRLRRLDPDTPVTRLLQVLVEHRRKLVDEKTRQSNRLTAALKSYYPQPLQWFDDIDGPLGCAFLQRWPTLAQAQRNHPGTLRKFFSQHNCRSADRIRQRIEAIHQAVPAVTDPALLEAGASVVSGIVRLSQALGDSIAEVDVKLQTAAAEHPKAHIFAGLPGVGKVLLPRLIAAFGTQLDRFPSADELQRYSGIAPVRSQTGNTEIVHMRRACPKFLRQTFIEFAIHSVAKSVWARAFLQYELASKKEYFVAIRALAFKWQRVLHACWRSNTPYNEQRYLQVLQKRNSPIVKLFPIANKALETPTSVEWKSIAGFNTLASKNT

SEQ ID NO: 294252 - protein, 355 aa, unidentified
MTKNRPIVIGGVDTHGYTHHAAVIDTSGRILGSEEFEATSDGYRKLLAWIRRFGDLDRIGVEGTGTYGAGLCRHLLDQGVQVVEVDRPNRRMRRQHGKSDSIDAEAAARSVLNGTATAEPKHRDGVVESIRVLRVAKSGAVKARTAATNALKAMLVTAPDELRSTMAQMSTAEMVDTCSKFRPSADRLSEPTQGVKLGMRSLARRVIQLTEEIKELDAAMRPLVRHAAPRTTQLLAIGTDHAAQLLITAGDNPARMRSEASFARLCGVAPIPASSGQTQRHRLHRGGDRSANRALHLAVIVRLRHCEETRAYVERRTKEGLSKREIIRCLKRYVAREVFHTISADLRSLHGLDGI

SEQ ID NO: 294253 - protein, 317 aa, unidentified
MDRRIEPDRYVGIDVAKGQVTVHVRPDTTTFSCRTDAQGLADLLTRLRPLMPKLIVLEATGGYEATVAATLTAADLPVAVVNPRQTRKFAGALGRLAKSDAIDAADIAHFAEAIRPQPRPLPDEQTIRLRALLARRHQLVVMAGAEQQRHDRAETALARRSCAAMLRSLRVEIARIEHAIDKLITASPIFCAKQDLLKTIPGVGDVVARTFIAELPELGAVDRHKIAALVGLAPMNRDSGRMRGERHIKGGRPQIRSPLFAACLAVIQHNPPLRGFYQRLVAAGKAKRLALVAVMRKLVCIANAILRTQHPWAHAQS

SEQ ID NO: 294254 - protein, 409 aa, unidentified
MERVVERGCGLDVHKKSIAACVRIPDERGQRRQQVRTFGTVAAELLALRDWLEAHGVTHVAMESTGVYWKPIFYVLEEAFTCVLVNPVHMAQVPGRKTDVQDCVWIAQLLEHGLLRGSFVPPTPIRELRDLTRYRKTITQERSRAINRLHKTLEDADIKLASVATDVLGVSGRAMLETLVRGNTDPDVLADLARGALRKKLPALRQALNGRFRPHHAFLVGQILAHVDYVEEAIEAVSQQIDVVIAPFTSALECLSTIPGVKKRTAEVILAEIGPDMSAFPSAAHLASWAGLCPGNNESAGKHRSGRTRKGTPWLRTALTEAALGAIRHGRGALATRYRRIMRHRGHKKAVIAVAHAILVVVYHLLTRQTTYHELGDGYYDRRHAERAKRRALETLERQGYRVVLEPAA

SEQ ID NO: 294255 - protein, 411 aa, unidentified
MSYETRELWVQTSSIDVFIGIDVGKSDHWATALDRDGERLFDKALPNDETRLRDLYERLSHHGRVLVVVDQPATIGALAVAVAQDMGITVGYLPGLSMRRIADLTPGNAKTDARDAAVIAQAARTMPHTLRAINGSDEDAAALSMLTGFDLDLARQVNQTSNRIRGMYTQIHPALEKVLGPRLEHDAVLEVIASWPTPAALRKAGRARINAKLKAHGARHHEAWADEIISALKAQSVVVAGTDAAGIVLPHLARQLIALHAQRSDVAAKVEALVEAHPLYQVLTSMPGIGVRTAAVLIAETLGRDFATGAHLASYAGLTPVTRHSGSSIRGEYTSHAGNKRLKRAMFLSAFASLRSDPASRAYYDRKIAQGKRHNQAVIALAHRRILTLHAMIRNGTLYDPQPTHQLPAAA

SEQ ID NO: 294256 - protein, 411 aa, unidentified
MNNTLFVGIDISKRSNVATFMNCEGKVVGRLAFSNNGSGADRLVAKILSYYEKGDFEAIRIGMENTSVYSKSLVWFLYEHEALNEHKLSIIPLNAIMVANYKKSFLDMDKDDITDSFAIADFIRIRPGLLPFKLDDRQEALKIMTRSRYNYVQALSRMKSQFLTRLFLSFSEMEAGKPFYSIFSKTSLSLLEEEFTLDELAEKPIPELVEFLQEKGGGKFQNPEEIAKVLKKAASSSYRVPAMVRESLNRTMASDMEIMRILENEIHNCDKNIEKLMKSVPAILVSIPGIGPVLAAGIMSEIGDISRFQKQESLGKMAGFKWKRNQSGKKESEDKAAVLSGNKKLRYYLVEAANRVRIHDPVFEAYYRKKYAESKTHAHKRALILTARKLVRVIFYLLKENKLYKPDVGIS

SEQ ID NO: 294257 - protein, 359 aa, unidentified
MLGVFTLLRRGRPLVSEFYLGRQFVGMDLHRRRSVLVRMTESGEHLETVRILNDRDVLAEVMSRAGESPEVVLEATYGWYWAADALAELGASVHLAHPLGVKAFSYRRVKNDQRDAADLADLLRMGRLPHAWIAPPETRELRELVRHRAKLVAMRSRCKAEVHAVLAKGGVWVPMTDLFGVEGNLLLDNLTMPAPYRERIASLRRFIEGFNAEIDLFTDLAQRRLSHDAGYTAIQQIPGIGPVLAAVFVAEIGDVHRFDGPAQLTCWAGLTPAHHESDTTVRRGRITKQGSRLVRWAAIESVKILPKTSRIGAIRERVAHRRGNRNIGAVAAARRQLELVFYGLRDHHIRALRRPPRAA

SEQ ID NO: 294258 - protein, 432 aa, unidentified
MNTPPYDLIIGLDRSDRKADLHLIGVIDSQRRSQTIDTSPEALWEWLLQLRQEYPQGRIALCLEQPAAHLIAYLEAYEWIALYPINPLTLLKYREAFVTSRAKDDTKDARYLAELLLAHHDKLKVWAPEDEPTRAIQQLVYHRRSVVNERVGLTNRLKDLLKQYFPQALVLCGEELWRPLATRFLLKWPSLQAVRKAKTEKLKEFYYLNGSRSARLMEQRLSLIERAVPVTDQAAVLDSFILRVQLICRQLQDVVTTIKTFDQRIAEAFKGHEDHEIFSSLPGAGPVLAPRLLATMGSQRERFESAARLQNYTGIAPVTKQSGGKCHIHRRYLCPKFHRQSFHEYAKESILWSRWAAAFYLQQRTKGSYHHAAVRALAYKWQRIIWRCWQDRKPYEEKTYEAALRKAKSPLPKLFDQVELGKSPIKNKVNKS

SEQ ID NO: 294259 - protein, 348 aa, unidentified
MATVTLIGLDIGKHSFHLIGHDPRGNPVLKKQFNRNSLIEFLAKQPPCRIVMEAYCGAHWLARKLTGFGHTVQLIAPQYIRPFVFGNKNDFIDAQAICEAATRPTMRYVAAKSAEQQALSALHRLRESRIAERIQTNNQIHALLLEFGIALPVGVRGITQLPMLLMDETNGLPVKARQILQRQLDHYRLLKTEIDELDHEIATEARQDDVARRLMTIPGIGAITASQLSADAGNAKGYGNARDFAASLGLVPRQYSTGGKSKLLGISKRGDKSLRRLLVQCARVIMQNAPRWKSAMAAWTVALMQRRHSNIVACALANKLARVVWALLAKGGEYRPQARALTEMQTAG

SEQ ID NO: 294260 - protein, 428 aa, unidentified
MTNRQPIPTDALLVAIDIAKVRNEVLIEAPNHKRRRRLSVLNTRAEHDRLIETLRAYGKPVICTFEATGNYHRPIAWRLIEAGFDVRLVSSMALARTREALHNGWDKNDPRDAQVILHMLRIGATQRYHDPLRAGINDVQELSKTHEAIAKAKTEIQHRILTHYLPLYFPEIERFRGNSRSDWFFAFLDAFPTPASIMALSKEAFIEAAWDVVGRKVSKERLLADIYETARTSIGLPLPIDAPAIRMFRMVIAEARSLIRQRNEIEDMADAMLRDSADYKALRKVPGIGPVIALTILAEGGDLRRFRHHRQFLKFCGLDLSTQQSGQHRGQTRLSKFGNARLRRTLWIAGQVAIRQRENGFRHKFERYIAKDRDNPDLRRKALTAITAKMARVVHAIIKSGSDYRPFVEGRVPGGRISFCGAVRAPKG

SEQ ID NO: 294261 - protein, 342 aa, unidentified
MNEYDGRQFVGIDLHRQRSVIVRQSESGEQLSAVRIVNDPVALGLQLEDAGADPEVVLEATYGWYWAVDVLQAQGARVHLAHPLGVKGFRYRRVKNDVRDAADLADLLRMGRLPEAWVAPPATRELRELVRYRAKLVAIRSGLKAQVHAVLAKAGVLIAVSDLFGAGGRKRLAKVALADAYAQRVRSLLELIDTLDGHEARFAALIATRLDADRGYQAIQQVPGIGPVLAAVFVAEIGDVHRFASPAHLCSWAGLTPRHRESDTVVHRGHITKQGSKLVRWAAIEAVQRHPTTAKIAADKDRIEARRGKNIAKVAAARKLLTLVYYGLRDGHIRALDHDKAA

SEQ ID NO: 294262 - protein, 423 aa, unidentified
MDILYERVAGLDVHKDTVVACVRIAADGKTKRECRTFAATTEQLVELRAWLEDCRCTDVAMEATGVYWMPVFRILGEGDFELIVANAAHIKNVPGRKTDMNDAMWIADLLACGLIKASFVPNEEVQELRALTRTRKQLVREQTRHVQRIEKTLAEANIKLSSVISDIMGASGRRMIQAMIDGVRQPNKLAELAGKQIKASPKELYDALHGRLTDHHRFLLALHLKQWDSIDETIRKLDGELDQRIGRMATAAEDRKIPFRALIELLTTVPGVSAVAAPAILSEIGPDMSRFPTAGHLVAWAGLCPGHNESAGKRKSSRLRKGAPWLKTMLVQCAWAAKRTKDSYYRAQFFRLQAKRGPQKAICAVAASILTAIYHILKHGTEHHDLGSAHFDRRPVEVKASRLVAHLKKLGFNVQLQPIAEAA

SEQ ID NO: 294263 - protein, 304 aa, unidentified
MFGIGIDVSGENLDVAVHEQAFRQFKNNKRGWASLIRWLQRWPAKQVVLEASGGYEQKALDALHEAGLPMVRINPGRGRSFASATGKQAKTDRIDAMVLAHMADVLKLTRYVPPAAWQRRLGELCQRRRHLVQMRVSEHQRMRAFSEPSLISMLNQHLREIQKTIKQLDTTIAALLAEQEGWRDFAKLKGAGPVLMATLACELPELGRLSGKAIAALVGVAPMNRESGNWKGRRSITGGRAVVREALYMAALTAKRYEPRLKEFFESLVNQGKPGKVALVAVMRKMLVILNARKRDAEALLASA

SEQ ID NO: 294264 - protein, 362 aa, unidentified
MTNKSPYKAPSMGKIITDFSSVTTVGLDLAKHVFQVHCVDASGRVVVAKSVRRNKLLEFFASLPSCLVGLEACGSAHHWARELVKLRHDARLMPPAYVKAYVRRQKNDAADAAAICEAVSRPSMRFVPLRSLENQAALMHHRVREMLVAQRTQVLNAVRGHLAEIGVIAAQGPKNARDLAKLIATDEDTLPYLVRAALAPLVRQLDRLDEDIGLADDAIKAMAKADESARRLMSIPGIGPVTASAIAASMQDVSSFSGSREFSAYLGLTPRQNSSGGKERLGRVSKMGNRYLRKLLVVGAHAVLYNRKGHDDALRTWACKLMETKPFKLVAVALANKLARIAFAVMRDQTPYSAKPFSPAQA

SEQ ID NO: 294265 - protein, 401 aa, unidentified
MFFIGIDIGKRHHEVALIDEKGNVIGKTIRIINTKNGSEKLIDFLNKHNLMPNNAMIGIEATGHYWLSIYSFFNKLDFSVTAFNPIQSDVLRDFYIRKTKTDTVDAVLITQVIRLDMPEKTTLPTEDTFRLKQLERFRYSLVDSASDLKRKIIACLDQVFPEYDKIFSDIFGNSSKQILLHAPLPEDILQLDTRLLNETINLASNKRLGITKSEEKATQLKELAENSFGISIAQDVFKLEIQIMLEQIQLIECQIEKVEKEIQELIAKQNNYLTTITGIGNIIAAVIIGEVGNIDRFSRPNQLLGFAGLDASVHQSGDFTGTKNKLSKRGSPYLRRAIWQAAFIAAFNDPALSQYYQKLRTRGKSHGTAIGAVARKLVNIIFAIWKQQKPYEIHLPKKSNN

SEQ ID NO: 294266 - protein, 373 aa, unidentified
MYYSTVYVGMDVHKETFSLCCYTNEKEQVEYPQKIDAHFSKVLNYIEAMRFHYGDDVLFICGYEAGCLGFTLYHELTAHHVKCVIMAPTTMAVPKGKKKVKTDKRDAALIARCLAHHDYSAVHVPTEKDEQVKEYIRMRDDHKLALKKVKQQILAFCLRHGCQYDGTKSHWTQAHINWLRTLKLDGLYAETLEEYLLEYDYLTAKIDRIDRRIEELASEDDYKEKVHKLECFIGIKTHTALSIIVETGDFKRFADAQHFASFLGLTPGEDSSGGDQNRLGITKAGNSHLRTLLTEAAQSYTRGQVGYKSRLLAARQEGNTPAVIAYADKANERLRRKYYRLVLKQGKKANVAKAAIARELACFIWGMMTDKVA

SEQ ID NO: 294267 - protein, 465 aa, unidentified
MNKEEQSMYLGIDVSKGYADFFLMDENKQCMDPGFQLDDNFEGHQELEMYLGKQSSRGKKIICGVESTGGYEQNWITVLKRQKGHLPVEVYKVNPKGVKHQIESTLKRTITDCVSAEGIAHYLANNYVKKQQDWHNTTCEDDQVVSAQHCFRLIQGLIKQQTARYNQLEKMLYGDFPELLTFCKHGIPTWMIRLLIRYPGLASIQRAHIASIDGIPGISKGKADQIKSLARTSVAAPAPSIQEKMIKSLSEDIQYHQGRIEDLKAYLTETYTNPNLAILKSIRGISDWTATALLILLGSVDRFEGTDQIAAFFGVNPRYKQSGDGKWGVHMSKQGSSSMRSILYIAANNVVLHEPYFKKLYHHYASKGIKPRSVRGIIMHKLLRVIYGMLKNKTCFDQQTDETNQQKSPSQTARPITDSSRRYQKLSTGAPISRSNYKKRRAVLECQISESDTRTASSSTAPPQK

SEQ ID NO: 294268 - protein, 482 aa, unidentified
MVVPNEEPKKPTKPKKPTKPKKPAKPRKSRERSLPVPVPASAAALHVINPDAAGIDVHSDMHMVCVPADRDANPVRQFGANTADLQEIVAWLKKCRIKTVALESTGVYWIPLFELLESEGFEVNLVEPGQLSRCGARPKTDVLDAQWIQRLHSYGLLRASFRPPDSVLALRAYWRQRQMQVRYAASHVQHMQKAMEQINVKLAEVVSNITGVTGMLIIAAILEGERDPVKLAQLRDERCQHSEEEIALALQGTWRPEHLFELRQAYELYQFHHRQITECDQQVEAELANFPNRAGEKTHTVKPRKRGRKSNDVRFEATGPLFKALGVDLTLIEGIDVGTALVILAEIGVDVSRFPTEKHFASWLRLCPPQDESNKTKKRRGHRKATNRVTIALRMCAQSIGQTMTPMGLFYRRIRSRIGALGAVKATAHKFACLVYRMLKYGQEYVTQSMEEYEAKVKANILKSLKRKAAALGFELSPLPTQ

SEQ ID NO: 294269 - protein, 382 aa, unidentified
MHNRQNYLYVGVDLHKEHHTAVIINCWQEKLGEIQFENKPSAFSEFLLEVETYVSNGLSVVFGLEDVGGYGRALAKYLVDHEQVVKEVNPALSFLERKSQVMIQKNDSWDAECVARILVNKFNQLPDAKPNDLFWSIQQLVSRRNALVKAQSALKNQLHIQLNHHYPSYKKFFSELDGKTALAFWQQYPSPSCLEGANIKQLTAFLLDVSNNTCSVKKASEILKLVKEDGHTMKEYQETRDFLVRSIVRDIEFKKTEMKYIERELKQLVKLLDYQLETMPGIELVTASALIAEIGDVRRFPNANKLARFAGIAPVYFGSGGKGKTHKSKQGNRALHALFYNLAVQQVQVAKGSKMPRNPVFHAYYQKKLKKEKQKDKHWYVL

SEQ ID NO: 294270 - protein, 350 aa, unidentified
MGEVSTIGVDIAKSVFQIHGVDADGMVVIRKRVGRAKVLEFFAGLPPCLVGMEACATAHQWARELKKFGHDTRLMPPTYVKAYVKRGKNDAADAAAICEAVTRPSMRFVPIKSVEQQSALMLHRTRDLLIRQRTQLINALRAHLAELGLVAAKGHEGLHQLVTAVAESSDERLPSNARFACQAIVAQLSAVQTQINGIDTRITQAHRANADSKRLDAIPGFGVILSTAVVATMTDPKAFKTGREFAAWIGLVPRQNSTGGKERLGSISKQGDRYLRRLLVLGAISIVGTARTRPDKYPWVTELLGRRPAKVVAVCSREASGAGAIGCASLASSSMRAPVHTCGRIGSTAR

SEQ ID NO: 294271 - protein, 439 aa, unidentified
MMDNTLPPLGIDVSKLTLDARLLSQHRPAPARRFANSPDGQTLLAQWLESQGINRVHACLEATGTYSDAIATFLFEHGHQVSVVNPARVTAFRLSEGIRTKTDRHDALVLARFCEQKRPALWRPTPAEIQRLQGLLGRLDDLQLTVQQERNRFENLRLDAQIRQEIAAHVSWLQQQRERTLQCAITHVQQSPHLQHACDRLDSIPGIACLTAMRLYSVYFDQQRFRGAPQLVAYAGLCPAQRLSGTSVHGKASISMAGNAQVRQWLYMSALSVLRYDPDFAQWAGELKARGKCGRVIVVAIMRKLLHVVHGVLTSDEDYDPRKAFPTHEHSTAVEAPMPTEQEHVASARKELVHHHTTQKTRLTTCLPIPAARPLHECRAASDGRISFLCPSANRLRRIDTIFNKISNIAQKPLTKKTVSTRSGTLKPGFCWNPQLFGW

SEQ ID NO: 294272 - protein, 336 aa, unidentified
MKNYIGVDLGKQSSYFVIKNESGNLLQRAKVFNDRSSIESFLKPFQQEPLLAVMEATTNYYWMYQELHRSGCKVILAHPLKTRAIADAKIKNDRLDANILCDLLRGNLIPESYIPSQEIRHLRERVRQRIRLVQMRTQVKNQIHTLLTKLNYPHQFSDLFGKQGLEWLSELPMPDVFAFQCKQAITQIRHYNEWVLQAEQQIRRTLKDFPQAAALTEVAGIGVFGAAVLIAEIGEIERFRSFKKLVSYAGIAPGLYESGKTSHQRNITRQGNAYLRWILCEMAQVHIRKPGPLRQFFLRLKERIGYTKALTATARKLLIGIYYVMNGKKFAPELAG

SEQ ID NO: 294273 - protein, 378 aa, unidentified
MAPSATPDKDGVDGPNGIDVPHCGLSEPATGEPPTVSITMIGLDTSKSVFQIHGVNETGKAELKRKVRRSELIAFFEQQERCTVVMEACGAAHHWARILTGLGHTVKLLAPEAVKPFVKKGKKNDAADAAAICEAASRPDATFVPVKSVAQQGILALHTTRSLLVKQQTMLANAIRGLASEFGLVVPKGLHNLEPLVALVEADEAVPAQARRAIAELYKRFGELATGIQAFETAIVAHARSDATARRLATIPGIGPITASLIAATVVDISRFKTARQFAAWLGLVPRQNSTGGKTRLGRITKAGNREIRKLLVLGATSMVGRAEGWHSAVGSWLRDILQRRPVRLVTVALANKMARIAWSVMTRNEVYRPQGGVAAKA

SEQ ID NO: 294274 - protein, 421 aa, unidentified
MSLDPHEEPAAIQTHIGAIFISLELSRSKWLITSLVPGGGQKMSKHWVDAGDLAGLLARFWAIRDKVLARTGKSYPIVVIQEAGLDGFWIHRSLVKEGIESHVVDAASIAVSRRRRRAKTDKIDGEGLLRALLAFKRGEPRVCSMVRVPTPQDEDRRRICRERKTLIAERIRHVNRIKGLLFSQGIGDYEPLRRDRRRALEAARTGDGRALGANMKAQIGRELDRLELLLGQIAAIEAERDAMLARQAEAEAVQGAQGAPASVQKPMDLNGPSAETVPEAEAAPGVQKLMDLNGLGAETVAMLWTEAFYRSFDNRRQLAAFGGLAGTPPWKSGSIDHEQGVSMGNHRLRQTMIQLAWLWPIHQPNSALTRWYRERTKGATKLQKKKMVVALARKLLVALWRYVDAGVVIEGAVLKRAARAR

SEQ ID NO: 294275 - protein, 414 aa, unidentified
MKVFCGIDWSERHHDVALVDQDGTLIAKRRIGESVEDFTELLTLLAEAGDNAEEPIPVAIETSRGLLVAALRATGRPIYAINPMAVARYRERHCVSRKKSDHADAMTLANILRTDAHAHRRLPADSELAQAITVLARAAQDAIWRRSKAIQELRALLREFYPGFLAAFAHGSVTNLASPEARAILAIAPTPAAGARLSQARIATALRRAGRKRGITTLAADIQQTLRSPQLRQPPLVENAMGCQVSALLATLATECANADQLTAAATEAFTQHPDHDIITSFPGLADLTGARVLAEIGDDRTRFTDARALKAYAGSAPITRASGRSLSITRRRIKNDRLNAVGFLWAFATLPRPGPPKDHYDRRRAHGDRHAAALRHLFNRMLGQLYHCLHTRQTYDPIKAFGQPTTTTNQATT

SEQ ID NO: 294276 - protein, 405 aa, unidentified
MSTFFAGLDWASRTHAVCFIDECGTVCERLDIAHDAAGLQQLQRRLIHFGRPPVAIERPSGMVVDTLLEAGFTVVPIHPNAVKATRPRYRSHGAKSDASDAYLLADLLRTDGHRFKPLASQSDEIRALRALVRGRDDLVATRVQLANQLRSLLESFWPGAAEVFADVDSPIALAFIDRYPTPETASHLGPKRMAAFCAQHAYSGRRSAKDLLARLHQAPAAVCAELEMEAKGELARSLARTLDRLVEQIRLLSSRIEHHIASTDDGRILMSFPRAGRICAAQILAELGSVRERFGTDAQLAAEAGVAPVTYASGKSKSVTFRWACNHRLRAALTCLADNSRHANAWAASVYAKARTRGCDHPHAVRILSRAWVRVIWRAWTDRKPYDASQHRAAHALLQTQTAGG

SEQ ID NO: 294277 - protein, 357 aa, unidentified
MSHNTTMSALMPNITIGLDLGDKGSRTYEVHAAGECGREATISTTVAGITRYFEQRDRCRVVLEVGTHSPWVSRRLEQLGHEAIVANPSAMFAGGPRRRRNDRLDARFLARQGRADVGLLYPIKHRSADAQRDLESLRARDQLVAVRTKLINHVRGTVKSWGARLSRCSSEAFAKRAAGEVPSELAPALTPLLEVIANLTQRIRQAEAQLAALTRERYPVAQRLQQPAGVGALTGLAFVLLIEDPHRFRKSRDVGPYFGLVPRLDESGASTPQLRISKAGDAFGRRLLVSAAQYILGPFGPECDLKRYGAALAQRGGKNAKKRAVVAVARKLAVLLHQLWVSGGTYDPDYQLKWRAA

SEQ ID NO: 294278 - protein, 349 aa, unidentified
MTDRHLSYIGRIVYVGVDVHKETYTVTCVCNKQIVKTATVQADPAGLAASLLRWLPGATLYSAYEAGFSAFVLHRALTTAGITNIVVNPASVAVAANDKVKTDRRDAKKLAIDLADGRLRGIYVPTEEEELARLLPRTRAQIVEHRATIARQIKAKLHQFGLIAPASRRMISNRYLREIAAWSLPPELRVSLTLLAEQWRFATRQLIEIRRLLREQAAAQADLETVYRSVPGIGAVVARTLATELGDMTRFANERALFSYTGLTPSEYSSGPSVRRGHMSRQGSGRVRHVLLETAWRALPRDQVLQEIFDRIAATRGKKRAIVAIARRLTGRIRACFRHGTTYAVGTYA

SEQ ID NO: 294279 - protein, 336 aa, unidentified
MTLYCGIDLHSNNHVVVIIDEADHRVYERRLGNDLALTLNALEPYRSELAGVAVESTFNWYWLVDGLQAAGYPMRLVNTTAVQQYAGLKYTDDRYDAYWLAHLMRLGILPTGYIYPKEQRGIRDLLRRRMQLAQTASQQLISLQSQIWRQTGERIASKRLKQADFEVALAGAAERLSAECTLKVYQAIHDEQELLERVLLQVVKPRSDFQVLTSITGVGEILGMTIALETGDIHRFPAVGNYASYCRCVKSEKLSNGKKKGKGNAKSGNKYLSWAYSEAAHFAVRYEPLAKRFFERKQRKTNGIIAIRSVAHKLARAAYYMLRDQVPFDAQKLFSS

SEQ ID NO: 294280 - protein, 415 aa, unidentified
MYYVGIDIAKSFHVVSVIDDEETKVINKPFKINNDAKGFEKLLTVLNSITLDKNEFTIGLEATGIYGENLQEFLKSKAYLVKLLNPFQTTRYREQITLKKVKNDEIDSLVIALLLKSGKFSSGYITDDEYQSLRTLYRNRATIQADMKDVKKRILTQITVTFPELEGFMKPFSVTGLVLLDKYPTAHHYKHSSVDRIMKLFRHIQGNNFTQSKALQLLELSKESIYSGKAKDARAIAIRSTIRLLQMYLSELDIIEAEILSLLQNSSVETTVDEAGIEIQKTDTLLHNLKTIPGVAEKTIAALISECGDLTRFPSIPKFIGYLGLFPTENSSGNSKYIGHLSKRGSPLAKHALYMSAVSCLIHNTQLKQLYDTKRSQGKSKKEALIAVSRKIATIIYSIFKYNVPYDPNRVFAKS

SEQ ID NO: 294281 - protein, 317 aa, unidentified
MTESVKVNVGIDVSKDFLDVHVGNVALRRVPNRSSGLSVLKRILSRYSVSLVLCESTGGYENLAVTYFQSLGYDVCVINPRQARDFARSMGRLAKTDRIDAQILCRLADVIDASPERTRFIRPLTDERRQHLVSMVRRRRQLCDLMTAERNRRAKTDDYGSESISTVLDFLTDEVARIDRDIAAHVGSCFSDISSLLQTFTGIGPVTASTLLGELPELGKLNRRQITALVGVAPFNRDSGYMRGRRRISGGRSGVRNVLFMAALSSVRFNPVLKAFFTRLVAAGKPKKVALVACMRRMVCILNAMLRDGSRFEVAVG

SEQ ID NO: 294282 - protein, 354 aa, unidentified
MRFIGLDVHRDFCEVAIAEGGQVRLAGRVRTEPAALALFAQSLADDDQVVLEATGNALGIARVIEPHVGRVVLANPKAVKGITQAGAKTDKIDARTLAKLLAGGFLPAVWLPDEQTRILRRRISARAQLVRQRTRAKNQVHATLIRNLKGKPPVSDLFGARGRRWLAGQVLPEDERETVAACLRQIEFLDREIALIERALAEQVLASAQMRRLLTLPGVNFVTAAALIAAIGDIRRFPTARQLVSYLGLDPRVRQSGSEPARHGRISKQGPGETRHVLVEAAWHATRTAGPLRAFHERIAARRGGNIAAVAVARKLRRDRLAHAQARRGLRLRPPLAHPREAPPARADARRRAP

SEQ ID NO: 294283 - protein, 371 aa, unidentified
MKSIIYIGMDVHKKTYSLCALLKETGEIIGETKIPADVSLIIKFIENAKKSVDSDDVQIKTGYEAGCLGYSLYWQLAEKGIECDILAPSTMHRSAKNKVVKNDRRDAKNIATNLANGTYKSVYVPTDEDVEIKEYIRMMHDFKIELKKVKQHINAFLLRFGHHYPGKSKWIPAHIKWLKELELSDMYREILDEYLSQLEILSEKIERFKYRLEELSQKETYNEKIGQLRCIKGIDTTAAMTIHAETSDFDRFPTANAFASYCGLTPGEDSSGDSYHRLGITKQGNSMIRTTLVEAAQVLVRGTIGKKGKKVKSKQKDQDVKVIDYADKAVVRLQKKYHRMIFRGVKRNIAITAVARELACFVWGIETGHIS

SEQ ID NO: 294284 - protein, 453 aa, unidentified
MKEQNQISMDIVNPKAAGIDIGSRSHFVAIGQKEEHVREFGVYNEDLKAISNWLKENGIQSVAMESTGTYWQALYAVLLNDGFQMILCNGKFTKNIKGRKTDVQDCQWIQKLHSIGLLSGSFLPDLQTEQLRTYCRHRASLIDVAANTSKKMQKYLRLLNLRLDVIVKDICGLTGLKIIDAICNGETNPEKLAELRNGNCKKSEQEMAKALETNGRKDYLFGLKQEYKMYKNLQIQIKECDVEIEKILQEQIDNDHNKKQHYTDPKIHKRINKNTPKNIDLNLMGYQYFEGVDLLKIEGFSHQTLLTLMSEVGLDGIKKFSTAKQFASWLRLTPNNKISGGKVLSSRIPKGSNRLKIALRNAANAIGNLKESTPLRDFFHRINFRKGRVSAISATARKLGVIIWNMVVKNIPYHNPKEYLYLDEKRKLAVQKRLQKQVENYQFSADDFNFLTT

SEQ ID NO: 294285 - protein, 372 aa, unidentified
MTEFSVYVGLDVHKATIAVAVAVAGRAEPQYRGEIANTPTAIKRLLHKLSPDGEVLGMCYEAGPCGYGIHRQITAVGHDCIVVAPGLIPRKATDRVKTDRRDALSLARLHRAGELTAVWVPDADQEAMRDLTRAREDLKAIERTARQRLGAFLLRHGQVYPGKSRWTQAHFRWLERVKMPMPVQQIVLTEYVDTVLAAQRRVAALVEQMRLALADWSLRPVVEALMALRGVSLITAMTVLAELGDITRFDSPSQLMAYLGLVPSEHSSGGNRRQGGITKTGNSHVRRVLVEAAWAYRFPARKSYAIQRRAERTSADVQAIAWQAQTRLCGRYLHLIHAGKTTPLATTAVARELAGFIWAIACEVPVNAAKAA

SEQ ID NO: 294286 - protein, 389 aa, unidentified
MRPAGARRAEWLKRGVGTRPKVGMSFARANGREVRPKRRYALMKVLIGVDPHKASVAIAAVDEDLGELLERAAFPQDRAGLRSLERWAKRFPERRWAVENAGGLGRHLAVRLAASGESVVDVPPKLSARVRVLSTGNARKNDGVDALATALAASRNERLTMVDPEAASEALRLLSERREDLVAERTRALNRLHGLLRDLLPGGVARTLSAERAARILRGIRSQEGTSARLRRQLASEVLRDVRTLDRKIADLDGRIEAEVEASGTTLTEIFGIGTILAARIVGSVGDVGRFPTKAHFASYSGTAPLEASSGEVVRHRLSLAGNRKLNYALHMVAVCQARSDALGGTYYRKKIAEGKSRKEALRCLKRRVSDAVFRSLVADSQATARSAA

SEQ ID NO: 294287 - protein, 375 aa, unidentified
MPGYVIQGFNEMVSLTETARSAYADRAVSLWEIVMDTISLIGIDLGKHCFHLHAQSASGRMMFRKKLTRSQMFTLLANVPSCTVVMEACAGAHWVARRIQELGHQAKLISPQFVKPFLQGNKNDFADAQAICEAASRPSMRFVSPRNEVQQTISALHRVRDALVRDRTSTVNQIHAFLLEFGVSLPKGMAVIRRLPAMLAAHDLPPRLVALLERLQAHFKYLDEQIEQIESELIRQLREDERSQRLLEIPGIGPITASVLATELGDAHQFACARQFAASIGLVPRQYSTGGKATLLGISKRGDKHLRRLLVQCARVLMLHIERRTDRLGAWVRGLLARRHSNVVACALANKLARIAWAILANGTHYQGVQAVAAA

SEQ ID NO: 294288 - protein, 438 aa, unidentified
MSQTEFAAYVAIDWADRKHYWQLADSDGRRREHGDLLHTPAAIDTWVTGLLARFADGPVAVCLEQSRGPLAYQLGKYARLVLYPVHPATMASFRQAFYPSGAKGDPSDAGLLLELLLHHRQRLRRLDPDTAETRLLQMLTEQRRQLVDERTRHSNRLTAWLKMYFPQPLEWIDNIDSPLGCDFLERWPTLQQLQRAHVETIERFFREHNSRSQARIDERVEAIRKAVTAVEDTALLQAGATASTSLVVLLKALNGAIESLDQRIAEQVPKHPEAYLYAALPGAGPALLPRLIVAFGTRRDRFQSASELAAYSGIAPVTRQSGKSKSVQFRFACPKFLRQTFHEFAAHSTARSQWAGQFYQQQRKRGMRHHAAVRALAFKWIRVLFRCWKEGKPYEEARYLQALEQRGKLRNPTSEASPATKSEGLTAATPAAPNEGSE

SEQ ID NO: 294289 - protein, 407 aa, unidentified
MSIYIGIDCSEQKHDVVFLNEAGVIIGQLEMSHTPAGLLNLEKTRRYLGICREECLVALETAHTLVIDFLWAQAYPQIYVIPPSVIKSCRGRYGQSEARDDRKDGRLIADVLRTDRARLQPWLPDSLLTQQMRAKVSFINHLTRQSVRWSNRLRAILLRYYPLALDIFTSLKHQITLHFILTYPTPQAATALTFKEFKHFAFEHGYRSHAKKLPQRFARLQQPYPTASPDTVQVYQAEVVVLARFLLQLLQSKKQALGELQALFDQHPDRDIFASLPGAGPFLAPALLSKFGDDRARFATAASLQALAGTCPVTDKSGKRKRVKFRRACDREFRWLVQQWAISSLKQSIWANGYWHQVRPRCGSDNHAYRCLGNRWLAIAWKLWQSSQTYDETYHFRQRALRSKPRA

SEQ ID NO: 294290 - protein, 443 aa, unidentified
MSQRKRNELTRGDRRRNERLSSLRGVVRPELAIVGIDLASAKQAVAVTDHESKVLAKRMFAGSPWVIDEVVAWAAPIAAEGGFAGVVVACEPTGHRWKPLLERCRVAGVGLVCVNPMLVARAREAEDYTKNRADFSDAVIIARLAAERRCFVPYLAEGLWARLRHLGVRRSQQLVLSGAARQGLRDLLECYWPAVLGAAEDPMDSLTLRAALGVSTDPGVIAAMGQKAFAEALRAELGSWGGRRRNHRVLRAVFEAAQRPGGVSSEVPAAAERARFALSDWHRALGEIAQVETAMIEVMEELGLAELVTSIDGLSVVGAAAILAETGDPDRFESPRTWVKHAGLAPRANESGTFFGQTKTSGRGRPRLRTATWRAVWPMIHHNEVFKARYAHLRTRSDNPLKDGQVRAALGAALLRQLFVVVTRHVAWDRAIAAGEKVMPLAA

SEQ ID NO: 294291 - protein, 370 aa, unidentified
MKVLYERVAGIDVHKEMVKVAIRSPGEKPWTRKTEVLEFRTFYGVLQAMAQELRRREVTHVVMEASGVYTEPVYYALCEQDFTQVAVINPAHAKALKGHKTDARDCARLAELFECGLLRGSYIPSAELKEVRDLARYRIKTIQARTSEIQRLGKALESAGIKLGSVASDITGVSATAMIESLIDGERRGGVLADLARGRMRTAGKLADLSMALTGRFTEHHALLCRLHQDRIAAFDAALADLDQRVAGKAARWRRETDLLTSVPGFGDVVAQAWLGEIGPAPHLHFATCEKLASWVTLCPGNNISARKRKHGRTGDAGTYIKPMLIQAAWAAIRSAGGYRPGTTGWCAGSAGTRAPPRRRRRSPRSRTPC

SEQ ID NO: 294292 - protein, 319 aa, unidentified
MPTQNAVMYAGVDVAKASLQVYLQGRQSEFKNTPSGLRQLCLELRKTSGVHVVCEATGGYEHALVKALHKEQIPVSVTNPAQVRAACQARGQRAKTDRIDAQMLTDFGQRYQPQPTAPTTPSQDQLVALTQWLQQLIHGLALAKTQAEHHQDPFVGRQHSKLMTHLESQIEAVEKQIKALLEKDPVLQQRVDCLDEIKGVGARTAWMVLAHMPELGRLNRQEAAALAGLAPWTRESGTMKGMRCIGGGRPEVRVALYMACLSAVRSNPVLRPLYQRLRAKGKLPKVALTAAMRRLLIYMNHQLKHLAADVPASGGDKTK

SEQ ID NO: 294293 - protein, 343 aa, unidentified
MSIVAGLDIHRRQITFDALDRVAGEVSRGRIASTPAAVGAWVERFGGRELEAALEACTGWLFVVEALLEAGATPQLAEPAETSALRGKKRRAKTDRADARHLRELLAEGRLPEAWIAPAQVREWRTRTRLRLRLLEERGQWLHRIRATLFHHGVPAAALPADLCNRQGREALASLVLPPASRERIEVALCLLEAIDRQLGTLERELRRLARKQPGCQALMRHYGIGPLTAPTILCELGDVRRLSASREAVRAVGLDIGVHRSDRRSRPGKLTRQGPPEARWALYEAAQSATRRTSPDHAHYLELKAGGLSHKQASLTIARRLTRRCFHTLRELGPQALEPVGD

SEQ ID NO: 294294 - protein, 387 aa, unidentified
MAEITRVLFALIVRVGVDLAKNVIQVHAVDRTGRRVVSRAIKREQFLAWCAQLPAGCLVAMEACSGAHHWARHLRVMGLDARLIAASFVSPYRMEGKSGKNDMTDAAAICEAASRPTMRFVPIKTCEQQAVMSLHRVREGLKEERTACINRIRGVLAEHGLVFDKSPKVLRAELADVIEDASNEMTGLARLVVQCTLEHWRELDEHMKWCDQQIGAHVRGSDDAKRAAKITGIGEIGASAFIAGVGDFKQFKGGHQFGAWLGIVPSQNSSGGKASLGRITKRGDDYLRTLLIQGAKSAVMSAGKRDDPTSRWLQQLVARVGWQKACVAMANKNARILWAVMTREQGFDPQHVSQKPQAKCKQHAPPVPLVPSPAQAAAPPQPVACPA

SEQ ID NO: 294295 - protein, 378 aa, unidentified
MRKIALDLGSRKTAYCEARDGHVVGRGTVEDVRSLEPMLGREQPEAVVAIEACREAWYVHDLLTSWGNQVVLVDTTRSRRLGIGQHGRKTDRIDAEVLALALERGGIPVAHLLSPHRRELRRRLGVRRALVESRAQMVTTARGLAREQGVRLPSCAVPNFVTNVRKSHLDAELSAVLEPLLKLLETIEGELESVEEALAKLCVTEPIISLLATAPGVGPVVAASFVSVLDEAKRFSSAHHVESYLGLVPSEDSSGGRRRLGAISKKGNKYVRALLIQSAWSILRGKNSQDPLRMWAEAVAARRGKPVAVVALARRLVGVLWAMWRKGTAYEPARLATAASQGLANSAQTLQFRADALKKAGKKESMKRLTANEVTASN

SEQ ID NO: 294296 - protein, 348 aa, unidentified
MSHYVGLDISMKETVFCIVNDKGVPVHKGRSKTDPEEITRYLEKTGLKIEKIGLESGSLSHWLINKLRELGLPAICIDARKMAAFLSVQVNKTDDNDARGIAEAMRCGLYKEVLQKSQQSIETGTLMQSRRMLVQQRVQLINSIRGFLKTYGVRLNSCGEKEFATRVRAVLPGDLMIAREGIESLVNCYEKLSAEIKKLDEKIEALVREDEDVKRLMTVPGVGIITAMSFKIEIDDPHRFKKSRNVGAYLGMTPRQYSSGETKRQGHISKCGSSEVRMLLTESGLVCLTRSKKWSKVKAWGLKIMRKHGAKKAAMAVGRKLAVIMHRMLVEKKDFIYGEEKRKEIKVA

SEQ ID NO: 294297 - protein, 381 aa, unidentified
MKKIIRFLGLDVHAETIAVAVAEADGEVRALGVIPNQPESVRRLIAKVGPADGLHACYEAGPCGYVLYWQLTELGVKCDVIAPTLVPVKSGDRVKTDRRDAIKLARCLRAGDLTPVWVPDPACEALRDLVRARLAAKRDQLRHRHRLGKFLLRHGRRRPQGMKVWTRKHLEWLKRSVHFEHAAQEATLADYLNEVERAGERIERLERAIDSAIEGVPKRLRAVVDALQALRGIARVSAVTIAAELGELSRFSHARQLMGYSGAVSREHSSGNEVRRGAITKTGNAHLRRIVIEAAWAYRHRPAIGEAQRRRQEGLSEEVKAIAWKAQHRLHARYVRLVGRGKVKQQVVTAIARELLGFIWAIGVQTETTIDASGGSKRLAA

SEQ ID NO: 294298 - protein, 400 aa, unidentified
MKRLSGGIDVGSVAHHVTILDEEDHVLYNRKISHTLDEFTESIKQFKKIEKKEKGEISFALEGKNGYSRPFDRILLDQGFALYNIDNLKLKRFREAFAGEWKDDGRDALMLSKMLKLKEHINGKKEKVFIKIEKPSLITESLKLLSRHQQTLIDEKVRLTNRLSKKLLEVCPEILRLGKAKSKKLIAILTKYPDFSKYKSMTLKSLLKIKGIGEIQAPFLLKRLNHITYVGLTDIYKTIISSYAKRILELQEEIKAIDQKLDEIGGKNQSVKHLKTIPGVATKLASRFIGEIGDINRFPSEKQLAVYCGIACVNNNSGKVTKAKAVYKANKICKQTLITMAGCSIRIIPQCKCYYLKKRAEGKGHNHSLRCLARQLIKIIYKMLTENRDYIIKKELKKVA

SEQ ID NO: 294299 - protein, 339 aa, unidentified
MKEVSTIGLDLAKKVFQVHGVDAAGEVVIRRALRRGRVLSYFAQLPPCLIGMEACATAHYWARELSKLGHRVKLIPPAYAKAYVRRNKNDAADAAAICEAVSRPAMRFVEIKTEAQQAAAGIHKVREMLMKQRTMLINALRGLMAEFGIVVAEGTRHVGELAAMLADPAERRIPAPLHDGLVRMAQSLHGLERQIEGIDKQIVDWGRGNQTCRHLITAPGYGPILSSAMAAIVVNPAVFRSGRDFAASLGLVPRQDGTGGKVKLGPISKRGNGYLRRLLVNGAMSVLNSKRAKQDPWLIKLLANKERKVAAVALANKMARIGWALMRRQEDFRATPAAA

SEQ ID NO: 294300 - protein, 414 aa, unidentified
MRTVSHREAEVTMDAAKPMVRAKAWVGVDVGKEFHWAVVVDAEGEILLSRRVENEEADVSALVEEVLAVSGGEPCWAVDQPGGGAALLLALLWGGDQRVLYIPGLAVDRARDGFRGETKTDRRDALVIAEQARMRRDLKPLEPADELLSELGLLLSRRRDLVADQSRALQRIRDALLASFPGLERALPDMRYRGALELLCRYQTPRAVLRSGRRRIETYLKGRGARNAAGLAGAAVAAAKAQRVVASAEGVAASIVAELAREVLALKERISALDAQIEARFRAHPLSGVLTSLPGMGALLGAEFLATVGDPRDGFASADQLAAFAGLAPAARDSGKRTGNDRRMRGGNRRLKQVFYQAAFASLRGSPESRAFYDRKRAEGKRHNQALIALARRRVNVLWAMLRDGTEFDPALAA

SEQ ID NO: 294301 - protein, 351 aa, unidentified
MNKGMSKFEKKKHFVGIDISKDTLDLCIIKGESPGKYNDLRIKNALTDFGRVTKWINNHRVNIGDCLFCMEHTGTYGLLLFAWLNSQGIDFCVKPGLEIKRSLGMTRGNSDRVSARRIAEYASEKRGKLTSFEMPSKLLIQIKQLLTYRDQMVRIKTALMNSRQSHQEYEQVSDLVDISQKLNMQIRQMQDVVADTEKKIKALIKSDPQVQKNFTLASSVKGIGLVIAAFMLVTTNNFNSFSSGRKYACYAGVAPFEHSSGTSVKGQTKVSHLGNKTIKTLLSNGANSAASWDKELRAYYERKLAEGKKHNVIMNAIKCKLINRVFATIKRQTPFVDIYQHNFAINNLQTS

SEQ ID NO: 294302 - protein, 322 aa, unidentified
MAEITNSTNIGIDVSKDWLDIVVLPSGETWRTENTEENMGVLVQRLEKLKPERIVIEATGGYERLVTTHLYLAKLPVCLVNPRRVRYFARSIGQLAKTDKLDAKVLARFGEMVKPALTQLPSENEQLLSALLTRREQLLAILVAESNRLGTAPAKVRPSLDEHITWLKSQLKELDTDIDAFINDTPDLKEKDDLLQEVEGVGKRTSAKLIADVPELGACNRKQIAALIGTAPYSRDSGRMKGQRAISGGRPDVRSVLYMAALTATRCNPVIKEFYQRLLKVGKKKKVAIVACMRKLLTILNAMLRDRKRWKPSICVPSAQSA

SEQ ID NO: 294303 - protein, 397 aa, unidentified
MEIQDETGRKLAARRLPEGASGITRLHELIAAHLGSEGDPGQVAVGIETDRGLWVQALAAAGYRVYGLNPKQVARFKERYSTSGAKSDAADAHALADMVRAERHQLRALAGDTPGAQAVKVAARAHQTLIWERTRHTLRLRSALREFFPAALAAYADLGLTGPDTLELLMRAPAPAAAARLTAAQISAALKRAHRHGVPARAQVIKDALRGPQLAQPAPVTAAYAAVVQAAAAVLITLNEQISRLEAQVEAHFLQHPDAEIYLSQPGIGTVNGARVLAEFGDAPGRYACAKARKNYAGSSPITRASGRSRAVLARFVRNDRLADALQSQALSALTGSPGARGYYDKQRARGLGHNPALRQLSNRLVGILHGCLKTTTHYDEATAWPATVTHPQPLAA

SEQ ID NO: 294304 - protein, 361 aa, unidentified
MRIIGCDLHARQQSVAMLDTETGEVVNRTLRHEGDEVREFYSQLPRPVLAGIEAIGPMQWFLQLLDELGIECRVGDAAKIRAAEPRKQKHDRRDAELILKLLVENRFPAIWRPSQELLDLRALLLHRHHWVRLRTQIQNALQAIALANGLRRGPGLWSYDGQAKIAFLPLPPHASYRRSMLQALYRQMEDEIAQLTGQVATQAEQRAGARLLLTHPGVGPVTALATDVFLGDPQRFADGEALASYVGLIPREYSSGAHQRLGALTKQGSPFLRFLWNEAAAHAVRRDPELQRFYRRKLVQKGLGKSRVAAARKLGIRLWIMLRDQIDYQEFCLRGQKQQSGAAGAGMLEVGNGANCHRPVG

SEQ ID NO: 294305 - protein, 341 aa, unidentified
MSDYSYFGGIDLAKNHFSIHVVDVKGKVVLHKSVSRSKLLTTISNLPHMCIGLEACGGAHYWARTLNKLGHDTRIMAAKYVAPYRTKGKNDLNDAVAICEAVQRPSTRFVPIKSPEQQAILSIHRMREHWVRERTAIMNRIRALLSEFGLVIPVGRSSLMKQVPLMLEDANNELPQLARAVLHDAYLHLNALNQRIADTEQAFEAFAKVSDNVQRIMKVRGIGPQTATAILASIGNGAQFDKSRDFSAWLGLVPKQYTTGGKPRLGRITKHGDKYLRTLLVHGARTVIANLGDKQDRLSQWCRGVLERRGMNRAVVALAAKNARIIWSLLHNQTEYENYAA

SEQ ID NO: 294306 - protein, 424 aa, unidentified
MKRTQNEKILQIKFETLVVGIDIGKDTHYARAFDCRGIELSKLLRFSNTNQGYEALEDWMQEIMKEKGKTEAIVGFEPTGHYWFTLGDHLQRKGHRLAIVNPFHVKCTRELDDNSQTKNDKKDPKTIAMLVKDGRFRDVYIPEDVYQELREAVSERERLVEQMISLSNQVIRWLDIRFPEFNQVFKNWRGEAAWLTLRHFPTPAKVAAAGALSIVSTWRKKMKKPSLKKAEKLVNLAISSIGRTAGNEAAEAALQNLLTQYEMVMRQKQDIEQLMQELLIKVPSASKLVDIKGMGMVAAAVIVSEIGDISRFNDPRQIQKMAGLSLRENSSGKHKGKTRISKRGRRRLREGLFRAMITMLATNSEFRQLHQRNLSREQNPLNKMESIVALCGKLIRVIFAILTKGNDYDADRMLNDMKRSMKAA

SEQ ID NO: 294307 - protein, 396 aa, unidentified
MTLFVGIDVTKNKHDFSVIDSFGTIHLNHKQVKNDREGFTELQITLESLRKSTNEASIQIALEDTGHYCFNLIRFLRSCGYPTFSYNPIIIREFAKVDSLRKTKTDKSDALTIAKKLLNDLDPSIHEVDPFYQELKFLTRHRSRTTEKRAQLKTQFVRLLDIMFPELAPIVGKANIHSQYIYNMFKAYPSPKKISRCRNKNLFKVLTNHRGRQLTSETIDRIKEASKQTIGFSTTSLELELLQIIETIELYTTQIATIDTETDLLMAKINSPITSITGVKNRLGSVILSEIRNIHNFKSSGQLLAFACLEPSVFQSGQYNREGHMVKRGSTSLRWALIQAAKLAARFSPTFKAYLDKKRAEGKHYSVAITHVAKKLVRVIFHLLKHQIFFEEVKLN

SEQ ID NO: 294308 - protein, 424 aa, unidentified
MKVTYQTCCGVDVHKSFLVATIVKTTGGIEPSYQKKRFSTFNNSILEFKQWLLDNHCHDVCMESTGKYWVPVFNLLEDKINVVIANPKWVKAVKGNKDDTKDSKWIGDLFRLGLVKGSYIPCKKVRILREYTRYRYKLVSCRSSEKNRYQNALTVCNVALDSIVSDIFGKSSTSIIDYLLEQSGTSINHEEIASKLLRSLKSKEDAVIESVEGYQMTDAQKYRMRLVRAHMDYITAEINDVDKMIENMISSNPDFENAVQFLCTIPGVKRDSAITIISETGTDMSQFSSSKRLCCWAGLTPGSNESAGKKKSVRITRAGVYLKPALVQCAHAAVKSDKSPYYKKKYESLVKRRGKKRAIIAIARMILTAIYQMLSTGEQWNPSDLYKIDMPVALVEKQKAKAIKQAKKLLQREGLLPPDESLAS

SEQ ID NO: 294309 - protein, 409 aa, unidentified
MSDMYELYVGIDWASTSHQICLLRPDGAQETFAVAHSGAGLATLRARLQGRVARPERIAVAIEVPRGAVVEALLAQGCHVYAINPKQLDRFRDRHTVAGAKDDRRDAFVAADALRTDRAAFRRVQPEDPRVLQLRELSRLHGELVEEQGRLANRLREQLWRFYPQLLAVSPAADEEWLWEVLTLAPTPTQGRRLTVSALRALLARHRIRRLPADAVYAALQEPALPVGAGTIAAASEHLGVLVPRLRLVHEQRAQCERRLDRLLRELAAPAGADPVEHRDVTILQSLPGAGRVVVATMLAEAGPALADRDYQTLRAHAGIAPVTRQSGKSRLVLMRHSCNRRLRTAMFHWARNAIRLDAVSRAHYDRLRQCHDHARALRGVADRLLSLAITLLRNGQLYDRGRRQRVAA

SEQ ID NO: 294310 - protein, 354 aa, unidentified
MRIIGAFDVHRKQITYKWLDTETGEIQRGRIMPGVRKAVREFLVPFEGLDAHFALEATTGWRFVAEELSRVGLVAHLAEPADTAALRGSKRRAKTDRRDCDHMMDLLGTGRLPESWLPPAHVLEIRTLVRLRKALTDTRREWQQRVQAQLFHQGVPRIPAITTQGRAQLAAVDLSAAGRQVVTTGLAVIDHLDYQLAPLDTYLVRFAKVQPGCRALQQRLFGVGDLTAVFIWAELGDCVRFSSSDDAVRYAGLDITVYESADKRPPGHLSRQGPEALRWALYEVAQSAARSSSPDYAYYLAVKRRLNHKRACLSVARKVCRRAHHLLRSFGDDAFAPVKGSVLPSFDRPAMATA

SEQ ID NO: 294311 - protein, 354 aa, unidentified
MPSKVTKPYTSAQPKLMSIGLDIGKDVFHIVGFDHNGKVVLRRKFRRLELDAVFEKLPRCVVGMEACLSAHFVSRRLRALGFEPRIIPAIYVKPFLKGQKNDYNDAEAIAEAALRPNLKLVKEKTQEQLDLQACHRVRSRLVSRRTATINQIRAFLIEHGIAIRTGANSLRRSLPEILLQRADELSPRMRVLIEELHGDWLRLDARIEALNEEIEEISRQEKSCQNLMTIPGVGPLISTATVAAIGNGEAFERGRDFGAWLGLVPRQYSTGGKPILGRISKRGSKYLRTLFIQAANVILMRPQNWPRYSFGGWLVTAATRLHRNKLATALANKLARIAWSVLRYNERFDDAQTV

SEQ ID NO: 294312 - protein, 277 aa, unidentified
MEEMQTSKGHNFVVGLDVAKAKIDVCLRLPTGKLRSKVVPNTPGGHEALVSWLAKNGCNQAHVCMEPTGIYHEAVAEHLSDAGFVISIVNAAQVKAYGQATGARSKTDTADAQLIAAYCAAQHPQPWQAPPVSVRILKALVARRDALVELRTQELNRQQVAHDSVRASIQSLLDLLNEQIDQIEEQIRQHIDDDPTLESQRKLLDSVPGLGDATIPVLLSRFGGPLRFAYTKQAVAFTGLDVRLYQSGSSVHGRPRLSKRGDSRLRKARTRCGMPLE

SEQ ID NO: 294313 - protein, 327 aa, unidentified
MSSYLGIDVSKDWLDVVLLRDGLAAEKGQFDNNFQGFRQLQHFLKKRKVKAVQVCLEATGYYGLEVALFLHQAAYRVSVVNPARIKAYAESQLSRTKTDTGDAALIADFCRTQQPEAWTPPPPEQRELQALVRHLQNLNDMRQQELNRRQAGIPSETLLKTLDDHIAFLDQHIADLLRQIRDHIQQHPHLRQQHDLLTSIPGIGDLTAFKLLAEIVDVTAFDSARQLAAFAGLTPRERRSGSSVRGRSRLSKRGSSRLRNALYFPAIVAQRYNPILQPFAQRLLAAGKSKLQVIAAVMRKLLHLVFGILKSGQPFDPHYLDKQPALP

SEQ ID NO: 294314 - protein, 344 aa, unidentified
MAQGTTARVTTVGIDIAKNGVCIHGVDAHGHVVVKKRLARQKVLPFLAQLPPCLIGMEASGGAHYWAREFTQLGHTVKLMSPQFVKPYVQSQKNDPNDAAGICEAVERPRMRGVPVKSITQQDVQALHRIRERQIKARTALINQIRGLLMEYGIVIPQRASQVRHKLPIVLEEAENGLTATAREWLHALAEELQALDQRIAATDQQIERVFEADEACQRLAQLPGIGPLTATALVAAVGDATECKNGRQCAAWLGLVPRQHSTGGKTTLLGMTKRGNCYLRTLLIHGARAVLRVVDRKTDARSRWLQGVKARRGMNCASVAQANKTARVAWALLAKGDRYRHAA

SEQ ID NO: 294315 - protein, 360 aa, unidentified
MNATTVAVDLAKSVFQLAVADEHWRIVETQRLTRAQFERWFVNRSVGLVVMEACGSAHHWARWLNSFGIEVRLLPAQYVRAYVRRNKTDASDAAALLEAARASDMRPVRVKSVEQQALQGLHRIRSLWMGTRTSRINALRGFLREFGIAVPVGARTGLEAISRVLADPASAVPELIRGSARLLVEEIRLLEARIAQLERELAALARLSPACTTLLSIPGIGLLTATALVAATSGDVTHFKDARHFASWFGLTPREHSSGSSRFLGKISKRGDRYLRMLLTHGARSVLRAAKVAEAAEREVCGVRRWALDVQRRSNHNKAACALANKLARICYATLRDKTPFGETERLNKKITRETFVMPA

SEQ ID NO: 294316 - protein, 430 aa, unidentified
MSYRIAGLDVHKRMLAVVVSDVEVDGEYQFERRMFGSSPDQLRSLAEWLLEQEVEEAVMESTAQYWKPVWEALERYWKPLRQKPEGARRKSGTLHLAQAQSNRGPRGRKKDFRDAERLVKRLVARELTLSFVPDAEQRLWRTVTRRKYQLKRDRVRLQNQLESLLEEAHIKLSSLVSDLLGASARRMLKALAEGETNPGALAALADWKLRATPEQLCDALGACTDLKPVYRRLLKMALEQLQFLEEQIDRLDQELASLLHPHQDAVQRLAEVPGLGVESAQQIIAEVGPTAATFPSAKCLSSWVGACPGDEESAGVNYSHRSPKGNRHMRRVLNQCANAAARTKGSIFEIVYRRSVPRLGHNQTIGAIAHRHCRLIWLILHQAVRYEERGPAVTKQSNQRRTARIIRQLRSLGYRVDPPTPQHANTAQGQ

SEQ ID NO: 294317 - protein, 344 aa, unidentified
MSEVSIIGLDIAKHVFHAHGADERGRVIFSKRIGRGKLLDFFAAQPSCTVALEACGGAHHWARQLTQLGHDVRLIPPAYVKAFVKRQKNDAIDAEAICEAAQRPSMRFVAVKSEEQQAAGLVFRTRDLLVRQRTQLINAIRGHLTEYGWIAPKGPSHVAMLADLIEEDEMANALPEAAHAMFRLMLDLLAGLNGKIADLDKEIARRAREDEVSRRLMTVPGIGPISATAIAALAPPVETFAKGRDFAAWLGLTPLQRSTGGKQKLGATSKMGERTLRRLLIIGSSAVVQQASKRGAPKGSWLEQMLARKPRMLVTVALANKMARIIWALLVKQENYRAPVAAKA

SEQ ID NO: 294318 - protein, 317 aa, unidentified
MSEPVYVGIDVAKETFHVATCPNILKTCLPNTPQGHQQLCQNLQNHTIALIVLEATGGYERPLAAELLNAGMPVVVVNPRQVRDFANGLGQWAKTDPIDAQVLAKFAYIVKPAPKTHATPQTSELAELVRRRRQLNDLRTQESNRLLMIHHPKVKKSIKKMIKTLDFQIKEIDQLIQDYIKANDDFRNKDRILQSTPGVGPQTSAMLIANLPELGKLNRQEIAALAGLAPWDRSSGKYDGKAHIWGGRKDVRSVLYMAAFTACRFNPIIRALANRLKQKGKAYKVILTACMRKLLIILNIMIRNQTLWTPEISIKNP

SEQ ID NO: 294319 - protein, 342 aa, unidentified
MLHAGIDLHKKFSVVTVISDAGEVLVKGQRLENDEAAVRNFLDGFDSEVRVALEAGPNWNWMCDLLDEMGVENKLCHPLKTKAIGSAKIKTDKIDSLVLARLLKSDFIAEAHKADYATRQLRELVRMRAYLVKSRTGYKNKIHAILTRMNIANPHSDLFCSKGITYLKDLALAPAYRNSIDAYLLMIEALDLQVARADELVHRAFEQRQDARLLATTPGIGEFLGLMIAAEIGDISRFSSAKGLASYSGLIPSTSQSGETTRHGGITRQGSAWLRYALVEATIHAVGRPGPLKAHYIRLSARKGRYVARAATARKLCTYVYHMLNEQKTYDEVMAFGRGDLG

SEQ ID NO: 294320 - protein, 412 aa, unidentified
MEVIIENCCGIDVHKKTIVACLMKGKPHEKPKTTIKTFTTMSRDILACREWLESEGCTHVALESTGVYWKPVFNILEESMEVILANARDIKNVPGRKTDVKDCEWIAQLLRHGLIKGSFIPPKPIRQLRDLTRYRQKLIQQRSSELNRLQKFLEDANIKLASVVADINGMSAQEMIQHLIQNDLSPREMANLAKGRLRNKLAELEAALEGHLTDHHRFMLRVSIQMIASYDEAIEKLNTEIDKKMEPYRNNSEKLQTIPGVKKKTAETIIAEIGVDMTQFPSHAHLSSWAGVSPGNNESAGKRYSGRVSPGNKWLKSSLTESAWGASRTRGTYLKARYHRLASRRGKKRATLAIAHTILIMAYHIIKEQCTYKELGADYFDRLNEQYLIKRLTSRIRTLGYQVEVKKEPAIA

SEQ ID NO: 294321 - protein, 463 aa, unidentified
MRRRIGRSIKKRMRQGLVVLEPNVAGVDCGSREHWVCAAAKESGQLSVKGFATMTEQLEALADWLHQQGVVSVAMESTGTYWISLFDLLEERGFEVLLVDARKLKKVPGRKTDILDCQWIQQLHSCGLVEGCFRPPAVIRELRALARERSNLKADSGTVVQRMQKALDQMNVQLHHAVTDLTGVTGMKILRAIVGGERDPQHLARYRDRRCGKSQAQIAQHLKGTWRDEHLFTLESNLERYDHLQTMLEKYEQQIILRLQQLSPPERQDRPVPTHPNARKDKDMRRRGEAPLRTALWRFSGIDLTRIDGLGSEAALRVISEVGFDLTSFPTSKDFVSWLKTCPPLNRSAGKNRKGRAKGFGSSRIAQVLRMGALSLKNSPTALGGSYRRMARRKGSSIAIGATARKLAEHIYRALRWGIQYLDQGAEAYEARFQNNRLKYATKIAKSMGYALVPLQNPNEVSA

SEQ ID NO: 294322 - protein, 400 aa, unidentified
MISVGIDVSKGKSTVCILKPYGEIVCSPFEILHVKKQLDALNDLLDKLDGEIRIVMEATGIYHLPVLTFLHEKGYFVSVINPFAMKKYAKDNSIRGAKTDKLDSIMIANYGIEKWFKLQKYEGDEETYAELKLLGRRYRYYMELHVKALQELTHILDYVMPGIKKMFKSWNEANGKDKLSDFVERFWHFDLITSMSLEKFTEEYLVWAKEEKYHRSRSKAEAVYELASSGIPTLSSSTPSTKMLVQEAVSVLRTVDSSLSLILTRMQELAKSLPEYSTVREMGGVGDVLAVKLIAEIGDVRRLHSAKGLIAWAGIDPPPYESGQFIGSKRKITKRGSSTLRKVGYEVMRVLKSHPAPKDDAVYNYILKKESEGKSKKHAKIAGLNKFLRIYYARVIAVYN

SEQ ID NO: 294323 - protein, 381 aa, unidentified
MAASTQLMPDTVCVAIDIAKRYHDVLVRWPDGREKVLKMPNTRAGHDDLIQFLQQQDAPVLAVLEPTADFHRPIAYRLAQAGISVHLASSLAGARVREALYTSWDKHDRKDARVLMYLLTQGMTHPFHDPLHEGYFDLQEISNTYQQVARARTRCQHSLVNHYLALYFPEMERYLSASRAHWFCHFLLAFPTPANITALTREAFVEAAWESVGRKVAKQQFLEGIYEAAQTSMGLPVVPDSPAVHTFRLQVKQYLSLTEQRQALEAMATTCMRDNKDFARLQTLPGVGPIIALMILAESGDLRRFSHHRQYLKFCGFNLAASQSGNTCSRYRLAKRGNARLRYAYWLAATVASGCEKTAFAPNSTATSGQIPPMETLGGKR

SEQ ID NO: 294324 - protein, 394 aa, unidentified
MKLIGIDIGKNKHFFCVMDQQTGEIISQPVSFSNDKEGFDFLVQKIKSYPKDSILIGMEDTGHYHFALLKYLLDLQYTVALINPKTTDFNRKMQGGITKNDKLDTINICDVLDTPERKKQYRISKVNSFDLYEQKQLTRHHHNLKEEENVYKNRLQKCIDIVFPEFNKLFNSKYGIVYMNILKMFGSAENIANTDIRTIRKCFEIEGRGNRISLTPERLKECARSSIGISSSAEVIQIKHLTAQIELIEEQLTEIDKKIEEFSIQNNSPILSIPGISHFSGTSILAELGDISNYSKPSQIIKFAGVAPLHYESSQFNAQHTAITKKGSKYLRKTLYQIILPVIRHNQVFYKYYQLKISQGKGHRCAQGHCVRKLLRIIYHLLKTNQQFDPQLLR

SEQ ID NO: 294325 - protein, 445 aa, unidentified
MSLRARTPDSNLLTGSLPGWPVLSARRKEEAVEQIHERVAGLDVHRDSVAACVRMTGPRGGVANEKERFATTTTELARLAGWLAERQVTLVAMEATGVYWKPVYYALERGFDVWLCNAHHVKNVPGRKTDMSDAEWLADVAAHGMVRPSFVPPPAIRELRELTRYRKTQIDARVAEIQRLEKLLQDAGIKLTSVASKVLTQSGRLMVEALIAGQCDPAALAELAKGKLRPKIPQLTEALNGHFGAHHAVAAQRILGHVDFLDASIATLTEQIDARMQPYGAARCLLAPVPGLDRLIIDTVIAETGADMTRFPSAGHLANWAGVCPGNHESAGKRRRVGVVPGNRWLRRALIEAAHAAARTKASYFGAQYRQIARRRGPNKAAVAVAHSLSDLVWHMLSTGECFTDLGADYFQRRRDPQREADRLVRQLQALGYRVNVTEPPTPAP

SEQ ID NO: 294326 - protein, 389 aa, unidentified
MIVIGTDTHKYKHALAAVDDGTGRVRGSREIDADDAGHLAAVKWARGLDDERVWAIEDCRHVSRRLEQALIAAGERVVRVAPHRMGASRKGEREPGKSDEIDSLAVARAVVKDGVEHFPAAYLDERAMEIRLLADHRNDLIAERTRIQNRLRWHLVALCPELEASLKKRSLSDTRQLDRIDRRLRRLTPESRVRVARAQVAQIRSLTRHANTLENELLGLIKTQRPQLLAETGCGPLTAAILIGRTAGAERFQTDASFALQAGIAPIKCSSGQHQQHRLNRGGDRQLNHALHIIAITRARHDPTTREYLARKQAEGKTKKGALRCLKRHLARRFWQLLAEPPLPADQAITRELAAEPAGPQALTTPERPAPRREVDRTITGPIPMVCIT

SEQ ID NO: 294327 - protein, 422 aa, unidentified
MQTLLSQRFTAYVGIDWADTKHDVCLQVAGETQRHFSIIDHTPQSIDRWAKSLFERYGAPIAIALELNKGPLVAALQKYEFFCLFPINPSTLAKHRKAFVGSGAKDDPTDAQWALELLLTYPQRFAQLMPQSPAMRILASLTEHRRALVDERVKVSNRLICTLKQYYPAALELFSNHDSVVFCDFLMRWPTLEQLKRSRQSTFLKFFNEHNARHAQLNQTHWEIITQAMPLTQDPGVIRPAQLYTTALASQLKGLICTLKDFDREIEETANTLSDYPIFKALPGAGQHLAPRLMVAFGEQRDRFSDANAMQQYAGIAPVTQRSGKKKVVYWRYRCSTFLRQTFVEWAAHSITQSTWAEAYYRQQRAKGCSYQAALRALAFKWIRIVYRCWKTSTIYDEKAYLQALTRHGSTLVEAPMEVVTG

SEQ ID NO: 294328 - protein, 343 aa, unidentified
MEYYVGLDVSLKQTSICVVDQSGSVVREGVVDSDPEAISVYVRSKAPGAVRIGLETGPTSTWLWTELKRLGLPVICIDARHAKAVLKMQINKSDRNDAIGIARIMQTGWFKEVHVKDIDSHTVRALLASRALLVKIKRDLENHVRGLLKNLGLVIGRAKFNVFAVRAEELIEGRPELIATIRPLLEARTAVEQQVSELDRKVMKLARHDAQVRRFMTVPGVGPITALAFKATIDDPARFARSRSVGAYVGLTCRRHASGEVDWSGRISKCGDAMLRSYLFEAAGVLLTRVPKWSAVKAWGVKLVKRNGLRKAKVAVARKLAVILHRMWIDGTEFNWSKKEIAA

SEQ ID NO: 294329 - protein, 359 aa, unidentified
MEHYIGLDVSQAKTAICIVDGRGKVIIEGKSLTQPDCIYDWLIGIHIPLVSIVKVGLEAGAMSAWLCTELAKKGLPIVCLEAWQAHEFLKAQRNKTDRNDAKGLAQLVRMGGEFLREVSIKGYVSQEIRTFLTLRQQLVQQKVGLENNLTGCLKPFGLIVKRKTDSAKVFRQRVLEALTKADELGLKQLREAMMPSLDLHKELCLQLDILSRKVEAAANAHPVCRRLMTIPGVGPVISLSFVTAVDDPRRFVKDEDIGAYFGLTPKQFQSGETDHKDGISKLGNMMTRQHLVQAATVMLTSSKEWSTLKSWGMNISKKRGFFKARIAVARKLAIIMHRMWINDEDFRFSTKAGGQKLAA

SEQ ID NO: 294330 - protein, 345 aa, unidentified
MPIVGGMDIHRKQITFDYVDLATGEVVCGQIAPADRRHLRAWLERFEGIPGVAFAFEACTGWRYVAAELARAGVKGHLAEPADTAAARGRKKRAKTDRADSRLMRDLLLQGRLPECWIPPEHVLECRALLETYHALRREHTAWVQRAHAVLFHQGATRLREGGTGTAEGRELLREIAAGQLSPAGQQQIGLYLRMLEVTEAELDALRGQLTGAARRLAGAKALRERLYGVGPVTALALTCWLGGAGRFSSARKAVRFAGLDITVYSSAGKRSPGHLSRQGPPVLRWCAYEAGKVHAHGQAPDHGYYAQVKDRIDGKRAALSEARKIIRQACHLLAELGDDALATG

SEQ ID NO: 294331 - protein, 348 aa, unidentified
MTTTVYCGVDFHARVQTVAYCVIADGEIHLHELDHRKDDVRGFYSQFSGEVVVGLEASGYSPWFERMLEELGHSVWLGHAAEIRRFAKRRQKNDRRDAELILDLLLKGEFPLIHRPTPDSLEVLRMLRYRHRMVKMRTMIVNNLQALAIGSGLSLKSRLLTRSGRLRLLATQMSPVMSRQREEWLSLVDTLNARIASVEKWLEQQAQANSRVQLLRTQPGLGLLTSLGLVHSMEPVSRFCNQRKVAAYFGMDPMERSSAEKRRCIGISKAGSRLVRFLLVEAAQTAARKDQELKRFYQRLVARRGRQKALVAVGRKLLTRSYIMLRDGIDYAEFLRRGVEARPARRDA

SEQ ID NO: 294332 - protein, 344 aa, unidentified
MDHFAGLDVSVKETSICVVDDAGKIVREVKVASEPEALLAVLKNLAYHFKRIGLEAGPLSQWLFSALAEAGLPVICVETRHMQAVLKAQINKTDRNDARGIAQMMRAGLYRPVHVKTIRSQKLRMLLTHRKLLQSKAIAIENDLRGTLRNFGLKVGMVGKVKFEARISELVENLPDLAVLVEPMLIVRRTLREQIVILHRRLLAIVRDDEVCRRLMTTPGVGPVVALTYRATVDVPARFRKSKAVGAVFGLTCAKYQSGEVDRNGRISRCGDEMMRVMLYEAAQSMLRSKKWCWLKAWAMQIARRRGMKKAIVALARRLAVIMHRIWVDGTEFRWTREQATAAA

SEQ ID NO: 294333 - protein, 343 aa, unidentified
MKLMRIGVDLAKNVFQIHGVDRHEQPIWRQRLPRDRWLQTVLEKIEPGCEIGMESCSGAHHWARQLQARGFQVRLIAPQFVKPYVKSNKNDANDAEAICEAMSRPSMRFVAVKTIEQQDIQATHRIRAGLIEQRTAKANQIRGLIAEYGLVAPKELLMLRRAIPCWLEDADNGLTARFRRLLNGLWDDLRALDERVSELDGEISAIAASDPAAARLQQLRGVGPMISTALVAAIGDASQFDNGRQLAASLGLTPKQHSSGGKDRLLGISKRGDAYLRTLMIHGARSALRTAKSKDDRLSQWAVRLAERSHPNVAAIALANKTARMAWAMLRNGTDYQPDRAAA

SEQ ID NO: 294334 - protein, 341 aa, unidentified
MDKVSTIGLDIAKSVFQVHGVDAAGAVLIRKRISRAKVLEYFGELPPCLVGIEACPSAHHWGRELQGLGHTVRLIPPSYVKAYLKRGKNDANDAAAICEAVTRPSMRFVPIKTKEQQTALMLHRARQLLVRQRTMLSNALRGHLAELGIVSAKGRNGPAELLRIIADGRVSPAVCGILKVLTRQYGAVGTEIASIDKSIMALHRGCEASQRLAEIPGIGPIGATALVAEIGDWKTFSSGRSFAAWIGLVPKQHTTGGKDRLGSITKQGNRYLRWLLVVGAMAVIRYARKHGTQKRPWLGRLMERRPTKVAAVALANKIARMAWAIMVRGERYKEPKLLLAA

SEQ ID NO: 294335 - protein, 389 aa, unidentified
MFFLGIDIGKNSHVASLIDDKKKVIFKAFSFSNSTEGASSLIKKLEPFCDSLDIAMEATGHYWINLFSFLLQKNFSVHLINPIQTDGWRNSTEIRKRKNDTIDSILIADLLRYGDFIESSLSNEDYLSLKNLTRFRSYLISSTGDLKRKTIALLDQVFPEYEKCFSNVFGKTSKEILLSFTTPQEFENISSSKLSKALENITMKKFAKKKIEELSEKAKTTIGVKFCLDSFSLQIKMLIEQISFIETQVEPIEEEISTIMTKLNSPITTIPGIGPVIGATILGELGDISRFSNASKIVAYAGLDSVVSQSGNYEAKSMSISKRGSSYLRKVLFQAALIAEFCDPVFSDYYQKKIAQGKHHLVATNAVARKLCYTIFAVLTKNEAYKIQQ

SEQ ID NO: 294336 - protein, 366 aa, unidentified
MLQKAELSCEADSENYLGGSSETMYYIGLDVHKRTISYCVKDAAGRVHQEGKIGSTRRELDGWIRTLPQPRTIAMEATIFTGWIYDHLLPHAEQVKVAHPLMLRAIAAAKRKNDKIDASKIADCLRCDFLPECYMTSTEIRDRRRTLRYRGLLVKQMVQMKNRISGLLLEKGVTHTKRRLHKVGYFAELMAGNEEIDQSIRPLLKLSREHIVRAQKLDYALVSSLERDPLLVERLKRLRTVPGVGPITALTWALEIGDVSRFRSIKQAISYCGLCGAEKSSADKMLRTPISKQRNKHIQHVLVEAAKLAPRQCHELALTYEKEMQRGNRNRATLAVARKIVAYLLAVEHRQQDFVPTEEFGGTVAA

SEQ ID NO: 294337 - protein, 358 aa, unidentified
MQRNKISFKGQKIFIGIDVHAKSWKVAIAPEVGVVKGYSQKPSVKELFDFLKKNYPDGEYQAVYESGFSGFSTYYALTEVGIDCIVIHAADVPTTQYEEVMKTDRVDAAKLARSLKAGLLKGNYVPEKQYIDDRSVVRIRKTIQKQLGGYKSRVKHLLHCHGVEMPERFSKIQTHWSRAFITWLMKDVKLMSDTRTSLDLLIRQVEVIRGTLLEATRQLRKMSQAKRYKRRHDLLRTIPGIGIITTMCILTEVCDVKRFHNENEFAAYLGLIPTSHSSGENIVHGEKTFRGNKQLGPMIIEAAWIAIGRDAGLGAQYFQYKQRMEPQEAIVRIARKLSNIIFSVLKNEKEYVPYQTGI

SEQ ID NO: 294338 - protein, 318 aa, unidentified
MLDPGDGEIVEERFKSSREALLAWARKWDGKLDAVAVEATTGWRWVARELQARGVAVVLTDPGQASALQGNRKRAKTDRLHARWLVTLLAREMLAESWLAPEEIQRLRDQTRLRKALTDDHTRWAQRLHAVLVHEGWACSRGSLLTVSGRRWVAALRVDAGARAQIDAMLSVMGALAEQIDLVDCDLRRLANSDERLKALQRIFGIGPILAATILAEIGDAKRFRRSRQVVRAAGLDPVVRDSADTQRRGHLAKQGAPCLRWALIEAAQHACRKNSPDHELYLRTRGHAGANPATLTVARKIGTRAFHALRERETQAA

SEQ ID NO: 294339 - protein, 459 aa, unidentified
MSTRVSPRRPRRMRQVHPDAAGIDCGSAEHFVAVPVDRDPHPVQAFKTFTGELQRLIGWLQACGVTTVAMEATGVYWIPLYDLLEAAGIEAVLVNARHVKNVPGRKSDVSDCEWLQELHSVGLLRGSFRPAPAITSLRAYVRHRDTLIRSAGMYTQRMQKALIQMNVQLPLVVTDITGVTGLKIIRAILRGETDPTVLAQHRDRRCNASAETIAAALTGHFRAEYLFIVQQNLALYEMCQQQVTACDTAIEGVLQTLATQMPAPQTPPPPARPRQKHNGNEPHFDVRTPLYQVTGVDLSQLDAIGPYAALRLVSEVGTDMRRWPTEKHFTSWLTLAPRNRISGGRLLSSRTQPSANRAAALLRMAAMSLGRTQTALGAYYRRLAARVGKAKAITATARKLAILVYRTLKHGLVYQDPGAAAYDLHHKTRVLRRLRQRAAALGYGLIDLTTSPASDGVVS

SEQ ID NO: 294340 - protein, 355 aa, unidentified
MRQISVIGLDLAKNVFQIHAIDKQGKLVSNRQLKRSEMIGYFSNLPSCLIGMEACGGAHYWQRKLSEFGHVVKIMAASFVKPYVKSNKNDHNDAEAICEAVQRPSMRFVSPKTPDQQSVLHLHRGRQLLVQQRVALVNHIRSILLEYGIAIAVGDKALQREFPWILEDAENELPMLTRQMLSELWEEQKQLRERALQLKSQLQGWHKQNQSSQNLETIPGVGLLTATALAATVKDCRDFKNGRQLAAYLGLVPRQSSSGGKQVLLGISKRGDGYLRTLLIHGARTVIRHVRRRLSAGQAGGNLWVEKLLKRCHPNEVAVALANKMARIAWAMLSRNETYRISLASVRAQVDVSDR

SEQ ID NO: 294341 - protein, 361 aa, unidentified
MNHIAIDLGSRESQICIRDNSGKILTQERRGTCSLGKYLAGKEKSRVVVESCAEAFVVADAARAAGHEVVVVPAMLVRQLGVGDRGLKNDVRDAQQMSNVSCRLTELPTVHIPSALSRERKAMCNMREAQIEARTKLVNTARSWLRTQGIGVMRGGGQETFPERFRRHVASRGRKVPEEVNRVLQALEALNLGIAEADKQLTTAAEEDPVCKLLMTAPGIGPVSAVRYAAALDDVSRFHSAHGVEAYLGVVPGENSTGESRKRRMTGITKAGPPRVRWTLTQAAWVILKCNKNRTTEVMDPMAAWAREVAKRRGKKCAAIALVRKLSGVLYAMWRDRKPYDPNHMRKAMQQAGMVAQPPAP

SEQ ID NO: 294342 - protein, 468 aa, unidentified
MSTNRTPKKRHLDDLTCVYPNAAGLDIGSAEIVVAVPPERDAEPVRVFATFTADLHALIAWLLACGIDTVAMESTGVFWIPIYELLEQHGIVPYLVNARHVKTVPGRKTDWNDAQWLQKLHALGLLQASFRPDAEIRTLRTLVRYRAEVIERRAPHINHMIQALKHMNIQLNLVLTDITGVTGLAMLRAIIAGERDPQRLAEFRQSGCKHSEAEIIKALTGHWDDAHLFVLQQAVDLFDYYTTKIVECDTKLEQHYQAMESRWEPDAPLPDLPPAKPDSKSKNALTFNARAQIARVIGVDLVAVMGLSAVTVQTILSEIGTDMERFPSVKHFCSWLGLAPHNDISGGKVLRSRTMKVRNRANQAFRQAAQSVAKSDSSFGAYYRAMRARLGPKQAIVATAHKIARTVYHLLKMGEPYREESAAEYDHKRRERERKHLERRAQKLGYCLTAIPATAPESQPEGGRAGSF

SEQ ID NO: 294343 - protein, 531 aa, unidentified
MTAVVVLGIDLGKNTCSIVGLDPAGAVVLRRRVRRGGLLAVVGTLPPCVVAMEACCGAHHVARRVAAQGHTPRLMPPEYVRPYVKTTKNDDRDAEAVAEAASRPTMRLVEPKSEAQLDLQSLHRVRERLVGERTALANRMRGLLLERGVVVAKGRRALREALSAPLAEQAGGLSPRMRALLSGMRAEWEALDDRIASFDREFAGIARDDEDARRLAGVPGIGVAVATALVAAVGRGEAFGKGRDLAAWLGLVPRQATTGGKPRLLGISRRGSTCLRKPLIHGARAVLPRLAGSATPLGRWLAGLLARAHRNKAVVALANKLARIAWAVLRRGRGFEPAPSAAAWDGIGRRRAPGAADRGRSAGGEARWPDGRPAARQPGAEDGPRGRRRYEDRPGRAYLHRGRGLRPGARYVAADRSRPDHRAACGRGGPYVLLRLDVGPHVLGRHQPDLVPLSTQHAAEVVRAAAGLHRHHAARQPGRELDDPVPARPPAQDHPSRRIQPDHAAAVLARVDPQHRDPHDSVPVPPVAPAA

SEQ ID NO: 294344 - protein, 457 aa, unidentified
MRQRGRRTKGMEEEHPFIGMRQVNPNAAGVDIGAEEIVVCVAGDGNTQLVKAFGNYTVDLQNIGKWLQEHKVKTVAMESTGVYWIPLFEELERQGFECLLISSRSLKRVPGRKSDIQDAQWIQTLHSYGLLESSFRPQAELVALRTMLRHRSQLLEHRSPHIQHMQKALLQMNVQLSQALSDVTGETGLAIIRAIAAGERDPLKLAGMRDRNCKKSAEEIGKALTGTWRAEHLFIVKQSLELYDFYTKQVEDCDAEIERMYALIRPDWEVGELKSLPQKKRNSHSKNAPENKEKIRQHLKRISGVDLSVVDGFGVSLAQTVIMEVGTDMNKFPSEKHFCSWLGLAPKHEISGAKILKNKTMKTKNRAGQAFRMAAQSVKRADCVFGSLYRRLKSRLDKAQATVATAHAIARVVYRMLKYQVEYEQISVEAYEEKYKEQQIKYMKKKAAKFGFQLVPA

SEQ ID NO: 294345 - protein, 348 aa, unidentified
MVADELDYVVGVDTHRDEHVLAVVVAPAGAVVARRAVAANARGYAQALRFADSYASGRRVWAVEGAGHYGAALARYLSGRSETVLEAGRSPRGERRLQGKDDGLDAVRAARAALGHELASPRAGQRREALRVLLVARRSAVDVRREALVQLRSVIVTAPDRLREELRKLPVQRLLDRCSRLRLSKTATPDELAVRIVLRTLARRIEAATIEASELEREILAHVRALAPQLLDEPGVGPIVAAQLLVTWSHHGRVRSEAAFARLAGVAPIPASSGQTTRHRLSRGGDRQLNRALHTVILHRRQHDPATKEYIARRVAEGKTRRDATRLLKRYLARHLYRVLNNQTPLMT

SEQ ID NO: 294346 - protein, 347 aa, unidentified
MRFYTNQHPFYCGIDLHARTMYVCILDQSGEVLVHRNMQTTPEAFLKALAPYRQGIVVAVECMFTWYWLADLCAAEGIPFVLGHALSMKAIHGGKAKNDKIDSQKIAALLRGGMLPQAYVYPAQMRATRDLLRRRMHLARKRAELLAHVQNTNSQYNLPAISKKIAYKANREGVAERFADPAVPKSIEVDLALITYYDELLRDVELTIVNTAKHHDANTLYLLQTVPGIGKILSLVLLYEIHDIERFPRVQDFVSSCRLVKCARESAGKRHGTSGTKIGNAHLKWVFSEAAVLFLRDHPAAQKYLARLEKKHDKGKALTVLAQKLARTVYYMLHRKVAFDREKFFQR

SEQ ID NO: 294347 - protein, 370 aa, unidentified
MKKIRFVGLDVHAETITVAVAEPGRNGEVRSLGSIPNRLESVRKLVKKLEPVDQLQACYEAGPTGYVLYWQLTELGVKCEVVAPTLIPVKAGDRVKTDRKDAEKLARSYRAGDLTPVWVPDEAHEALRDLVRARLAAKRDQLRARHRLSKFLLRHGQRPSTKVKAWTVAYLNWVKKGVHFDQPAQDATLTDYLHEVEHEQERIARLEQAIDDAIKTMPERMRAVVEALQSLRGIAKISAVTVVAELGEVSRFKKPRQLMGYSGTVSSEHSSGERTRCGGITKTGNAHLRRIVIEAAWAYRHRPGIGTTLRARQKTASQPGGERYCLEGTTPIASPVHQAHSEGKDYTEGSHSRRPGAFGIHLGYRGCGRE

SEQ ID NO: 294348 - protein, 383 aa, unidentified
MPDVSSTAPAQVRLWVALDVHKHSIVAATLPPTGGAPEVQRIESSERAIRRLIDRLGGPSGLAVAYEAGPCGYDLFRLFGRLGVACDVIAPSLVPVRAGDRVKTDRRDAKKLVRLYRAGELSFVAAPTPEQEGLRDLVRCFDDLRCARTAARHRVAKQLLRHGRIFREGKKSWTKQHVAWVRRQRLEQPNAQRALEHMLAHLNGLDAQLGALEHELAALATSDPWRDPVAWLCRFRGIGLRTALGLLAEIGDLRRFGSARELMSFLGLVVSEYSSGDRQHRGQLTKTGNRHARRLLIEAAWHDQHPPRRPVRTGALAEPVPSAVDARAWQAQIRLHHRYRHLTDHRKRSTVAVAAVARELAGFIWAAMTHQPVRTDQQLTATA

SEQ ID NO: 294349 - protein, 290 aa, unidentified
MELYTIGIDLGKTVFHLVGLNQRGEVVVRKKFSRIQLLHFTANLQVKLIGMEACGGSHFLGRALRGQGHEVRRMPAQYVKPYVKTNKSDYIDAEAIAEAVERPKMRFVPIKSDEQLDLQSLHRVRERWVMRRTAVINQIRGLLLERGITLRQGRRHIDAALPGILEDASAQLSGAVRLLLAQLKLELDHLQMRIDEADAMINKAAGENEACRRLVAIPGIGPVTATAIIAAIGNGAAFKKGRGFSAWLGIVPGENTTGGKQKLLGISKRGNSYLRRLFVQGARAVLQQSA

SEQ ID NO: 294350 - protein, 420 aa, unidentified
METIKTKKVKKFNPKSLIVTIDIGKETHYGYFRAPDGTEVKPFAFHTTRTSFDTFYYKMQRFADSQGVEEIVVGFESTGPYAEPFFHYLKDKPVKLVQINPMHTKRIKELTGNSPNKTDRKDPRVIADVIALGHVLTLVIPQKNAAQLRRLSHARQRLIKKCTAASNQLNALVYSLFPELSSIFKDITCKSAMYVLRHHPMPSDIIALDRHALTRMLKKISRGRIGTQRTSALVDAASRSVGIQEGREAIAMEIGLLIEEIDRHHHCIEQLEDQMEEELKEIPYSGSILSIKGLGIVTVAGLIGEVGDFGQFKTISEITKLAGLDLYEISSGKQTNGRRRISKRGRPLMRKLLFFAAINTIKRGGIMHDRYHQMLKRGMVKIKAVTAISRKLLALIFALVRDNSVYVDNYRRTHEFKRAA

SEQ ID NO: 294351 - protein, 326 aa, unidentified
MESRKAYVGVDVSSAELVVGVHPTEEVWETSNDARGIEELRERLRRLEPALVVLEASGGIEAQVAGELSEAGLGVVVINPRQVRDFARATGRLAKTDAIDALVLAQFAEAVKPPVRPLPTEAELALRALMARRRQIVAMITSERNRLPKATAHVRPGIEEHIAWLKARLDDLNNDLHRLIESSPLWRAKDKLFQSVPGVGPVASNTLLTHLPELGQLNRKEIASLVGVAPHNRDSGRFRGQRTVWGGRAPVRTVLYMATLAATRHNPVVQAFYSRLCESGKPKKVALTAAMRKLLTILNVMAREQSPWNPSLHQITRCPLTPQHSC

SEQ ID NO: 294352 - protein, 410 aa, unidentified
METIVKRAAGLDVHKAQVTACVRIPGRGGARTQEVAEFQTTVRGLLSLRDWLKAHRVTQVAMEATGVYWKPVWAILEDEFDCLLVNARHVKQVPGRKTDVSDAAWLCQLLEAGLLRRSFVPPKPIRALRNLTRYRKAQIGERQREANRLHKILEDTGIKLDCVATDILGASGRAMLDALVAGTTDPQVLAELAKGKLRAKIPALKEALVGRFDRQHALIVSAILAHLDFLDEQIQLLSDEIEAQLAPFARAVELLCTIPGVQRRTAESVLAEIGTDMSRFPSDRHLASWAGQCPGNDRSAGKRRSGKTRHGSKWLDTALTEAAMAATRTNDVYLAAQYQRLRPRRGHGRALGALKHSILCACWHMLQTGELYREAGGDYFSRRDPERATRRLVAQLERLGHRVTLEAAAA

SEQ ID NO: 294353 - protein, 343 aa, unidentified
MVRMIVGGVDTHADSHVAAVIDANGGILGVESFPTDESGFEALVGWLTSYGEIQVVGVEGTGSWGVGLARFLHDHEIPVVEVDRQNRQNRRRVGKSDSTDAISAARAALSGSASVIPKTRNGPVEQIRILMVARRSARSQRIETLNQLRHLIFTSPDEIRSRFKDRPRTGLVTDVAKLRPRKGSDPVTYTTMVTMRGLARRIQHLNSEIKALDGMLTELVIDTAPSLVDLYGVGTDTAATLLVAAGDNPDRLHSERSWAHLCGVCPIPAGSGKTDGRHRLNRGGDRQANAALYRIVLTRMSGDPTTKTYVARRRDEGKNTAEIMRCLKRYVARETYKHIHHDT

SEQ ID NO: 294354 - protein, 364 aa, unidentified
MKNCITWVGMDDSANKIKVAVFLGNAKTPHEEFGVDNDPSGHGRLVKKLKLLPGEVRCVYEAGVNGYHLQRVLSRNKISCDVAAPSLTPRRSGKRVKTDPLDAKALAGLYRAGELTSILIPETRQETVRDLVRAREDAMEDQQRARHRLNRFLLRRGMKYRAGKAWTGAHLKWIKAIHFEEAQAQAVLDEYRLALDEQTERMKRLEELVEEAAKAPEYWKLVSYLMALRGVRVLTAMTIIAEMIDLKRFPDARKLMAAFGVVASEHSSGEQERRGGITKTGNVHGRRVVIESSWHYRHPPVVGKALRKRRAGLPQEVLEIARKADRRLHKKYWHLVNRGKRTQTAVVAVARELVGFIWAIGQVV

SEQ ID NO: 294355 - protein, 355 aa, unidentified
MSQEKYIGLDVHQATISAAVMDAGGKLLMECLLETKATTILEFIQGLHGTLSLTFEEGTLAAWLHDLLKPHVSRLVVCDPRKAALLKEGNKSDRIDARKLAELLRTNQLKPVYHGEHGIRTLKELGRSYLTVSKEITRTMNRIKSLYRSWAIPCPGTTVYAPRHRAEWLAKIVEPGVRVRAEHLYEQLDSLQPIRLAARRELLRESHKHAAVKLLRQMPSIGPIRGALLVALLQTPHRFRTKRQLWAYSGFAVETHDSGEYRYVRGKVQRNRERITVRGLNDNHNKDLKNLFKGAAISASTRPGPLQDFYLARVAQGMRPTMARLTLARKMAAITLTMWKKGASFDPQQLSRQPV

SEQ ID NO: 294356 - protein, 348 aa, unidentified
MHQGILLTVDYHDQNCVIRRLNAGTGEERVLSVPTTEGDLRRVVAEARAEVGRRGRVVWLQESTTGWARVQAALGGQVEFLLANVLQMPRPPKAHRRKTDKVDTARLQREYGNGNLPLAHQPPAWWRQVRRVVACREDLVSRRTALRNWINRYLAHETWADRTGLWSAKGRRRLEALAAELPRRDALVVSAKLAELDHLGRALEAVEAELLRAYQECPDARRVDAVRGIGVVAAVSIVARIGPVERFGGAEQLIAFAGLAPGVQQSDQTRRDGRIGGGGTDGRLRHYLIEASVWARHLERYRATYERAVRRRGKKIGRLVVARLLLRSIYKVLKDGVAFAPAVAAKGG

SEQ ID NO: 294357 - protein, 528 aa, unidentified
MAQTGTNFSILGRPKKVSQLHSEAMTSLNRVVLFADDTFLGSTKPYESLCNDVCATLQTVSGHLLTLKYHNCMAKKAQKVKKGKRSELLIVNSNAAGIDVASTEYQVCVPEDRDQEPNRRFEAYTCDLHSIANWLKECNIETVAMEATGIYWVQIFMVLQEYGFDVILCNAKHVKNIGEKKTDYVDASWIQVLHTYGLLKESFQPDNQIRQLKDLMRQRERIIQRTSQDILRIQKSLEMMNIKVHKVLSDIKGKSGLNILEAIIGGERRPDILADLVHHRVKATREEIIKSLEGNWNDAQLLIMKQNFDAYCFALKQVEELDLSIEQSLTAYSQVAGKSKSDKPIVRTLKRQQPLGNAFHFDAEQYSYDILGVNLTRIPGISSLTGIKLISELGRDFPEKFPTVKHFCSWLNLTPNNRISGGKILSSKVPKRKNFAGQSFRVAANTLSRSKGYLGDYFRRMKSKLGYNQAIIAVAHKLARIIYKMVQMGVEYDETIDRDKNINMLKLKQKALQKRLAKIEKELNLSYC

SEQ ID NO: 294358 - protein, 469 aa, unidentified
MFTALASSLQVRLSSLTNTQGLPYKRLTYIAFAEFKACMSLLLNLPLWRAVMQTELSQFTAIIGIDWADKKHDVCIQAAASGQRQIYQVPHKVDKLDEWARSLYRQYGGPIAVALELSKGPIVSALQKYDFFVIFPIDPTTLANHRKTFTLSGAKDDPTDAEYALDLLLKHTEHFKALSPQSIEMRTLMTLVEHRRRLMNDRIRITNRLRSTLKQYYPQALEWFDRIDTQLFCDFIKRWPSLAQARCARKATLEKFFREHNMNRKALLERRLTAIKSALPLTEDEAIITPYRLQAVTLVAQLEVALASIRRYDDEIAALAPQHPDYALFDGLPGAGPTLAPRLLVAFGEQRERYGKAAELQKYAGIAPVTERSGQSTWIHWRWQCPTFLRQTFVEWAAQTINKSYWAGLYYYQQKAKGCSHQAAVRALAFKWIRILYRCWITRTPYDEAKYLKTLQQRGSALLKMAEAA

SEQ ID NO: 294359 - protein, 355 aa, unidentified
MTSTKYIGMDVHKESISIAVMNASGKIVMECVIETKASMILQFFDGLRGDLQVTFEEGTSAAWLYDLLKPHVTKLVVCDPRKNASMREGNQSDKIDARRLAELLRLNHLNPVYHGEHGLRSLKELVRSYLTVTKDLARVMSRVKAIYRSWAIPCTGKQVYAPRHRAEWLGKIGEPGVRRRAEFYYQQLDALRTVRQEVRRELLAEGKKHKAWKRLCQIPSIGPIRSAVLLGILQTPHRFRAKRQLWTYSGLGIETQSSADHRSVNGQLERAKKQISIRGLNRNCNHDLKNLFKGAAIVASSKPGPFQEFYTALLAKGIRPDMARLTLARKIATIVLIVWKRGACFDAQHLKPQTA

SEQ ID NO: 294360 - protein, 361 aa, unidentified
MQKLNDLSRSPNPLDPDGTLIAVMELSLSNWLVAGIVPGVERQPLKKLAVDESALLKLLHRWREEAAKAGHRIKRIAVAFEAGRDGFWLARWLSARDIEAYVIHASSVAVSREHRRAKTDRLDTELLKRSFLGWLRGERDHCKMVAIPTTKDEDAKRPNREHESLVGEQSRIVNRMKATLIRLGIRGFNPKLKKAAERLDGLRTPEGEPIPPNTLAELRRDMVRRRLISDQIRQIEDARLERLKQAPDDGPHAMVRLLARVIGVGVETADMLVQEVLSRSMRDRRAVARYAGLTGSPDESGRRRREKGLTRSGNARVRRGMIQLAWRFLMFQKDSALAQWFRARTESARGTRKTMIVALAS

SEQ ID NO: 294361 - protein, 330 aa, unidentified
MKKDRITLGVDVSKKTLDICHWGTHDFIKIENNSSGFKQLAKWMRGKGFVSSQVFFIMEYTGGYEYRFLQYCESKGLSYTRKSGLEIKKSMGMVRGKSDKQDSFRIAQYGEEKAYMLDPSGKLNSAIFDLKQLISFRKRLVREMAGYKASSSERKAMYGKDAGKAILKVSKTMIDVYKKEIYRVEREILQLIESDESLNRNYQILKSVKGIGPVNAWMTIVYTENFKAFTDPRKYAVYAGVIPFEHTSGTSIRGRKRVSHMANKAIKQELNQAAKIAITHDKTLREYAQRKLTTKAYPLVLNNVKFKLILIMFSLIGRQEMYREDYHYAA

SEQ ID NO: 294362 - protein, 311 aa, unidentified
MAFLHHPPSLCLGLDVGKDTIAVSDGRNAAVVANRRPAIRRFLRTCKADFIVCEPTGGYELVLIEECLQLGLAIHRADTRKLKAFIRSRGQLGKSDAIDARELAAYGLERWASLALWRAPDPSEARLRALVRRRNDLVAIKVAEMNRANAPGAKDLADTFKAVLAVITRQIKVTDQAIRTLLREGSLKQKVDVATSIKGIAETTAAALIATLPELGRMDRKQAAALAGLAPHPNESGRKIGYRRIRGGRPAVRTILFMPAMQAARGRGEFASFYRRLVDAGKKPIVALAAVMRKIVVTLNARLRDAIPQQS

SEQ ID NO: 294363 - protein, 369 aa, unidentified
MNRLFVGMDVHKEKIVLFGFPKDGHMPVVRETFPGEATRVVKRLVKLSREWKIEACYEAGPSGYGLARDLVKAGLDCRLVAPSLIPRRPGNRVKTDSRDALELALALRARTLAFVRIPSREEEEVRGLVRCREDIARQARVLKMTISHWVFTRGHRLPTGLKRWTPRHWSWLRSLPLSALERETLDHYLDMLFLQEERRKQIEARICELGDLPEYRERVKRLMALKGFSCLAAMRVIAEVMEFRRFKNASSFMKFTGLVPSEYSSGERIRRGKITKAGNSHLRHVLVEAVQRAHSSVRPGRGLLKRLQGVSGPLRQIALRCLARLHHKFWALTRRGVTAGRVRVAMARELAGFVWALMVFPAGETNTAG

SEQ ID NO: 294364 - protein, 402 aa, unidentified
MFAGVDWASEEHAACVVDADGRIVEGRRYRHDERGLRALCARLIALGVALVAIERPDGLLVERLLDAGLSVIAVHPNQVAAMRPRYTAAGGKSDSFDAFVLAELARTDSHRFRVLVPDTDATKALRALSRAREDLVDARVALANELRAQLEQFWFGATKVFAAIDSPIALAFLKRYPSPIDARGLGEQRLERFLARHHSCGRRPAGELLGRLRAGAEGRAGQLETEARRTIVLALVAALEPLVQRIAELTSEIRAALHDHVDGPTFRSLFRDPKPAITAATMLSEIGDCRDRYPSNRTLAADGGQAPVAVESGKFKRARFRWACDHRLRDAIATLADTSRHHNPWAADIYTRARARGKTHQHAIRILGRAWCGIIWRLWQDHDVYDPNRHTALQRVLAATTN

SEQ ID NO: 294365 - protein, 442 aa, unidentified
MADTVVHPSEPDFVAFVGIDWGDQKHCWKLMVAGAQTIEAGELKQTPEELSSWALALHHRFGGRPVAVALEQSRGALVYQLSQYPHLWLYPVNPAAAACYRQAFYPSGSKSDPGDSKLLLELVVHHRDRLRRSAPETAETRLLRMLVEQRRQLVNEKTRWNNRLKAALKTYFPQVLEWIDIDTVLGCDLLERWPTLQLLQRAHPGTLRKFFREHNCRSASRLKERVDAIYQATPAVEDTALLEGESAIAASCVAQIRTLLASIAKLDQQIATSSSQHPEAPLFAQLPGAGAVLQPRLIVAFGTQRDRYASASEVQAYSGIAPVTESSGHSRWVHVRWACPTFLRQTFHEFAACSVSHSEWARAFYDAKIAAGKSHHAAVRALAYKWIRVLFRCWKDGRPYDEPTYLQALAKRNSPLRPSTVTSTKVGWKSVGGFKKLSTENS

SEQ ID NO: 294366 - protein, 384 aa, unidentified
MDQTTSTLSANTLHCALELSKNSWLLAIQFRDREQPSLYPIEGGNTDKLMAKLAAARDCWAKVNGALPAITLCYEVGYDAFWLARFLKARRHRVPVIDPGSLQVNRRARRVKTDRVDVKMLLRTLIAWCRGERHVWSLVRIPSVDEEDLRRSHRERSRLVRERTAHINRIKGLLFAQGVRGINIKSQYKTLAVDQLVTGDGHRLPPRLVCEVAREIQRLAMVQEQIAKIERERDTAPTPCEATERKRRLLLRLKSIGPAISALLSREVYYRQFANRRQVGSFLGLTPSPYSSGEEERCQGISRAGSGHVRAIMIEAAWLWIRHQPKSALTRWFLERTAGQSTRMRKTMIVAVARKLAIALWRYVEHGLVPQGAILNPPTTGNAR

SEQ ID NO: 294367 - protein, 310 aa, unidentified
MDAIFVGIDVSKDRLDVHVRPSAEAFAVSRDGKGLEQLVDRLRTLAPTLIAVEATGGFETIVAASLAAAALPLVVVNPAQVRYFAQAVGKRAKTDPLDAAMIARFIEAVKPPLRAVPDAQARLLGELIARRRQNIEMIDAERQREKRVETVRVRKSITRTIKTLEKELPEIDGDIDTMVRGSPAWREKEDLLVSFPGVGNTLARTLLAEVPELGTLSRREIASLAGLAPFTRQSGCWKGKSMIGGGRAALRAALYMAALSAIRCNRPLQAFYQRLLSIGKPKMVALIAVARKILTILNAMLRDRKQWQPA

SEQ ID NO: 294368 - protein, 342 aa, unidentified
MTIVTVGIDLAKNVFAVHGVDAAGKPALVRPSVARSNLLELIATLPPCLIGMEACSGAHHWAREFEKLGHTVRLMAPKFVAPYRLSGKRGKNDAADAAAICEAVTRPQMRFVPHKSIEQQGQLMVHRTRQGFVEQRTATLNRIRGLLSELGLVLPLKAATVRREALARLEELPGWANTVIGDLLSEVTRLDERIAEYDRHIALMARHSTQAQQLMQLGGIGQTTAMALISTVGNGHDFACGRSFSAWLGLVPGQYSSGGKQRLVRITKAGDAYLRSLLVMGARAVLAAAMNTRTPKQDPISRWARSLAERRGYWRAVVAIAAKNARMCWAVLQRGEAFKMPA

SEQ ID NO: 294369 - protein, 315 aa, unidentified
MVEQVVVGIDVSKAKLDVAIVPGGEQFTVSNDRHGIGELLRRLSRLAPSRVVLEATGKLEQLAVSELAAAGLPVVVINPAHVRHYAKARGKRAKTDPIDARLIAEFARDLEPELRPLPDAETQALAALCQRRNQLLEMEQMEKSRLQRAPQANQKSIKAMLRFMRRQIEQVEKQIEHSIRNSPLWQAKRELLESMPSIGKVNSSTLLARLPELGQFTRQKICALVGVAPYDDDSGQWHGRRHIGGGRGGVRQVLYMATLSAVRCNPALRTYYQRLLGRGVEPKAALIAVLRKMLTILNAMVRDNTPWRPLCPTHA

SEQ ID NO: 294370 - protein, 404 aa, unidentified
MKGPIVSIDVSKGKSDYQAFKNLNVKYTGSRSIKHTKEGFDEIVSLVREMEKKLETEVCVVYEATGVYHRVLKKVLEDNNIKQFIINPLLSAKTRKNDSLRCPKTDKLDPKSIAKTYYSHSLHNSHKPETIYHELRELSRYYEDILVHIRKDKVAFRAQLDIVFPGYDTLFDDLYSPVSLTVIEKYPHPEMLQKKKINTVSKVIQSKTCHRQAASDTMADKAIEYSKTIYSGCDKDDIEVLILQRLIKKLNEDMAEAERTIGEMIKLAQELPDFSIIKSIPGIGDNLAARIIAELGDMTRFKKKNELVAFAGLDPRISESGKNDGDHMHITKKGNKRLRCLLYLAVTCSIRLKRDDNSIKDFYIKKKQQSNPMCSKAAKTACASKLVRIIYSMCKTGELYQYNK

SEQ ID NO: 294371 - protein, 408 aa, unidentified
MEVVYRCCCGIDVHKKIIVACLNQGGEQSLRKFGTTTSEIKSLATWLTESGCEIIAMESTGVFWKPLYNLFELMDLDAIVVNAAHMKALPGRKTDVKDAEWIADLLRHGLLKASYIPSREQRELREITRYRKSLTEERCRETNRLQKILEGANIKLDSVVKDINGKSARKLLEKIIEDDVPTSEEEISKMIHGRMRSKLGQLVTAIEGITTPLQRKLLAQVIDHIDDLNRRIADLDKLVQDYMDEYEAAITALCDIPGIARRSAEVILAEIGLDMSRFPSAAHLCSWAGVCPGNCQSAGRRKHGKTTKGNKPLKTILTQCAKSARSVKGSYFSAQYQRIAARRGKNRATLAVAHSMLIAIYHMLRNNVPFRDLGSDYYDSFNRDRKIHGYLKRLKALGWEPDALPGSA

SEQ ID NO: 294372 - protein, 400 aa, unidentified
MISVGIDVSKGKSTVCILKPYGEIVSKPFNITHTQKDLSELSSMLFRLNDEVKIVMEATGIYHLPVLTYLQEKGFFVSVINPYLMKSYRNESLRKAKTDKIDSRIIANYGIDHWFKMKEFQISGVIYEELKLLGQQYRHYMKLHLLSLAELTHLLDLTMPGIKNLLASWNETNRKDKRSDFVERFWHYDVITSMSEQEFTEKYILWAKEKKYVPSQEKAKVIYTLAQESIPTLPSETSSVKMLVIEAVRVLKEVDATLGLILSRMQEIAKTLPEYSVVREMGGVGNTLAPKLIAEIGDVRRFRNGKALVAFAGIDPPPYESGQFVGCNRKISKRGSASLRKVGYETMRSLKMRSRPEDPVYRYVVKKESEGKSKKSAKIAGLNKFLRIYYARVTELYKNI

SEQ ID NO: 294373 - protein, 391 aa, unidentified
MIYVGIDVAKDKHDCFITNSDGEVLFKSFTIANNREGFETLFQRIQSVSDDLTKVKVGLEATGHYSYNLLGFLLDNGLPTFVINPLHTNLYRKSLSLRKTKTDKVDSHTIASMIMSDVNLKSYSDTSYHNEKLKSLTRYRFDKVKERAKLKSSVSRLVCILFPELEKLVPQLHIASVYALLSEFPSAHAVASAHLTRLTHLLSESSKGRYGKDMAIIFREAARNSIGSNMPAKSLELKHTIKLIRELTSEIDEIETEIKSIMDEINSPILTIPGISYRMGAMIIAEIGDFNRFNSADKILAYAGMSPSTYQSGQLDNCYSHMEKRGSRYLRYALYNATKYVCHWDPTFAEYLAKKRAEGKHYNVAISHAVKKLVRVIYAMEKSGQVYNKAS

SEQ ID NO: 294374 - protein, 231 aa, unidentified
MVSRGIDISKSSFVAAYPSTNGNPTKTFPNTTAGMRELIGTLAVAEHHCVMEATSNYGCCCTCYIRTVLPSVLPPPKKKQIKHFSRMMMPVTKTDEKDAYMIAMYGEKMNPPIYKMPSQATIRILTTEGFTYFDNAKQLSRFIGICPTYQQSRTSVNIREHINRNDDERLRSLLYIAFWTALRYNSRECYIRLKANEKPFKVALIAVTNKLVRPVLTITTINSIYRWICPG

SEQ ID NO: 294375 - protein, 358 aa, unidentified
MQKQDTKINFKGQNIYVGIDTHLKSWKVALYHDEIALKTFSQDTDPKLLVNHLRKYYPNANYQCAYEAGFSGFWLQKALTKHGIECIVVNPADVPTTDKEKKFKNDKRDCRKIARSLRNKELEAIYVPSDEGLEERSVVRLYKDMIRNRTRYKNKIKSILNFYGIIYPEQFKDSKHHWTISFCKWLKSLRLNTDAGTWMLNFYILEYAHSNELVQKASKQLQILSEQNKYASKIKLLRSIPGIGLVNAITILTEIEDINRFKTLDELCGYIGLVPNTSSSGDTDLIGNMTNRGNPFLKTTIIEAAWMAVRHDPALLLSFQKLKSKMDANKAIIRIAKKVVNRIRFVLKNEAEYVKSVL

SEQ ID NO: 294376 - protein, 386 aa, unidentified
MQKLNDLSRSLAPLEPDGTLIAVIEMSQSSWLVAGIVPGVERQPLKKLAADEIALLKLLHRWREEAEKAGHRIERTAVAFEAGRDGFWLARWLRTRSIEAHVIHASSVAVSREHRRAKTDRLDTELLKRAFLGWLRGERDHCKMVAIPTTKDEDAKRPNRERESLVGEQTRIVNRMKATLIRLGIRGFNPKLKKAAGRLEDLRTPEDEPIPPNTMAELRRDMDRRRLVSDQIRQIEEARLDRLKQAPDDGPHAMLRLLARVIGVGIETADMLVQEVLARNMRDRRAIARYAGLTGSPDESGTKRREKGLARSGNARVRRGMIQLAWRFLMFQRNSALAQWFRARTENARGTRKLMIVALARKLLIALWRLVREGVVPDGVVLRPTQ

SEQ ID NO: 294377 - protein, 410 aa, unidentified
MIKENFIYVGIDLHKETHTAVMIDCYNQKLGEITFPNRPADFPKLVTKVKKCNTDGKEVVYGLENAYGYGRALAVWLIDKGYLVKDVNTAISHRQAKHRGAMYRKSDSDDAEAIALATLNMLDKLPDAYPNDAYWSLGQLVHRRDNIMKQRTRLVNQLHEQLCIAYPSYKQFFNDISRPTALYFWEHYPSRKYLKGKSVEDLRAELVPVSHNKCSTKTCEKILDAVASDKVKNNAYQDARDMVTLSIVSDLQYYDKQLAEVDKMLEQMYKMLGCTLTTIPGVNVITAVKILAEIGDIKRFSNANKLAQFAGIAPLHLSSSGKGKDVATKQGNRRLQATIYFLAIQMVQVSSKGTPRNSVVRAYYEKRKAEGKTSQQALICISRRLISIIYGMLKHGTEYRMPVVESAGEK

SEQ ID NO: 294378 - protein, 352 aa, unidentified
MKYYIGCDAHKKYSVFSVVNERGQAGGPERVQHDKELYRKYLNYLPAGSKIAIESVGNWYWMIEAMEQAGHIPILVNPKKAKLLMGNINKTDKLDARGLAMLNLNGSLPEVWIPPAELRDQRELSRMRISMVGVRTQFKNRIHATLAKYAIEINEVSDIFGKTGRALLQEAIRELPPETKNSVEAQLKLLDQVSGQIEELENHIRKVVKETPAMQLIKSLPGVGDILAIVIALEIGDIDRFRSPQHLASYSGTVPRVSSSGDKTRYGRVRSDVNHNLKWAYIEAANCVALQQERQAGRHAVQLMKRIQKQKGYPKAAVAVARHLAEATYCMLKKNQPYQEPNLRKTVLSSQG

SEQ ID NO: 294379 - protein, 408 aa, unidentified
MNTLYVGIDVSSKSNVIYLMLPNGDKHSNFSVANSHEGSTQLVKRIHSALTSHSLDTLLIGLEATSVYGDNLVYFLREDATLAPFNRKIHVLNPKQVKKFHDTYNDLPKNDYVDSFVIADCLRFGRINKEVYMGDYRYKALQNLTRARFFAVQNLVKEKQRFMNVLFKKYSTMTQEKVFSDTFSTTALAVYDEFESAEALANMDLHELTDFIMKKGKNRFPDPDAVAKAIQKAARSSYRLPKTVNDSVNQVLSISITSMKALESQIKEFDKAIKAQMELLPNVLISIPGIGPVYSAGIMAEIGDINRFNSQAALAKYAGLAWKQHQSGGFEAEVTRLIPSGNRFLKYYLCEAAFSLVRCDKEYSDFYYLKYKEVNRCQHKRALALTARKFVRLVFRLLKDNRLYCPAK

SEQ ID NO: 294380 - protein, 457 aa, unidentified
MSKRSKKSKFQQFNVQSLPEHLRHINLNAAGIDIGSERHMVAVPEGRDDVSVREFGTFTTDLHALADWLQQCGVTTVAMESTGVYWIPLFELLDRRGFEVKLVDARHVKNVSGRKSDVLDCQWIQQLHTFGLLAGAFRPTDELCVLRSYLRQREMLTQTASMHIQHMQKALQQMNLLLHNVVSDITGVTGMKIIKAILAGERDPQILARNRDEHCKNSRTTIAKSLVGNYRAEHVFALKQAVDLYETYQAKIADCDEAIVKHVEKQPDITDGPPPPSEKSIQARDRIRSGLDVRELLFKKSGVDLFAIPGLAADTLLTLSSEVGFDMSPWKTIKHFTSWLGLCPGTKISGGKVLNKKTKRNPNRATQAFRMAAATQARSKTALGAFYRRIKSRTGGKQAITATAHKIARIYYTLLTKGTTYVELGQQAYELKYKERRIHHLMAQAKSLGLQLVPCAT

SEQ ID NO: 294381 - protein, 353 aa, unidentified
MNNDKYVALDVHKASIVYAIRDASGKIISTGVIETKAQTVRDFVRGLSGTIHLTFEEGTQSAWLYDLLKALVAECIVCDPRRNKLLESGSKSDDIDVAKLSELLYLKRLRAVYHGHEGTRALKELAHNYDALVKDSTRVKNRLKAIFRGRGISYEGDELYDCQQQQVWLAKLNECGSRERARQLYEQLVQLQAWVSAARQQMVRESRKHKSRKVLQQISTLGEISVAQLIATVDTPFRFRSKRQFWTYCGLAVVRHTSADYLFEQGELRRRVKPGPTRGLNHNYNRRLKKVFKTAAQTGSRQGPFKPFYDRLLARGLNPELAQVTLARKIAAVTLSLWKKGESFDRKKLGKPE

SEQ ID NO: 294382 - protein, 419 aa, unidentified
MSKSLFCGCDVALENNTIWLMLDDGSQPVKLFNVDNNQLGAEVLVERVYSIAKEHCVSDILIGTEATSMYDWHLLEYLAESKLALEFNLKLYRFNAKWIKNFKKSLSPRGKTDPIDSFAIAERLRIGRLPKEYVPDTKYQPLRKLTRFRFHLQQQIAREKDFFLANLFLKASAYSRVSPFASTFSATSLAVINDFFSVDELAAMPIEELTEFILEKGKAHFSQPGEIVDNLKRVARESYRLKPELAPTVNLILASTYNNIRCYKEQVKLVDSAIAENLKAFKHTLDSTPGIGPVYAAGILAEIGDINRFPNDSALAQFTGLTWPKYQSGKFQAEETRMSHTGNQYLRYYLVEAANSVRRYDATYKAFYEKKYAEATKHHHKRALVLTARKLVRLVWTLLTRGVLYQPGYCSFEDLSKIS

SEQ ID NO: 294383 - protein, 357 aa, unidentified
MIYVGIDIAKLNHFATAVSSDSEILIEPFKFTNDYDGFYLLLSKLAPLDQDSIIIGLESTAHYGDNLVRYLVAEFYQVCVLNPIKTCQMRKNNVRKTKTDKVDTFVIAKTLMMQDDLRFITFFDLDMIDLKALGRFRQKTIKQRTRLKIQLTTYVDQVFPKIQYFFKSGLHQHAVYALLKEAPSPKEIASMHMTHLANLLKVNSHGHFTKEQAKELRVLAQKSVGVNDSSLSIQITHTIDQIELLDSQLFHTELEMANLVTCLHSVIMTIPGIGFINGGMILGEIGDIHRFSEPKKLLAFAGLDPSVHQSGNFQAQRTRMSKRGSRVLCYALMNAAHNVVKNNATFKAYYDTKRTEG

SEQ ID NO: 294384 - protein, 534 aa, unidentified
MRKKHRNRRRSGRHVPGQKPRGCFQERVKQVGPEHFAIIPVDCGKSEARTRVADFYGNVLLEPFTIQITRPGLELAACLIRNTMEKHGIQDCVCAIETTGRYHLPIARFFKQQHWDTRDVHPYTSSLIRRSADLGTKTDDIDLAAIHRAAIDGLAMQPEVLDPDSVQWRLLVRHRRDLVEKAATLKIQLKETIHAYLPGYTTNWKADHFWDSPVAVTIATTFDSPQAIRDADDESFSQAVRSANSVIQKRTINRIRAWSHQAAPVGEGAHMHFRRAISLWKDLQAKWAEIPSFELEMADFLCRGTCVRLLAFPGINVIAASDYGAELGPITNYANSKSIAGRAGLYPSRFQTSNTDYPNGHMVVRRNRRLRAALVRAARCLNCSNQYFMGISHEYLKRHPDNDRKIAIARAFSRLSYYIIAGDGRLVHAALQSREKVLQKLMEFYNQRDADAARMTTALTAAMRHLSTDALHAERNSLSSQYNQVRTQRHTRRVMRLNELLPQILLRLSERLGPEDPTHSTDNLTNKQDETHGS

SEQ ID NO: 294385 - protein, 416 aa, unidentified
MIGQKEKNEMKHVIALDVSKGKSTVAIYDGHRQCEFEGMLHHTRCDFERLHERMEEITKQDGQAPAIVFEATGIYSKPVEAFFKDYGYAYCRMNPLEANLQMATMRRNKTDISDAHELAKTHFKMERETTYIQDDYYEQMRALTRYYDEIDEEIILLKSRMHAILQLSFPELEKLITPSSALFLNIVQLYPHPALLQAHSKTMIKNRLKVNTRKNLSLMRAEAKAITLLEAAENSYPAIKPTDIRCDQARDYAARIADLLEKKDALVKQMVELSEGRKEYLVFRSIPGIGDSTACRLIGEIGDIRRFQNAKQLNAYTGIDIMRYQSGNTQYRDRINKRGNKHLRKILYFMVCAMLMAKGKPNHFVDYYYKLKKQPQRKPHKVAIIACINKFLKVTFQLLTRGILYDYESALPAQKS

SEQ ID NO: 294386 - protein, 416 aa, unidentified
MSSQQRTNDSETLEYFVGVDLGGEQHAISVISSAGRLVGKRTFPHSGPGLEELVAWLRQQTGDDSSVVAVAMENPHGALCEALLGRNYSNAINPKQLDRFRDRFSMAGAKDDARDAFVLAQSLRTDRSCFRLLQIDHPKLLHLRELSHGWDRTRQELRRTANQLNDLMRRYFPSLLTLCPGSDELWLWSLLALAPLPEDAARIRRIRLEAIVKKHRIRRFSVSELQQVLRIPALPLAPGTARAIAEQAVLLLPRLVLLHQQTQQLDKRIEALLEELADDESYQEHRDVTILRSIPGVGKGFTAAVLSEAARPLADRDYRAIRGLAGIAPVTKQSGKTRLISMRQACNRRLRLALHHASASHVRNDARAQLHYQKLRQKGHTHGRALRGVADRLLALLIAMLKTQTSYNPELRTVSS

SEQ ID NO: 294387 - protein, 352 aa, unidentified
MPIVAEEYTFVIGVDTHAATHSLALVTAATGAIVDQAVFPNTPPGLDRALTWISHRIGSQPALIVIEGVGSYGAGLAQRVSDAGLLVVEPSAMPAAQRRGVGKTDALDAVRIARSVLAVDRSRLRWPRATGQRVILRVLVVAREQMVAERTRAINALTALLRTIDLGIDTRKALSHSQFKVVAAWRDRREDFVVRTCRQEAIRLAKRIAALDGELVDNRKALDAAVEEVAPELCELPGVGSVVAACVLTAWSHPGRVRSEGAFAALAGTCPIPASSGNTLRHRLNRSGDRRLNRALTTVVIVRMRTHAPTRAYVARRRAEGRTTKEIMRSLKRYITRQLFRTLATAHPALNT

SEQ ID NO: 294388 - protein, 320 aa, unidentified
MNSIIIGIDVSKETFDAAVLINNKVQTRKFNNNSEGFNKLVTWLKSRGTGHVCMEATGIYWKNLAKYLYDYGYKVSVVNPARIKGFAMSKLSRTKTDKADSVLIADFCEAMKPEAWYPQPPYIQELQQLVNRLNVLINHKTQETNRLEGASKAIANNIQMHIEFLETQVKEIEQLINSHIKNNKDLHDKAMLLESIPGVGAKTQAIVLAFFADIEKFSSAKQVVAFVGLNPKHRQSGSSVRGVSRISRTGNSDLRKAFYMPAMSALRYNCIIKQFSQRLSDTGKPKMLILIATMRKLLHIIYGVLKHNSPFNPNVLINQK

SEQ ID NO: 294389 - protein, 318 aa, unidentified
MNETTSSVYVGIDVSKARLDVAIGEKGAVWSEGNDPQGIGRLVKQLVELRPELIVIESTGGLERPVLVELARAGLTVAMVNPRRVREFAKAIGLSAKTDKLDARLLARFARDAKPMPTELPSEADQHLSALLARRKQLIDMLTAEKNRLKTTPLTLKGMITEHIAWLEQHIQAIEKEIDDFNRQDPDRQEKQDLMRTVKGVGPVTAATLSADLPELGQLNKKEIAALVGVAPFNNDSGKLRGRRRIKGGRASVRQVLYMSAVAAVRWNTVIRNFYQSLLRRGKEKKVALVACMRKILVILNAMIRDRQPFREPLPVAL

SEQ ID NO: 294390 - protein, 335 aa, unidentified
MQIKHFVGIDVSRDTLDLSVIVEGISHQHYCITNRAIDIGSTINKIMKSFGATVDDTIFCMEHTGIYNLPLIKWLQSHHGKMWIESGVHIRKTLGLVRGKNDKVDSMRIAMYAYLNRHKIKLWVAPRKLIGRIAALLSQRSRLNKAKKQLSTANQEQRLFMDKDIMRSLNMYTQKTVVVINKQIQAIENEILGLIKEDEKLNRMYQIITSVYGVGFVTASYILVTTNEFININNPKKYACYSGVVPFEHSSGSSVRGKTRVSQMANKNIKTLLHLAALSTIRKQGDLQEYYNRRVAEGKNKMSVLNAIRNKLILRIFACVNQNREYEKNYCCKLV

SEQ ID NO: 294391 - protein, 411 aa, unidentified
MENIFPCCAGLDVHKESVEACVRRIEPNGRWHQQTRHWGTMTRDLLAMADWMAAQGVTHVAMESTGVFWKPIYNILESRFTMLLVNAQHLKQVPGRKSDVRDCQWIAQLLQYGLLKGSFIPPRSQRELRDLTRHRTQLVEEKTRTANRIHKVLQDTNIKLSSVATDVLGVSGRAMLEALITGEEDPVKLADLAQRKLRGKIPELEKALEGHLTEHHRFMLQLLWKQLAQQEELIAELDRKIEQQTRPFAAEIDRLDGVPGVDRRVAEVVLAEVGADMKPFPAHENLASWAGMCPGNEESAGKRRRRRITPGNPWLKPTLAQAAWAASHTKNSYLASQYRRLAGRRGRKRALIAVGHSILVIFYHMLKTGTSYTDLGGDFFDRLEPERLTRYYVKRLEHLGHKVTLESRAAA

SEQ ID NO: 294392 - protein, 361 aa, unidentified
MSKVAVRQGKEKRKVVNFEGKACLVGVDAHKVNYAVAILGEDGQGLEFSTPAEPKKLLLQLVKMGMTIKALAYESGPTGYGLAWACQEVGIPVVVAAPSRIPRPVTKTGKTDRLDSMKLVEFLARDMLKGIAVPTREEFALREMERRRQRLVKLRREARQNIRAFLLRNGLVEPLGLDSWGKAPLQTLQEMPLPTYLRLSLDSYLEEHAAILASLAKMAKQLEKAAIELGYGEQVKNLRTIPGVGVTIAHAFTSEIFRPERFKRAEDICAYVGLAPITSHSGSGKEKAWLRPVGQRYLRSILVESAWRLIAVEESYRNFYNRIRNKTGLTQKAITAVARKLLVLIWRIAIEGRPYRPVAIN

SEQ ID NO: 294393 - protein, 434 aa, unidentified
MICAAVERCAGIDVGKRWLSVCILIGPLNGEPRVERRRFGVNVGDLQQLRDWLQREAITHVVMESTGSYWKPVFNVLEDAVKVYLANSQEVKNRKGHKTDDKDGWWLAHLLRHAMIHPSFIPPRAIRQLRDLTRRRERLNGDGTSEKNRVQKILEDANVKLGNVLSDVFGVSGQLMLEALLRGQAKPEEIAQFAKGRTKQNMPAIIAALEGHQMSEHHRRMIRYSLAHMKFIEEQIEEIDRDIAAQIHAAGLDGPWQLLQSVPGVQQRSAAKILAETGADMAQFPTQRDLGSWAGVCPGNNRTAGKNRSSRPTKGNPWLRSALTECSWAAAAKKNCFLKEKFWRITTKHGGQKNSALIAVAHNLLQLVYIVLKTGQPFRDRQAPPLNEQQKERLIRHHVRRLGKLGVRVHSLRAATGSLQNQPSACGADGSLTA

SEQ ID NO: 294394 - protein, 404 aa, unidentified
MFAGIDIASERHVLARLDDAGAAIGKPITITEDRAGYDVLLAALAPPPVLIVMEATGHYWKNLFAVLTAAGHEVALLNPLIARRFQEASLERTKTDAIDATGLARLAFEKRPAPTHLHDEVAEAMRELVRHRDRLRQDFDDRVRPLHRLVDLGFPEFTRYVRTLDSQLATCLLAEYPTAHAFARATPRRVAKLRYDGRHFVGAELAQSLVEAGKRSVGQHHGPAYKLQARHICQDLDTWRKRLAEIEHDIDDLLDTHVPGKLIATIDGIGPQTAARIIAATGDPAHFKSAGAFAAYVGVVPGLRQSGKQTSTRAGIGPLGNARLRRALWMPVLSAVKRNPWLRAFYQRLRAAGKPAKLAMIAAMRKLLHAIYSVAKHRKPFVIAAEQGRAVEPPNSATARHCAA

SEQ ID NO: 294395 - protein, 372 aa, unidentified
MYYNTLFVGMDVHKETFTLCCYDMQQDRVFATQKMEADYNQVLKYLMSLRDIVGNDIDFVCGYEAGCLGFTLYHQLTKFDIKCVILAPTTMMKPGKNTIKTDKRDAALIAKCLAYHTYRPVHIPTEQDEQIKEFIRMRDDHKLALKKVKQQILAFCLRHGYVYSATKNHWTNAHRAWLNDLKPEGLYGEILSEYLLSYRTLTDKLERLDRRIEELSAQEAYQESVKKLSCFIGIKTQTALATIVEVGDFHRFPTAQRFAAYLGLVPGEDSSGKSQNRLGITKAGNTHIRRLLVEAAQIFTRGQVGYKSIALKKRQEGNSPETIAYADRANERLRRKYYKMVLSQSKRSNVAKTAVARELACFIWGMMTGNVA

SEQ ID NO: 294396 - protein, 467 aa, unidentified
MAKASPKRTRLDDLLCVHPNAAGLCIGSAGIVDAVPSDRDAQPVRGFPTFTPDLHALVAWLIACGIDTVVMESTGVFWIPIYDLLEEAGLTPYLVNARHVKTVPGRKSDWNDAQWLQKLHLLGLLQGSFRPDAEIRALRTLVRHRADLIQHRAPHILHMQQALKQMNIQLSIVIEASMGTTGQAILRAIVDGERDPVVLARLRHPNCHSSEETIAKALTGSWQAELLFVLQQALARFDFYTEHIRHCDTQIAAYLRAMEPRLEDDQPTPELPVKKRNSRSRNRPSFAGQAEFVRIVGVDLVAVTGLASPSVQTILSEIGTDMERFPSSKHFCSWLGLAPHNDISGGKVLRSRTGKVVSRANQAFRQAAQAVARSDSVFGAYYRSMRARLGPQQAIVATAHKIARVFYHMLKYREAFRPEQMEVYEQRRRERELKHLQRRANRLGYTLTMVPEQAPDPTTTPSEASVA

SEQ ID NO: 294397 - protein, 429 aa, unidentified
MEEVDEVELVVQRVAALDLGKATLEACMRVPHPSKPGRRMQEIRGYATTTATLLEMAIWLRQWGIERVVMESTSDYWKGVYYLLEAEGFDCWLVNAREVKNVPGRAKTDRADAVWLAKVAERGMCRPSLVHPPPIRRLRDLTRYRRALVADRSREMQRVEKLLEDAQIKISSVLSDIHGVSGRAMMEALIAGQRDPRSLARLAKGLARKKTDRLEEALRGFFTDHHATILQMMLDNIDRIGAQIAALDARIAEAIGPFSRQGSRLADIPGVNTVAAAELIAEIGVDMTRFPSAAHLVSWAKFCPQIHQSAGKSRSKARGKGNPWLAGTVGRIVFSASHTDTFLGARYRRLARRRGKPKAIVAVGNSVLTVVYHLLSDADLDFCELGPAHYESRINKHRRARDLATQLQALTGQHIVIRDGKAIITDNAA

SEQ ID NO: 294398 - protein, 363 aa, unidentified
MSKNNMLFVGVDLGDKYSQLTVLDQEGEVLEEARVPTTQAAFQRKFCMFPTSRIAMEVGTHSRWVSQLVEGLGHEVLVANARKLRVIYTNPRKGDEADAETLARLARLDPKLPPDGDLRLSPIHHRSPQAQAHLSMIRSRDVLVRTRTLLINHVRGTVKASGERLPSCSARSFHHKAGDSLPEALQPALLPVLETVARLTEQIKVFDQKIEELCKDSYPETQLMRQISGVGPLTALAYVLTLEDPGRFHKSREVGPALGLVPRRDQSGDQDPQLHITRTGDVYLRRLLVVAAQYILGPFGPDCDLRRWGMKVAERGGKNAKKRAVVAVARKLAILMHRLWKTGEVYDPSYQIRGEVEAPSLAA

SEQ ID NO: 294399 - protein, 435 aa, unidentified
MAKPLEIVYPHACGIDIGSRNFYVDAGEDKIRVFPTFTADCNAVRDYLVSLGITTVAMESTGVYWVILYAVLEEASIEVFLVNGRDVKNVPGRKSDVKDCQWLRQLHSYGLLRKSFIPDGDIRKVRSYVRLRQDHIRAAATQVLLMQKALTQMNIRLTEVINDISGASGMRILTAILEGERNPLVLTELCEGSILKKKREQVVKSLEGHYSEEHLFALGHAFLTFEYYNGLIKECDAEIEKQLIVMTKDKDDIENHIERKPIRYHKPEIKDLHKPLLKLTEGKDPIGIAGITDYSFLQIVSEVGTNMSAWPTEKHFTSWLKLAPMRASSGKMSKRVRMKRHNNAGLIFRNLAQGILTSKHLALGAFGRRIRARRGSPVAIKAIARKIAGYYYRVMMHGSEFVEKGITAYEDYLKEKQKKYLAKMALELNLQLVPA

SEQ ID NO: 294400 - protein, 404 aa, unidentified
MSVQAAPVTPSTIVLAVDVGKTSAMLLATDGARKRVFGPVEFAMTHSGLAATVHRVSAVVPPSAQVKVGIEAAGHYHRPVCDYRWPAGWEVLEFNPAHVAEQRRVAGRRRVKTDAIDLEAITELVLAGRGQVITDREVRIGELAAWAAHRSRRVTTRTATKNQLLGQLDRAFPGLTLALPDVLGTKIGRLVAAEFADPGRLSALGVNRLIRFAAVRDIQLRRRVAERLVAAARDALPTRDGVVARWVLATDMGLLADLDSQIENAERELAALLPASPFATLTSVPGWGVVRASNYAAALGDPDRWPGSRQVYRASGLSPMQYESAGKRRDGKISREGSVALRRALIDLGIGLWLTEPAAKAYAAALKARGKHGGIIGCALAHRATRIAHALIRDHASYDPSRWS

SEQ ID NO: 294401 - protein, 369 aa, unidentified
MSDCITMHVGLDVHKDSIEIATADVRGGEIRHVGRIGGDLPALDAALARLRCPVAGMQVVYEAGPCGYAIYRHLVARGIACAVVAPSLTPRRPAERIKTDRRDALKLARLSRAGELRAIRVPDTQDEAIRDLLRAREDTVRVQRNARHRLKALLLRQDVRYTGKTAWTPAHERWLARVRLPTPAQQIVFQEYVDSVHQATLRIARFDTVTGDLLPHWTRYPLVRELQALRGVRQLHAAMLIAEVGPFERFDSPRQLMGFLGLTPSESSSGSRRRQGAITKTGNAFARRALVEAAWQYRFPARVGITIARRQGECSETARAIAWKAQVRLCARFRRLQARRMLSTKAVVAIARELPGFVWTIACAEAASH

SEQ ID NO: 294402 - protein, 386 aa, unidentified
MNAVSGPNLSVAIRTELSAIFVSLELSKSTWVVTSLSPSGGEKMSRHSVPARDVGRLFERFEQLQEKTRARTGRLFPLIVIQEAGLDGFWIHRVLQGRDIESHVVDPASISTPRRRRRPKTDKIDGEALVRALLAYKRGEPRVCSMIKVPTPEEEDCRRLCRERKTLIVERVRHVNRIKGLLLSQGIADYDPLLRNRRDQLRALTTGDGGPLPARNQAQVERELDRLELLIKQVKAVETERDALVAPKHENVPAPMSMLVNIKGIGPEFAFVLWTEGFFRHFDNRRQLAAYAGLAPTPWQSGSVNREQGVSKSGNPRLRATAVELAWLWLRHQPDTGLARWFHECVRQSGGARKRAVVALARKLLIALWKYVRAGVLIDGIVMKNA

SEQ ID NO: 294403 - protein, 438 aa, unidentified
MRVMYERCCGLDIHKSSIAACALITEKGKPQEETRRFGTMTGDLRELAGWLQQKGIRHVAMESTGVYWKPVWNILEPAGFELLLANAQEVKVVPGRKTDQKDSQWIADLYKHGLLRKSFVPPRAIRDLRDWTRTRAILTQEHTSVCNRIQKVLEDANIKLGSVASDVFGVSGRAILRALMKEEKDPEVLAELSKGTLRKKIPQLRRALEGQITAHHRSLLTGHWNRMEFLEQQITDFETQIAQRMKPTPEEITIQNAAEEAPLPLSPLEEAIQFWMEMPGVGWTAACNMVAELGVHMDQFPSAAHLASWAGLCPGNNESAGKRFSGKTRKGNVWLRRTMCEVAWAASHTKDSYFAAQFRRIASRRGNKRALVAVAHSMLVTAYHILKHKRHYMELGGDFFDVIDRDKVRNRLVQRLTKLGFEVQLKPKDAVEKVNSAS

SEQ ID NO: 294404 - protein, 396 aa, unidentified
MRFFGIDIASEVHVVAAVGAEDEVLLKPTKVEETGAGHERLLELLGDKADALVIMEATGHYWQNVFARLAGAGFQVAVVNPLAVRRFGESQLTRAKTDAADALLIARFGRAHRPPAAAVPDEALMELREHMRLRDRWVQDLGDRVRQLHRLVDLGFPELTRHVKDLGSSLATTLLARCPTAAAFRQVKPSTLAKLKYDGRHHVPEELAAALVAAAKSSAGMHHGPAYRLGVQTACEDIDVLRKRIGEIDRNIKGLIAASELASLLQTIDGIGPTTAARILAEFGDPSEYASAAAFTAHFGVVPGVNHSGKSTPSRAPTTSLGDAKLRAKLWMPTLTAVVRNSWLKAFYDRLIARGKPAKLALVAAMRKLLTAVYSVAKSRRPFVPRLPEPPAENPC

SEQ ID NO: 294405 - protein, 343 aa, unidentified
MDHFAGLDVSVKETSVCIVDDTGKIVREVKVASEPEALLAVLNNPAYHFKRIGLEAGPLSQWLFSALAEAGLPVICVETRHMRAVLKAQINKTDRNDARGIAQMMRVGLYRPVHVKTLRSQKLRMLLTHRKLLQSKAIAIENDLRATLRNFGLKVGVVGTVKFEARIKELVESLPDLTMLVEPLLIVRRALREQIGVLHRRLLAIVRDDDVCRRLMTVPGVGPVVALTYRATVDVPARFKNSKAVGAVLGLTPSKYQSGEINRTGAISRCGDEMMRVMLYEAAQSMLTRTVKWSWLKAWAMKIARRRGMKKAIVALARRLAVIMHRIWVDGTEFRWTREIAAA

SEQ ID NO: 294406 - protein, 479 aa, unidentified
MGASESSVVMDCVQTKVPFLSGAAEPAKESDPGTWRHNELSPPSLMASTRRRLSTQKAPSGCNPGGETMQVVYARCAGLDVHQKTVSVCISVCEGETKHQQTRVFGTFTRDLLALVDWLKQNGVTHVAMEATGVYWRPVWAVLEGQVEQMLVNPQHIKAVPGRKTDTKDCEWIADLLQHGLLKGSFVPPTPIQDLRDLTRYRAELRQSQNRVANRIQKFLEQANLKLSSVASNALGVSGRQMLEAIIAGQDDPEQLAQLARGRLKHKIPQLQQALEGRVREHHRFLLGQYLDEWKDLAARIARIEAEIDKRIGPFEAAATLWQSIPGVDRVTACNLVAEIGVDMNQFPTAQHLASWSALCPGNHESAGKRLSGKTRDGNKWLRRSLCQAAWAVTRQKNCYLSAQFKRLAARRGVKRAVMAVAHTMLIIGYHMLKSGQSYHELGGDYLERINKDQLQRYYVKRLQRLGLKVTVEAVTVAA

SEQ ID NO: 294407 - protein, 424 aa, unidentified
MKKADYLSTLFVGIDIGARQNVVSAINFEQEFLIKMKPVPNTQPGADQLESMLVKILENSAFKTVIIGLESTSFYGVHIANFLSASEKLMPYKPYVYCLNPKEVANYKDSFNALDKNDGIDSFVIADFARVGRIHTEPWRGSQYLALQRLTRHRLHIVECLTREKTYMLSNVFLKFSEFALLQGDEHPFSNKYGATASSILTDFLSSEDIANASIEELVEFVNTKSRKRISDPQMTAEVLQQAARNSYRLDKCLYEPLTTSIACSFNCIQAFEKELSTINRAIEKAVMGMNPVEYQILLSIPGFGPVYSSGILAELGSAQAFPNNDAIAKYAGIVWKENQSGSFKAENTPMNKAGNRYLRYYLIEAAGSVIRHIPEYQEFYQKKFAEVTTHQHKRALALTSRKMIRMIFGLLAKNQLYSSNRVD

SEQ ID NO: 294408 - protein, 338 aa, unidentified
MRLYSGIDLHSNNSVVVVIDEQDRVVYERRHPNDLGAILSALSPYAETLEGIAVESTFNWYWLVDGLMEAGFQVHLANTARMQEYGGLKYTDDHHDARWLAHMLRLGILPQGYIYPAQERAVRDLLRKRGQLVRQRTVQILSLQNLLSRNLGQQLSGNRIKQLDEQALSELLPVAEQHLAGGANLAVMRALDGQIEHLEQEIKARVKPRPALKWLKTVAGIGDILGWTILLEAGDIARFAHVGNYASYCRCVESKRLSNGKKKGENNRKNGNKYLAWAYVEAANFAIRYHDPVKGFYQRKKAKTNGVVAIKAVAHKLARASYYVMRDRVAFDIHRAFS

SEQ ID NO: 294409 - protein, 344 aa, unidentified
MSNLDTCGIEVSAKELVVRLRRGEDLEPLRNFTNTPEGHLIILGYLRRAGRVVRVCMESTGLYGLDLALALSGQEGIEVMVANPRAVRHFAHALMKRSKNDQIDAGVLEQFAVPMPFKPWPRPSVARLALHALARRLRELVEMQTAEKNRQHAAGLSQATPAVVRRDLARSLGAQERAIERLTRQARQLIAQDPQRTERFELLDSVPGIGETSAVQLLGELGVLAPDLEARQWVAYAGLDPRQYTSGTSLHKKPRIRKAGKKHLRHALFMPALVAVQHDPHLRAFYQHLLAKGKCKMQALVAVMRKLLHPLHAMFKTQQPYDGSKLFRLKSTPAQEVTHALVAS

SEQ ID NO: 294410 - protein, 344 aa, unidentified
MKITTIGLDLAKNVFQVHAINADGEVFVRKALRRRQMIPFFSKLEPCLVGMEACGTSHFWAQTLSGLGHEVKLMPPAYVKPYVKRGKTDAGDAEAICEAVTRPTMRFVAIKSPEQQSVLALHRTRDLLIRQRTQLVNMIRAQLAEFGIALAKGIQHALRLVEQLLDGEALDIPSLAIKVLMALAEQVRDLQARIQDLDKMLMTWFRGNEVARRLETIPGIGVITASALAATVTDPHQFTSARQFAAWLGLTPRANSSGGKERLGRISKMGDQYLRRLLVNGMTSQLRWARQRPDTHPWAGGLLQRKPPKLVAVAMANKAARIAWAVMTRGEVYRTPQPSTAVAT

SEQ ID NO: 294411 - protein, 345 aa, unidentified
MPIVGGLDIHRKQLTFDYLDTVTGEVQRGQVSPADRAHLRAWLRRFAGRDDVAFAMEGCTGWRYVAEELAAAGIAAHVAEPADTAFARGRKRHAKTDKTDARHLRQLLADGRLPECWIPPAQILECRALLEAYHDLRREHTAWVERIHAVFFHQGAPRLGEGALRTERSLAALRAAAAVHLSPAGQLQVATALDMLTAVEARMDTLRRQLREAARRLTGARVLADRLYGVGPLAALAMTCWLGGAGRFSSSRKAVRFAGLDVTVYSSDGKRSPGHLSRQGPEILRWVAYEAGKTHGRASAPGHDYYAAVKDRQDGKIAALSQARRLIRQACHILAELGDDALTAT

SEQ ID NO: 294412 - protein, 388 aa, unidentified
MSCKSESGPIGQCASDHSRATLYVSLELSPSKWLVTSLVSGTDKLSKHLVPGGDCGALLQLLAALKAKAEKQSGMAVVVATIQEAGLDGFSLHRLLEANGAESWIVDPSSVAAPRRARRAKSDAIDGETLLRTLLAYRRGEPRVCSMVHPTSPHDEDRRRLTRERRTLMRERIEHTNRIKGLLMSQGISGYDPLRKNCLVRLDELTTRDGHRLPPRLRAEIGREIDRLELLARQLKQVEAERDALISQVADVADSPAAQLMRLKGIGVETATLLWLEGLFRTFANRRQLAAYAGLAPTPWLSGRIRREQGISKSGNPRLRTGMIELAWLWLRNQPGSALSRWFADRVRAEGGRKRRITIVALARKLLIALWKYVNRGEVPEGAALKSV

SEQ ID NO: 294413 - protein, 368 aa, unidentified
MDEIITGFVGLDAHAESTAIGFAAAGRAAPRFIGTVGPQRSELTRALGRLGEPGSLLIVYEAGPCGYGLARELGALGYRCEVVAPSKIPRKPGERIKTDRRDALKLASLARAGELTAVTIPDERDEAIRDLSRARVDAVRARLKARQQLQALLLRHGRRYPGKTAWTAAHERQLASISFAQSAQSIAFTEYRQAVSECDMRVRRLSEALAHEVECWRMQPVVGALMTLRGLDLVAATTVVAELGDLKRFARPRELMGYLGLVPSEHTTGAKRRLGAITKTGNGHVRRVLVEAAWNYRFPARVSRALQVRQEHQPKAIREIAWRAQLRLGHRYRRLKARGLPHNKVCVAIARELAGFIWDLGRHVGPNA

SEQ ID NO: 294414 - protein, 428 aa, unidentified
MKKRMKFDHLSTLCVGLDIGSRSNFITALNFDSDRLINMRPVSNAANGVETMEAMILAVLEGSPQFRYLLVAMESTSFYGVHVANYLSTSDLLKPYGVKVFCLNPKTVANYKKTFTGLEKNDGIDSFIVADYVRAGLIEIEPWRGSQYLALQRLTRQRRHISEAIAREKNYVLNNIFLKFSEFALLSGEDSPVSNKFSTTAEAVLTEFKTTEDIANAPLDELIDFISTSGHGRFSDPNQVASLLQKAARNSYRLDKALYEPITTSIACSFNCIRAFEKEQKALDKAIAATVAGLNPTEYQILKSIPGIGPVYAAGILAEIGSVRCFNSNNALAKYSGIIWRDNQSGEFDSEDTPMMKAGNRYLRYYLIQAAGSVIRYCPEYEDYYNKKFAEVPKHQHKRALALTARKLIRLIFGLLDKNQLYSPAKGR

SEQ ID NO: 294415 - protein, 345 aa, unidentified
MKIVGCDLHTRYQQIAMLDTETGEVIERRLEHANGEARAFYASLPGPVRVGIEATGHTRWFERLLAELGHELWIGDAAQIRAAMVRKQKTDANDAAHLLQLLVEDRFPCIWRPSRAERDLRQLVWHRQKLVWMRNAIGNQLHALAMGEGLCRKKQLWTKQGRAELEGLGRDEWASYRRQELLQMIAQLDHSLKKLDEAVEKQSQQNAAAVLLRTHPGVGPVTSLAFVLTLGPVTRFACSKQVASYLGLNPREHSSGGKQRLGAISKQGNPMMRSLLVEAGHSAARLDAELRKDYQRLKLRRGSGVAKVAIARKPAVRMYWMLRQQANYAQLVRMQGSPWATLVQK

SEQ ID NO: 294416 - protein, 343 aa, unidentified
MEYYVGLDVSLKHTSICVVNPTGSIVQEGVVDSDPEAIALFVRSRAPGTVRIGIETGPTTTWLWTELNRLGLPVICIDARHAKAVLKMQINKSDRNDAAGIARIMQTGWFKEVRVKDIDSHAVKALLASRALLVKIKRDLENQIRGLLKNFGLVIGRGKFNVFAVRAAELIENRPELIAAVRPLLEARKAIEQQVDDLDRKVHKLARHDVEVRRFMTVPGVGPITALCFKATIDDPTRFKRSRSVGAYIGLTTRRHASGEIDWSGRISKCGDAMLRMYLFEAAGVLLTRVPKWSGLKAWGAKLTKRNGFRKAKVAVARKLAVILHRMWIDETEFNWSTKKAAA

SEQ ID NO: 294417 - protein, 341 aa, unidentified
MDYYAGIDVSLEWSSVCVVDAAGKITRESKVLSEPEALIAWFGALGFGLARIGVEAGPLSQWLYAAMRQAGLTVELLETRHVRDAFKAMPVKSDRNDARGIAQLMRLGWFKPVHCKSMAAQEVRALLTARKLVQSKLHDMEMSLRGILRGFGLKVGVTTPRRFAGRIRELVAGHANLEVIATAMLAIRDVLLREFVAFEKRVRTMARQDARARLLMSAPGVGAIVSLTFASAIDDVSRFKSSKQVGPHFGLTPKKYQSGETDITGRISKIGDKGVRTALYEAAHIILTRPVKGSTLKSWAMKLARRAGMQKAKVALARKLAVIMHRMLVDGTPFKFAAAAA

SEQ ID NO: 294418 - protein, 408 aa, unidentified
MEVVYGRCCGLDVHKKMVLACVITPEGKETRTFGTMTENLLELADWLVKGGVTHVAMESTGVYWKPIYNLLEGDFELLVVNAHHIKVVPGRKTDVKDAEWIADLLRHGLIKGSFIPERPQRELRELLRYRRRMIQERGRVVNTMEKVLEGANIKLSAVASDVVGASGRAMLEAIAGGTEDPETLAALAKGRLRHKRPALEQALRGLIGPHQRMMLQSNLRHLTFLAQEIERLDEEVAKRMAPFQKEIAQLDEIPGVGIRSAQNILGETGIDMSRFPTPDHLASWARVCPGNNRSADTRKSGHTGHGNRWLRSALVEAAWAAARTKDSYLSTQYHRIAACRGRKRAILAVAHTILVTIYSMLRNSTPYKDLGANYFDERNHQITLRRAIQRINRLGYLVTLEVQEAAFS

SEQ ID NO: 294419 - protein, 416 aa, unidentified
MKKGQDTRGYERYMALDIHREYLLVGAWNEEKEWVLTPRRVSIEKFPEWAKKNICAGDIVVLETTTNVWTIYDILAPLASRVLVANAAEVGEIAGARVKTDKEDVKRLLKLLVGGIVPEVWVPPMHVRELRAFVSYRSRLVTTATMIRNRLQSLLHKHNLMLSETGLLDQVWWEAQKNISPLEKLQIRQELSLLQEVEKLKAAVDEELQRQSTSAMWGKPALQIMQLPGVGVIVAMTVLSAIGDISRFENAKKLVGYAGIGAGVHDSGKTHKEKKITKKGRRELRWAMVEAAWRAVRMSPFWKAEYEKHLKRMRKPNQAIVVIARKLLIAIWHVLSKEETDIHASEEDLAYKMLLLSWSLSEGVRLGLSYKQFAKYALLKLGVETDITRFVRKNVPRRLAPREEVLARMTDLGLSA

SEQ ID NO: 294420 - protein, 338 aa, unidentified
MVVIGIDPHKGSHTAVAIDEDETKLDEVRVSADRRQLEALRSWATAFPERSWAIESANGLGALLSQQLVSAGEEVFDVPPTLSARVRVLGTGKSQKNDPNDALSVAIAALRSDRLRLVVAEDYLAVLRLLWNRHKNLTSLHTQAVCRLHALLAVIVPGGTRRRLSAEKAAAGLSGFRAKTAVEKARKPQAHDLVGGVRRLDALLKASKRTIVEALAAVPTSLGELSGVGPVATCIILAHTGDVGRFGSEDNYASDNATAPIDTSSGPRKRHRLNPRGNRQLNHAMHIIAFSQLSHAGPGRDYYERKIAEGKTQKEAVRALKRQISDVVYRQLVRDAQR

SEQ ID NO: 294421 - protein, 419 aa, unidentified
MQQVQPLQRWTGRAIGLDLHRDFCEVAVCEDGVVRSAGRVEMTPEGLEALAASLEGSDRVALEVSGGAWEVARILEPHVERVVVVSPDDTGIAQARTKTDRLDARTLASLLWRGELEAVWMPDERARVLRRRLSRREQLVRTRTRVKNEVHAVLMRRLKGKPPCSDLFGVKGRKWLRRLSLPPEEAETVQAALRHIAFLDREIEQVERMVAKQMLTWPEAKRLMTVPGVNLIGAATFLAAVGHIARFRSSRKLVAYLGLDPRIRQSGEQPARSGSISKRGSVSARWALVEATWSVVGQPGPLRAFYLRVRARRGHGKAIVAAARKLAVLFWCMLSRGQDYAHQQPSLTAQKLRRLELAAGAPVRRGKPSGVWVTHQKLRRAEKQLAAQAQASYERSVRDWQASGTKNKEAGASVTAGRA

SEQ ID NO: 294422 - protein, 335 aa, unidentified
MEHYIGIDVSKATLDLALINASGQLLAMVQTENSTKGLVRSWRRWSKEFDLVKDKCLICLEPTAHYSDQPLIALVELEIPTWLANASDMVRSLGMRRGKNDQLDAQRIADYARRFHDKARRFSRDHLRLRTLKKLLSRRRLLVDRRKAHQVLLKDYNPLMPAELRRTMDRLDKAMLRAYDKAIVEVEAMILVEIQRDPELQRQYELVLSVESVGPILAAHLLALTDGFARFGSARQLACHAGVAPYEFRSGSSIRGKTRVSSFAHRQLKTLLHMSAVSSISRSGELRAFYDRKVAEGKGAMSVLNAIRNKIIHRVYAVLARGTPYTKKTLANAIE

SEQ ID NO: 294423 - protein, 357 aa, unidentified
MTSSKKYIGMDVHKESISIAVMNAAGKMVMECVLETKASMILQFIDGLRGDVQVTFEEGTWAAWLYDLLKPHVSAVVVCNPRKNALLKDGSKSDRIDARKLAELLRGNHLRPVYHGEHGLRTLKELARSYLTITKDVTRVMNRLKALYRSWGIPCGGNEVYAPRHRSEWLGKISEAGVRRRAEHSYQELDVLRLLRQQVRRDLLLESRKHKAWRLLRLIPGIGAIRAALLIALIQTPHRFRTKRQLWTYSGLGLETHDSAQYRVVEGQLKLSKKPVTLRGLNQDHNHDLKDIFKGAATRVSTSRSGPLHDFYDHLLAQGRKPTMARLTLARKIAAITLIVWKKEVRFDPSYLKSQAA

SEQ ID NO: 294424 - protein, 333 aa, unidentified
MGFEPEPSKEGSWMMAQNGLVVAGIDVAKGKVDACIRALSQRRTFESTAEGRRQLISWLRKHKATKVVMEASGGYEREWAKALRNARIEVRIVDPKRVRHFAQSAGRLAKNDAIDADTIAWFAETFGEAPGQAYDAEREKLAQIVNARRGLLETETMLANQGEHSVPDVVRKMQARLLKKIALEVAKLDAAIAAMIKATPHFAKLAEIIESVPGLGEGASAGLIAGMPELGQVSNKVAAALLGVAPYDDDSGKRRGERQIKGGRRRIRNLFYMPCMGAATRHNPVLKAFYDRLIAKGKLKKVAIVACMRKLIVILNIMIARGEKWDAKRYAVG

SEQ ID NO: 294425 - protein, 360 aa, unidentified
MAVVAQAYDFVVGIDTHSKTHTLAIISAVTGAEIANETFPSTSTGMSRALRWISRRSTGDKSGVLLSMEGTGSYGAKLRQLATESGFRVVEAPFPERRIGRKRGKSDSIDAARAARAVLGIETNELREPRAGQHHTALRVLTVARTSMVRERTAAINSLIALLRVVDLGIDLRKSLTSKTIGTIAAWRMRDEGVGTRVSRSEATRLAKQILALEDQLEQNRADMALLVQQTNQALLDMPGVGPISAAAILTAWSHPGRVRSEAALAALAGTCPIPASSGGTTRYRLNRGGDRQLNKAIHTIAVVRMRWHQETREYVVRRTREGRNKKEIIRSLKRYITRQIFRTLGTAHEVSHAISRHAY

SEQ ID NO: 294426 - protein, 394 aa, unidentified
MIFVGIDVASTKHDVFIMNHHGEILSHGVSFNNTLSEYKKLQYTILSIMESSQNPKVRIDLESTGLYHLNIMNYLTAQGFPVQEINPLLTSMTSKSKSLRKTKTDQIDAKAICMFLFQNQLNFKPYTPKLYNNEALKSLARYRFSLVKEMSQMKIKLYTLVARSFPEYLDFFSSLHIKTSYAILHKYAISSVLVSTRIDCLSNFLYVSSMGYFKLDKAKKLKMLAKDTIGDKSDFYAIQIKSFVEMIWSYQSQITTIESEIKSIIDEYFPFILTVPGVSYTTAAVIIGEIGDIHRFKSFDSLLAFSGMDPIVYQSGNYDASNTRPSKRGSHYLRWAIHQVSMQIVRRDAKFALYYHKKLDKDKKHYYVALGHVGKKVLRVLCSIIKYRLVYIAQ

SEQ ID NO: 294427 - protein, 335 aa, unidentified
MKRFDYYVGIDVSKLTLDVTILCECNNATKTDYYRIVNNEKSIARFVKEKLGNYVPEQILFCFETTGIYSLPLAYYLNDNKLLYWQVPPLEIKHSKGIKRGKNDKIDSNDIAFYAYTHTHKFRPCSMSAKSIRQLRLLFTEREKVLKSLSSFEKTIENKDFISSDVFNVIASVNKSVINQLKQALKRIEEKMLVIIVEEDELRQQYELITSIPGIGMYTATYLLIATKGFIAFDNWRQLACYAGVAPFPYQSGTSIRGRNKVHPLADKKLKSLLNMCAICAVRHDRELKAYYERKVKEGKNKMLVINNVRAKLLARVFAVINRGTPFVNICKFAA

SEQ ID NO: 294428 - protein, 477 aa, unidentified
MAHPTKGPPDLQAVPMLKYESLYVGIDVGKQRHVAGFVSTTLLERHQRFEACPALAFEQSREGFRSLMERIRSYVPLEQVSVLLEQTGHYHRTLVQYLQEFAIPVYIMPVQKRPPGILKTDKRDALSLANHLFNQLERGIQLADKTHLVRRLLTPTETALQLQGWMRHRYELVQECTRRKNKLTAICDELFPELTQVLKDPNLPTALALREHFPTPHALATAPFSALIALRAKSRPTLGQLEQLQQVASQSIGTKEMIRQRGLVLEQSQLIRELRMLQEHIEQLDTEIRRSIEQSREGKILTSIPGIGSIQAAAIIAAMGNVLNFERASRLKAYFGWAPQEERSGTSLDRVHLTHGGTRSMKQMLFLCVASAIQLDCEWARLYKRLVPKKCPYDERTQSYRGKVKVMGRIAGQMIEMVYALLKQDAEILSQFAPGKTPPDPILYDPEIHRRHRNGEYRPIKNVPCQRKVIRLPERPS

SEQ ID NO: 294429 - protein, 469 aa, unidentified
MFTALASSPQVRLSSLTNTQGLPHNRLTYIAFAEFKACMSLLLNLPFWRQVMQTELSQFTAIIGIDWADKKHDICIQVAETGRRKVLQIPHRAEKIDDWARSLYREHGGPIAIALELSKGPIVSALQKYDFFVIFPIDPTTLANYRRTFTLSGAKDDPTDAEYALNLLLTHTEHFKALRPQSVEMRTLMTLVEQRRRLMNDRVRITNRLRNALKQYYPQALEWFDRIDTLLFCDFIKRWPSLAQARRARKATLEKFFREHNMNRKALLERRMTAIKSALALTEDEAIILPYRLQALTLVAQLEVALASIRHYDDEIAALAPQHPDYGLFDGLPGAGPSLAPRLLVAFGEQRERYGKAAELQKYAGIAPVTERSGQSTWIHWRWQCPTFLRQTFVEWAAQTINKSYWAGLYYYQQRAKGCSHQAAVRALAFKWIRILYRCWVTRTPYDEAKYLKALQERGSPLLKIAEAA

SEQ ID NO: 294430 - protein, 342 aa, unidentified
MNKNIKVLGIDLAKSVFQLHGTDSKGKCILKKRLSREKLIEFMAQLSPCLVGIEACGGSNYWGRTFQGLGHNVKMMAPQFVKPYIKSNKNDCNDAEGINEAVTRPTMKFVPIKTIEQQDMLLLHRCRELAIKQRTALSNHIRGLLSEYGVVMTKGLCHMRNLPVILELNKDKLTPHAGAVFMRLYEQFKMYDMQVDVHEKEIKQQAEQDPRYKEIQKVEGIGPITASAMIATLGNAKYFKNGREVSAWLGLVPKQHSSGNKIRLGSISKRGDRYVRTLLIHGARTVINRCQNKTDKKSIWAADKKERCGYNKATVALANKNARVIWALLATGECYRQSLAVA

SEQ ID NO: 294431 - protein, 408 aa, unidentified
MARFHVGVDVGRTQHVARVLDTATANMSRSFPIPVGHEGFERFRRYLEGFSPDRQDFFVAIEATGAYHVPLAGYLFDCGYMLALVNPARAKAFRKAEGHVAKTDRVDAGVLCRMVSGVGLRPAAPKPEEQERLRVLTRWYFRLQQDRTRALNRVSAAIDTVFPEFWQVFSEITQVTPRLVLQTYGTPDELVRADTEAIAGLLRRASRGRYLWKDAEYLQTLASRTVGVRNLYAPVALQIRQALAQVDLIDQQIRELEPLIEQEFHAMGFTAEEFPIGGVTTIATIIAHLPSPQSTPSLKSLHAYVGWCPMDRQSGQYKSTRPRMAKGCPPLRWALYGLALASMAHVEGYKQYVTRRKSQGKKGGHILVIIGRKLLDHIWAVARTKEVFLPVAPTPLAEFRREELAVRF

SEQ ID NO: 294432 - protein, 320 aa, unidentified
MLSFGGIDVSKDRLDVMVLPEEQCSSVPNDAAGWAKLVEQLRGFSISAVGIEASGGYERGAVRALLAAGMSVRQVNPFKLRQFARASGVLAKNDPLDARMIASFIAIMPTRPAQPHAPAVERLAEILTVRRQLSDAKVAAENASRLLEDAMLQRLSRRRIARLAADIDLLDGRLVEIVMADAALVRRYQLLTSMPGVGPVLACTLIALLPELGRMNRKQVAALVGLAPYAFDSGKLKGARCIWGGRASIRRVLYMAALIAMRCNPALKAFHNRLAATGKKPKVVIVAVMRKMIITLNAMLRNETPWVDRSSGRHSVLTAR

SEQ ID NO: 294433 - protein, 360 aa, unidentified
MQTQNTTTGGLDFTGQNIYVGLDTHYKSWVITIYSDEFELKTFGQEPDVDRLENYLHKHYPNANIKLAYESGFCGFWIQRAFAKRGIHCDVVHAADVPGSNKELIRKTDKVDSRKIAKGLKNNELNCIFIPDEQLESDRQLLRSRTKIVRDTTSVKNRIKAFLKFKGINVPADYKSNKWSKKYITWLQSIELNSISGKVAFSCYIDELNFLLEKQKNLNKVIETLAASDAYSANMHLLRTVPAIGLLSGMTLLTEIGNINRFQKQDHLYSYCGLTPDCHSSGDTERIGKVSRRGNIFIKTVLIECAWVAARKDPALLLYYKQQLPKMDRNKAIIKVARKLLNRIRYVLKNKMEYQIGIVK

SEQ ID NO: 294434 - protein, 312 aa, unidentified
MAKPVSQITLGIDVAKDELVIADWDTGEVTTLINEPLAIKRWIGSLPGPVRMALEPTSHYHLALADRAQAAGHRVYLVNPRQLAHYREAVGERHKSDPRDALLLARYLAHEAPRLRLYEPQSAAARELWTLLTRRATAVESCKRVRQSFLGTGISIQALRSEYRKVLKRIDRRMEALIDACGWQQSYQFCLSIPGIGPSNATALVAAFHRGAFSSQDAFIAYLGMDVRTRESGTYKGKRKLTKKGPSELRRLLYCAAIAGRSYEPFARYHQRQLDKGLPKIAANCILARKLARLAFVLMSRQENFKKGAVAY

SEQ ID NO: 294435 - protein, 323 aa, unidentified
MSQPNPLCVGIDVSKTTLDIATANNEFAQFTAGNDTDGFELIIAELRKHSVALVLMEATGGLEAAVACSLQAEGFDIAVINPRQARNFSRAMGYLAKTDRIDAKVLSQMAEVINRHPERERFIKAIPDAERQILAAMVVRRRQLITMLVAERNRLHPAHPQNRKNINTIIKALEDELSRIDEAMNNHIKTHFKELAARLSSIKGVGAMTVATLLSEVPELGSLSRREISALIGVAPVNRDSGTMRGRRTIFGGRAGVRTALYMAALVATRFNPVIKDFYTRLITAGKVRKVALVACMRKLLTILNAMIRKNEEWSDSYHKFSL

SEQ ID NO: 294436 - protein, 347 aa, unidentified
MRKSITDLSSVTTVGLDLAKHAFQVHCVDASGRVIVAKALRRKDVLFFFAQLPECLVGMEACGSAHHWARELIKLGHDARMMPPAYVKPYVRRQKNDAADAAGICEAVTRPSMRFTGLRTLENQAALMHHKAREMLVAQRTQLINALRGHLAEIGVIAAQGLKNARELARVIKAEGDETIPACVRAALAPLVRQLHVLDQEIACSDRTIAAMARDDEMARRLMTIPGLGPVTASALAASVQNVSAFSGPREFAAFLGLTPKQNSSGGKERLGRISKMGNRYLRKLLVVGAHAVLYHRKPHEDALRSWAKKLMQTKPFKLVAVALANKMARIAFAIMRGRTTYSAASA

SEQ ID NO: 294437 - protein, 400 aa, unidentified
MLSIGIDVSKGKSTVCGMKPGGEIVYTPFEVQHTREGMSELVSLLRGSGEEVRVVLESTGSYHCPVVAALLENGIFVSVVNSLRMKRFCSQSIRRVKTDQIDAMQIALYGLAYWQELQPTRLPENTYRELQLLARQYYQMTSLLIKAKVDFNALCDQVLPGMQELMSDHAGRHKLSDFVLRYHHTAHILKMGETRFRKDYCKWAEKKGYRNCERMAAHIFATAQNGIPVLPNAPSTQIVITEAIRVLHTVEASRDAILTQMQALAKTLPEYSLVREMPCIGDTLAPRLIAEIGDVRRFHSKRALIAYAGIDAPPYQSGKFCANNRHISKRGNRYLRKTGYEVMQSYVMHKPANDPIFTFIEKKRGEGKSGKLAMVAGLNKFLRVYYGKVTELYRSLPTIE

SEQ ID NO: 294438 - protein, 343 aa, unidentified
MSIVTLRIVFVGLDYHASSVQVCVVDKDGKMLVNRKCANDWRAVMSAVHERCDKEVQVQAAIESCCGAADLADELISRGWTVQLAHPGYVARMKHNPDKTDYSDARMLAELQAHGFLPRVWLAPEEVRELRRLVHHRQTLTKERKNLKLQIGATLREARQKAPANANSWTKSWLAWLESSAELSPNARYITSRRLRRLRALQEELRQVDKRLERQTREDPLVQKLLTIKGIGLVTATTLRAEIGRFDRFRTGKQLARFCGLSPRNASSGQRQADAGLIKAGNNEMRALLMETAHRLIRCDERWTALAARLSNRGKAKSLIVAAVANRWVRWLYHQAQPGCLAA

SEQ ID NO: 294439 - protein, 338 aa, unidentified
MSKHNIVCAGIDTGKNKLDVAIAGSDKEACFANCPHGHAGLVAWLRRHQVERIGIEASGGYERAVVAELRRNGFVVIVFQPIQVRAYAKFHLRRAKNDKIDAALIAACTAATEKIHAPPDPRLVALADHQTLIDHIIDDIAKLKNRRESCRDERFRRLWKEEIARLKKMERAEFKRLVAAIRQHTDLGQRLDLIASVDGVGLPTAVAILVRLPEIGRLSREEIAALAGLAPYDDDSGERSGDRHIAGGRERLRKTLYNATLAAAFHWNGQLIAFKDRLLAAGKLHKVMRVACARKLLIFINAVVARGTRGFQAPSNGDIALQFVSLFECAGRPARSRW

SEQ ID NO: 294440 - protein, 334 aa, unidentified
MEQITTVGIDLAKSVFSLHGVDGAGRVGFRRTVRRDQLLEVVAGLSPCLIGMEACSGSHEWGRRFQEHGHTVRLMAPKFVAPYRKSGKNDGNDAEAICEAVTRPSMRFVPVKSAEQQALLTLHRVRQGFVVERTATINRLRGLLSEFGVVLALRSVTVRRQAAAAAEGLPELARRAIGDLLDQLRVLDERIGGYDREIEAQARLCEPAQRLMKIRGIGPTTALAIVATVGNAREFKNGRQFAAWIGLTPSQYSTGGKARLGHISKRGDAYLRNLLVQGARSVLNSAGMHQDRMSRWILELQPRRGYYRTLVAIANKNARIAWALLAKNETLRPA

SEQ ID NO: 294441 - protein, 331 aa, unidentified
MHYSHYIGVDISKNTLDAVIYATEMRRSDTKHLTNDKAGLKELVTWAKAAGAKPKDMLICAEHTGVYGNELQIFCEKKGIALCLESPLQIKRSMGLVRGKDDQIDAIRIAQYAYDHKDKLKLFHRPSGNIITLSNLLRERRLYVRQKATLASQQGELGSYETAHSRNRRESLINKQDAVIKAVEKQMLEIIKSDEALKKTYDLISTVVGIGPITAIDTIVYTNNFQNFDTPRQYASFIGVAPFDHTSGTSVNGRTRVSQFCRKQQKVSITMAARSAIIHDPWMKNYYHRKMKEKGEQRNQHGVVLNAVKFKLVLRMFAVVKSGTPYKVMKY

SEQ ID NO: 294442 - protein, 427 aa, unidentified
MVAAARNFRRGKRMNRQQWYAGIDWATESHHVFLTDGSGRKIGEKIFKHSGAGLAEMAAWLMAASQAKEPGHIQIAIEVTHGPVVETLIERGFTVHAINPKQMDRFRDRFTLAGAKDDSRDAEVMASALRTDPRCFRLLAAPDPVIAELREWSRIAEDLSAERNRLTNRFRQQLWRYFPAMLELESDLGAEWFLDLWEAAPTPCKAARIRETAAAKILKRHRIRRFAAGHVVAVLRTAPVQVAAGTVKAACAHTETLIARIRLVNAQIKEAQRHLDALTARLIPTEDSEAGQQKQHDVEILASLPGVGRIVLATLLAEAWDALLRRDYAALRSLTGVAPVTKRSGKSCIVIRRQACHDRLANAMYHWARIAVQYDAKSKAKYTALRGRGHSHGRALRSVADRLLNVACAMLKAGTLFDPSLKTQNAS

SEQ ID NO: 294443 - protein, 377 aa, unidentified
MVSGKKRRSELTAVPMLPNESLYIGVDIGKFKHVAGFLSKTLLERHKHFEHCPAFIFEQSREGFRAFVERIQAYSPLEQCFILMEQTGHYHRPLLQYLVELDLPVFVIPIQRRQTGMIKTDKRDALGLANQLYTQLELGAQVADTLQVIRRALPPSEAAAQLKGLMRHRYELVNEATQRKNKLIAMCDELFPEFTRVFKDPNAPIALDLREQFPTPRAIATIGSIGNFEGAAHLKSYFGWAPTRAQTGVSFDRTRLTKGGSREMKKVMFLVAWKAIQTDTEWAKLYKCLVPRLCSYDDRMQAYKGKGKVLGHSIGRLIVLIFALLKKDYEVLSQLSPGTEPPAPTLYDPQLHHRHRTGYYSPFPREGAKNRIVQVSQ

SEQ ID NO: 294444 - protein, 389 aa, unidentified
MSVSVLDNAGEMVRSPVSLPVNQEGLSKLVDILAETTKNKKEIQVGMEATGNLLENVYSFLEEKEYTQVLINPHQSKKFHELARRKAKTDRVDSVVIAGLLRSGETIGSYVPEDDVQALRELVRLRHSLQKTKKNYQRRASSLLGVVFPEYTQLIKDPFGKVSSRILTSYPTAIHMRRAKASALVKISRRIQGNNYSGELAHKLIEAARRSIYSGKASRVRGMNLRILLEEIKSLKEKIERIDKEIDDILYSKEPPSPEGRLLEIPGVGPKTVAAFRGEVGDVNRFKSGKELIGFIGWHPKISESGEKKSQHPKMSKKGSSTLRAALYIASVSCIKHNRELSSLYLKKISQGKEAKQALVCVGKKLAYIMYSILKNGSSYDPQRVFLQV

SEQ ID NO: 294445 - protein, 377 aa, unidentified
MTDASLICTVAIELSRARWVVGALPPTGNKVSVGAVPGGDTDRLMQHLNKIQTRLAREFGQAIELKICFEAGYDGFWLARFLRDRGLDVFVLDAASFLVSRRGRRTKTDRIDVEAMTFTLRAYLAGDLSVCRVVPVPTPEAEDAKRISRERTRLASERTRHVNRIRALLALHGIRSIKGLWGGNWRAQLDRLETGDGRPLGRYIKGEITREFERLHLVLEQVKALEAERHQTLLDPASPFPHKSKVATLTKLAGIGELSATLLVAEVFQRQYHSRRHLASYLGLAPTPYASGEVQRDQGISKAGNKPARTLLVEIAWAWMRHQPTSELASWYRARFAGNGMRSRKVGIVAMARKLAIALWHFVEHGVIPAGAVVNAR

SEQ ID NO: 294446 - protein, 369 aa, unidentified
MLEDSEAFVGIDAAKSRNAIAIAEAGREGEIRYLGEVDATPQSMRKVVARLAAKYQRLHFCYEAGPTGYGLYRQLTALGHDCIVVAPSLIPRKPGVRVKTNRRDAISLARLLRAGELTPVWVPDEAHEALRDLVRARDAAVEDLRRKRQSVTSLMLRHGRIFPGKTTWGARHARWLQGQHFEHPAHQIVLQELVLAIQHAQERLERIEAAIAEFVPGWSLAPAVEALQALRGVNLISAVTFLVEVGDLRRFETPRQLMGYLGLVPGERSTGDTVRKEGITKAGNSRARRTLVESAWTYRYPPRIGKVKLYHLQRVTPAIRDIAWKAQSRLCARFRALAARGKKSTVAVTAVARELAAFMWAIVRAVPAT

SEQ ID NO: 294447 - protein, 392 aa, unidentified
MPIAVGIDIAKEVHWVTAIDETGETVLDRRLANTPPEIAALIDDLTALRGTITIGLDVIGGIAGLAEAMLAEAGFPLVHVPGLAVNRARQGTTGGEAKSDPRDARVIADQVRTRRDLRPIEPADELDIDLRLLVGRRRDLVEEQTRRVARLHDLLAGIFPGLERALDLTTKSGLWLIGKYATPAELRSAGRSRLIKHLKRAGGLPKLQGLADAAIAAAEEQQIAVPGERMTAALIKELAGEALATRDRLARLDRDLEALLQRHPDAALIRSLPGMGAVLTAELIAEAGALTRFNSPDALAAAAGLAPVLRQSGKVRFLRRPTGGNKTLKRVFYQSAFCSLHTADSRAFYNRKRKEGKRHHQALIALARRRINVLWAMLQNRQPFRENFKLAA

SEQ ID NO: 294448 - protein, 337 aa, unidentified
MKRYLGVDLHRTQFVVCTRWENGEQEIREWRIRELSQFVEQLQPEDQVAVEAMGTTARFYDAVVGRVSRVVVVNPHQFKVISESVKKTDRRDAAALALYLEKDLLPEVRMKPKQNRELMHLAETRDMLVKQRSAMKNKINNLLAMQGIELKREALSSKIALDRILILPVSGMVKLELRVLVEQIRSLSASIAELDEQLEEAGQQLPGYENLTSIKGIGSLSATVLLTVIGKISDFANEDKLAAYLGLVPRIANSNESEHSGRITKQGNKLARTALVQCGLVAKRYSPYLSRFYERIKQRRGGGKAKIALARKLVKIVYDTLKNQWVFEDFPSFTLAA

SEQ ID NO: 294449 - protein, 327 aa, unidentified
MMSYLGIDVSKAWLDVVLLREGLPTEKGQFDNSNQGFHQLHHFLKKRKVKTLHACLEATGYYGTEAALFLHQAGYTVNVVNPARIKAYAESQLSRTKTDAGDAALIADFCRTQQPDPWTPPPPEQQELQVLVRHLENLHDMRQQEVNRRQAGIPSETILKTLDDHIAFLDHQIADLLHLIHDHIDRHPHLRQQRDLLTSIPGIGDVTAFKLLAEIVDVHAFDSARQLAAFAGLTPRERRSGSSVRGRTRLSKRGTPRLRDALYFPAIVAQRYNPILQVFAQRLLAAGKSKMQVVAAVMRKLLHLVFGILKSGQPFDPHYLEHCLPLA

SEQ ID NO: 294450 - protein, 444 aa, unidentified
MDWKALEIVHPDAAGIDVGGSEHWVAISPDRDPEPVRRFGCFTADVREMGRWLVEKGVRSVAMQSTGVYWMPVFEVLEQQGLEVYLVNAQHTKNVPGRKSDVQECQWLLKLHAFGLLNNSFQPTDEIRIARTLWRQRSNLVAEASSVIQRMQKVLIEMNVQLCNVLSDVSGMSGMKIIGAILEGERDPWKLATYVEPEVKAKPEDIAKSLEGNWREELLFVLRQHVELYRIYQEKITDCDLQLRKHLESLGSKVDLRTQPIGNRPKGKKNSKNAPGFNLRTELYRITGIDWTQINGIDVLTAQTVIAEAGADLSAFPSEKQFASWLGLCPTNEQSGGKILNRRTRKVVNRATVAFRNAALTLLRSQSYLGAQYRRLRTRLGAPKAITAMARKLACLFYRLIKHGQPYVDKGTEYYEAKYREQQIRSLAKRAQKLGLQLVIPKTA

SEQ ID NO: 294451 - protein, 337 aa, unidentified
MQLYCGIDLHSNNSLISLIDEHDQVIKEKRLDNDINIISSYLSPFQTDISGVVVESTYNWYWLVDGLVELGYPVHLANTLAIQQYNGIKYTNDASDARFLAHLLRLDILPKGFIYPQPMRYVRDVLRRRLLLVKQSTAQLLSLQSLISRHTGKRLSSYQVKRLQCEDLGCYFKDAAVLFTGQQSLQLWQQLQQQINHVETFVLSRCEADQYSVLTSTPGIGKILGMTILMETGPIERFAAVGNYSSYARCVPSKKISNGKIKGHGNRRNGNRYLSMAFVEAAHYATIWNPTIKRYYQKKCKQVPLMVAKKAVANKLTRACYHMLKENQMFDVKRAFG

SEQ ID NO: 294452 - protein, 373 aa, unidentified
MDEDRAVCVGLDTHKAKIAVAVAEPGRSGEVRFRGEIANQPEAVRRLIERLAGKHGRLRVCYEAGPCGYGLYRQIVALGHDCTVVAPSLVPRKPGERVKTNRRDALTLARLLRAGELTGVWVPDPTHEAMRDLVRARTAAMEAVRRARQQLQGFLLRHGRVFAGRRAWSPAHRRWLAGLRFGHPAQQIVLQEQLDVIDEAERRRDRLEAQIRELVPGWSLAPVVAALQAMRGGALLSAVVLAAEVGDFRRFATPRQLTAWLGLVPSEHSSGAKVERGGITKAGNGRARRVLVEGAWSYRFPARVTGELQARLEGVPEKVRAIAWKAQLRLCARYRRLVAAGKNANLVTAAIAREMAAFAWAIAREAQPAGAAA

SEQ ID NO: 294453 - protein, 331 aa, unidentified
MQISHFVGIDISKETLDAALYPARDRKTDFLHFANSSKGLGEMMSWLKSRGVKSSELLICAEHTGIYTNTLIAFAHKKGIALSLNSPLDIKRSIGLARGKNDAVDAARIAEFAYTRRDKLRLYEKPSEGIIKLQYLLTERRQYVRQRTAIINLHSAMGQYETSAGRSRNESAINHTEKLIKKVEEQMHTVISEDPAIKRNFDLVHSVKGIGLINAINTIVYTNNFKSFESPRKYACYIGVAPFDYTSGTSIRGKTQVSKICRTQQKAELSMAARSAIVHDPGLRRYYQRKMKEKGGDKSAHGIVINAIKFKLILRMFAVVRAGEPYRVLNY

SEQ ID NO: 294454 - protein, 347 aa, unidentified
MLTEPADYVLGVDTHADAHAFALVDARSGALLREYALPACRSGYRQALKLARRQGPGRRVWAIEGTGSYGAGLTRFLEAQGERVFEIERPQRRGRQGGLKSDALDALRAARVALAGERLSQPRAAGEREALRILLVTREQAVSVRRAGLNELRSLLVTAPDELRERLRALPRGRLVSACLKLRWRTQSDPALAASRLALKACAERVSQATRQAAELEGEIERHVRSLCPQLLALRGVGPISAGIVLTAWSHKGRLRCEAAFARLAGAAPIPASSGKVCRHRLDRGGDRRLNRALHTIVLCRRRNDADTIAYIARRVSEGKSEREAVRCLKRYLARSLFRLLERHATT

SEQ ID NO: 294455 - protein, 352 aa, unidentified
MDRFIGLDAHSQTCTVAVMGPSGKHILEKVVETNAKMLTELVRSVGGQRHLCTEEGTHAEWLYEILERHVERIVVVQPPKSTGRKSDSIDAWALADMIRKNDIEKAVFKAPGMYTALREAVRGHQVVLRDMVRAKSRVKAIYRSRGLQGMGQAVYEPEKRNEWLCKLPPHRRQLAELLSDELDGLIKMHEKAEKWLLEQASRCPEVKRLASAPGIGPIRAAQIVATVITPTRFRTKQQFWSYCGLGIVMRSSSDWVRGRDGEWTRKEATQTRGLNPNRQPLLKAIFKGAAMTVIQHMPKHPLHADYQRTIEAGTRPNLAAVTLARRIASAVLAMWRNKEVYDPAKHRRPDAA

SEQ ID NO: 294456 - protein, 434 aa, unidentified
MRTIGLDVHKRFAEVAILEPGRPLQRQRIRTTPAELRAFVAELGPDDQVALGASFNTWQLTDLLRARAGRVVVSNPMKTKAIASAKIKTDKVDAEILARLLAADFLPEVWIPEAPLRELRRLLSHRHALVRQRTQLRNRIHAALSRNLLDCPFTDLFGKAGQRWLAQQTLPADERALVDGTQRLLGWFESELEMLDRRLAAQAAGDRRIQHLITIPGVGMVTALAVVAVIGDVRRFPRPTQLVGYLGLDPRVRQSGERPARLGHISRQGQSHARAMLVEAALASVRQPGPLRAFYERLRGRRRTQIAVVAVARKLAVLAWHLLTHETDYRWASASLTDRKRRAIARRAGQPGLRLSAEPVSDRDLQVLLQAERAYRVLVEARRKEQDAVAPNGKRSMGSRPDARRGSHSQTPIFSSGVDRVQHNLTNMSSPPKA

SEQ ID NO: 294457 - protein, 369 aa, unidentified
MQDSMFIGLDVHKATISVAVADGKRGGEVRSWGVIPNRADEVKKVVEKLAGRARELHFCYEAGPCGYGLHRQLVEHGHDCIVVAPSLIPVKTGDRVKTDRRDALMLARLHRAGELTAVWVPDEAHEAMRDLIRARATAVRVVGKARQHLQGFLLRHGRIYSGKRGWTQAYRRWLTTLRFQHPAQQIVFQDYVHAIADAEARIERLTKQIKDLAPSWSLWPVVEAVQAMRGVAFIVAVTVVAEVGDFQRFDNPRKLMAYLGLTPSEHSSGSSVRKGGITKAGSGLARRALIEGAWTYRMQARVSRKLYDRIENVPQAVRDIAWKGQLRMCQRYRQLTAAGKAKVVVTTAIAREMAGFIWAIARATAGTPA

SEQ ID NO: 294458 - protein, 343 aa, unidentified
MQIRSVGIDLGKTTFHLVALSAAGKVLLRKKFTQKQLITFTANMQTCLIGMEACSGAHFLGRALREQGHDVKLIPAQFVKPFVKSNKNDFLDAEAIAEAVGRENMRFVPIKTDDQLDLQALHRVRDRLIARRTSVINQLRAFLLERGMTFAKTPAKLKVAIPEILEDADANLTPRMRNLVSLLWNEWKDLEQQIVAMNAEVEQIASSDPACQRLRQIPGIGPLVATAIVAAIGNGSAFHKGREFASWLGLVPRQHSTGGKARLFGISKRGNRYLRKILVHGARSAVLRVKRERSPFGPWLDALEQRAPINVVITAAANKLARIAWAVLSSGQEYRPAVRPMVA

SEQ ID NO: 294459 - protein, 396 aa, unidentified
MERISTLGIDLAKSSFVVCGLDKAGKQVLRREFSRHKFAEFIAKTEACDVFMEACGSAHFWGRRLREAGHSVNLIAAQKVVGFRKCNKNDRNDAHAIAIAGKCPGMEFVPVKSVEQQDVQSLVRIRARLIYRQTALVNEMRGLLAEYGITIGEGITPFRSKMSEMANGSIGDFPGITPTIFHSVISANEELLDITNRVEKHEALIHELIKKDDRCRRIQEIPGVGPLSAATVIASVTNPDAYGNGRQFAASIGLTPKHVQTGGKDSKPVQLGISKRGDPVLRSLLVQGGMTVAKACKMRMDKAAKEKSLEKNAENQTSPSSSLGQHPCRERAKKKAKKKIITPGREEWMRRMISEKGMQKTAVAIANRNARIILSLLKSGDHYLPLGQQWPSGAVC

SEQ ID NO: 294460 - protein, 325 aa, unidentified
MRKIRDCLGIDISKDVFDVIDEKGKHYVFTNDYSGFRKFKKILTSNSHCVMEATGYYYCKLAYYLLENGYVVSVENALSIKRFIQMQLVKNKTDKADARMIQMYGERVDLKHWEGQTKDQRACLQIIRLLETYTKQSTALKNKIHGEKVLGIPCKGVLRSLERMLRTVQKEIRSLEKELETKVKVSHQTLLTNLKSIPGIGVKTASMLVVVTDGFTRFDSSSSLCSYSGITPVLRQSGSSVRGRPRMSKVGNRKLRNLLFLCSLTASKYNKGCRELYQRIVAKGKSKKLALIAVCNKLLKQAYGIAKSGLVYDESYRSLHPGYSS

SEQ ID NO: 294461 - protein, 394 aa, unidentified
MKLIGIDIGKNKHFFCIMDQQTGEIISQPVSFSNDKEGFDFLVQKIKSYPKDSILIGMEDTGHYHFALLKYLLDLQYTVALINPKTTDFNRKMQGGITKNDKLDTINICDVLDTPERKKQYRITKVNSFDLYEQKQLTRHHHNLKEEENVYKNRLQKCIDIVFPEFNKLFNSKYGIVYMNILKMFGSAENIANTDIRTIRKCFEIEGRGNRISLTPERLKECAGSSIGISSSAEVIQIKHLTAQIELIEEQLTEIDKKIEEFSIQNNSPILSIPGISHFSGTSILAELGDISNYSKPSQIIKFAGVAPLHYESSQFNAQHTSITKKGSKYLRKTLYQIILPVIRHNPVFNKYYQLKISQGKGHRCAQGHCVRKLLRIIYHLLKTNQQFDPQLLR

SEQ ID NO: 294462 - protein, 309 aa, unidentified
MKQSVVYIGIDVAKTHLDVAWAGTFRRWPNERSGHAALVRWIKQSATPVQLICEASGGYEQALLESLEKSEVKVTLVQAVRVRQYARAAGILAKTDRIDAKVLAAFGSAMQPQPTPPLSAEQKRLRQYEAQRRHLSRILVAEENRLAQLSCAELRSLSRCLISKIKTQIKTLDRGISDLIAQDQTLCVKAQKLTAISGVGIRTAALLLAQMPELGQLNRRQAAALAGLAPFNRDSGSLRGKRAIFGGRPALRSGLYMAALSAARFNPILSNFYQRLRAKGKPHQLALTAVMRKLLLALNHTLKPIPCTA

SEQ ID NO: 294463 - protein, 429 aa, unidentified
MTRISVGVDVSKNRSTVCIIDQDGKVIMRPFLVWHSTEELDFLADTLKRLNGEVRVIMESTSIYQYPIALHLKEKGIFISIVNAYKVKKFANIDFRGGKTDKKDSRTIASYGISYWDKLVEWQIPKDTYFNLDLLNRTYMNAKKHRQIILQELQHYIDCAMPGMDKELHSLNLSTKKDFMLDFVEKFWHRDEIVNMTEAEFTEVFTAWAKEKGYRPGKGKAAKIYAIAKSCIPYYPANPTVKTILQCIVDKLSGVNRTLVTIVTQMIEEAKKLPEYQIVREMPGVGDPLAARFFGSAGDIRRFKNSKALVAYAGIDSPPDESGDFSSTHRHITKKGSKVFRDTGYEIMMALRAQKRTWEKVRKNPDVYDYMLRKEAEGKPPKVAKIAALNKFLRIIYARIKELYDNMALAERAKTKTRSKTRAKTKVTA

SEQ ID NO: 294464 - protein, 403 aa, unidentified
MNAAGIDVSKGKSMVSVMRPLGEVVAKPFTVCHTGSELKELADYLKSLDGETRVIMEHTGRYYEPVARVLHDAGLYVSAVNPKLIKDYGNNSLRKVKTDKADSKKIAKYGLDNWGELRQYASMDMIRYQLKTLNRQHALYSKMKTAMKNNLIALLDQTYPGVNALFSSPAREDGTQKWVDFAASFWHADCVRGMSQATFTERYRKWCKRNRYNFSSDKAAEIYTGAKDQIAMIPKDDLTKRLIRQAIDSLNTVSKTVEQLKAEMLKLASQLPEFPVVMEMHGVGDSLGPQLMAEIGDVTRFAHRGSITAFAGVDPGANQSSEREAKSVRTSKSGPPELRRTLFLVMDGLLKSMPQDDPVYQFMDKKRAEGKPYLVYMTAGANKFLRIYYGRVKEYLASLENAD

SEQ ID NO: 294465 - protein, 338 aa, unidentified
MRTMEQQNNGLTLEKKVYVGIDVHKENWHVTIRTLREEVFNGRIPGSYISLKKVLDRYRGNSVKVAYEAGPFGFWLYDRLTEDGVEALVVPPSTIPIESGNKVKTDKRDSRKLAILLERNMLKRTYVLSEEEREHRDLLRTRRQIVDHRNDVARQIKSKILFYGIPVPFSPKTRLTHRYIAWLKTLAFGTTYLKESLDLLIQLYEYLTQQITRINRKVVALCREKKYHERIKLLCTAPGIGKLTAIELLVELQDMARFKNASQLASYIGLTPAEYSTGEKTRQGRITRCGNLQNTPQGKKRGKGGSPGAAINGYEHTWWKARGSSLRRTRGSVRSISN

SEQ ID NO: 294466 - protein, 368 aa, unidentified
MSNYVTAIGLDVHARSIKAFALNPMSGECERASFGYDPAAIAEWALSFEEPRAVYESGVTGFHLCRTLRALGLDCVVGAVSKMQRPAADRGRKTDRRDAEFLARLLATRNVVEVWVPDESTEAARDLSRALADARDDLQRAKQRMSKFLLRHGHVFDETTPTGARKGNWTRAYWRWADAIEFAEADDAAAYEHYRDCVRRCQEARDALARRVAESAGRPGWKPAVDALRCVKGVDVATAFLLACEAGDFSRFRTAPEFASWCGLTPSEHSSGETLSRGGITRAGNAHVRSALVEAAWHVPMSSREAKPLASDQEVAPAVRRHAAKCNRRLQDRREAMSAAGKKPVVANCATAREMACWVWAIARMAVA

SEQ ID NO: 294467 - protein, 548 aa, unidentified
MSDLHQASRFSLSPLGERIPRKISRFEPLNLIERSALAVGRSVAALPFGASRSRRLPAGEIGSGRRHTHCLVTPLARCSRWGGLSFVDDRAHAGWQVQSNVICFKSMKSLPVLDPKAAAIDVGSEKLHVSIAGDVPKVFGTFTGDLENLRAYFKEQQVRSVAMEATGVYWLYLYEVLEGAGLEVIVVNGRHVQNVPGRKTDMADCQWLATLHAHGLLRGGFVPPAEIRRLQDYQRLREDHIRGAASQVQKMQQALERMNVKFHDVISDLTGVSGLKVVGAILRGERDSAKLLELCDQQIQKKKSAAVVESLRGCWKEEHLFALRQALELWEFFQQKIAQCDRELEKLLHQLVPPSSNDSADGGTSKLARAKVPGKNAPVIAKFQQLLARICGGRDATQLPGLSAYLVLQLISEVGTDMSRWPTEKHFVSWLGLGGARKQSGKRKGQIKAHRNRAGRIFCRASAALAQSVDKALGGFYRRLRGRIGGLAANVALARKLAQLFYRLLRYGAEYVERGLKVYEAKVLETEARLLRKLAGKQGFILVSATAK

SEQ ID NO: 294468 - protein, 315 aa, unidentified
MVDVPCFVGIDVAKAQLDIALRPCGERWAVPNDAGGVVTLVERLQALHPTLIVLEATGGLERAATTALATAGRPVVVVNPRQARDFARATGQLAKTDALDARALAHFADVIRPTPRPLPDAQTQELRALLGRRQQLIVMRTAEQNRLAGTSERLMKDIEAHITWLNARIATLDDDLEELLRASPLWRENDDLLQSTPGIGPVCARTLLLELPELGTLTRQQIAALVGVAPLNHDSGTLRGRRTIWGGRAHVRTVFYMGTLVATRFNPRIKAFYERLLAAGKVKKVALTACMRKFLTILNAMLKHRTPWQVQEVQS

SEQ ID NO: 294469 - protein, 367 aa, unidentified
MSECSLFCQLGGEKQKVNTRYVGVDIGKKKCNVAIMDQQGLIADEFTFTNNHQGIEWFSSKLSMDDRVVMESTGSVWTNLYNHLDSKHIPVTLANPLKTKAIAWARIKSDEIDARILAHLLRSDLIAESYVPPQELREIRALIRHRLSIVKIRTMVKNKVHALIDKNGLEHNEFSDLFGKSGMQWLKSLQFQSSLDRLMLDNYLEHLESLHHQIKTVDQEILSKASQDEDVKLLLSLTGVSIYTALLLKSEIGDIKRFPNYKKLVSWSGLAPSMHQSGSVEYYGSITKQGSKMIRWIMVESARVAVNHDERLNAFYERIKHRRGDQKAIVATASKMLKIIWTMLSRREPYESRNEKSYERKLNSIDE

SEQ ID NO: 294470 - protein, 359 aa, unidentified
MSELTFIGLDVHARSVAAGILEGSTGEVHGGPAPVVVAELVSWLRQQGESVSVAYEAGPTGFGLTRACSAAGIPCLVAAPSKILRAPGERVKTDRRDALRLARLLRLGELTAVRVPTPSEEAARDLVRAREDARGDLMRARHRLSKLLLRQGLVWEAKAWTQAHERWLATQRFEERGLALAYEEGLAALSSVRARRDALDRAICEEAAKEPWAGVVGRLACMRGVSTLTAFGLATEIGDWQRFDGRSIGAYLGLVPSESSSGERRRQGAITKTGNGHARRLLVEAAWQQRRPSSHPSRELMRRREGQPALVRERAEAAGRRLQRRWRRFDARGKRSTVAAVAVARELAGWCWSLAIMED

SEQ ID NO: 294471 - protein, 348 aa, unidentified
MDRYIGMDVHATSCTLCTVGPSGRKLKSDVVETNGQALVQYLKTIPRPRHLCFEEGTQSGWLHEILSPHVDELVVVGISESRGAKSDAKDALGLAQAVRLGAVDTVVFKAPSQFARLRSLATGYDQITTDVTRTQLRIKSLFRARGISTPGQSIYSPQARSDWLKKLTEPSRPSAELLWRELDMQRQLKRESERQLVAESHRHPISKILETCPGFGPIRTALSVPVVITPHRFRTSRQLWSYAGLGLVMRSSSDWVKASSGWVRAETAKTRGLNRCFNRTLKYVFKGAATTVITKRRDSPLGQRYLKLLEGGTKPNLAKLTLARSIAALFLSMWKHEEAYDPARHRAR

SEQ ID NO: 294472 - protein, 315 aa, unidentified
MVSYLGIDVSSLSLDAAVRPQGTRLHVSNDPAGFEALLDGLCGLSIKRVLLEATGGYERNILRFLQDAGYKVIRVNPRRARAFAESIGVKAKTDAIDAEVLAHYAEVIPDQPTLRISPERALLRELLQQRDRLVQQRDDDRRRLKQAQFSAVSDFLKANLQHFKSQIKLIEQAISQQTEALKDERVTQLVQVKGIGVVTAGKLITLLPELGRVESKEIASLVGVAPFNHDSGKSVGKRSISGGRFEARRSLYMSCLVAIKYNPALKARYEALRGRGKVAKVALVACMRALIVRLNAMLRTGKPWLDLVLPQPMRT

SEQ ID NO: 294473 - protein, 326 aa, unidentified
MEHELHYIGIDTAKEKLDVDVLRPDGRHRTKKFANTTKGHDELVSWLKGHKIDHAHICIEATGTYMEPVAECLYDAGYIVSVINPALGKAFAQSEGLRNKTDTVDARMLAEFCRQKRPAAWEAPHPLERALRALVVRHQALTDMHTQELNRTETAREVQRPSIDAHLLWLEAELKRLEKQIKDLTDDDPDMKHRRKLLESIPGIGEKTSAVLLAYIGLKDRFAHARQFAAFAGLTPRRYESGSSVRGASRMSKAGHVSLRRALYMPAMVATSKTEWGRAFRDRLEANGKKGKVILGAMMRKLAQVAYGVLKSGVPFDASRHNPVAA

SEQ ID NO: 294474 - protein, 344 aa, unidentified
MNEVTTIGVDLSKNVFQVHGVDGEGGAVAGRQLRRSQMLPFFRKQPPCLVGMEACATAHHWARQLMEFGHEVKLMPPNYVKPYVKRNKNDAADAAAICEAVTRPTMRFVAVKSAEQQSVLMLHRTRELLVRQRTMLINAIRAHMAEFGIVAPVGIPRVKELFAVIADGDDERLPPIARACLEGLAKQFMSLHEEIAIAERRIHAWHRASEVSQRLETIPGIGPITATALAATITDPSVFRSGRELAAWIGLVPRQNSTGGKERLGKISKQGDQYLRWLLVAGAMTIIRHAKRRGTSNLPWLANLIASKPTKVAAVALANKMARIAWALLRTGQDYQKPALTHGT

SEQ ID NO: 294475 - protein, 364 aa, unidentified
MLIIGCDYHPGFQQIAFVDTDTGELKERRLEHREPAEQFYRDLKQQKLAVRVGMESSGHSRWFERLLNELGFELWIGDPAEIRTKRVRKQKTDRQDAQLILQLMLENRFPRIWVPDAANRDLRQLLWHRHRMVQMRTRVMNQLHVVPLNEGLRRKKALWRPAGRKELESIALAPWASRRRQDLLDLLDQLTPKIQELTRALEEEVEKRPVTRLLMTHPGVGPLTALAYELVIGTPERFHCGKQLASYVGLVPEEKSSGDRRRLGHISKQGNVLLRFLLVEAAQVTVRSQQEWRNKFFHLAMRRGRKIAKVAMARKLAVHLYWMWRQGCDYGQTQKLGSHAGKPGNPDGVQFITDVMIGHPAPSK

SEQ ID NO: 294476 - protein, 350 aa, unidentified
MSSASVRTTISTIGLDLGKNTFHLVGLDRRGAIVLQQKLSRGQLERRLANVPRCLIGMEACSGSHYIGRRLTELGHDVRLIPAQYVKPFLKGHKNDYRDAEAIAEAVQRPTMRFVSIKTPEQMDLLALHRVRSRLVGQRTGLINQIRGFLIERGITVRQGVLPLRKALPDILSSSTGTLSPRVVHLIADLAQDWRRLDERIETVSTEIEALAQQDDSCQRLMTVPGVGPIISSAVVAAIGNGVGFKQGRDFGAWLGLVPKQESTGDRTILGKISKRGNKYLRTLFVQAAHVVLVRRPATARRGLWPWIEQASRRLHRNLLAIALANKLARIAWAVLARGHASEPRVSSHA

SEQ ID NO: 294477 - protein, 385 aa, unidentified
MSKPYDLSKPLVALDHDSTLVCVIEMSGSSWLVAATVPGVDRRPLQKLPVNPTRLLEQVERWRKEATRAGRTITRTVVAYESGRDGFWLARLLQGHGIEAHVIHASSVAVSREQRRAKTDRLDTEMLMRALLGWLRSEPGHCRMVAIPTVAQEDARRPGREREGLVAERTRLTNTIKAELALWGIQGFKPGLKKAAEHLDALRTVEGEPLPPNTLARLHRLLKRRTLISDQIKAIELAAAQAIERDPTGPNAMVLLLAQIKGIGLETAQMLVHEVLSRNLRDRRAVARYAGLTGTPDESGSKRREKGISKAGNPRVRRGMIQLAWRLLMFQPDAALVRWYRERTAGGKGAIKKTMIVALARKLLIALWSYATAGVMPEGVVLKAV

SEQ ID NO: 294478 - protein, 359 aa, unidentified
MSQQPSDRSVIIGGVDTHKELHVAAVVDAHDRVLGTASFPTTRHGYKTMLTWMRSFGELSRVGIECTGTYGAGLLRYLQRAGITILEVTTPDKTVRRKRGKDDAIDAENAAHAAYAGIRTVTPKTRDGMIESLRVLKVCRKTAVAARRVALQMIQTQVVSAPEELRDLLRNMTRMQLLRTLAAWRPDLNGYRDVTMAYRIALKSLARRYLELHDEIADLDVMIKAIVDELAPKLVSRTAVGYETAAQLLITAGDNPDRLGSEASFAALCGVSPIPASSGKTQRHRLNRGGDRAANSALHIIAIGRLRLDADTQAYIARRVGEGHSKLEAIRCLKRYIARELYYVLRSRHREINQTQIAT

SEQ ID NO: 294479 - protein, 320 aa, unidentified
MRNAVGLDISKLTFDASAIVGNAEYSAKFDNDSKGLDQFSDRLKSLGCQNLHICMEATGNYYEEVADYFAQYYSVYVVNPLKISKYAESRFKRTKTGKQDAKLIAQYCRSAKESELVKRQKPTDEQYRLSRMTAAYAQIKSECAAMKNRHHAAKDEEAAKAYAQIIKAMNEQLEVLKEKIKEQTEKPNCKEGVKRLETIPAIGRMTAAVLFHHLTSSKFETSNKFAAFAGLSPQQKESGTSVRGKGKLTKFGNRKLRAVLFMPAMVAYRIRAFPGFIARLEEKKKPKKVIIAALMRKLAVIAYHVHKKGGDYDPSRYKSA

SEQ ID NO: 294480 - protein, 383 aa, unidentified
MQPTQEMDVTRVDQMLAVSLELSSKSWKVGLHDGRRERASIYTLKQEVAGARLGAAIELIEQTRARWALGKDARVEVIYEAGQDGFWIARALEGRGYAVRVVDPASIPVERHARRAKTDRLDVLRLLSSLLGWLRGEHDRMRVIRMPDEAAEAQRHWARERGLLQKEIGQHRDRMRKLLRTVGCWVDLERDVGAQLKRGELKDYQGGALSEPLHERLLRESERLAQVEAQLKCVEQALAERLSPEAQRRVEALGQLRGVGPVGARRLVLELFWRNFGNRRQVGACVGLVPQPYDSGNSRVDQGISKQGNRRVRALLIQMAWMWLRYQSGSVLAKWFAQRWAGGGGNKRAKRIAIVAVARRLAIALWRYLKDGTVPDGAALKSA

SEQ ID NO: 294481 - protein, 394 aa, unidentified
MPKASAHTEAPAAIQTHISAIFVSLELSRKEWLITSLSPGAGEKMSKHSVPAGDVAALLMRFAELKRKAEARTGKSFPIVTIQEAGLDGFWLHRLLQSEGVESHVVDPASIATSRRRRRAKTDRLDGEALLRALMAFKRGEPRVCAMVKPPTPEEEDRRRLSRERKVLVAERIEHTNRIKGLLFSQGVSDYDPLARDRRQRLGELKTGDGRPLPAHLKTQIVRELDRIELLLGQIKATEAERDAMLAPPKTDAQLPASPPPAGKMLLAFKGIGPEFASILWHEALYRHFDNRRQVASYAGLAPTPWQSGSVDHEQGVSKAGNPRLRTTLIELAWLWLHNQPDSALSLWFKQRVAANNGRRKKPTIVALARKLLVALWKYVTFGVVVEGAVMKQA

SEQ ID NO: 294482 - protein, 328 aa, unidentified
MPMYQLGIDVSKNTLDLCLLREGIKGRIKTRKLKNTADAAKVVAEWLKKQSCELGEVHIIMEATGVYHEPLAYGLHFAGAKISLANPHRTREFARGMNILTKNDKVDAWMLACYGSLKEPEAWTPPPESVRYLRALLRRRDALVADSTREKNRLEKSVFTDSPDAVRASIENMLQELSNEIEHLDVLIQEHIETHPELNQDFRLLTSIKSVGYLLGLNMLTILKSHSFESAEQAAAFLGVVPVERRSGTSVKGKPKLSKIGPPEIRTKLYLAALCGLRFNPVMKQMYTKLCLRGKSKMCAIGALMRKLVHWCYGVLKTQLPFNTEYNQ

SEQ ID NO: 294483 - protein, 334 aa, unidentified
MNPIAIIGIDLGKNAFHIHCQDKSGNALLRKKLTRNKLLEYLSVCKPTTVVMEACSGAHFMARRITNLGHEAKLISPQFVRPFVKSNKNDFVDAEAICEAASRPSMRFVQPRTEAQQAMRALHRVRESLIRDKVKTTNQMHAFLLEFGISMPKGIAVIKRLSVVLAENDIPPYLAQLLIRLQAHYLYLIEQITDIENELNQALSLDDAGQRLLTIPGIGPITASVLSSQLGDGKQYAKSRDFAASTGLVPRQYSTGGKNTLLGISKRGDKNIRRLLVQCARVYIQRIEYQTGRLANWVKVQLSKKHSCIVACALANKLARIAWALTTQKTVFEN

SEQ ID NO: 294484 - protein, 441 aa, unidentified
MVSSPSPCLAFDAAVFAAFVGLDWADQKHDVMLYDQRGGEAERSQLTHTPEAIDEWACGLRQRFGGRPIAVCFEQSRGAIAYALLKYDFLMLFPLPPSRLAAYRESFSNSGAKDDPTDAALLLDYVLRHRDQVRVWQPDTPATRELQLLAEARRDAVDQRTRFSNQLTAVLKRYFPQAVALVGCDVDTLLACDFLSRWPTLAAVQAAAPSTLRKFYYAHRCRQEERIAERLQLAQVAAPLTNDAALIQAGTLQVQYLVGQLRAILRAIEKFETRLKQLMEEHPDAALFLALPGAGAALAPRLLVAFGSDRQRFQTAAELQTLSGVAPVTKRSGKRRTVHRRWACPKFLLQTFHEFAMCSRKKSVWAKAFYLLQRSHGKGHHAALRSLAFKWIRILFRCWKANTPYSEKRYLQSLQRSNAPLLAFLSAPAGAQPVANKSIYD

SEQ ID NO: 294485 - protein, 358 aa, unidentified
MKYVGIDVHKKMCQAAILDEDGTLLDEIRFANTPEEIEEFAGKLTTFHDEVRAVVESTGNLWIQIHDRLEEHGFDVALSNPSKTRLIAEAKVKTDKVDARTLAMLLRADMLPTCYVPGEELRSRRELLRHRLNLVKNRTEVKNRIHSLLDKHGLRMPGTTPFSKENIEWLREQNFGFMDDAIVRSDLAVLEAVDGQVTLIEGKIAALAAEDKRVRLLMTMTGVGYFTAMLVMAEVGDVGRFRGDKEFASWMGLVPSVHQSGERIRMGGVSGPGNKRLRWALVECAQAAVRFDPRFGGMYERVSRRRGKGCAVVAVAHEMSRIMFFMLSRGESYRGENRGLTERKLKSMSKRAFNGLRN

SEQ ID NO: 294486 - protein, 319 aa, unidentified
MQDILEICCGLDVHKETVVACLLKGVLNNKPQAKTRTFPTLLSGLEELKSWLEEENCRHVAMESTGVYWQPIYNVLESAFDGTIVLIVANARHMKNVPGKKTDMKDAEWIATLLRAGLLNGSFIPSQPIRRLRDLTRYRKSIVEEISAQKNRIEKHLQSCGFKLSTFLTDIFGVSGRTIIDQLARCGKTSPQEVERYVKGKAKAKLNEIKQAVNGQMDNIQREFLIILLQRLDESNEHLQLVEQKIDEELLKYQRQLEQLDGVPGISKTAAAAILAEIGIDMARFKTVEHICSWAGLSPGNNESAGKKSPPGPSMAIPT

SEQ ID NO: 294487 - protein, 429 aa, unidentified
MNYTQNEKIEQVTDATLVIGIDIGSQTHYARAFDNRGRELTKRVFSFGNDIEGFNSFHQWAEKLKTENDKSAILIGCEPTGHYWFSFAKYATDHKMILVMVNPFSVKKIKELDDNSPKKTDAKDPKTIAKLVIDGRFSIPYMPEGIYAEIRDLEYSRDRIIKQHNISANRIQRWLAIHFPEYLGIYTRFDATSGLAVLEKAPLPKDIISLGVSGIRKIWHDNRMRGRGVTEDRAMTLVEAAHNSIGLDGGPGTRSELYMLLEEHKLWTSQLETVNKALEEAVLKVKNVEKLLAIKGVGIITIAGFIAEVGDIRRFKSPKQIQKYAGLELVENSSGKHKGRSRISKRGRRKLRKILYQVMIPLLASNKEFRQIYDYFVSRVKNPLKRRQAMMAVSCKLIRVFYAVLTKGVDYDRFKMMSDIHHEGNLIAA

SEQ ID NO: 294488 - protein, 348 aa, unidentified
MNLKRIGLDTSKAVFTLHGVDHDEKAVLRRNMRRAEMEAFFAKLPPTHVALEACGGSHHWGRRLASFGHTVQLIPPQYVKPFVKRGKNDRNDAEAISEAASRPGMPSVAVRSAEQQAEAIVLSARELLVRQRTQLVKAVRGHAAEFGIVAAKGTNQLPALLEAVAAGEAVPIAAKEMLAFLGGQVAQLDTQIGKLERRMKRQHKANPVSQLLAEIPGIGPIGALSLALTIDPGRFQSGRHFAAWLGLTPKEHSTGGRQRLGGISRAGNERLRQLLVLGAMAVIRYAKPGSETASAWLLALLERKPRKLAAVTLANKMARTVWAMMATGEAYRGSKTVATQAAGVAAIA

SEQ ID NO: 294489 - protein, 317 aa, unidentified
MAEVTFPQLIQRACGIDVHLKVVVATIDGAGIQRETRSFKTFTSSLNELKEWLLSNGVTHVGMESTGVYWKPVYKVLEDSIPNVWIVNARHIKNVPGHKTDKMDSEWICKLLLAGLLKPSYIPPKEQRQLRDLTRYRNKLIQQIASEKNRMMRILEDCNIKLSSVVSNTSGTTATSLIDMLCEGKVLTLDDINSVYHGKLSASPEELLEACTGFVEEHHIYLLQMIRKDIDQTQTLVDDLSERIKRLLSKYENVLELLREIPGFSTKVVEDLVSEIGLDMSHFPSEKHLSSWAGLSPGNNESAGKKKAHEPLTETNR

SEQ ID NO: 294490 - protein, 345 aa, unidentified
MELHTIGIDLGKTVFHLVGLNLRGEAVVRKKLSRRQLLQFTANLHVDLIGMEACGGAHFLGRALREQGHEVRLMPAQYVKPYVKTNKNDYIDAEAIAEAVARPTMRFVPIKTDDQLDMQSLHRVRERWVMRRTAIVNQIRGLLLERGITLRKGRRYVDAALPGILEDADSKLSGALRVLLAQLKLELDQMAIRIDDADAVLNKAAHENEACQRLVEIPGIGPVTATALIAAIGNGAAFRKGREFAAWMGVVPREHSTGGKQKLLGISKHGNSYLRRLFIQGARAVLQQRTKQTPALSVWLAQLTIRAHQNVVAVALANKLARIAWAVLAKEKQYRPPALISLEAA

SEQ ID NO: 294491 - protein, 337 aa, unidentified
MIVIGVDVHKHSLTAVAVDEAGRALAELTVAAAPELLGWSGPLAAERLWALEDCRQLTRMLEETLLAAGERLVRVPPKLMAPQRRAGRMRGKSDPIDALAVARAALREPRLDHPRPGEQRLRELKLLVDHRDDLIDERRRAQQRLRWHLHDLDPALAVPLGALDRAIWLDRLGRRLAQLEQTAQVRIARELVGRCSSLTRTILELDRELQAAATQTAPALLALPGCGAVSAAKLLGEIGPIERFQTDAQLARHAGVAPLEASSGKHRRHRLDRGGNRQLNCALHRIAVTQGRVHPPARAYLERKQAEGKSRREAIRCLKRQLARTIYTTLKNEPLLT

SEQ ID NO: 294492 - protein, 444 aa, unidentified
MEQSTRFVGMDVHKDTIVVAVTATGEVGKATAYGTFPNTATALETLVKRLRQAGDGPIKFCYEAGPCGYGVHRTLTRMGEDCMVVAPSMIPRKSGERQKTDKRDAASLAVLHRGGLLTAVWVPDAAHEAMRDLIRARLAAVRAVRAARQQLSAFLLRHERIYPDGRSTWTKAHRRWLADQTFAQPAQQIVLEECIEAVRQGEQRRDRVDGYLRAQIPTWSLFPLVQNLCALRGLDMIAGAGLAAAIGDPSRFATAPHFMAYLGMVPSEHTSGPKRRIGAITKAGDVHARTLLIEAAHSYRYPARIGRHKLAAVDAVPEAVRAIAWKAQTRLCQRYRHMMARGKLKQVVVTAIARELAGFVWSIACITSDPAVSGNIVTELYDEGTAPYDEVTILSEEVAQQVQQLTPDTGRPRAPRHQSLKGTARPRRRTPANQAGSVERSRTG

SEQ ID NO: 294493 - protein, 343 aa, unidentified
MKIYALGIDLGKTVFHLVGLDTSGQVVVRKRCSRTQLLAFTANLQVQLIGMEACSGAHFLGRALREQGHPVRLMPAQYVKPYVKTNKSDFLDAEAIAEAVQRPTMRFVPIKTEEQLDLQALHRVRERWVMRRTAVVNQTRSLLLERGLTLPKGRSHLDEQLPRILEDAELNLSDSFRVLLAQLKLELEQLAARIEPMDRVIQQTAKQNEACQRLTEIPGVGPVTATALIAAVGNGSTFRKGRDLSAWMGIVPRECSTGGKQKLLGISKRGNKYLRRLFVQGARSVVQQRHKQAPGLSSWLAQLLARTHQNVAVVALANKMVRIAWAVLYKNERYHAPVLAVTS

SEQ ID NO: 294494 - protein, 400 aa, unidentified
MMTPDDIDVWVGLDVGKSAHHAHALDHDGNTLYDKPLKQDEKAIRTMLGKLSKHGRVLLVVDQPNTIGSLPLTVARNMGIAVAYLPGTAMRRTAQLLPGDAKTDRRDAHVIAWAALKLPETLRDAGPDDETLAALKLLAGHDEDLAHESTRHVNRLRSLLLQTHPAFERALKGERITRDATLALLERYGGPMGVKRAGIEDVKDWAKSNGLRAGRIIDDMFKAIGEQTVTVPGTLMAETIIPSIAHDIKTIRDRRREVGRQVEKLLEDHPLLTVLTSMPGIGVRTASNILLGIGGDIANFKSSAHLAAYAGISPVTGQSGTSIKGERPSRRGNKRLKNALWQSSFVASAKHPPSIAYYKRKREQGKRHNAAVICLARRRCDVIYSMLKNGVLYQEPVLVA

SEQ ID NO: 294495 - protein, 413 aa, unidentified
MDKIYDICCGIDVHKKLIVACLNHKRKKELREFGATTRELMELAEWLQKNECEIVAMESTGSYWKPLYNIMESYGLHAIVVNPAHMKAVPGRKTDVKDAEWIAELLQHGLLQPSYIPSKDQRELRELVQYRKSLVGERTRELNRLQKMLEGANIKLSGTVTNINGKSARKILEYILSGNEIDEKKYDEMYEEKLIAHNLKASKEQILDDLKGFMSPLQRRMLKELLQHLDELNVHIENLNDEIDNFMKPEEKQASQVIQDVTGIGNTSAQTIIAVIGTDMERFPSDRHISSWAGLCPGDNISAKKRKGGKIRKGNALLKSTLVLCAHAAVRHKSSYFHAQFKRISTHRGKKRAYVAVAHSILIAIYHILKDGVKYQDLGAEYYNQFNAERKIHAYLKKLKALGWVPPKEAVPA

SEQ ID NO: 294496 - protein, 309 aa, unidentified
MGIYVGIDVSKDRLDVCVLPRNEAFSVERNGKGLAALVDRLRPLTPSLVAVEATGGFETTTAAAVAGAGLPLVVINPAQIRHYAQALGKRAKTDPIDAAVIARFAADLKPEVRPIPDETTQLLADLIARRRQIVDMLQAERQRQMRATVRSLKKSLARLIAALEKELNALDGEIDGMVRASPAWRVSENLMISVPGVGSKTARTLIAELPELGSLDKKRIASLAGLAPYTRQSGRWKGKSMIGGGRKTVRSALFMAAMVASRHNPVLKAFRDRLVARGKPKMVALIAVARKLLTILNAMIREQRPWQHA

SEQ ID NO: 294497 - protein, 370 aa, unidentified
MTSIIYVGMDVHTTNYTLCSYSIENDTIFATVKVDPDYMNIVKYLEKVERNHGGDCHFLCGYEAGTLGYSLYHQLTLQGVECVILAPTTMATTRKKGIKNDKRDAGNIAKCLAYNTYSAVYVPTGEDNAVKEYIRMRNDAKDTLKRIKQQTLALCTRHGKRFTEGRNYWTQKHIAWLRKLDFGDAILNETLREYLTLYHQAVDKVELFDRRIAEMARSERYEERVKKLKCFIGIKDHTALATIVEIGDFARFPTARNLSSYIGLVPGEDSSGESLQRTGITKAGNSHVRKLLIEAAQSYSRGAVGTKSKALKERQAGNDPKVIAYADRANERLKRKCCRIMFKSKRNIAVTAVARELACFIWGMMTDNVA

SEQ ID NO: 294498 - protein, 382 aa, unidentified
MKKYSNELVVGLDVSDKKSEVCIMQKVDGEVTKRESIKTERETFFQYFSKLETSLIVLEVGTHSPWMSRLIKSLGHEVIVANARKISLIYGSKRKNDKADAEKLARLARVDRTLLHPVEHRDEQKQADINVIRSRAVLLKTRQQLINSVRARLKSFGIKPPQVYPAGFHKKVVAFIPETLKVALLPIIEILKGIHSQIKGLDKEIAKLAEQRYPETGLLTQVSGVGQLIALTYVLTLGDPKKFKKSRSVGPYLGLAPGQDQSGNHDPKQSITKEGDPYLRSLLVQSANYILGHFGPDCDLRRFAFDRLQHQKEDLKKKGKDPNKVKVSKQLKIAVARKLAVLLHHLWISAEVYDPFFNSPHQNSQDSSLTSEQQDSLPLLVA

SEQ ID NO: 294499 - protein, 390 aa, unidentified
MIYVGIDVAKDKHDCCILGSDGEILFSPFTIQNTLQGFDELYEKIWSLTKDLHEIKVGLEATGHYHLNLLRSLLDNGLASYVINPLHTNLFRKGQSLRKTKTDKVDAASIAMMLLTDRTLKPYSDTSYHNEELKSLTRYRFDKVQERAKLKTSVSRLVSILFPELEKLVPTLHTATVYALLSEFPGASFVAAAHLTRLKHLLCEASKGHYGRDEAILIRDAAISSVGTVMSAKSMELKHTIHLIEVLSEEINEIETAINSIMNTLESPITTIPGIKNRMGAMILAEIGDFSRFENADQILAYAGLSPSTYQSGQLTSSYAHMEKRGSRYLRYALFNATIYVCNWDPVFNSYLAKKRAEGKHYYVAISHACKKLVRVIYRMQLTGEPYRAA

SEQ ID NO: 294500 - protein, 320 aa, unidentified
MRNTVGLDISKLTFDATAIVGNAEYSAKFDNDSKGLDQFSDRLKSLGCQNLHICMEATGNYYEEVADYFAQYYSVYVVNPLKISKYAESRFKRTKTGKQDAKLIAQYCRSAQESELVKRQKPTDEQYRLLRMTAAYAQIKSECAAMKNRHHAAKDEEAAKAYAQIIKAMNEQLEVLKEKIKEQTEKPNCKEGVKRLETIPGIGRMTAAVLFHHLTSSKFETSNKFAAFAGLSPQQKESGTSVRGKGKLTKFGNRKLRAVLFMLTMVAYRIRAFPDFIKRLEEKKKPKKVIIAALMRKLAVIAYHVHKKGGDYDPSRYKSA

SEQ ID NO: 294501 - protein, 334 aa, unidentified
MWHVGIDLHRQTLVIAAVNDAGECMAPRRIDCRDRDTIIDTMRRLGPFRAVIEATGTYRWLYDLLAPLGTVLLANPLRLRAMVQRRSKTDKLDSQLLANLLRINQIPLSYIPPQRYQLLRDITRHRARLARQATMAKTQLRSLLAIHNRGPLPFSAVGIRACTWFAHQDFGAAGNWVRDELLLRLDHYRRQLALLDKRLESLHRETPEVEALSDIPGIGLYSALLIVGELGEVHRFRTARQVGGYAGLTPRVHQSGDHCYRGSITRQGSCWLRWILVEAAIKAARYDPQLKHFYVRARKRSGVKIARVAVARKLAEICWKRLIGWHGRPVTSIA

SEQ ID NO: 294502 - protein, 469 aa, unidentified
MFGDTVVSSIPVWQYAFSMLSSLSCRLLLNQKAMANVVTFEQINAHAAAIDIGAEKIFVSPDGQQVWIYQTFTADYRRCVQDLKDHGIRSVCMEATGVYWIALYELLEQAGIEVCLVNPKEVKQVKGRKSDPKDCRWIQKVFSAGLVRQSYVPAGMLKELRMMVREREDVIICGSSYVNKMQKALELMNIKLTNVLSQIHGASGIRIIEAIIGGERDPQQLLLLCDSRIVEQKAEQVLKALEGNYNESWIFLLNQGLVMWKMHQQQIIVMDNKIASLLDKLEKGKAFVKSVGKIKPIRHHAPKIKDLHQKMLNIYGVDGSSLSGITDYTLLRLLGEVGTDMSRFATVKHFVSWCQLAPVLHQSGRMNKRIKIRSGSKAGQIFREIAQALISSKHIAIGAFMRRIRYRKDSKIAIKAGARKLAEAFYRLLTKGKDYVERGVINYTKQLEEKEKKFLEKLASKHNLKLVTV

SEQ ID NO: 294503 - protein, 325 aa, unidentified
MTSPMTLGLDVAKRTVDAALLSADRRAHHRQFANTQAGFLQLAAWLRPHPHHAIHAGLEATGTYGQALALFLHQQGLRVSVINPARIHAFAKSELARNKTDQLDAALIARFTATQQPAAWTPPPAAQRHLQALERRLEALQAMRQAERNRLDLEAADSLVLDSLHAHLAHLEAQMGELQQRLRDHVQAHTELQRQSALLQSIPGIGQTTAFKLLAELPNLGDWKSARQAVAYAGLNPRQRESGSSVHGRAHLSKLGNARLRRALYFPAVVAMGYNPLLKVFAARLRERGKPPMVIVGAVMRKLLHQAYGVLKHATPFNPNHAPAH

SEQ ID NO: 294504 - protein, 369 aa, unidentified
MGQYTEAFVGIDAAKARNAIAVAEGGRGGEVRYLGEVDASEQGMRRIVARIAAKYDRVHFCYEAGPTGYGLHRLITGLGDECTVVAPSLIPRKPGDRVKTNRRDAVTLAKLLRADERTAVWVPDEGHEAIRDLVRARAAAVETLRVHKQQVAAFLLKHGRHFPRKTPWGARYMRWLQEQKFAHPAHQIVLQEAVEAVRLAKERVERLERLIEEFLPTWSLAPVVTALQALRGVNLIVAVTFVAEIGDLRRFESPRRLMAYLGLVPSERSTGDAVRRGGITKAGNGRVRHLLVESAWTYRHPPRIGAKKLAQLERVPPKVREIAWKAQSRLTARYRALAGRGKRLTIVCTAIARELAGFMWSIARESQPA

SEQ ID NO: 294505 - protein, 341 aa, unidentified
MGEVSTIGLDLAKTVFQAHGADASGGVIFRKKLRRDQLLAFFASQPRSVVAMEACASAHYWAREISAFGHETRLIPPAYVKPFVKRQKNDMADAEAICEAAQRPTMRFVTPKSAEAQGAAVIFRTRDLLVRQRTQLINALRGHLMEFGFIVRQGPGHVSKLIDLVADPSSDLPAEARPILAVIADSLQAIQARILVLDREIVARAQAHPVVRRLTTIPGVGPITATALVALAPAASTFRRGRDFAAWLGLTPRQHSSGGKERLGRTTKMGERSLRRLLIIGASSVAKVAGREGSRASPWLARMLARKPRMLVTVALANKTARIVWALMAHGGTYKAPTAAV

SEQ ID NO: 294506 - protein, 368 aa, unidentified
MKMNAIKAAPAASAIAIKNEKSAKAKRILIGTDVHLRGYQAARKVDNGVIGVVENFRSEEALLLHVEKQCERAEQVVVVYEAGPLGYTLYRKLTARGVLCYVCAPDSSEQKRKRRKNNKIDARNLTSKLFNYLNGDEGALQLARVPTEAQEQLRLASREHDQMVEERKRLGAKGNALLLTQGFGSWSNWWRPKAWAQLSSLVPEWLLERLKIWVDVLKMLDEKICLAKVALARACSGPRPKGVGALSQIQLQSEVLDWSLYTNRRKIACLAGMVPSEWSTGDTERRGSITKVGVPAIRRIIVEMVWRIVLFQPQYKPVQKWQKVLQGTNPALKKKAVVAIGRQLIVDLWRLQTGRVTAQELNLVMVGA

SEQ ID NO: 294507 - protein, 355 aa, unidentified
MTKIKYIGLDVHQASISIAVRDESGKLVMQSVIATRASAILEFLEGLRGTLYVTFEEGTYSTWLHDLLVRRVSKVVVCNPRKNALLKKGNKSDRIDARKLSELLRGGLLSPVYHGENSTRTLQELTRSYMTLTVDTTRVMSRLKAIYRGQAIPYGGKKLYTRKHRQEWLVQLHQPGLLRRAERLYEELDLLQQLRRQAKQELMMESHKHSVCERLRTIPYLGPIRAAVLAARVQTPHRFRTKRQFWAYCGLGLETRSSADYQQLEGQLQRSRKKVLVRGLNVDHNHDLKNIFKGAALSASIFAGPLQDFYQQRINSGIQPEMARLTLARKIAAVALTIWKKGESFDAAKLKTQAA

SEQ ID NO: 294508 - protein, 324 aa, unidentified
MKTQNDPEKYAGIDVSKASLDIAVGQEGEIWQASNTAGGIGTVVEHLLRCQPCLIVVESTGGLEKPLIAGLQKAGLPVALIHPGRARKFAAGIGRLAKTDRLDARLLAWYGFAARPEPKPQPQPACEALSELVRRRNQIIEMLVSERNRRSTCPASLLETLDAHIAWLTTERERLTTQIETMITTQAEFHDKDVVLQSAKGVGPILSATLQAELPELGAYSHKQIAALVGVAPFSRDSGRYHGKRQIKGGRSGVRSTLYLATLSAIRYNPVIRSHYQQLVDRGKLPKVAIVACMRKLLVILNAMIRDLRPWQPAPLHAVVSTTP

SEQ ID NO: 294509 - protein, 436 aa, unidentified
MRRKVRRRLEVIHPDCAGIDIGGSRHFVAVDPARSEEPVQSFGSFTDELERMGRWLHECGVEVVAMESTGVYWIPVFEVLDRMGLEVHLVNPRATKQVSGRKSDVLDCQWLWQLMSYGLLKGAFRPSDAVCELRSYVRQRARLGRDQARSVQHMQKALTEMNVQLANVLSDVTGKTGMRILRAIVAGERDGKKLASFRDRRVKADEQTIARSLEGTWRAEHVFALAQALERYDFYAVQIHQCQSRILSQGAALSLDADGAAMPEGHSWDSHMKATLHQMLGVDLTAIPTIGVETALMVASELGADLSRFSDSRHFCSWLTLAPGTRISGGKPLPGRAPKVINRLGQALRVAAATARTSQSFIGATHRARLARLDKPRAIKATAHQLARLIYAMLTKGEQYVEKGIAHHEAVRRDRQLRALQQRARQMGFTLVEQAA

SEQ ID NO: 294510 - protein, 414 aa, unidentified
MQDLLEVCCGLDVHKETVVACLLTGAPEMKPSSEIRSFSTMAAGLAQLREWIHKAGCRHVAMESTGIYWIPVYERLEDSAEPIELMVVNARHMKNVPGRKTDMRDAEWIATLLRAGLLRSSFIPEKSIRELRHLTRYRKSIVHDVTAQKNRIEKFLQSTGFRLSVFLSDAFGASGRNVMRHLVAHGSIDRDGMDRCLKTQTRHKLNDILSSVNGTMSTHQRQFLSMMLGHLDQLETHLRQIEMEIDKAVSQFTGAMNVMTSIPGISRTAASSILAEIGPNMNCFTTSEHLCSWAGMSPGNNESAGKRKSTATNHGNPYVKSMLCEVAWVIAGKRNTYLSNWYWRLKQRKGAKKAVVALGRKLLVIIFTMLKSGTLFDEACFEQRRQHSERRRVTRMLSELERLGYEVISPAVIA

SEQ ID NO: 294511 - protein, 427 aa, unidentified
MEVIHPRCAGIDVSKRDAKVCVRVQGRGRRATSSEVTTWTSMTSSILALREHLIAERVTCVVIESTAAYWKPFYFLLDDALNVMLVNARHARNVPGRKTDVSDAAWLAELGAHGLVRASFVPPEPIRVLRDLTRARTTIAQARTKEIGRLETLLEDAGIKLSSVACEIAGVSGRAMLEALIAGQRDPAVLADLAKRQLRKKIPALTEALQGRFNDHHAFMVRLYLDRIDAHEADIARLDARIEEAITPFRHARDLLVSIPGWSQVVADVFIAETGADMSVFPTAEHLASWVGVSPGSDESAGRIKSAKTLPGNRHLKAALGVAALSASRSTNTYFGARFRRIAGRRPARPGTKKSRRQSAAGQTAVVAVEHKMLTCAWHMLVNGAFYQDPGVDYYTRHHPAKTKARAIKQLQALGYNVTLQPRTEAA

SEQ ID NO: 294512 - protein, 342 aa, unidentified
MTRIARIGIDTSKSTFQLHGVDAEEKVVMQRKLRRREFMTFLGKLEPTSIGLEACSASHYWAGQLQAIGHTVMLIPPQYVRPYVARGKNDAADAAAICEAMSRPRVRERLVAAKTADQVAAQMLLGVRENLIRRRTQLGNSIRGHAAEFGLVAAKGLSKVEPLLARIAADDTVPALAKDMFATLGQELAELAPRIAAVEARLRAWHRSNELSRRLAEVPSIGPIGACLLPIKIANPQIFRSGRMCAAWIGLTAKDHSTAGKQKLGGITRAGDETLRATLVAGATAYIQQVRRGRTKPSPWLAVLLQRKPPKLAAVALANKTARIAWKLMTSGQHYNRAAAGV

SEQ ID NO: 294513 - protein, 344 aa, unidentified
MDYYAGIDVSLECSSACVVDASGKIIREAKVASEPEALVAWFRALGLDLARIGLEAGPLSQWLYAAMKQAGLAVELLETRHVSDTFKAMPVKSDRNDARKIAQLMRLGWFRPVHCKSMGAQETRAMLTARKLIQAKLQDTENSLRGILRGFGLKVGKTTKRSFAARISELVTGHPALETIAAAMLAVHMVLLREFNGLEKRVRKMSLLDTKARLLMSTPAVGPIVSLTFACAIDDPSRFTSSKRAGPLFGLTPKKYQSGETDYSGRISKTGDASVREALYEAAHIMLTKPIKGCAQLKSWAMRIARRAGMNKAKVALARKLAVIMLRMLKDNVPFNPAAKAATA

SEQ ID NO: 294514 - protein, 466 aa, unidentified
MSGKGIRRRGVGRRRKGLPKSLRRVNLDAAGIDVGSNSHHVAVPEDRDDEPVREFRSFTNDLHRLADWLEACGIDTVAMESTGVYWVPLYEILEERGFEVVLVNARDFKNVPGRKTDVLDCQWLQELHTYGLLRASFRPDAEIAAMRAYVRHRDMLVKDAARHVQHMQKALSLMNIQLHNVISDITGATGMRIIRSIISGNHNPQALAEFRDHRCRASKETIVESLTGNYRAEHVFALRQAVELYDFYQRQMGSADEEIEKLLCKLEETCPAREDLTPSKRKRPKGNEPNFDIRTRLYALTGTDLTEITAIGPYSALKIISEIGTDMTRWPSADHFSSWATLAPRNKITGGRLISSRTRSSANRLAEVLRMAAMTIGKTDTYLGAFYRRKAAHIGKAKAITATARKLAVIVYNMLARAVPFHDPGLRAHDEQHQKRLLKNLSKRAKSLGLQLVPATDQSSSGVPVT

SEQ ID NO: 294515 - protein, 322 aa, unidentified
MTYIGLDIAKLTFVVGIKQQDTYHVKEFDNQESGFAEMTKWIDDFDIRQAHYCMESTGKYGFALAAYLYKNKQTISVVNPFKIKHFGKSLMLRNKTDQVDAKLIAQFCEVHKPSAWTPKSQDIERLSSLTKRLLQLEKMLRQDKKRLELETQNEVIESINKLGEELQKQIDSIENLIAQTIANNDELVKNASLLKSINGVGNKTIYCVLSKLGHPKQFQSAKQFAAYIGINPEHKQSGTSLNKSSISKMGDRNLRKILYMPTLSAIQCNPLIKEFYQRLVANGKPKKLAVCAAMRKLLFIIFGVLKHETKFDINFANTKNCG

SEQ ID NO: 294516 - protein, 441 aa, unidentified
MAMRKREEDEVFPNAAGIDVGGSSHWVAVPRQADDEPVREFGAMTDDLNAMADWLLACGVDTVALESTGVYWIPVYEVLERRGLVVWLVDARQMKYVPGRKSDVQDCQWLQKLMSLGLLRAAWRPGDEVCVVRAVVRQREVLLAEQASWVTRMQKALVQMNLQLTEVLTDVMGMTGQAIVRAIVAGERDPKVLARHRNGHVKASAADIERALTGNWREEHLFVLGQALAMVDSLAQRVLECDAKTEALLAPLGRHEVELGGPGKRRGKNTPGFDARTALARWAGVDLTRINGLAVTTVMTILSEIGPDLSRFANVKHFCSWLGLCPGTKVSGGKVLSARTRRSTNRVRQALKLAAMSLSRNDSALGAFYRRLCSRMDKPRANTAVAHKLARMVYFMLTRGEAFVDQGQQHYEEQQRQRSIDALMRRATALGFQITPAVQLA

SEQ ID NO: 294517 - protein, 367 aa, unidentified
MKKVSTLAAKQGRNISQPTLTIGLDLGDRNSWYCVLDESGQIQLEQRVRTNAKALREIFGGIPRSRIALETGTHSPWISRLLSELGHQVIVANARKVRLIGESRKKDDRLDAQTLARLARIDPGLLCPVKHRSAQAQADLTVIRARAGLVRARTALVNTARSLAKSYGERLRGCNVRNMNPEKAEALSPELQRALEPLLSAIEELSQRISAYNERIEALAEQSYPQVKLLQQIKGVGTLIALTFLLTLEDPHRFGKSRDVGCYLGLQPGRRNSGQSEPQMHISKEGDPYLRTLLVQGAQHILGPFGVDCDLRRWGLKLAERGGRNAKKRAIVATARKLAVLLHRLWVTGEVYDPLHNSNRVIVAAAA

SEQ ID NO: 294518 - protein, 472 aa, unidentified
MTDSKNSKKQATKKRKARRRKKGFCFQDRPIVEPNAAGVDVGAREMYVAIPPDRDAEPVRVFQTFTADLEALADWLIERGITTVAMESTGVYWIPLYQILEDRGLRPCLVDARHMRNVPGRRTDWHECQWLQYLHTSGLLRAAFRPQQDVCAVRTLVRHRHEMVQMACQHIQHMQKALTQMNFQVQHVIDDITGVTGTAILDAILAGERDPGKLAKLRHGRIKADEDTLRKSLEGDWRAEHLFTLRQSREMYDAYRKQIEACDQELIQYLGDFEAKVDVVEKPLPKPSGPSRKRRTKRTGDYRFDARQQAYRLYGVDVTRIPGIDGMALSLFSELGSNLTIKFPNSGEFSSWLGLCPDNDKTGGKVVWRGVRKIKNRAGQMFRQAASALHRSRSPLGDLLRRMKAKLGPEAGIIATAHKIAIIFYTLVTKQVEYDDSAWAERDRQRQQRFEQKLKRQARYLGYQLVPIQASA

SEQ ID NO: 294519 - protein, 334 aa, unidentified
MDKVTTVGIDLAKRVFALHGVDGAGRVVLRKTLRREQLVETVAGLPPCLIGMEACSGAHAWARRFQKLGHSVRLMAPAFVVPYRKSGKNDGNDAEAICEAVVRPNMRFVPVKSEEQQALLALHRVRQGWIAERTATINRIRAVLSEFGVVLPNRAEHVRRHALQAAQPLPAFAQRALSDLREHLRGLDERVAAYDRELTAQARASDPAQRLMQIRGIGPLTALAIVATVGTARDFSSGRQFAAWLGLTPRQHSSGGRSRLGHITGRGDAYLRCLLVQGARSVLHTAMHHSDRLSRWVVSLQGRRGYHKALVAIAAKNARIAWALLSKDQTLRAA

SEQ ID NO: 294520 - protein, 315 aa, unidentified
MNHTLAQNVGVDISKDFLDVATSPAGEAIRFANDAKGHRALIKRLAAFEVIRVVFEATGAYHRLFERTLAKAGLPMVKVNPRQARRFAEASGQLAKTDRSDAAMLARMGSALELEPRPVISQTTDELKELLGARDALIKDRVAALNRRKTALSALIKRQLAQRLRQIDAQIDAIDQQQKKLRSADSNVQERYQILTSIPGVGDVTANVLIVEMPELGQLEHAQVASLAGLAPIANDSGKSSGKRSIRGGRSRARQALYMPALNAVRFYPHCKAKYDAMIKAGKPKKVALVAIMRKLAVLANALLRGSRKWSPQRA

SEQ ID NO: 294521 - protein, 355 aa, unidentified
MTSTKYIGLDVHKESISIAVLNFAGKVVMECVIETKASTLLQFIHGLRGDLQVTFEEGTWAGWLYDLLKPHVTELLLCNPRKIALLKDGSKSDRIDAHKLADLLYMKKIKPVYHGEHGLRMLKELSRSYLTITKDLGRVMNRLKALYRSWAIPCAGTQVYAPRFRSEWLSKITEAGVRRRAELYYQQLDALRLVRQQARKELLAEARKHRVTKLLRQIPGIGPLRAAHLVAVMQTPHRFRTKRQLWTYSGLGLETHDSAQYRVVEQQLKRSKKPVTLRGLNTNHNHDLKDIFKGAAMRASTASGPLRDFYEALLAKGRKPTMARLTLARKIAAITLIVWKKEVRFDANYLKQQAA

SEQ ID NO: 294522 - protein, 385 aa, unidentified
MQKLNDLSRSLTPLNPDGTLIAVIEMSQSSWLVAGIVPGIERHPLKKLEPNEGELLRLLMRWRAEATKMGCTITRIAVAYEAGRDGFWLARWLRARDIEAYVIHPTSVAVSREHRRAKTDRLDTGLLKRVFIGWLRGEPDHCHMAAIPTLAEEDAKRPNREREGIVRERTRIVNRMKSCLARFGVRNFKPTLRKAPERLATLVTPEGIPLPPNTLLELRRDLARLRFVMDQIKEVEEARAQRLEQAPQEKTHAKVRLLARVIGVGIETADMLVHEILSRSLRDRRAVARYAGLTGAPDESGSKRQEKGLAKAGNARVRRGMIQLAWRFLLFQKDSALAQWYWARTESGGKKRKTMIVALARKLLIALWRLVTTGEVPAGVVLRAA

SEQ ID NO: 294523 - protein, 323 aa, unidentified
MYFLGCDVAKSKLDVSLVNEQGVEQWVDKVPNEASKLAESLLAVTGHYGAGTLTCVVEATGCYHHALLDACEAVSIPCRVYNPILTKQGIKSSVRGKKTDKTDALLIARLGLRGEGRIHTPEPYRTTRYAARAQQRLGELSGAVKRYQTHVESVLGDELTTAAQELLAAIQTQFAAARKQFVTDTSASAPEGLVRRLQTIPGIGPYVAASLIGEVQTMDRFRTAKAFIAYAGLDPKIRQSGHSLNSTGRLTKRGSSYLRRSLFIAASSARRYDPYFKALYDKKRAEGKTYKIAVCVVARKMATVVRAVWLSEEDYDVTRWTEE

SEQ ID NO: 294524 - protein, 391 aa, unidentified
MIYVGIDIASEKHDFFMIQAETGITFSKSSITIKNSDDGYKKLHESIQDFCGATGDSQIRIGLESTGIYHTNIISFLLSQNYQVMMINPILTNMARKASKVHCPKNDNLDSQTICKYMIDNSDKFLPYTLSLYHNEALKSLSRKRFYIVQDLRKAKLAVNSLVQQIFPEFKSFFSNIYGDSAIAILKEYGTPKNLAKAHTKKVASLIHGRCKCTAEQLIAAAKVSVGISEPHLAFQLTDAIEEMEHIQKRIKTYDAQIKEYVDMLCPNLLSIPGVGYTTAGLIAGEIRDIDRFHSAESLISYSGVDVTVYESGKYKAQHLMMSKKGSKYLRYALFQAARIIWQHDPVFQSYYNKKKAEGKHYYVILGHIQKKLCRVIYSVLKSGSLYSSAS

SEQ ID NO: 294525 - protein, 355 aa, unidentified
MDQEKYIGMDVHQATISVAVMDGRGKLIMECILETKAATILEFVRGLQGDVSVAFEEGTSAAWLHDLLKPHVAHLVVCDPRKNALLKDGSKSDRIDARKLAELLQLNRLHAVYHGEHGVRTLKELGRSYLTITQDLTRVMNRIKALYRSWAIPCSGTTVYAPRHRAEWLAKIVEPGVRLRAERLYQQLDLLQPVRQQARRDLLLESHKHQAVKLLQQIPAIGPIRAALLVALLQTPQRFRTKRQLWAYSGFALETHDSGEYRMVRGKVRRNWERLTVLGLNDNHNHDLKNLFKGAAISASTRPGPLYDFYVGLLQKGMRPTMARLTLARKIATITLTMWKKGVDFDANELNRQAA

SEQ ID NO: 294526 - protein, 352 aa, unidentified
MTNATILAIDLGKYKCVSCAYHRVTAAAEFRTVVTSRAEVQRLIRDARPAVVVIEACSLAGWVSDLCAELGVPCKVANTAAEAWKYKHAKRKTDRDDALRLAQLEALGQIPEVIVPGKRVREWRALIAHRQALVTQRVAAQNRIRAILVGQGLPAPRGAKAWAAAGLAGIAQFAQPLADCAPDELWRGLLELALRAYRQAEALVVAAEAKLDEIGTADARVRLLDTVPGLGPRTAEAVVAHLDDPKRFKSGKQVAAYGGLVPRQYQSGEDDRRGRITKRGPAVLRKLLVQCAWAMLRYNRWARAVFERLSRGKARCKQAVVALARRVLVRCWAMLRDGVPWRADPDPTPAAA

SEQ ID NO: 294527 - protein, 331 aa, unidentified
MHYSHYIGVDISKNTLDAAIYAAEMRRSDTKHLTNDAAGLKELVAWARTAGAKPKDMLICAEHTGIYGDALQVFCEKKGIALCMESPLQIKRSMGLVRGKDDQIDAIRIAQYAYDHKDRLKLFHRPSKSIIQLSNLLRERRLYVRQKTTLISQQGELGDYETAQSRSRRESLIRKQNAAIDSVEKQMMEIIKGDAELKRTYDLILSVVGVGIITAIDTIVYTNNFQNFDTPRQYASFIGVAPFDHTSGTSVYGRTRVSQFCRKQQKVSITMAARSAIIHDPWMKNYYHRKMKEKGDLRSQHGVVLNAVKFKLILRMFAVVKSGIPYKVMRY

SEQ ID NO: 294528 - protein, 351 aa, unidentified
MKVTTIGIDLAKDVFGLHGVDGEGRVTFKRRLVRSRLLEFLSQLPRCLVGLEACSSAHYWAREIERLGHRVRLMSPRFVKPYRKSDKNDANDAEAICEAVTRASMRFVPIKSEAQHEVQALHRVREQLLKSRTALVNQVRGLLAEHGVVAPHGIARARRLLLGILADPERHGLSGLFRETLQEMAERLRFFDERVGAYDDRIERVFKEDERCRRLAKVEGVGPLVATAVVAAVGHASEFKSGRELSAWLGLVPRQHSSGNRSQLLGISKRGDRYLRTILIHGARAALRRADHKRDQRSRWAMRIKLARGYNKAAVALANKNARIIWALLTRGENYRPAAISVASAGSVESV

SEQ ID NO: 294529 - protein, 417 aa, unidentified
MITAPIAAFDVAKHSSKLCVLSPANDKVMDGVDIKHTDDGFEKLSHLLTKVERTFGVRPVCVVESTGHYHKRLFEYLTEKGYEVAVVNPLQSKSLQDINIRGAKTDRLDAYRLALLHRLNVTKVGKVPDDAVLELRTLTREYFSMSDTLAQYKNRARAAIDLLFPRFDQVFPDKFSATALALLKAYPSTQHLDKATDEELVELICSTSRRSAEWARQKVLSLREVAREAPGIRFGRNGLLIALQSNLTIIETIQEQLAEIEKAIVEVAEPLEGYHHLMSMPGMGPVSAATILGEIGDVCWFKSARQLVAFCGVDPTVRQSGQFKGSRSRMSKRGSPLLRRVLYVIALASIRTKGNQDAVNPVLRRYYEDKVAAGKAKKVALGAVMRKLVHYVYAVLRDGEPFKLRTPQQHIQAFKAA

SEQ ID NO: 294530 - protein, 466 aa, unidentified
MKPFYMGIDVSKGYADFMIIDAQKKPVIQSFQLDDTFEGHQALYSIVGRFLAQHPNSMLSAGMESTGGYENNWYNSIVAFQSSLNIQTARLNPLGVKRNSQADLKKNTTDKISAQNIAEYLVAHPEKVTYQKQDQLTGLRKQWGFIQTLTKQRTQFLNQFKGLLYTSNPELLRYCQTETPAWILKLAVKYPSAARLKRAKVKTLSKIPYLPKIKAQQVVIDAKRSVASATDAATEQLVVATAQQIIHLNKTIDGQIRRMIEACTMPEVKLLKTFSGISDKSAIGLIIEIQTVERFKNAKKLASFFGVHPVHKISGDGISGVKMSKQGRKEPRHILYMITLSALKSNPLIKQIYEKLQKNGKHNMAAMGICMHKILRIIYGMLKHNKPFDPRIDIANRKRSAQAKEAAPRKNASRRFQEYDTKAPVSRQQKKKRLERGRSHSVPDTKSGITAPVPETYIITNILSEL

SEQ ID NO: 294531 - protein, 421 aa, unidentified
MTQTSHDTFAAFVGLDWADAQHDGCLQGAGSAQREYFQLAHTPEAIDAWVTTLRTRFHGQPVALCLELTKGPLVSALRKYDFLVLFPINPLTLARYREAFTPSRAKDDPTDAELQLELLLTHRDKLRPLQPQSPTMRALAQLVEHRRRVVGDKVRITNRLTSTLKNYFPQVLHWFQDKDTRIFCDFLSRWPTLKAAQLARRSTLETFFRDHHVRTADVLATRMRAIKTATPLTMDEGIIAPNVLLVQTLVSQLRVTLEAIEAFDHAIAQRAQHHPDFPLFQALPGAGPVFASRLLVAFGEQRERYASAAALQKYAGIAPVTERSGKKAWVHWRLQCPKFLRQTFVEWTAESIRHSFWAQVYYQQQRDKGNTHQAAVRALAFKWIRILYRCWQERTPYDESTYLQALMRRNSSLIQNRVKAS

SEQ ID NO: 294532 - protein, 369 aa, unidentified
MDDIIFVGLDVHKATVCIAIAEGSRGGEVRQLGIFENRPEILSKVVSRLSKGGRRLSFCYEAGPCGYGLHRLLTGYGHECVVVAPSLIPMKAGDRVKTDRRDALMLAKLHRAGELTAIWIPDAAHEAMRDLVRARATAVRVLVKARQHLQGFLLRHERIYRGARAWTLAYRRWLSTVRFEHPAQQIVLQDYIHAVQEAETRRDRLTQQIEELLPNWSMAPVVAALQSMRGVALVVAVTVVAEVGDFRRFANPRQLMAYLGLVPSEHSSGSSVRRGGITKAGNALARRVLIEGAWTYRMSARVSRKLHDRLEGLPAAVRDIAWKAQLRLCARYRRMAATGKPKVVVTTAIAREMVGFIWAIARLAQPALV

SEQ ID NO: 294533 - protein, 304 aa, unidentified
MDESIKFFVGLDAHKDSISVAVCETGREPSRFLGTLGPDMQGVLKTLRKYGPPQQVSVVYEAGPTGYGLHRELKRRGYRCEIIAPSLIPRRAGERLKTDRRDCARLAELSRAGELKAIWVPDEAHEAMRNLWRAREDAVNMRLKVRQQIKAFLLRQDRRYAGKTSWTKMHQRWIADQRFVHPADQIALTEYQLAVQTAEERVQRLTAALQQSTQGWRFEPVVSALRALRGVDTVSAIGLVCEIGDIRRFASARQLMGYLGLVPSEHSSGNSVHRGSITKTGNAHARRLLTEAAWNYRFPARISK

SEQ ID NO: 294534 - protein, 339 aa, unidentified
MIITTVGIDLAKNVFAVHGVDKNGIPILVKPKVPRTALPELIANLPPCTIGMEACSGAHYWARLFTRYGHNVRLMAPKFVSPYRLAGKAGKNDAADALAICEAVRRPHMRFVPVKDEEQQSMQCLHRTRQGFIEERTASYNRLRGLVSEFGFIAPQRTESLRRLVAEHRENLPGWIRQCIDTLLEHIDAIELKIAEYDRILATIAKQDSRSQNLMKLKGVGPTTASALVASIGTAHDFKNGRQLAAWLGLTPSQYSSGGKSRLGKITKAGDAYLRTLLVQGARSVMIGVEKKQDPFSQWVSSLINRRGYWRTAVAIAAKNARLCWASLFYSDDFRFYNK

SEQ ID NO: 294535 - protein, 351 aa, unidentified
MQHVAIDLGGVKSQVCIRSEDGQIVQESKVETLRLGALLKRQPASRVVLETCAEAFRIADLAMASGHEVRVVPATLVKTLGVGARRIKTDRRDAQVLSEVSCRIDLPSVHVPKEIARVRRNMCASREVLVSSRTAMINSVRGWARTQLLKVPSGDSESFPKRARKAALTSPDGLPEYVERTLSSLDSLSEKIAAADEELEQLAKQDPVCERLMSVPGVGPITSIRFVAALDDRARFPTAHAVEGYLGLTPGEHSSSERQQRTGITKAGPAPVRRALVQAAWNFRRLRPHDPISVWAKQVEQRRGKFIATVAVARKLAGVLFAIWRDGSTYEAHHRPAAPAAPAAPAAPASP

SEQ ID NO: 294536 - protein, 409 aa, unidentified
MRYYLGVDWADQTHAVWVVDESGAKITAHAVAHTAEGLGEWGRALDEWRAQGIDLWAAIERPDGRVVDFLLDHGVVVYPVNPKALDRARDRFRQSSAKSDPFDARVLADFLRTDHAHLRALLPSSEAAQELKLLTEDCQRHIRQQTRLVNQLTATLKAYYPRALEVAEVTSALAREFLPAYPTPAAVTALTERQWQRWARAHGLSAARAGDLWAVLRQPHLPVPAHVVRAKARLMQTLMEQLMPVVAAVAQYRKAIDDFFASMPAAQWARTLPIGKHGITAPTLWARLGDAPGRWESFRHLQAHAGAVPVTKRSGKQQVVHFRFACDKALRHVVDQVAFLSLLSSAWARAYYDQQRARGHSHRQALRALGAKWLKIIFVMWQRQVPYDEQYHLATMTRQQLQQGQTQFA

SEQ ID NO: 294537 - protein, 380 aa, unidentified
MTEITRVLFALIVRVGVDLAKNVIQVHAVDRGGRRLVSRPIKRDQFLAWCAQLPAGCLVAMEACSGAHHWGRRLFAMGLDARLIAASFVSPYRMEGKSGKNDMTDAAAICEAASRPTMRFVPIKTFEQQAVMSLHRVREGLKEERTACINRIRGVLAEHGLVFGKSPKVLRAELADVIEDASNEMTGLARLVVQRAFEHWRELDEHMKWCDQQIGAHVRGSEDAKRAAKITGIGEIGASALIAGVGDFKQFKGGHQFGAWLGLVPSQNSSGGKASLGRITKRGDDYLRTLLIQGAKSAVMSAGKRDDPTSRWLQQLVARVGWQKACVAMANKNARILWAVMTCEQGFDPQHVSQKPQAKCKQPAASAVPVAPRQAIACPA

SEQ ID NO: 294538 - protein, 358 aa, unidentified
MAVTGGTRRIVGGVDTHKDLHVAAVVDEQDRVIGTRSFATTRQGYRQMLAWMQSFGELQRIGIESTGSYGAGLLRFMQQAKVAVLEVTTPDKQDRRRRGKNDDLDAQNAAHAAFAGQRTVTPRSRDGMIESLRILMACRKTAVSARRVALQMIHNTIVCAPDGLRDQLRSLTRMQLVRTLASWRPDLTAYRDLDSAYRIGLKSLARRYLELHDEIADLDVMIAAIVDELAPNLVARNSIGHIGAAQLLLTAGDNPERLKSEASFASLCGVSPVPASSGKTVRHRLNRGGDRAANSALHIIAIGRLRTDQRTKDYVAHRIAEGHSKLDAIRALKRYLAREVFTLITQRRKEINATRIAA

SEQ ID NO: 294539 - protein, 441 aa, unidentified
MGNLEKIHDNAAGIDIGSEKIFVATDKQPVKSYRTFTNTLQECVKNLQSQNVRTVAMEATGVYWITIYDMLEKAGMDVWLVNPADSKNLPGRKTDVQDCQWIQQLHSFGLLRRSFIPKEVFRQLRTYNRLREDHIQMASSHIQHMQKALISMNIRLPEVLSQVHGKSGMLMIESILSGNTDAKHLLSLCDFRLRKNKGEEILQALQGFYSEEHLFELKQAYDAYYFYQKQIQDCDKKMEIILEKMSSENSISDEEILQKANKETKRVRHHNPQIDKLHYKLIRITEGRDATTLPGFTDYNYLRVLSELGNDISRWPTEKHFTSWLGLAPRQNRSGKINKRTKKRSSTKAGQVFKQAAQTLLISKHIALGAFAKRIKAKRGPAIAIKATARKLAVMYYNLMKYGADYVEAGTKKYEEKYRSQLIKFMQKKAAELNLQVIDIQ

SEQ ID NO: 294540 - protein, 402 aa, unidentified
MISVGVDVSKGKSTVCILKPYGEIVFSPFEVKHVEKELEDLAGLLNKLDGEIRVVMEATGVYHLPILTFLQEKGYFVSVINPYSMKKYAKDNSLRRAKTDRLDSIMIANYGIDRWFKLQKYEGDENTYAELKLLGRRYRYYMELHVKSLQELTHILDYVMPGIKAMFNSWDEASNKDKLSDFVERYWHYDLITSMSREEFTEDYLAWAKEKKYHQSSAKAEAVYEMASDGIPTLSSDTPSTKMLVQEAIAVLRAVDSSLFRIISRMQELVKTLPEYSTVRSMGGVGDVLAPKLIAEIGDVRRLHNAKALIAWAGIDPPPYESGQFVGSQRRITKRGSSTLRKVGYEVMRVLKSHREPEDNVVYNYILKKEAEGKSKKAAKIAGLNKFLRIYYARVMAVYQQQ

SEQ ID NO: 294541 - protein, 355 aa, unidentified
MKYYTSTTEFNCRIDLHARQMYVCVLDRQGKKLVHTNVKDNDFAFFLKLVQPYRHDLTVCCECMFGWYWLADACQAAGLQFVLAHALYVKAIHGGKNKNDRIDSEKLTHLLRSNLIPPAYVYPAQKRPLRALLRQRIFYVWRRAELLARIHSHQLAHNRIPAKQTRRLRDPWEEQLLAAEDHPLRQLALKNDLAMIRHFDHQILQVEEELQRQTKQVSSREYALLQTVPGSGATLGLTLLYEIGEIERFPTVKDFLSYCRLVKGTVASAGKIKGLRGAKLGNPYLRWTFGEAAVIAKRDHFRIRPLAQQLEARMEGNKFKANTVVAIKLARAVYFILKNKTVFEPERLVAALARN

SEQ ID NO: 294542 - protein, 413 aa, unidentified
MQVLYSRCAGLDVHKDTVVASARLASGRDVSIEVQTFATTTAGLLALSAWLAERGCTHVAMEATGVYWKPVWHVLSDGDFTLVLANAAHVKNVPGRKTDVADATWLAELLAHGLVRASVVPDAPTQALRALLRTRKQLVRERASHVQRLQKTLEDANIKLASVLTDVTGVSGRAIVEALVAGETDPATLAALAHQRVKAPRERLIEALRGRVTAHHRFLLRLHLRQIEALEAAVAEIDQEVEADLEPFRAAVRLLSSIPGVSALGAEVIVAEIGTDMRRFPSAGHLLSWAGLCPRSDESAGKRRSTRLRHGAPWLKTTLVQCAWAAARKTGGYLQAQFQRLRARRGPKKAICAVAASILTAAYHMLRDGTFYQDLGPDHFSRRAKGDRTVRLVRHLTALGYTIQPPAQEVVSC

SEQ ID NO: 294543 - protein, 371 aa, unidentified
MAKRLKYIGLDVHKETIAVAVAEGERGGEVRFHGTIPNEDDAVRGMVKRLAGPGITLDFCYEAGPCGYGLQRLLTRQGQPCIVISPSMMPRRPGDQIKTDRRDAMTLARLLRAGELAPIWVPDEAHEAICDLIRARRSAQEDTSAAKQSVRSFLLRHDRRFSGKSAWTKPYCRWLSEQRFDFAHQQLAFEEAKRRVLEAQARTARLEAALVEAVDGWRFAPLVRSLQALRGVRLIVAATLVAEVGDLTRFQNPKQLMAYLGLVPSEYSSGARVQRGRITRAGNAHARTMLVEAGWTYRLPAREERRYRDRVADLPEDIQAIGWKAQVRLCQRFRRLSATGKPQPKVNTAIARELVGFAWDIARRVQPVVAV

SEQ ID NO: 294544 - protein, 415 aa, unidentified
MAANLKLIGQRGIKEMNAVGIDVSKGKSTVAIMRPFGEVVAEPFEVSHTDVELRKLACFLEKLPGETRIVMEYTGSYWQPIAKVLHDSGLFVSVVNALLIYKYGNNSIRKGKTDKLDAVKIANYCLDRWTDLERYAPADQIRQTLKTCRRQYDQYIRLKVNLKNNLIALLDGTFPGLNTLFKSAPRDTDGHEKWIDFAAKFWHIECIYGSSENAFTNQYQKWCARAGYRFSEEKAASIYAYAGSQVNTLPMTDAVKCLVTLAVSQLNTIIETVSMIQHEMLSLAAQLPEYPVVMRMFGVGPVLGPQLMAEIGDVRRFDRKQSLVAFAGVDAPPCQSGTFESKNRHISKRGSPRLRKTLFQVMSTIIQHAPADDPVFQFLDRKRQEGKHYYVYMTAAANKFLRIYYGTVMAYLEKL

SEQ ID NO: 294545 - protein, 356 aa, unidentified
MQENIRRSAEKPEMTVGIDLGDRFSRYCVVNREGEVIEEGRIQTTMVALERHFSGERRRIAMECGAHSPWVSRLLQGMGHEVLVANARKMRAITDSESKNDRNDAEKLARFAAYDVRLLSPIQHRSPERQRDLNLLQARDTLVRARTMLVNAMRGLVKSAGQRLPKCSTESFARTVRTTIPAGMEPALTPLLEQVASLTEEIRKMDKQIEALGKQYPEVVRLRSVPGVGPVVAAAYVLTLDSPGAAGKSRAVGAFLGLRPRQNQSGECDPQLRISKTGNSYLRRLLVQAAQYVWGRFGPDSELRRWGLKLSASGAKRGKKRAVIAVARKLAVLLHHLWQSGEYYRPFPNGPQAFTP

SEQ ID NO: 294546 - protein, 455 aa, unidentified
MLVETNSELALPAGVRVQVGIDAAITSNHHVCVRQVGTDGAIVTSRFVVPPTLAGLSALTTRLAGYPGVVAVAEPTSMSWLPLAAALSEASGQLALIGSRHAARLRGAITGKNKSDVIDADVLARAGEVFDLVPLRVPAPGQLALRRVCTRRGATVIDGNRYLRRLISLARWAFPDVWNGFAGSLATAKAVLSRWPHLAQLAAARRATLTAVVAEHTREVPDVPARAEAIRDAAGAWARFWTGRLDLDELAWAVSEHLDDLEVATGRIARATALATQYWERLYGDDPLLASLPGLGPVTTPTIRAFLADGATFHSAKHAASYVGLAPSNWSSGTVTQPSRAITKEGPAVLRLAFYQAANAARRVDPQLAAIYHRLMVTRGHCHTQATVAVARKLVERTWTVLDRGQPYQLRDPDGQPITARAAKTLIAEQFTVPDTVRARTRAHSAATHRAKLTR

SEQ ID NO: 294547 - protein, 419 aa, unidentified
MKDSITYVGLDTHKAQHTVAILYPGQDEPKEMVVKNTVGDIRRLVRRIARWAPGPVRYCYEAGVCGFTVYRQIFAAGGWCMVVAPSLVPVRPGDRVKTDRRDARKLARLLGAGMLTEVRPPNEAEESVRELCRCREAALKDLNRTRHRLSKFLLRRGSAYHEGTQWTQRHMAWVRGVSLEQAWDREVLASYLSELSQREERLAELKGAVKAVARTEPYRQAVGWLECFCGIKTITAMTILSELHGFERFGDARSLMCFLGLVPSEKSSGQQERKGGITKAGNGRVRRALIEAAWHQRRSAVASKTLRLRRRGQPAWVIAIADRAQRRLYRRFWRLVERGKSSPKAVTAVARELAGFLWSVLRYARSGGPPEGAAESSPGVPAAEEAPLPVVNEAMRQAVDERVPYERRITVREFLGQKA

SEQ ID NO: 294548 - protein, 341 aa, unidentified
MTLVMGMDQHRAQISAEWIDTITGEISRARVAPADRAGVRKFLARFKGEGLEVALEATTGWRFLAEELERIEAEVHLAEVVQTSGLKGRGKRPKTDWADARHLRELLLIGRLPESWIAPAHLLDLRARVRCRHTLLHQRTEWQQRMQAVLYHHGAPQSRGLLKLANRERVAALKLPAAAREQLTIALQLIDAIDLQLAPYDLSLRAYARKQPGCRTLKDQIYGIGELTSVTILAELGDTRRFQNSRDAVRYGGLDITIRESDQRRAPGHLSRQGPPALRWALYEAAQAARRPSSPDRAYYEQLAARIGGNRACIAISRKLLKRSYHLLRALGDQALEPVTT

SEQ ID NO: 294549 - protein, 367 aa, unidentified
MTIVAHAHPFVVGVDTHAKNHALSILATPAGVQVDDGEFPTTAAGMARAIDWVARRTDGDLAVLWVIECAASFGSQLAHAVTAAGYQVVEAARMSAKANRGVGKSDPLDARRIAAAVLPLELDRLRHLRKDDGVRVGLRVLIAARDHMTGERTATVNALIALLRVLDLGIDARKPLTAAQIIEVSKWRTRTEDIGAAIARAEAVRLAKRVIVLEAELAENTKTTTDLLRRSPARVLLDKPGIGPVTAAVAMAAWSHDGRLRSEAAFASLAGVNPIPASSGNTVRHRLNRGGDRRLNQALHMAVVVRMRMDPATKAYVERRLTEGHTKKEIRRCLKRYLARQIYRTLTAVTRADEALAAVTSATPIPA

SEQ ID NO: 294550 - protein, 365 aa, unidentified
MQYLNDTELSSLEGTRRQFNGGRCAIKLGIDVHQDFYVVVAQVGGSNPKPPQRFQKEAFLHWAARLKRKSGAEVHAVYEACGFGFALQRQLSALSIQCYVVCPQKLDEHNRRVKTDGLDAKALCLKLDRFVQGNRAALARVRVPSEAEEQLRAIHRQREQLLKARKQLEAQGRSLMVNHGLEPVQNWWKPRTFAALQVSDWMKQLLQNSQPILIGLQEKIAALTGQLQRAASPDQPRGLGKMTSVIIDREIGDWHRFRNRRQIASYTGLCPGEYSSGNTPIAKLRDQARQPQAQSCPGGIGLAAGPLPARLPPGTQVAAEPGQRRTGHRRGPQKKAIVAVARQLAVDLWRIKTGRLSAEELGLIN

SEQ ID NO: 294551 - protein, 377 aa, unidentified
MTTTDAAAEARETVYVAIELSKKTWVLGIAHPDRARPSIHRVCGGNIAELVSRLRVAARNNRRILVCYEAGYDGFWLARVLAKMGIECRVLDPASIQVNRRARRVKTDRIDVLALLRALIATDRGERHVCAIVRVPSVEEEDARRSHRERQRLVRERTGHINRIKGLLFAQGIRDIKPKLRRTRIDFAALETAEGHPLPDRLRRELEREYARLSLIAAQLREVEKERDTADAQDPVVEQKRQLLVALHGVGATSAAILAREVFARSFASRRQLGSYLGLTPSAYDSGSTTRCQGISKAGNSGARRILIEVAWLWQKYQPASPLSYWYIQRTAGQSSRIRRIMLIALARKLAISLWRYVETGLVPEGVAIAKAKLRPA

SEQ ID NO: 294552 - protein, 354 aa, unidentified
MNTTQNSTKSKIVKVIGVDLAKDHCDVIGYDENGKICLRLDGCSYAKLREILSNLPQAVVLMEACKGSMFHARSIADLGHEVRLVKGADVKALRNVNHKNDLRDAAYIAKLYFVPGTTYVYIKSQQQQSLQFLQNEYKSLQELRIQVGNQIHAGLEEFGCPVRKSSKFIKTRMVAHLEKHAELIPEDVMASFKRRREIWLNLLQQEEEAKRRLEQVAATDANAERIMTVPCVGPQTAVGLLVHVGVDFGRFKNSRQFAASLGLVPKQNSTGGNNTLNHITKCGPKRLRSNLVQCAQLVLMYAEKWKGNFGDWVRKIRDSGKKHGVIVCAIAAKLARIIYRLMKDKVDYTPILSC

SEQ ID NO: 294553 - protein, 331 aa, unidentified
MNQLGTDVSNDTLDATRTGGGQVKRRQFANTAAGHRQYIKWALRGTDRARVCLEATGIYHLQLALALYRHPAIEVMVVNPRAARRFAEAHMVRAKTDPIDADGLLLFVQRMPFRPWQAPREEVLQLQSLARRVGQLDKELTRERSRLHAARKAGPHTRPVQQDIQAHIKQLQQRKDAMQAQAEAVVQSDPALADDARLIDTIPGFAECSITRLLAELAPLPADMQAPQWVAQAGIDPRPGESGTSVRSARQISKQGNARIRAALFMPALVAIRHDANLAAYYEHLLACGKSKMTAITAVMRKLLVAIWGMLHNRQAWDGEKFYRLNLPQTA

SEQ ID NO: 294554 - protein, 314 aa, unidentified
MTFYLGIDVSSKTLDVAFFRAGEKTGACEQFDNSPAGAKKLLRIMARLDVQHVVLEATGGYENLILDAIAQIYTVTRIASHRGTAFVRSLGKFAKTDKADARALAHMAQTITPQPYKPPTPAQRHLRGLVKGRDQLIRQRDDNRRRIKRCESMVVQGALERVDALLTAEIKALEGLMAEAAKAADAPLAEQLLQVPGLGKIAVATLLAFLPELGQRGNRQISALVGVAPYTKQSGRRDGPRQIMAGRPFVRRILYMAALAAIRSTQSPLRAHYQALKERGKPPKVAIVACMRKLLITLNAMVRDQTPWHGTVEA

SEQ ID NO: 294555 - protein, 394 aa, unidentified
MILVGIDIGKNQHTFSIVDKNTGEILSNPSLFTNNQEGFLCLIKKLNRYSKSDLLIGMEDTGHYHFALLKYLLDIRYTVALINPTTTDLTRKLQGGITKNDPLDSLTICDVIGSNQRKKPYRITKVNRFDLYEQKQLTRHHHNLKEELNTYKNRLQKCIDIVFPEFNSLFRSKYGIVYMNVLKAFASAEKIATSDIRTIRKYFEYEGRGKRITLSAEQLKAAAKTSVGIPSVAEEIQIRHLVCQIEMIEEQLSEIDKKIEEFSLQNNSPILSIPGISHFSGTSILAELGDICSYTKASQIIKFAGVAPYHYESSQFTAQHTAITKKGSRYLRKTLYQIILPVINHNKVFTAYYNKKLIEGKGYRCAQGHCIRKLLRIIYHLLKTNQQLDPQLLR

SEQ ID NO: 294556 - protein, 391 aa, unidentified
MSATRINDSNTTRPVLYMALELSEKTWKLAFTTGLGQEPRQRDIPSRAVLVMEAEIHAAKERFGLPPETSVVSCYEAGRDGFWLHRCLLARGVENVVVDSSSIEVDRRQRRAKTDRLDVKKLLKMLVRYQQGERDVWRTVRAPTVEEEDARQLHRELETLHHEQTSHSNRIKGLLSSCGETLEVDRDLPQRLKKLRLWDGSPLPADLHRRLLREFERMQVVNRQIRELEQTRARRIRQEEKEPAMSQVRTLLRLKGIGVNSSWLYVREVFGWRQIKNRRQIGAIVGLTGSPYRSGTLDHEQGISKAGNRRMRAMAIEIAWGWLHFQPQSALSGWYEQRFAHGGKRLRRIGIVALARKLLVALWKYLETGVPPQGAELGDWQSKLHYTPSLL

SEQ ID NO: 294557 - protein, 331 aa, unidentified
MAEVKRYVGIDVAKAQLDVALGPNGERFTVPNDERGISALLKRLEPADLVIIEATGGLEVPVAGALATAGIGVAVVNPRQVRDFARATGQLAKTDALDAQVLVRFGAAVKPQVRALPDAQAQALEALVNRRRQLVEMLTAEKNRRANSPKVIHKSIDEHIHWLEKRLAGFDDELAALVRATPIWRERDELLRSVPGVGPVLATTLLAHLPELGALNRKQIAALAGLAPFNRDSGSLRGSRCIWGGRAQVRRVLYMAVVSAIRSNPVIKDFYVQLRARGKYPKSALTACMRKLLVILNAMLHNNTHWHASDLTASTSTLAPLADAVAEHGCC

SEQ ID NO: 294558 - protein, 417 aa, unidentified
MTAASRQWFAGVDWASSKHDVSLSDDGGKIVGRRVFEHSGTGLAQMADWLVRESGAEPADIHVAIETPHGAVVETLLERGFKVYSINPKQLDRFRDRFTVAGAKDDRRDGHVLASSLRTDPRALRLLTPADPEIVELREWSRIVEELGHDLRRHMNRLHDQLRRYFPAFLRLGGDADALWKLELLALAPTPAMARSLPRAKVARLVKTHRVRCHDADGLLAVLRAPAPAVSEATVAAAKVHVLVLLKQIRLAAEQLGEAKATLGRLVDALAEPGDSAPGQTVQRDAAILHSSPGMGRIILATLLAEAPQAVRERDYHALRTHGGIAPVTRQSGKSRYVVRRLACNKRLRNALYHWARVAIQKDARYRAKYEALHARGKSWGRALRTIADRLLYVACAMLEAGTLYDANHGAEATKSP

SEQ ID NO: 294559 - protein, 439 aa, unidentified
MNTKVIEEKRHFVHNKIIIGIDPAKRNYQSMVINQLGIPYCKSFTFNNTFKGFNEELWFKLSKILKEIDPQKVVFAVEISINLWQKLCHFLHKKGFTVLMVSPLYTKHERPKMDNTYSKTDPKDALAIANCARQGYFNFYKEYSNSSEAMHRLSITYDKLKKHMTQIKQRIRSQVELIFPELPIAVDIDTDTARELLRRYLSPKEFLQMNIYSETIIIEKVSQRQHGLKTLKRIQEVAANSIGVTVSDDLLFAEKLTMFNWLNQYQLLKEQMKLVLDKLIEIAEESPMFAILTSLKGISGITASRFIAELRDPMLFTNYKQIETFAGMSLKLSQSGKYTGYRRITHIGNHRLRAIIYTMAEETKNHIPEIRIRYLKRQMKQARYKKNVVACASNMLKLIMAMLKDKHTYQYRDKSVEELKQLEEKYQEFKNKKKIKKSA

SEQ ID NO: 294560 - protein, 371 aa, unidentified
MNHVTSIGLDVHARSITAVALDSITGEVRSQKFKHSPAEVASWILQFESPKAVYESGVTGFHLVRTLREFGVDCIVGAVSKMQRPAADKRKKNDRNDAEFLARQLMAHNIVEVFVPDEETEAARNLSRALEDVRGDLVRAKHRLTHLLIRWGYVWDERTPEGRRRGTWTRAHWEWIRGIELPESAAQESLDYYISEVRHIEAQKKAIEKRIAQYAQRPRWQERVEALRCMKGIETMTAFALVAEAGVFSRFDSARSFASWLGLAPSEHSSGERVSRGGITKAGNSHLRKLLVEASWHYTRATKERKRALNDPVVPFAVSNHAAAGVKRLVERRRHFSHGLRKRPVVANVATARELACWVWALGRMSEGTLP

SEQ ID NO: 294561 - protein, 368 aa, unidentified
MKKTAYVGIDYHIAKLTIAVKMQDQEDFYSTIHLENKTKVIANYLKKLSEQFQLKICYEASGSGYHFQRLLKSWNYHCDVIAPSLIPKKAGDRRKNDFRDARELARNYAAGQLTVVHPPTQYEEAVRNVVRCRLDFKENEKRTKQHINSLLISQGQHWQKSKWTLQHRTWILQLSFSEPFVQQVLQEHLAHLEYLETCIARLDHQIEEIAALDTYAPSVKKLRALKGLGTLSAMILIAEITDFRRFASPRALMSFLGLIPAEDSSGPRCRYGSITKAGNRRCRTQLIESVRHYIKQPRMSRQMKADCAQVDPASAGIVQKCMQRLHKRYWALTMKGKTRNVALVAIAREFVGFIWALMTSNDPAAQAA

SEQ ID NO: 294562 - protein, 355 aa, unidentified
MDNTKYIGMDVHTETISVAVLNSTGKLVMESVIETKALTVIQFVQGLRGDLHVTLEEGTWAAWLYDLLRPHVNQVLVCDPRQNAFLKVGNKSDKIDARKLAELLRSNLLRPVYHGEHGVRTLKELSRSYLAISGDLARVMTRLKAVYRSWAIPCAGKQIYAPRYRGEWLGKLSEAGVRRRAEIYYEQFDALRSLRQQVRRELLAESAKHKASKLLCQIPSIGPIRAAQLIAILQTPYRFRGKRQLWAYGGLGIETHSSADHCYVKGQLQPSKRQVSLRGLNRNHNHELKNIFKGAAIIAATKPGPLQEFYAALLAKGMRPEMARLTLARKIAAIILIVWKKGVSFDAQHLKLQTA

SEQ ID NO: 294563 - protein, 350 aa, unidentified
MLIIGCDYHPGFQQIAYVDTKTGELQERRLRHREEAETFYRELASGGVQVRVGMEASGHARWFERLLAELKIELWMGDAAKIRAKRVRKQKTDRQDAQLILRLMLKDDFPQIWVPGWDNRELRQLLWHRHRMVQARTRIMNQLQAVAINEGVRYKKRLWREAGRKQLESLPLAPWASRRRQDLLEVLDRVNPTIAELTQAIEQEAEKSAQAQRLMTHPGVGALTALAFVLIIGEADRFSCGKQIASYLGLVPAEDSSGERRRLGHISKQGNSLLRFLLVEAAQVTVRCDPRWRNQFFHLAMRRGRKIAKVAMARRLAVHLYWMWRRGWDYEQMEKFGSHAGQPEYRHGVQ

SEQ ID NO: 294564 - protein, 439 aa, unidentified
MRIPPSVPMPNEVPIEQEIVAYVGLDWADQQHVICWQAADSAAVQSAVVQQRPEELQAWVAELRQRFPQGLVAIALEQSRGAVIAALMHFDFLRLYPINPKSLARYREAFASSGAKDDPDDAGLLLELLVKHRDRLTPWVPDDPLSRELALRVEHRRQLVNLQTKLIQQLRSHLKVYFPQALDWVGELDSLQACDFLQRWPTLAAVQKARPSQLEKFYHQHHCRRPQLIQQRLEQIRQAQPLTQDPAIVQAYSQMVLALVAQLRVLILTLQQWQQQISQLFAQHPDAALFASFPTAGPVFAPRLQAAFGSRRDRFGSAAEVLQFSGVAPVTKRSGKSRQVQRRWARPKFLHQSFVEFTGLSIPHCCWARALYQQLRARGHRHWAAIRVVAYKWIRILFRCWQDRVPYDEQKYLKSLERRNPTLWAAIQQLPAQPSRKEV

SEQ ID NO: 294565 - protein, 384 aa, unidentified
MKVVCGLDVHKDSVFCCILCANGEKIQHKFGVLTEELVTLRDLMVSEGVEECAMESTSIYWIPIWRVLEGSVKLHLVNPYFIKQLPGKKSDVNDAEWIATCLSKELIASSFVPDDKIQRLRQYDRRIFDLNASISRNLVKLDQCIQRCNIRISNYISTTDSKGYRSIVKLISQGVTDAEVLVKELHGRTINRHGRETLVKALTGVVSETDINIIKQLVEEIELQQRHKDEAQQKMTALCMEWFPQEVENLQTIPGVKERSATSIIAEIGTDMTHFQTPKKLVSWVGLRPRNEESAGKIKARGITHGNRFVRKTMIECSWGAARMKDSFFAEFSYRQCIERRKNKMKVQVAIARKILVAVWYVLSQGTQYIKPTDHYTAAHMTAV

SEQ ID NO: 294566 - protein, 342 aa, unidentified
MEQYVALDVSLKEISVCIVDSNGDVVFEGRTAAEPAILVKLIRSKAPQVKRVGLETGATSPWLFHALASAGLPVVCMDARHAHAALSIRPTKSDRSDARGLADMLRMGWYREVHAKSVTSHERRTILGARHQLVTMRSELDAQIRGILKTFGLILGTGNKDTLIQRAEKLAAGHPVMSGLVAKLAEVRRHVTSQIAAIDRDIRHLVHTEPTLKRLMSVPGVGPITALAFLSAVDDPRRFKHARDVGPYLGLTPTRYQSGETDRQGRISKCGDTFTRTCLYEAAHVLLTRVQRFSPLKAWGMRLAKRIGGRKARIAVARKIAVILHCIWTDGTEFWWTREKAA

SEQ ID NO: 294567 - protein, 319 aa, unidentified
MSTTANVMEVFVGIDVSKKQLDVFRLSDRQSRSFDNDACGVELLLAWLAESPPTQVVLEATGGFERLVVAELANAAIPLAVVNPRQARQFAGALGKLAKTDRIDAEVLAKFAQAVRPQMRPIPDEKQRELAELVNRRRQLVRLHVAESNRLQQAVAPKVIRNIEKALTFFDKQIADIDQALDKHFQESPVWQEKIDLLKSVPGVGPATSRTLVAELPELGECSRRQIASLVGVAPINRDSGAFRGQRTTWGGRARVRSALYMATLTAVKHYPPIQELYQRLLTQGKKAKVALVACMRKLLTILNMVLKTKTPCRLPEPA

SEQ ID NO: 294568 - protein, 355 aa, unidentified
MEGAKYIGMDVHKDSISIAVLNSSGKLVMESIIETKAITILEFVHGLRGSLHLTFEEGTWAAWLYDLLKPHVTKLVVCDPRRNGYLKQGSKSDRIDARKLAELLYSNMLRPVYHGEHGVRSLKELARSYLTITKDQARVMTRVKAVYRSWAIPCAGKQVYGQRHRLEWLGKIQEPGVRRRAEFYYAELDALRSLRLVVRSELLLESKKHNVSTLLSQIPSIGPIRAALLIALLQTPDRFRTKRQLWAYSGLAIETHDSAENQYVNGQLQRSRKQTSICGLNQNHNPDLKNLFKSASAVAAVKTGPFQKFYAALIGKGIKPEMARLTLARKIAAITLIVWKRGVSFDARYLNPQTA

SEQ ID NO: 294569 - protein, 379 aa, unidentified
MNEATRFLGLDVHAETIAVALAEPGRGEVRSLGIIPNELTAVRKLIQKLGKKNLRACYEAGPTGFALYWQLAELGIECEVIAPTLIPKKPGDRIKTDRRDALKLARCFRAGDLTAVWVPDQAHEALRDLVRAREAAKYDQHRARQRLSKFLLRTAKRPPSGTPWTIKYVEWIRALRYEHVAQEATRIDYLAEVDHASERILRLEKAIDDAVKQASPTVQAVIDGLQALRGVGKLSATTMAVEIGSFSRFTTAKQLMAYCGVVPSEQSSGNSRRQGAITKTGNAHVRRVLFESAWACRHRPNLGAKLKERQRTLSATTNEIALKAQHRLHRRYLALTARGKPSPKVLGAVGRELLGFIWAVAVQIEQEHAAAAKSKKLAA

SEQ ID NO: 294570 - protein, 346 aa, unidentified
MKHFAGLDVSLEETAICVIDEAGTMVREARVPSEPEALVAFFQGLGLVMERVGLEACSLSAWLHEGLGAAGLPAVCIETRRAKAAMGAMPNKTDRNDARGLAQIIRTGWYRAVHVKSPTCRSWRALLTARRLVLNKMRDLENGLRAVLREAGLKLGTPTRKEFAARVRELTAADPGLSVLAEPLLTIIAGMTRELAQLTKRVLDIVRDEPVCRRLMGVPGVGPLTALTFRATIDRPERFRHSRDVGAHLGLTPKRYQSGETDVQGGISRCGDELARTALYEAAHSLLVRSRKWSTLRAWGMQVARRRGMARARIAVARKLAAILHRMWADGTEFRWGKEGPMPAAA

SEQ ID NO: 294571 - protein, 414 aa, unidentified
MADETHVWFAGIDWGSQKHQVCVLDAQGTIIGEQEFPHSGKGLAELSDWVLSITGTADAVAVGIEVPHGPVVDALLDRGFAVYSINPKQLDRLRDRFSVAGAKDDRRDAYVSADCLRTDQHLFRRVQVSDPRLTELRAWSRLTEELQEERVRLSNRIHQQLWRYYPQMLELTDDVSATWFLELWTKAPTPANARSLRKSTVERLLKQYRIRRVDANTVIRTLRQTAIKVPDAVVEAAGIHMRSLIARLHVVNSELRHGERKLDELCTAIGETSPAPGQGIEWHDVAILKSLPGIGRINLATLLAEASGPLSRRDYQGLRTLSGVAPVTKRSGKSHIVVMRNAAHVRLRNTVYHWARVATQHDHKSRIRYAALRKRGHSHGRALRGVADRLLALTCILLARQTVFDPHFDQAVAS

SEQ ID NO: 294572 - protein, 360 aa, unidentified
MSFNGTSVGLDVHALSVVAHAVDEESGRVERARLCPDRGEIIDWLHRLRAPVRVAYEAGPTGFGLARALADAQIDCVVAAPSKLIRPSGDRVKTDARDAAHLTRLLRLGEITAVTVPEAEVEAVRDLVRAREDARADLMRVRHRLSKLLLRQGRVYSGGQAWNGVHEIWLRRQRFDDAHTASAFDHHFDAVLSTTAARDRLDEQIVTIAASPRWADQVDRLGCLRGISALTGLALTVEIGDWTRFSGASIAAYVGLVPCEYSSGASRVQGSITKAGNAHVRRLLIEAAWHHRAPYRNPGPTMRARWAKVAPAFKDRGHAGNRRLHQQWCRFLDRKKNPLVANVAIARELAGWCWSLATLN

SEQ ID NO: 294573 - protein, 424 aa, unidentified
MKNCNKQNEKIELVDEKTLVIGVDIGSYDEYARAFTCRKQELSKKPLHFHNTAEGFKTFKDWAVNIMKANGLEKIIVGMEPTSIYWEALATYCKDNGMILVHVNPAAVHKSKELDDNDPSKNDRKDPKVIAGLVADGRYQFPYMPEEEYAELRELSNLRIRTQESLTQCKNRLSRWYSRYFPEFKGAYKNVVSKTAMMILDLYPLPEDIVTLGVEGILQIWRSKKVRGAGERKARKLYEAARNSIGRKEAASIARIEFKSIKEDLDRYQERLDEIEKKADEILPKIKNVDKLFEIKGVGKATVLTFLSEIGEISRFDNPKEIQKLAGYAIVTNESCKHQGEKRISYRGRKRLRWVLYQTALSVIAKNAEFRQIHAYYTTRANNPLKGIQSVVAVACKMIRIFYKILTDGVSYDGTKMTQDIVHA

SEQ ID NO: 294574 - protein, 464 aa, unidentified
MKNTVKGKYKVRCTVSSSSTKSVSIPVVNEHAAGIDIGSRSHFVAVGQALDDVREFGVYDSDLRECATWLSSHGIKTVAMESTGSYWQNLYDVLIESGFDVLLVNGSKTKNIGGKTDVKDCRWIQFLHSVGLLTGSFLPDIDTEELRTLFRHRDFLLKQGAKYINKMQKSLRMMNFRLDIVLSDITGLSGQTVIKAIISGETDPQILASKADWRVKKSKDEIAKALSYNGRKDYMYELSDSFDLYQSYVQKIDACDREIEKLMRSQIIKLGKPQTKPPLLEKKKKQNKNSPKIPLEELSWQRNDEVNLMSIKGVSHTTVLTVNSEVGLSISKFSSAKKWVSWLRLSPDNRISGGKILSSHVRKGSNRVAAVLRHAAESVGKQKDAPLYPFFQRILQKKGRCAAIIATARKLAVIIWNMLYYKDIYKPYDTTKIQSQMREKQIKKINKLMQVFDVKASEIKFAVA

SEQ ID NO: 294575 - protein, 393 aa, unidentified
MACSRLASRRYPARSDSKEVWNQKPEVGMSFARDDGESPTETEVRALMKVLIGVDPHKASLAVAAVDEATGELLERASFPQDRAGLRSLERWAKRFSECRWAVENAGGLGRYLAGRLAGSGESVVDVPPKLSARVRVLSTGNARKNDGLDALATALAASRNGRLAAVDPEAASEVLSLLSERREDLVAERTRALNRLHALLRDLLPGGVTGTLSADRAARLLRGIRPRSSSSRIRRRLASEVLRDIRTLDRKIADLNGRIEAEVEASGTTLPEIFGVGPILAAKIIGTVGSVERFPTKAHFASYAGTAPVEASSGEVVRHRLSLAGNRHLNYALHMVAVCQARSDARGGTYYRKKIAEGKSRKEALRCLKRRISDAVFASLVADSQVLSRSAA

SEQ ID NO: 294576 - protein, 281 aa, unidentified
MNKIVHYLGLDVHKDSIAVSIAPQNSSEVRRYGIIGGTLDAMDKLVKKLSSQNVELRVVYEAGPCGFVLCRHLRSKGIQCDVVSPSLIPKKASDRVKTDRRDADQLARLYRAGELTAIHVPDQEDEAIRDLIRARSAAVRDKRQARNRLKGFLLRLGFRYTGKSSWNDAHKRYLSGLLMPRPAQQIAFQEYIHATDDAADRVGRLTQAVEAALSGWKWEPVVRALMSLRGMQVLSGMTVVAEVGDLSRFENPKSLMHFLGLTPSEHTSGDKRVLGGITKMR

SEQ ID NO: 294577 - protein, 371 aa, unidentified
MKSILSVGMDVHKNSFSLCAYDGYTGEIVSESTFASDVKLVIKFIETLKSRHENDVEIKCGYEAGCLGYSLYKLLTARGVDCVILAPTTMQVSAKNKMVKNDRMDALNIAKNLASGSYKTVYIPDEEDVEIKEYIRMIHDFKKELQRVKQEICAFVLRHGYQYDGKSKWTIRYMNWIRELEMSEIQRETLNEYIAEMENLNDKIDRFMNRINEIYQSERYHEKVSKLRCFKGIETFAAMTIQVETADFERFPNAKAYASYTGLTTGEHSSGDKNNRIGITKQGNTVIRKTLVECAQALVKGNVYAKKSQRLKSRQKGMDVNIIVYADKATERLKKKYQKLIERNVPRNKAIVAIARELACFIWGMETGNIH

SEQ ID NO: 294578 - protein, 350 aa, unidentified
MWQQLTGRLEHIIGVDTHKGTHTLAVVDANGGEVAIKTIRTSAAGYGQMLAFGRDNAPGRRIWAIEGSGSFGAGLTTHLLEQAERVVEVDRPMRRPHRSGAKSDELDAVRAARQAWGQRHLYEPRRRGSREALRVLARTRQGAVAAKTSAICHLKALIITAPEDLRRELRPLPTGALVNRCAAMRDSSRRDTERAPTVSALRSTARRIQALTAEAKELEQQLETIVRTEAPALLEQPGVGVLSGAELLIAWSHPGRLRSEAAFASLAGVAPIPASSGQITRHRLNRGGDRQLNRALHVIVLSRLQHHPETKAYAERRIAEGKSYREIRRCLKRFVARRLFKLLESTSIAA

SEQ ID NO: 294579 - protein, 397 aa, unidentified
MIAVGIDISKAKSTVAVIDSDGTVLTSPFTMAHTQPEMEAFVTYLKGLGEPTTILMEYTGHYHYPVLKKLQDEGFPVCIVNPYQMKKYGDVEIHKAKTDKKDALRIAAYALEKSYKLVPYSSMEQKYEDLKFLSRQYSQRITYVAKLKVQLIALLDQTMPGITRILPLNSRNPEKCALLLFIKRFKSFDEIQRIGKARFLASYDVLAKKASERSASSKGLSIYELAVDSITTRGEDPYIWLSQNQCVDLLSTTQNAADEIISQMRNIAETIPEYKVLRAMRGVGDRLGPIILAEIGDIRRFHSGKALNSYAGNDAPPYQSGQFESRNRHISKRGSSALRKACYEVMQALKLTKPQDDPVYLFMLKKEQEGKPFNVAKMAGVNKFLRIYYARAMELYK

SEQ ID NO: 294580 - protein, 489 aa, unidentified
MRSAKVTKTALARRLRKSSTFAERKLWKYLRSRSLSGFKFVRQEPIGPYVVDFVCREKRLIVEVDGGQHAIDKRDVIRDRWLVDHRYRVLRFWNNEVLGNIEGVWETIFAAASAAAPPCNFPTPLSGNISTAVAGDRPTPPRDTKPVDEHGSSPAVPSNPNSRLGRIASPLAQGWDQMDACIIGIDVGKDRLDVAVRPSGESFVTARTGAGIEDLAERLKKLVPRIVAIEATGGFETVVAAGLAAADLPVIVVNPAQVRAFAQALGKRAKTDPIDAAVIAHFAEATKAVPRPLPDEMTRLLADLIARRRQIVEMMAAEGQRARRVTDQRLKKSIARLRKALEKELAELDGEIDDHVRGSPVWVEKEDLLASVPGVGPVVARTLIAELPELGSLDRRKVAALVGLAPWTRQSGKWRGKSFIGGGRKTVRNVLFMAAMVAARHNPILKSFRDKLVAAGKPKRVALIAVARKLLTILNAIVRDKRQWQPKTA

SEQ ID NO: 294581 - protein, 352 aa, unidentified
MDATTVAVDLAKSVFQVAVADGTGRIASSHRLSRTQFERFFANRTADQVVMEACGSAHYWARSLQAQGFAVRLLPPTHVRRYCLRNKTDAADCAALLEANRNPKIHDVRVKSVEQQALQALHRTRSQWMATRTQRINALRGFCREFGLPIAVGARTGLRAISQLVADPESAIPLLLRPAMTLVLQEVLDLERRIAQLERELTEVARHSNACQLLLSIPGVGLLTATALVAAIGTDVSRFANGRQLAAWIGLTPKEHSSGQTRRLGSITRAGDRYLRTLLTHGARSVLQAATRSQNAGRRCEGLRAWALGVLQRSNANKATCALANKLARICFATLRHQQRFDEQRATRARAD

SEQ ID NO: 294582 - protein, 310 aa, unidentified
MTTACYVGLDVAKRHLDLATSPATTARRFAHDEAGLSALVAHVRTLGPALVALEATGGYEADVAAAVALAGVPVAVVNPRQVRDFAKAIGRLAKTDALDADVLARFAAHVRPEPRPLPDAAQQDLTALVARRRQLVEMLTAERHRLALARDRVKRDVQTHIHFLEQRLKETNTDLRACVQASPVWRAQDDLLRSVPGIGPTTSATLLAELPELGRLSRQQIAALVGVAPLNRDSGTRRGPRVIWGGRAGVRAPLYMATLVATRRNPHIRGFYQRLRAAGKPTKVALVAAMRKLLTILNAIVKAQRPWQPA

SEQ ID NO: 294583 - protein, 422 aa, unidentified
MAGLSTGLCRVNGSMRVALRQRIWIGIDVGKVGHHVCVVDENGKVCWSGKLANDQRAIEAVIDRAHKTGIEVQWAVDLTSPLAALLITVLLSAGELVVYVPGRMVATMTGIFRGEGKTDAKDARVIADTARMRADLQPVTAPDELVAELTQLSSYRTDLMNDWVRGVNQLRSMLASIFPALEAAFDYSARSPLILVARFCTPAEIRDAKIDGVTTYLAENGAWRKGIDAMAAAAVVAAGTQDIAVPGEATTAALIKRLASKLLDLDREIKDLDKQITARFREHPQAAIIESLPGMGPHLGTEFLVNTGGDAMAEFTTPGRLASYAGLVPVPRDSGRISGNLHRPKRYNRRLRRVFYMAALSSIKAEGPSRTFYQRKRTERLVHAQALLALARRLVDVLWALLRDNRPFEAKPPSVNATPAAA

SEQ ID NO: 294584 - protein, 345 aa, unidentified
MNEAITYDNYIAIDWAQETMAIARMTNKQDKIKVFEGPSDVRGIREFLKGLRGTKILTIEESTASQWLYTEFREHVDRLLVCDPYRNRLLSEGAKNDKIDATKLVRLLRSDMLKEVFHSGDEFIYLRKIVSGYDDLIRSGVQAKNQRSALLRAIGKSHKKDSFPPELLADKFVLDRLERRIEDYKTQKAEYEREFQRLCKKHKSIKNLKTIPGIGDIHAVQIAATVVDAKRFENQGRFLSYCGLVKLERMSGGKSYGKKSPRYNRAFKHVFKMASQSVIQAGVTNPMHQFYEYLINEKKKSEYIARHTIARKIAVLSYGILKTNKAFDLKKFGGTKKTEKDLVRS

SEQ ID NO: 294585 - protein, 435 aa, unidentified
MKEVTDEPLYRDRVCGIDIGKAGLVATIRVPSGKDPARRAAETRSFGTTRRQVLALADWLRSWQVPAVVMEATGDYWKGPFYRLEAEGFECVLADARQVKNLPGRPKRDPADSRWLAACLERGAVRPCFVATPEFRIIRLHTRYRRDLTGERTREKQRAEKVLESAAIKLSSVLTDLHGVTGRDIMDRLIAGERSPKVLAQLARAAARRKISQLEEAVEGAEFFTAGHAALLAVMLARIDRLSADIDGLSQVIEQLLAPYEDQLAQAESMPGWGRHAAQDVLAETGPDMSRFPTGAHLASWAGRAPLDHQSGTRAGRSTAKKGNRYLGAVTGETAVAAGRTQTREGARHRRLARRRGAAKACVATGNTQLRVYHKLLSSPGMRYADLGPDYYERRRDVRRQIAHHVGKLGALGFEVTLCRIPEPDPDRTGQIKPA

SEQ ID NO: 294586 - protein, 428 aa, unidentified
MDEVNRNRLEEFRQLRKEVRHSEEYLIVGIDIAKDQHHAFFGTATGKTLWRRLVFSNDHEGFRKLLDHAEALRVRHGLKKVAYGMEPTANYHKPLGEYLIILGRTVVLVSGVTVKRNRESLDGRWDKHDAKDSANVADLISQGKCLYYEHPSAELRGLRGLLSLKRRLKKQEHSYKVRIRNHLIAQYFPEMDRDYERLGVEGLSIVRWCFPPSQITELDVDPFIQRVTSRRIRMEKRRRLEGVWEKAGESIGCDGVPGVEHEARVMVEGLRQIRETIKETEDKILELCKQFPEYQYVLTIPGFGPDVSAKVLGAIGEADRFQNGKQVLKLGGLDLSADRSGKNSDKAIPEISKRGKADLRYALYQAALVASTKNQDFMLYYARKLEGRQKEKGIQTKMWVKLSAKMLLIAWTLMKKKEAFDPTYLNAE

SEQ ID NO: 294587 - protein, 355 aa, unidentified
MSSEKYIGLDVHQATISVAVMDSEGKVVMESILETKASTILEFFAGLRGSLFVTFEEGTWAAWLYDLLKPHVTEVLVCNPRKIPLLKQGNKSDKIDARKLAERLRLHDLKPVYHGQTGLRMLRELARSYLTVVKDLSRVMNRLKALYRSWAIPCAGRDVYYTRHRSQWLGKIPEAGTRRRAEQLYQQLDLLQHMRQQARRELLAESRKHTIIAKLKQIPALGPIRTALAVALIQTPHRFRSKRQLWTYSGLGLETRDSGEYHYVRGQVRRRKKQATIRGLNKDYNHDLKGLFKGAATRASVQPGPFQEFYQRSLAKGIKPTMVRLTLARKIAAITLTLWKKGENFDIHKLNSQAT

SEQ ID NO: 294588 - protein, 343 aa, unidentified
MQAVTTIGLDIAKSVFQVHGIDAEGKVIIRRKLKRRYVAAFFQKLPPCLVGIEACASSHHWSRELQALGHTVRLMPPAYVKPYVKRHKNDAADAEAICEAVTRANMRFVETKSPEQQSCLMLHRTRHLFIRQQTAVINAIRAHLAEFGIVAPVGRNGVEALLNVVADTSDKRIPEIARACLVALGVQLRMLKTQVLEFDRLIMAWHRSNETSKRLDEIPGVGPALATALVASVGDPRAFRSGRDFSAWVGLVPKQNSSGGKEKLGSISKRGDRYLRSLFTTGALAVIRYAKLHGAKHRPWLTALLARRPTKVAAIALANKIARMAWAMMAKGERYKEPVALAR

SEQ ID NO: 294589 - protein, 368 aa, unidentified
MNTAAHSEKRLYLAIECGSKEWKLAFGTGSGERETSIVAGDLAGLDRQIARGKERLGLPADAKVRSCYEAGRDGFWIHRMLTERGVENVVVDPASIEVKRRGKRVKTDRLDAKKLRAMLIRYWVYGETKSWSVVKVPTENQEDARRAHRERGRLSKERTAHRARIRSLLALHGPVPRRLVSEGAQARDWKGRPLPPALIEEIDRELERLARVEEQLGHLEEERRERYRTGTGRAAQQARQLSRAKGVGEMTATLFAHEFFWRDFKNRREVGAAAGLVGCPYDSGQSRREQGISKAGNRRIRTAMIELAWRWLTFQPDSELSRWYERRFAHGSGRLRRIGIVALARKLLVALWKFLEYDQIPAGAIVRP

SEQ ID NO: 294590 - protein, 430 aa, unidentified
MTKPQLTPTQGILVAIDIGKTRNEVLIEIPGQARRRRLTVLNTRADYDRLIDLLSGLGQPVTCAFEATGNYHRPLAWRLLQAGFTVRLISSLALARTREALHNGWDKNDPKDAQVALHMLRIGASQHYHDPLAAGLNDIQEVSKTHEAISKAKTEVLHRILTHHLPLYFPEIGRFRHNSRSDWFFAFLDRFPTPGSITALSKEAFIAAAWGVVGSKVAKERLLGDIYETARASIGLPIPIDAPAVRLFRLVIAEARSLIEQRNALEAMAIELLHESPDYKLLCRIPGVGPITALTILAEAGDLRRFGHHRQFLKFCGLDLATHQSGAFRGQTKLSKYGNARLRRALWLAGQVAIRQKENSFRDKFERTIARDRHNADLRRKALTAITAKMARVVHAIIKSGADYRPFVEGPVPGGRTSLSMGREGATATL

SEQ ID NO: 294591 - protein, 378 aa, unidentified
MPHKLNSGIAVIGIDIGKNSFHVVGHDKRGAIVLRQKWSRGQVETRLANLRPCLIGMEACVGAHHLRRKLQMLGHDARLMPAKYVRPYSKGQKNDFRDAEAIAEAVQRPTMKFVATKTAEQLDLQAMHRVRERLVSQRTGIINQIRAFLLERGVAVRQGLRFLRTELPRILAAPCDALSPRMLRVIEDLAGDWRRLDERIEGLSSEIEVLARRDVGCERLMTVPGIGPIISSAMVAAVGTGDAFTKGRDFAAWLGLVPKQISTGDRTILGKISKRGNRYLRVLFVQAAWVVLIKPKSWDRHGLKPWLETAKKRLHHNVLAIALANKLARIAWSVLAHGRAGEQAASRVISHRHVLPAEVCERTKTRWRIGLPGACEHW

SEQ ID NO: 294592 - protein, 391 aa, unidentified
MNDRTEIEGVASRIFAAIELSQSAWIVALHVPCQDKISLHRVASGDVDRLLVLFERARQTARAASGAEASAPDPQICCCYEAGFDGFWLHRWLVARGISNQVLDSASIQVSRRKRHVKTDRIDAEGLVRVLMAWHRGESKACSVVHVPTPEEEDAKRLHRARENLLRERVRHVNRIKGLLTLHGVRHIEPMRQGWITALGELETRDGRSFPPRLLAEIRREAKLLELVKKLLVEVTTEIEALVRSSTPAKGRRKAPPHPVASRLIQLRGIGPIFASVLATEVFYRRFTNRRAVASYVGLTPTPYSSGATHRDQGISKAGNSRGRHHAVELAWLWLRNQPASRLTAWFLERVSTGKSRVRRIAIVALARKLIVALWRYLETGLVPEGAVLKA

SEQ ID NO: 294593 - protein, 453 aa, unidentified
MGKSNKKAIKIGFHEGLPQIRANAGGMDIGASEVWVDVGGKDPEPVRRFETFTADLQEMGDWLKRCGIETVAMESTGVYWIPICQVLESKGIEVVLVNARYAKNVSGRKTDMLDCQWLRILHSYGLLEASFRPARDIGVLRAYMRHRQMLIEYAAAHVQHMQKAMTQMNLQLQHVLSDITGATGMRIMRAIVDGERDRNRLAAMRDVRTKANETTIAKALEGDYRAEHLFALKQSLELFDSYQKQIEACHQQIADHLRSLESKADPAAGLKPARTTKKKRRNQPDFNIREEAFRISGVDLTEIDSIHESAALGLLAEIGVDLSPWKTEKHFASWLTLCPNNKISGGKVLHRSTRKSASRARDILRLCAQSLLVSRSALGAYCRRMCARLGKPKGIIAAAHKLALLVYRMLKFGRRYVDIGQEQYEEKYKERALKQLARKAQHFGFQLVPSSQQ

SEQ ID NO: 294594 - protein, 404 aa, unidentified
MWYAGIDWANDHHDALVIDEKGSQVGSLRVDHTPQGMSRLNTFLEQIVGAESKEQMACIIETTHGLLIAHLLETGWPVYPVNPRTVDRRRAASGAKTDTIDAYLLAKTGRADLADLHRLTPDSEKIAELKLLTRDQDALIQMQTRLVNQLTACLKAYYPVALELFAKLQQKSTLLFLQTYPTPQAAMAASAEQIQEVLRRAKHSNPTIVAAEIVERVHQPHLQADAVTTRTKSRLMGALVSQLLPLLAQIAQYNKEIHTLFLTHEDHEIFASLPRAGKRLAPRLLAEIGDDRTRYQDASSLQALGGTSPVLFQSGMYSKAHRRLGCIKPLRNALHQFAWQTTQSEPWAMQYYQRKRAEGKSHTVAVRALANVWVRIIFAMWLHHQCYETATFEHAQQQHARPAA

SEQ ID NO: 294595 - protein, 391 aa, unidentified
MFLLGIDIAKLNHVASCIDSSTNEIVFSNFKFKNDFKGFSTLLDKIKTFDTKNLIIGLESTSHYGENLINFLFKQHFKVALINPLQTSHLRKANIRDAKNDNLDSLNIAKSLIFAKLNFISEKNINCFSLKKLTRFRSSLIKQRSKAKIQLTSLLDLLFPELQYLFKSKIHSKAIYSLLKKYPSAEEIAALKDDEISNLLYASSKGHFKKEKSIELKSLAKTTVGIKDTSISLHVIQLIELIELYDKQIKDIVTKIADTVDKLDTKLLSVPGISIIACAIILGETNNFNNFSDSTKLLAFAGLDPKIRQSGNFNASSCRMSKKGSPYLRYALIFTAWNIVRHSEKFNKYYCLKRSQGKSHYNSLGHVAHKLVRVIFTLIKKNIVYQEENLE

SEQ ID NO: 294596 - protein, 316 aa, unidentified
MATRSSVFVGVDISKKSLEVATHNGNSLQNFSNDTMGIPKLVDLLLEIQPVLVVVEATGGYEQALVHAFHQASIPVAVVFPKLIKNFARARGLIAKTDKLDARNIALFGFSINPRPTPPVSSPRDRLAALVDRRRQIVNMIKVEKNRLKMVAPDMQPSFFDHLEWLKEEEDHLSSEIRLLIENQPEMKAKSEIVQSATGIGMVTASTLVAELSELGALDRKKISALVGVAPLNNDSGNKHGKRRIHGGRRNVRSALFMATLVAVKYNPVIKAFYDRLLARNKEKKVALIACMRKMITILNAMVRDNQPFRYQASMA

SEQ ID NO: 294597 - protein, 333 aa, unidentified
MEKITTVGIDLAKSVFSLHGVGGAGQAVLRTVRRDQLVKAVAGIAPCLIGMEACSGAHEWGRRFQELGHTVRLMAPKFVVPYRKSGKNDGNDAEAICEAVSRPSMRFVPVKSAEQQALLAMHRVRQGFVVERTATINRLRGLMSEFGVVLPLRSIMVRRQGAAAAENLPELARRAIGDLLDQLRVLDERIHGYDREIEAQAKLCEPAQRLMKIRGIGPTTALAIVATVGNAREFKNGRQFAAWIGLVPGQYSTGGKTRLGHISKRGDAYLRNLLVQGARSVLHTAATHRDPVSRWALELQPRRGYYRTLVAIANKNARIIWALLAKNESLRTL

SEQ ID NO: 294598 - protein, 411 aa, unidentified
MRRVIGMDIHRTFAEVVFWEDGRLRWHGRIDMTRSGLEGFGRSLTKNDEVVLEATGNAMAVVRVLSPYVARVIMANPLQVKAIAHAHVKTDKIDAGVLASLHAAGFLPEVWLPDGETERRRRLVARRNQVVRHRTRVKNETHGILAAHLVPPCPHAELFNGPGRAWLARQVLPDDERAAIVRHLRELDRLGEDLAVLDHEIAEATVDDPAVRRLLTIAGINVTVAVGLVAAIGDIRRFSGPQKLVSYFGLNPRVRQSGLGFAQHGRISKIGRSHARAMLVEAAWAAAKAPGPLHAFFVRIRARRGHQIAAVATARKMAVLVWHLLAKDADYLWARPALVAHKLRALELQAGRPMKKGNRRGPAYAYNVKTLRNQEMAIAEQAEHAYEHFVAQWRPKPTTRRAGASPVTGSS

SEQ ID NO: 294599 - protein, 347 aa, unidentified
MPKRVNLDSEPWVCIVDGAGKIIRETKVDSEPEALVGYFSSLEIKVVRIGLEAGPLSQWLHAALTQAGFEVVLLETRHVKAALSAMTVKTDRRDARGIAQLLRMGWYRPVHCKTLPSQEVRAIITARKTLLGKLIDIELSMRGILRGFGLKVGRVTRTSFEIRVRELMAGQVTLTTIMEGLLNARATLVAEVAKLHQELLTIARADEVCRRLMTVPGVGALTALTFKTAIDDPTRIAKSRDVGPLFGLTPGRYQSGETDIIGKITKVGDVMVRTALFEAATVMLTRTTKTSRLKAWALDLVKRRGTKRAIVALARKLGVILHRIWVDGSTFRCARESAAMPALITAK

SEQ ID NO: 294600 - protein, 342 aa, unidentified
MKDMMIGVDLAKSVFQIHGALWTGEVQFRKKLTRKQFASFMAQQEPCLVLFEACGSAHHWAREMESFGHEVKLIAPQYVRPFVKRQKNDAADAEAIVIAGRQPEMRFVAPKTVEQQSRAAVFRGRERLVHQRTADVNALRALLYEHGHVFPEGIRQLDRLTALVEDETSDLPALIREECQDLLTQIAEKTVRIAERTTKLKTLASQSDRARRLQTMPGVGPLTAVAVEAFGPDMAQFKTGRDFAAWLRLVPRQHSSGGKERLGRMTKAGQVDIRRLLIIGAMSRLGWLGQRTIPEGSWLARMLARKPKMLVAIALANKMARQIWAMLTKEEDYRDPALAGAA

SEQ ID NO: 294601 - protein, 461 aa, unidentified
MTTGHSAAGTLIQLTTDAMKALPILDPRAAAIDVGSEKLHVSIAGDMPKVFGTFTGDLESLCAWFKEQGVHSVAMEATGVYWLYLYEVLEAAGLEVVVVNGRHVQNVPGRKTDMADCQWLATLHAHGLLRGGFVPPADIRQLQDYQRLRGDHLIGAASQVQKMQQALERMNIKFHDVISDLTGVSGLKVVRAILRGERRPGELLALCDLQIQKKKGGAVKESLRGCWKKEQLFALRQALELWETYQQKIADCDREIEAQLHQLAGSLPPVAGSGGGEVKLAPAKEPGKNAPVIERFQELLARVCGGRDATQIPGLSTYLVLQLISEVGTDMSRWPTEKHFCSWLGLAGGRKQSGKRKGRVKAHRNRAGRMFCAAARALANSVDKALGGFYRRLRGRLGGLAANVALARKLAQLFYRLLRYGLDYVEKGLKSYEAKVLQTETRLLCKLAKKQGFTLVPTMPN

SEQ ID NO: 294602 - protein, 403 aa, unidentified
MYSSFVGIDIGKWNHQAAFLEVSGKETARSLAFQNTSEGFQSLLDSLAPFDKGQTVIGLEATGHYWLALFSFLVDNGWTVKVINPMQSDALRNMNIRKAKTDRKDCVVIADVLRFGRYTETVLPDEDLLQLRELSRCRVAHVELLGDLKRRVLGILDRVFPEFASCFSTVFGAAPTELLQECTDPEELADYDVDKLIKLLEKESRGRHSREKAEELKAKASRSVGTRFGRDALKFELKMLLEQLDFIKGQVKELDKFLKKLMKNHELIYTIPGISVTLGSAILGEIGDVKRFGTPQQLQAFAGMDPSVTQSGNFQGTQGKMSKRGSPYLRRAVYLAANAARRFDPVFKEFYDRMIARGKHPKQALAAVGTKLLRVIHAVMTSQKPYNPQKLLPPAARISQLNP

SEQ ID NO: 294603 - protein, 413 aa, unidentified
MLYLGIDQHRKQLTVNVRNEAGEAVLRRQVSTEWDRVRAFFDELRRQAESEGGFVSIVELCGFNDWLLKMLTEYGCRETVLIRPEKRSKRKTDRRDAHQLSGLLWVNRHRLLAGTKVEGVRRIQPPSPRDAEDRQITEFRKRMGQLRTRTINKIKALLRKHNLEEEQPAKGLDTKRTRKWLAVLPLGAIDRMEMDLLLTQWKVWDEQIESLEKEIGRRQAESETARVVATIPGCAAYGSLALAARIGPIERFPRPASLANYWGLTPSCRNSGEATDRLGSITKQGSPTARFILGQLVMHVLRRDAWMRAWYGRIKRRRGSKIARVAVMRRLATVIWHMLKNQEAYMAGGPPRRRFEASDFRRDDKVSKGRREGPPAGNSRRRPAAPLAHLDPAIPCRVASPQSPTPLHRAETL

SEQ ID NO: 294604 - protein, 385 aa, unidentified
MTKLDRTDTPATAEYATVYVAFELSKAKWKLGVIIPGSQKMSRYTIAGGDREALAARLAAARAKAERSGKPVRIVSCYEAGLDGHWLHRWLTEHGVVNHEIDPASIAVSRRARRAKTDRIDLEQMMGALLAYLRGEPRALSVVHVPSEAEEDRKRRSRERERLIKERTAHTNRIKGLLHGQGVRDALPLKAGFIAGLDELRTGNGRALERELKAEIVREHARLVLVNEQLAEIDANSKAELRAAAPGSAAAKVMQLMDLKGLGPVGAQGLFNEAFYRSFANRRQVGSYFGLVGTPYDSGESRREQGISKSGNARARNLAIELAWLWIRHQPDSELTRWFRERVRDLKGRIRRITIVAVARKLMVALWRYLTTGVVPNGAVLQQSF

SEQ ID NO: 294605 - protein, 386 aa, unidentified
MPQLNDLSRSLITLEQDATLIAVIEMGQSSWLVAGIVPGVERQPLKKLAVDESALLKLLNRWREEAEQAGHRIKRIAVAFEAGRDGFWLARWLRTRGIETHVIHASSVAVSREHRRAKTDRLDTELLKRAFLGWLRGERDHCKMVAIPTTKDEDAKRPNRERESLVGEQSRIVNRMKATLTRLGIRGFNPKLKKAAERLDDLRTPEDAPIPPNTLAELRRDMVRRRLVSDQIRQIEGARLERLEQAPCDGPHAMVRLLARVIGVGIETADMLVQEVLSRNMRDRRAVARYAGLTGSPDESGQKRREKGLARSGNARVRRGMIQLAWRFLMFQKDSALAQWFRARTENARGTRKTMIVALARKLLIALWRLVRDGVVPDGVILRPAQ

SEQ ID NO: 294606 - protein, 395 aa, unidentified
MGIDLHKETHTAVMLDCWNRKLGEITFDNKPSEFTKLTRKVSRFVTEEKTAVYGLENAYGYGRTLAVWLIEKGNLVKDVNTSLSYAQRKSVPMYQKSDSYDAEAVALVLINMLDRLPDAIPDDKYWTLSQLVNRRDNICTHQSRLKNQLHEQLCAAYPSYKQFFNDISRATALYFFNKYPSPEHLQGKLAEELADELRPISHNNCSIKRAKKILDLIQSDGETKREHQETRDSITRSLVNDLEHYRVQLEEVEKAIEMMLPQFRCTLMTMPGIDVITAANMLSEIGDINRFPNANKLAKFAGIAPVNFSSAGKGKDMCPKQGNRRLQAIFYFMAIQMIQISTNGVPRNKIFREYYLKKVESGKNKQQALICIARRLVNIVYGMLKNHTEYREPEQ

SEQ ID NO: 294607 - protein, 401 aa, unidentified
MSWVIYHAHHDVLVIDEKGRQVGSLRIAHTPTGMQQLQTFLEHILGQAPKEEMACIIETSHGLLITSLLEAGWRVYPVHPKTVDRRRAASGAKTDKIDAYLLAKHGRAELADLRQLKPDSPLVAELKGLTRDQESLIQMQTRLVNQLTACLKAYFPAALDLFSKVQQRCTLLFLQAYPTLQAARSAEVSQVETLLKQCRYPGPKKAAAKIVEQVAQPSLAADAVTTRTKSRLMLALVRQLLPVIEEIAAYDSDIERLFLTHEDNEVFSSLPRAGQRLAPRLLAEIGDDRDRYQDASSLAALSGSSPVIFQSGTYAKAHRRYACSRPLRNAMPQFAWQTTLSEPWAADYYQRKRTEGKSHTKAIRALSCVWVRIIFACWKKHECYDAATFQAAQLAHAPRAA

SEQ ID NO: 294608 - protein, 389 aa, unidentified
MPIVADRPEAQTAIQTNLAAIFASLELSQSIWLITSLSPGGGEKMSKHSVPAGDVAALLARFSELQQKALKRTRKSFPIIVIQEAGLDGFWIHRVLQSEGIESYVVDPASIATSRRRRRAKTDRIDGEALLRALLAFKRGEPRVCAMVKAPTPEEEDRRRHCRERKVLIAERVRHVNRVKGLLFSQGVSGYEPLRRDRRQRLDELTTGDGRPLPTHLKTQISRELDRLELLLGQIKAAEAERDALLATQQAATPAPTGRMLLDLKGIGPEFAANLWLEGLFRHFDNRRQLASYAGLAPTPWQSGSVDREQGVSKAGNPRLRTTLIQLAWLWLRHQPQSALALWFKERVSRNGGRMKKTSIVALARKLLVALWKYVTAGVVIEGAVMKAV

SEQ ID NO: 294609 - protein, 348 aa, unidentified
MIIGVDYHPSFQQIAFMDQQTGECGERELNHSDGEAERFYRELKQRGVGVRVGMEATGHARWFERLLAELGFELWIGDPAEIKAKRVRKKKTDREDARLMLKLLLENRFPRIWVPSPENRDLRQLLWHRHRLVQMRTRIMNQLQAVAMNEGYRWKKKLFSEKGRGLLEKLPLAPWASRRRKELLELLDQLDPKIAELTAAVEQEAKKRPEVLLLMSHPGVGPITGLVYVLVIGTPDRFPCGKQLGSYTGLIPCEDSSGGRQRLGHISKQGNKLLRYLLGEASQAAARCNPDWRRRYVHLMMRREKRIAKVAMARKLAVRLYWMWRNNWQYSQLVEYGRTRESSGSSMA

SEQ ID NO: 294610 - protein, 360 aa, unidentified
MTTMTDRPRPRRLVVGVDTHKHVHVAAALDQLGARLGTGVFTADRAGYAELIGWAASFGAGEVVFAIEGTGSYGAGLTSAVRRTGLGTVEVMRTDRRDRRLRGKSDTIDAENAARSVLAGTATAVPKDRDGVVEMIRQVKVAKDVAVKARTASMISLKQVLVNAPPELREELEPLPKMTLIRRCAGLRPGEVVTVTAAAKHTLRAIARRWLDLDTEIKAHEKLLTRLTTDLTPQLVDAFGIGPDTAAEMLIVAGDNAERVRSESAWAKLCGVAPIPASSGMTSRHRLNRGGHRQANAALYRVVIVRMQHHAPTKAYVTRRTAEGKTKAEIIRCLKRHLAREIWALMRPLRTPPPTLATAS

SEQ ID NO: 294611 - protein, 362 aa, unidentified
MPMLAELIDAVVGVDTHRDTHEVEIALPTGTAIGTRKISNDNSGFAELLAWIVDHAPGPRVVVSIEGTRSFGVGLARAVAAAGLTVIECEQPNRKARRGKGKSDPIDAHLAVLAALRLDADRLPIPRADGDREALRILLGTRQELTVVNTAQTNRLRALLLGGGDSERDLARATLTDPVLLAMVRRCEPPQASREQAVRHGEIRRLAHAVRTGRHALAANRAQLQTIVDQVAPGLTQRRGIGAVTAAQAIVSFSHPGRCRSDAAFAALSGTNPLQASSGKTVRHRLNRGGDRALNSAIHTIAVTRMRCCPTTKDYIARRTAEGKSSREIRRCLKRYIARELYRALNTSTTLTAQISAPPAAA

SEQ ID NO: 294612 - protein, 340 aa, unidentified
MGEQYVGIDLHRRRSVIARMTPEGEVLETVRIDNDPVALSLELAKTGPDPEVVLEATYGWYWAADLLQACGATVHLAHPLGVKMFGYQRVKTDARDAANLGDLLRMGRLPEAWLAPPAVRELRELVRYRAKLVALRSGLKAQVHAVLAKQGVRVPMSDLFGVAGTRLLEELRLPRAYGLRVASLRELLGALDQQIAMLGREIGSALAGDVGYLAIQAIPGVGPVLAAIFVAEIGEVGRFAGAPQLCSWAGLTPRHRESDTTVHRGPITKQGSRLVRWAAVEAVQRLPGTTKQAADFHRIADRRGKGIGRVAVARRLLTLVYYGLRDGQVRCLAPAPAEAM

SEQ ID NO: 294613 - protein, 484 aa, unidentified
MHLRITNISAKALDAFCFSFESAGAFELTNEYSGLAALPARYICFESSSMHAPVANSTRWRKIMNQLSGTPFTAYIGIDWASTKHDICLQVAGSEERMFERIAHTPEAIEIWARELYQRLGGPIAVALELSEGPIVSALGEYDFLVLFPIDPKRLAKYREAFVPSGAKDDPTDAEFALDYVMRHPEKLKALKPESAPMRKLRYLVEARDRIRGDQSRCVNRLIQALKHYYPQAVDWFNDHNTLVFCDFLKQWPTLVKVQRARKARLERFFKGHNVRFARLIEDRIQAIKAATPLTRDEAVIEAHRLQVEILVEQLRLTIQAMKCFDEEITAIATQFPDYQLLFTPLPGAGKVIAPRLLAAFGDDRDRYHCAAQLQKRSGIAPITKRSGNSTWVHWRFQCPKFLRQTFIDYAAQTINKSAWAGAYYRQQRAKGASHHVAVRALAYKWIRVLYRCWQDQSPYDESKYLEVLRRRGSPLLKQLAEAA

SEQ ID NO: 294614 - protein, 452 aa, unidentified
MAKRSKKRCEQLPILHPHAAGIDVSASELFVAVSADRDPQPVRSFPTFTRDLNALADWLQQCGIRSVAMESTSVYWIPVYQILESRGLEVCLVNAQHVKNVPGRKTDVSDCQWLQYLHSVGLLRASFRPPGFICAIRSLWRHRSSLIQMAAEHVLHMQKALDQMNLQIHRVLNDITGMSGLRILDAILAGERDPVTLARLCHGGVKSSEDTIAKSLEGDYRPEHLFALRQSLAAFHYYQQLVVEVDQEIQRQLGSLETSTTAEPTVPKRTKASAYQRRRYEPKTFDLRGELYRIFGVDLTNVPGISAITAQTILCEIGTDVSRFRNASAFASWLGLCPENKISGGKVLYTKSRRVTSRVATALRMAANSLHHAKDYLGEFFRRITRKLGKPQAITATAHKLARVVYHLLSTKEAYNESVFHRCDEEAIKRAQYRLRRQAAQLGFQLIPLQNG

SEQ ID NO: 294615 - protein, 404 aa, unidentified
MFYIGIDWADAKHDALAIDEAGHQLGSIRVPHTTEGLDKLEHWLLQILGNQDKAQMACIIETTHGLLIAYLLEHGWSVYPVNPRTVDRRRSASGAKTDAIDAYLLAKTGRADFADLHRLTPDSEKVAELKLLTRDQDGLIQMQTRLVNQLTACLKDYYPVALALFSKLQQRSSLSFLQTYPTLPAAQGASVEQIAQVLQLAGHTSATKVAPKIFERLHQPSLQADAVTTRTKARLTQALIAQLLPLVEQIAAYDKEIERIFLSHEDNAVFSSLPGAGKRLAPRLLAEVGDDPSRYESAASLQALGGTSPVLFQSGTYSKPHRRLGCIKPLRNALHSFAWQSTQYETWAKAYYERKRAEGKSHTVAVRALSNIWARIVFALLKSHEPYTSATFEKAQALHSHRAA

SEQ ID NO: 294616 - protein, 351 aa, unidentified
MDESIVILSTTKNKRPAQYDHYIAVDWSQKNMAIARSTQKSKHAHTVDLPSSLRDLKDYLYNLKGSKIITIEECPAAQWLYVELADYVDKVLICDPYRNRLLFDGAKNDVLDAEKLCLLLSNGLLKEVYHTHNSLFELRKYVSAYEDIIKAGVRIKSQRSSIFRSEGKNFRKETVGIDSSRFIISIIDKNIKTYEQDKKEYKSLFEKLKQKNTTLKNLCKVPGIEIISAVKILANVIDAHRFPKKGNYLAYCGLVKHKRVSGQKTYGLRNPRYNRILKSVYKSAALGSIIATSNPMKDYYEYLVGKGVAVHNARNALARHIATITYGMLKSGEKYQPYKWRKEVKLISNQK

SEQ ID NO: 294617 - protein, 421 aa, unidentified
MKNKAARKLKQVPAGYLAIGVDPHKKVHAAVAITEDLTVRTKFKFSNSRAGFEQALENARAEMIKACCRGVIFAIETGGHYWRNFAYFLDERGIPSRLISQITLKRMRDGRDINRRKSDFRDAEMAADILRTGDFTETRLPQGVYADLRSTHSAYFRLVKERSRIVNLMKGLLDGLFPEFTQVFKDPCGRNAMVVLLTCPSPAVIASIEEDVFIARIRDRRQGRLMLKKLRALHQAAKTSVGVKPGADSVATEISLLAGRYGLIEEQIDKLVKSLISLVCMTEEGKYLLSIPGISYLSAAALLAETGPLKQYQNAKQVIKMAGTNPIESESGGKRLGETPMSKKGRPRLRYSAWNAVIPLFRHNPDFRCWAKRLRERPAHAHPLNGKEVVGAALNRLLRLVFALVKKQEFYHSPEIALVVN

SEQ ID NO: 294618 - protein, 335 aa, unidentified
MLRFLALDLHRDYIHVCRLMPHPDGAKIRHSRFPNTPQAWSRFIATEIDRDTWVAFEVTANAFEIHDLLSPHAGKVLVVKPSAVKERGSGRKTDRADTERLVTGLAQGTLPVVWVPPEESRVLRRLLRLRQRTDSRRKAVGNHLRALLRRHFIAVPAGKDVAVWLQNHPGTLELLSADDRVLLGSLLRQYRVLQEEVEALTAEVAARVQDHPIVQCLLTIPGVSLITAATIYAYLGDPRRFRGPKQVKRYAGLDPSVYQSGQRNRRGRTSKHGCTALRAALIEAAQTTVRWDDGPLGSLPTAPEEEGSLRERGGGGGAAVGHRLANDAYGRALSR

SEQ ID NO: 294619 - protein, 400 aa, unidentified
MDERERFGYFLGIDISKERFDGCCINGQGEKLFSLSTSMDRKGFEELTGQLSSLSFGQESVLIGMESTACYHVTLYSFLIWSGYSVVILNPLLISNFVKLQLRKTKTDKKDAYVIAQFLLLNRDSLCQTILSSDLSDIRDLSRQRESLVDQMSSIKTEIKRLLTMTFPELEHLAGIFTKSMLRLLLQHPSAASMRRAKRSKIAKILIPGSYGKQTDASVERIIKAAEKSIGASSPTKEIILKQKVSLLMQLEEHLQELTNILIEQCQGKMRRDMDILTSMKGIGEKTAMNFLIEMGGDIKQFESHKKLIAMAGLDPALYQSGKIDRKGKISKRGNRHLRRVIWQMTTRVIQFNERFKQYYLKRTNDGLPYKMAVLATAHKLIRVMFAMLTNRTLFNTKMN

SEQ ID NO: 294620 - protein, 387 aa, unidentified
MSPTIAARRPAAVDYERTLILSIEVSNQSWVLAAQVPGLPHTKAKRTVDPEAEALMAAIAGYRSRAAAMGRSIERVIAVYEAGWSGFWLARWLTRHKVEVYVIQPSSVPVDRRMRRAKSDGIDAELLLRTLLAWLRGEPRVCSMVPVPDEADEDARRCIRERTELISERVGLTNRIGAVLATLGVTDYNPLLRNRHHRLAELRTGLGEPLPPNAHAKIARLLARLELVLAQIAELERERDAVVETEMPDHASKMIQQLISLRGIGVQSATVLVREAFVRRFANGKALGSYAGLTSSPYSSGGIDREQGIGKGGNRRLRTVMVELAWLWTRYQPAAAQVCWFRERVGSTGRRVRKIMVVALARKLLIALWRFVIDGVVPEGAVLKPAA

SEQ ID NO: 294621 - protein, 448 aa, unidentified
MSKGSGITRGDRRRNARKARLRVLVPHENAVAGLDLGEKKQALAVTGADGEVLARRSPRVSVHELGPYLDRALEQALAAGYAGLSVACEPTGSRWMVVQDLCEERGLPFVCVQPLVSHVAREQEDLTGDKTDEGDSGLVARLARELHCYEPERLEGAWAELRDEGRRRAQLITNATAAKQLIRDKLGLAAPALPESACEPFDSPTWLASLEVALERCGGDAAQAAAMGYAAFAAAVAAALPGWGGQRVGGTCRQLFSALGDGRGVARMRRAALRRVRGALADLKYARARRAQAEADMIALLSELGVDADRICQIPGLSAATLAAILAETGDLHNYESSSSVVKHAGMSPARNESGSFRGQAKISRRRPVLRLAVWRATWPVLRHCAVLAAKHAALTGRDDDSKLTPEQARVACAASLLRWIWSLTVHGTRWDARIAAGELGHHHAMAA

SEQ ID NO: 294622 - protein, 345 aa, unidentified
MQPMYYIGLDVHKRIISYCVKDGSGKLHAEGSIPATRLDLDRWVKTLPQPWSAAMEATMFTGWIYDHLKPHAAALKVAHPLMLRAIAAAKKKNDRIDANKICDCLRCDFLPECYMASTAIRERRRTLRYRNLLVRQMVQMKTKISMLLMEAGIGYNKQRLHKTGYFRELMATNPGIDEGLRSLLRLCRETVVRLSKTESALVRSLRRDPLLLERVERLMSIPAIGPITALTWALEVGEVQRFSSIKKAISYCGLCGAEKRTGNTVQRTPLSKQRNKHLQTTLIEAAKMAPRYSPTLAMLYDRERQKGNANRATLAVARKLVAYLMAVDRGQTHFLVVDREACVAA

SEQ ID NO: 294623 - protein, 405 aa, unidentified
MAKLFVGLDWSETHHDVFIEDDDGRRVDSGRVPEGVEGVARFHAMVADRVDNPAQVIVATETDRGLFVGSLIAAGYTVMAVNPMSTSRYRERHSTSGAKSDPGDAKVLADLARTDYHNHRPVAGDTDLVNSIKVLTRAHQSLIWTRQRQTNQLRSTLREFYPGALNAFSDLTHGDALEVLRVAPTPELGRRLSISKIGSALRRGGRQRRLDDRAAEIQQALRADQLAAPDLITESMGSVVTALVGVISELNTQITGLEADLADRFDQHPDTKIIRSLPGLGMTLGARVLAEFGDDPNRYADAKSRKNYAGTSPITRASGKHRVVLARYARNKHLADACYLWAFASITVSPGARAFYDNRRERGDTHNRALRALGNRLVGILHGCLRHHTPYDEHTAWAHRHDLAA

SEQ ID NO: 294624 - protein, 407 aa, unidentified
MEVLYPRCAGLDVHAGSVTACVRIATGAQVTYAHRTVATTTRGLLELVEWLTGHGCTHVAMEATGVYWKPIWHVLKEHVALVLANAMHIRNVPGRKSDMNDATWIADLLAHGLIRSSVVPPAPIQELHDLTRTRRQLVHEVARHVLRIQKMLEDANLKLTQVMSDIVGVSGRAILNALMAGETDPERLADLTRGRLKATRADLVDALHGRITDHHRFMIQVHLGQIDGLESAVAGIEARIGDVLGPFRAAVSLLTTMPGISETTARVLVAEIGTDMSRFPSVGHLISWAGFCPRLDESAGKRRSTRTRQSAPWLKPTLVNAAWAATHKKDGYLRAQFLRIKSRRGAKKAILAVASSMLTAAYFMLRDGVEYHDLGAHHFEQRDKEQLTKRLLQRLRDLGVAVEVKAA

SEQ ID NO: 294625 - protein, 414 aa, unidentified
MELLHPRCAGIDISKRDAKVCVRIAGSGRRRAAETVTTWSSMTNQVLALRDHLTQERVTCVVLEATSDYWKPFYYLLEDASFEVMLVNPRHVKNLPGRKTDVSDAAWLAQLGAHGLVRASFVPPEPIRHLRDLTRTRSAITRERAREVQRLEKLLEDSGIKLSSVASEIMGVSGRAMLEALIDGQRDPAQLAELAKRRLRSKIPALTEALTGRFTAHHAFLARMHLDLIDKHTEAIDNLTSRIEVVIEPFRGFRELICTIPGISTGVADVVTAETGADMSRFPTPGHLASWAGTCPGSNESAGRVKSTKTRPGNPYLKAALGTAALSASQSKGTYLAARYRRIASRRAPIKAVVAIEHTMLTTIWHMAQTGALYDDPGGDFYTRRHPEKAKRRAIEQLRAMGYHVTLEPLQEPA

SEQ ID NO: 294626 - protein, 390 aa, unidentified
MIYVGIDVAKDKHDCCILGSDGEILFSPFTIQNTLQGFDVLYEKIWSLTADMSEIKVGLEATGHYHINLLRSLLDNGLASFVINPLHTNLYRKGQSLRKTKTDKVDAASIAMMLLTDRTLKPYSDTSYHNEELKSLTRYRFDKVQERARLKTSVARLVSILFPELEKLVPSLHMVSVYALLSEFPGASFIASAHLTRLKHLLHVASKGHYDRDMAVSIRVAASSSIGSVLPAKSLELKHTIHLIGVLTKEIDEIEAAINAIMDTINSPITTIPGIKNRMGAMILAEIGDFSRFDNPDQILAYAGLSPTTYQSGQVTSSYAHMEKRGSRYLRYALFNATQYVCIWDPTFKAYLAKKRAEGKHYYVAISHACKKLVRVIYRMQLTGEPYRAS

SEQ ID NO: 294627 - protein, 350 aa, unidentified
MVVIGVDAHKRTHTLAVVDEMGRSLATRTFPATLDGHRAALGWAQRWPERVFALEDCRNLTRRLEADLIRAGEGVLRVPARLMATARRTGRELGKSDPIDALAAARAALREPGLPVAQLDGETRRLRLLVDHREDMVGERTRMQSRLRWHVHELFPGLEIAPKSLGRLRVIAALDRRLHKVDGTVAAIARELLGRIRDLTVRINELQRETTQLVRPLAPSLLAMPGCGPLSAAKILGEVAGAGRFRSKAAFARWNGTAPIPVWSGNETRHRLNRGGNRQVNAALHRIALTQWRGVGPGRTYVQHRLAAGSTKTEALRLLRRRLSDEVFRRLRSDETAITKTSSREGVIAA

SEQ ID NO: 294628 - protein, 344 aa, unidentified
MTNIEHKETSHKVKPELFAGIDVGAEELVLEIRKNGKPFNPQKFANTPSDRARLVNKLAKLPGIIVCLEATGVYHFDLSIALHDAGVLLMVVNPKASHNFAKVLMKNSKTDAVDASTLAEYAARMDFVAWTRPSDETLALRSFSRRINSLTGQKAAAKNHLHALNATSEIPKAVLKDAKLAITQLEKRIDNLTAEALILIGKYPELDRILLLLIGIKGIAQTSAIALMGELLLLPPGLSHREWVKFAGLDPKAFDSGKSVHKKTRLSKAGNRHIRAALYMPALSAKQHDPHIKAYFQHLVDNGKKPLQAVCAVMRKLLHAIHGMLKHNQPFDNTRFYAIPTCTN

SEQ ID NO: 294629 - protein, 399 aa, unidentified
MTAIYTPVELQIGIDVGSLNHSVAIGDNFGNIVKEFEITHTQQGFDNFFKIIEKEARKLDATISIAMEGYNGWARPLDSQILNRGYKLYNVNNVKLARFKEIFPAAAKTDAIDARKIVELFSLQKHLPVAKKVLQEIKISDDVNAKLKKLTRRRRQLVNEKVAISNRFSSDLQAVAPDLKAITKSIDNLWFLRFMTLRDDIRNLARVRKSSILNIKYLGNKTVTKIEEWQKGATFSDELEYTACMIYDDAMRLLELKGKINELTKQIDILNNNSKLATKLQTIPGFATISAGELAGEIGTLKRFKSEGSLALYLGMTNLDNSSGKQKRSKRNMATNRHAKNAMITATMKHVMYTEESKKYLQKKISEGKRYQQAIRSIGRHLVRVIWSMIQNDRSYEIR

SEQ ID NO: 294630 - protein, 338 aa, unidentified
MSTKSCVCGIDVSAKTLAVALTVGGVTEDLEFSNCEVGHRALVSRLTKRRRRARVVLEATGIYSLDISLALHRAARVEVMVVNPRAARAFAIASSRRGKTDVIDARMLSEYATRMQFDEWVPPSPQVLKLRTITRHIQGLSQERVRTKNRLHAARSTSTTPAAVVEDLEAQLVALKARVELLTLSAKEIAVADPVLARRYDLLVSITGIAEATALRLLGELAVLPSDMTARQWVAHAGLDPRPHRSGTSVNRADRISKAGNRYLRTTLFIPARTAAVHEPVVGAFKQELLDRGKKPLQANVAIMRKLLHAIWGMWRTDTTWDPARFRPVRRELAAEST

SEQ ID NO: 294631 - protein, 427 aa, unidentified
MPYRIAGIDVHKKMLAVAVADVEVEGDFHFERQKVGTTPADLRRLADWLVAHEVDEVVMESTAQYWRPVWEALEQHWRPGRRARDGAPRLAGTLHLAQAQSNRGPGGRKKDFPDAERLVKRLVAQELTLSFVPDVEQRLWRTVMRRKYQVTRNRVQLQNRLEALLEEAHIKVSSLVSDLLGISARRMLQALADGETDPAALATLATARLRATPEQLCDAFQACPTLHPVYRRLLKLTLEELRVIEYHLGQLDQQMADLLTAHHDAVQRLAEVPGLGVDSAQQIIAEVGATAATFPSAKHLASWMGACPGNEESAGVNYSHRCPKGNRQMRRVLNQAANAAVKAKGTIFNVVYRRLVPRLGHAQAIGAITHRLCRLIWKILDQQIRYEERGPAVSTEAKKVRARKMIRELRSLGYHVELLTPPAGNPA

SEQ ID NO: 294632 - protein, 339 aa, unidentified
MNITTVGLDLAKNVFHVVCFDERNKEVKKRMIRRNQVRHFFTQLSPCRVGMEACATSHYWGRELRALGHDVKLVPPQHVKPLVQGNKNDYNDARAIAESLDRPKITFVAVKTTEEHDMQAIHRIRSQCLRDRTALSNSTRGLLGEYGISFSKGLTVLRRKIPELLEDAENGLSMRFRNLLARRYEQLVEIDEHIAFYTKELELLSKQDDACERLQTIPGFGPIVASAFRSTIGDGHAYVRGRHAAASLGLVPRQYSSGGKNVLLGISKRGDRYLRKLLVHGARTVVLHAANRDDPLSRWINRVRERRGYNRAAVAMANKMARMGWAILRHNTSYEPALA

SEQ ID NO: 294633 - protein, 374 aa, unidentified
MRNDSEAYVAFDSSKLRNAVAIAEGGRTGEVRFVGEIENTEAATIRLVQKLAAKYRQLTFCYEAGPTGYGLYRLIRSLGHECLVVAPSLIPRKPGDRVKTNRRDAVALVKLLRAGELTAVWVPDARHEAMRDLVRAREAAVDDLKSKRQQVLSLLLRLGRHYPGKKTWTKMHMNWLAGQKLEHAEQRIVLEEMLLAVRQAAERIARLEAAIAAAVPDWSLAAVVTALMAMRGLDLVSATVFLAEIGDLSRFATARELMGYLGLVPSERTTGDRVKRAGITKAGNRRARRILVECAWSYRHPPRVGRKKLAKVAAAPAAVRDIAWKAQCRLAARYRALTRRGKQPTVVVTAVAREFAGFIWAVQRAIPASGPAAH

SEQ ID NO: 294634 - protein, 315 aa, unidentified
METTTPTTEVTYVGLDIAKDRLDYTVDGIRCDHVPNTPSGHEKLLGVLAKLRGVRVICEATGGYERAVVAALLLAKHEVCVTNPGRVRAFAHAEGLLAKTDRLDALLLRRFGEKVQPRLHAPMDQAAITLRELLDYRRHVSEQLVAVRNRLELAGPVLRARLDGQVTFREKELTATDQLIQDHIDHDDTLSRKAARLRELKGAGPVLAATMLAYLPELGEIESPQLSALVGVAPFARDSGRSHQARHVRGGRGLVRRVLYMAAVAATRHNHVLRAYYTRLVAAGKPKMVALVAVMRKMLHVLNRLLADPNFVLVQ

SEQ ID NO: 294635 - protein, 466 aa, unidentified
MAKRIVGIDLAVTGLHRAAVYDAQRMDFVGKSFAFDHTDIGYALLVEKAAAGFGGEMVFVMEPTSGVWKPLSAYLMARGYVVYLIKPQKVHDLRKFLRRHTKSDRIDAQALAKLPIIDPEGVYPLTLPGSATEALTRYCRQRERIMRSISARKVRIQAYFTAVSPLLMDCFGAHKYTRCCRAFLRRYADPFLVVKLGVKRLATFLDRHAFGTPGPLLAEKIYAAAQSAVNIFSAARAKDLLPFAPEQFQEEINIELDLMEYEEQKVQYLDGKIEALYVQLDPGKVLRSIPGIGPVIAPSILGVTGNPTRFANIRAYKAFCGLVPRKKQSALSDIKGLAITKTSQRILKKSYCLAAETARRYDPEAASLYHRLKARGRHHNQAICAVASNLAGRTYSVMKRTGLGTGDNRQDTAQLGYVVHDFEGKNIDLKQGRALVVERFLTKNNRESAYEFNSRQSFPITRDNSS

SEQ ID NO: 294636 - protein, 410 aa, unidentified
MELLHPHCAGLDLHKETVVACVRHMADGKVTTDVKSFQTTTHELMELSDWLSSQGVTHIAMEATGVYWKPVWHILSDGEFALILANAAHVKNVPGRKTDVNDAVWLADLMAHGLIRASFVPDEPTQQMRDLLRTRKQFVRERSSHTQRIQKTLEDANIKLDSVITDIVGLSGRRMIEALIGGETDPEALAALAHGRIRATKAELEAALRGRVTAHHRFMLRIHLNHLDALNTTIADIDKEVDGNVEPFRVAIEMLTTIPGVSSLAAEVMVSEIGIDMSRFKTEGHLISWAGLCPKNDESAGKRRSNRMKKGAPWLKTTLIQCAWAASRTKASYLQAQYLRIRSRRGPKKAIGAVAASILTAAYHMLKDGTLYQDLGASHFDHRDKGKQALRLVNRLQSLGFTVQITSMAA

SEQ ID NO: 294637 - protein, 342 aa, unidentified
MYYIGLDVHKKTISYCVKDVSGQIHRQGTIGATRNELDWWVKTVPQPWMVAMEATMFTGWIYDHLLPHAAQVKVAHPVMLRAIALAKKKNDRIDAGKIADCLRCDFLPECHMASTAIRDRRRVLRYRHLLVRQMVQMKNRMSGLLMETGVSHEKKRLHTQRYFEEVVWNHPEVSANIRPLLRVSRESILQCRKTEYALRKSLQRDPLLAERLQRLKTAPGVGPITALSWALEIGDVARFRSVKQAISYCGLCGAEKSSADKVMRTPLSKQRNKHLQRVLVEAAKLAPRESPELALLHERELQKGNANRATLAVARKMVSYLLAVDRRGTDFVSSEQKNTAAA

SEQ ID NO: 294638 - protein, 309 aa, unidentified
MKQSVVYIGIDVAKTHLDVAWAGTFRRLPNERSGHAALVRWIKQSATPVQLICEASGGYEQALLESLEKSEVKVTLVQAVRVRQYARAAGILAKTDRIDAKVLAAFGSAMQPQPSRPLSAEQKRLRQYEAQRRHLSRTLVAEENRLAQLSCAELRTLSRSLISKIKTQIKTIDRGISDLIAQDQTLCVKAQKLTAISGVGVRTAALLLAQMPELGQLNRRQAAALAGLAPFNHDSGSVRGKRAIFGGRPALRSGLYMAALSAARFNPILSNFYQRLRAKGKPHKLALTAVMRKLLLALNQTLKPLPCST

SEQ ID NO: 294639 - protein, 408 aa, unidentified
MAEVDSDRRSWQSEVANPPTLETIMQSVAARPEALSAIRSDLGAIFVSLELSRSTWLITSLSPGGGEKMSKHSVRGGDVAGLLERFAQLQKKAQARTGRNFPIIVIHEAGLDGFWIHRVLQNEGIESHVVDPASIATSRRRRRAKTDRIDGEALLRTLLAFKRGEPRVCAMVKAPTPEEEDRRRLCRERKVLTNERVQHVNRIKGLLFCQGITGYKPLRRDRRRRLDELRTGDSRPLSKHLKYQISRELDRLELLLEQIKAAETERDAVLVATPAPAAMLLDIKGIGPEFAAVLYSEGLFRHFANRRQIASYAGLAPTPWQSGSVDHEQGVSKAGNPRLRTTLIQLAWLWLRHQPQSALALWFKERVMRNGGRLKKTTIVAMARKLLVALWKYVTAGVVIEGAAMKAH

SEQ ID NO: 294640 - protein, 416 aa, unidentified
MNRLHYELLVGIDLGQWLHQACVLDANGELLEERGFEHSVDGLSATLDWLLNLASKAERIAVAIEKPHGAVVETLLGRGIAVFAINPKQVDRFRDRHSMSGAKDDRRDAFVLADALRTDGHRFQRLQMPPPEIVALRELLRTRDQLVKNHVALSSQIRDLLARCWPHLSTLAPKEKALDSFFCELLQLFLDRPTEIGSTSIQQLVHKHHIRRVQPDFILESLKLNPLRVAPATIHATADHLRLLVMQVLLVRQHRRDADQFLERWFHGLQRTTQQPYSDAAILASFPGVGAFVLASLLSFAHDPIRLRKLEAFRCLGGIAPVTKQSGKRRQVLLRRARSQPLNNALHHWARIAVLRDPHAKEHYHRLRQRGHSHARALRGVMDRILSIAVAMLRDRTLYDPARRRSSYDGRKKVSP

SEQ ID NO: 294641 - protein, 392 aa, unidentified
MGSASDGVVIGMDPHKRSATIEVMTGEEAIVGGGRFGTDRDGYRAMLQYAKRWPGRVWAIEGCEGIGRHIAMRLLADGEQVVDVPPKLSARARVFSTGQGRKTDATDAHSVALVGTRVAGLRPVVDDEQLAVLRILVDRRRSLGEDHTRMVSQLHRLLLELIPGGAKKDLSAAQAKALLAKVRPRDAAGKARRRVAAELIADLERVYQRRKAADKELKALVAATGTSLMDLHGIGPSGAARLLVEVGDITRFPDRAHFASWNGTAPIDASSGDQIRHRLSRAGNRQINRALHIMATVQLRNPTDGRAYYDRKKAAGKTSNEAMRSLKRRLSDIVYRRMIDDAITTTMTGPGGHRETSLDSSVTGSHSHTGSSDQSLPGPANTQPTTLVPAAS

SEQ ID NO: 294642 - protein, 356 aa, unidentified
MTKVTANFENKTVFVGLDVHKRSWNAAIFLGDYYVRNIHQPPSPQALHHFLINNYPGAHYTCAYESGKFGFWIQRHFDQLGIQCLVVNPADIPTTHKDDVYKTDSRDARGIGQALSSGLLKGIFVPKQEQEADRQLVRQRKKLWSDLVRCKNRIKAFLDYLGIVVPERFDNPNWSLNFLRWLRQLEFEQISSRVTLNYMLDEMELLRKQMLSICNSVRKLMRSKKYNKLYYLLRTIPGIGPLTAASLITEIGDINRFTDFYHLNSFIGLLPMEHSSGEKELRTRITIRKHRQLRSDLIECAWTAKRSDPALALYYSEQLKKGKNGKAAIVKVARKLVARIRYVWRTQQPYQSAVVK

SEQ ID NO: 294643 - protein, 345 aa, unidentified
MEHYVGLDVSLKLTAICIVDRTGKIEREGVVSSDPESIAIFIKSHAPHVVRVGLETGATATWLWTELNKLGLPVICIDARHAKAALKMQINKSDRNDAVGIARIMQCGWYKEVHVKDLDSHAVKALLVSRALLVKIKRDLENQIRGLLKNLGLVIGRAKMNVFAVRAAELTEHRPELAAAVVPLLSARAAIEQQIADLDRKVMRLARKNAQARRFMTAPGVGPITALCFLATIDDPTRFKRSRSVGAYLGLTTRRYASGEIDWTGRISKCGDKMLRSYLYEAANVMLTRVARWSALKAWGIRVAKRTGLRKAKVAVARKLAVVLHRMWIDGTEFKWSKEAANQPA

SEQ ID NO: 294644 - protein, 345 aa, unidentified
MKKVMAGIDLHSNNLVIGIVDLEGKRLGQRKLDCELKKVVEFLAPYKKRLEAIAVESTYNWYWLVDGLAAAGYPVVLANPAGMQQYSGLKHSDDASDAFFLAELLRLKILPPGHIYDAHLRPVRDLLRRRLSLVHQRTALMLSFKSLFTRTTGQEMSLSRLKAMKAEEAQGLYEHPANQLIAQVQHQHIGALDQSIAVIEKAVLKVTRALSSYRRLQSLPGVGIILGLTISLETGDIKRFGGPGQYASYCRAVDAQRISNGKKKADNNQKCGNKYLGWAWVEGANFARRYDERCRRWFDRKAARTSKVIATKALACKLAKAGWHVMAQDTVYDEKRVFPELAMKK

SEQ ID NO: 294645 - protein, 353 aa, unidentified
MNDTPAIAWLGLDAHSKNCVLAHLDDHGTELKWWKFPTQPHQLIAQIQAIPAADKRLMLEESNLARWLGQLLKPHVQQLVVCDARRNHLISQDHHKHDRRDAFALARLLRLNEFKPVWQPVEAQRVLFKRSAQAYENAVQRQTRLKLQLKALFQHWGLFPSGSTVFSQSGRALWLKQLPHDALRSQALILYELLDQALASQTQCRRLLVHSGRQFPEVKRLRTIPGIGLVGAHLFVAYVQEPARFQKFSQLTRYCRLGIRDRTSDDKPLGYQQLDRHGVGTLKAITYRAFLQAAKRHSGPVWDFYEFSRRHTGDSTHARLNTQRKILLPLWMLWRTGREFEPETFSRSQPHDV

SEQ ID NO: 294646 - protein, 406 aa, unidentified
MKGSIVTVDVSKGTCHYQPFIEKGKPFRKPKVLHDTNEGFADLSSCIQKLKEKTEAETIPVVFEATGVYHRCLQKYLDDHEMPYYIITPLLSAKYRQTNLHGNKTDDLDCTHIANAYYVDERLLPYFKQDDRFEKMRTLNRDYETELAHLRMRKVSFRSRLDIIYPRLDKCFKGSGSLYDPVPMEILKKYPHPSLLIKHRKETIIKAIEKKTDHKSDFITRVVDRMYECALHCYSGADPDSIEVLRFPKMIEELQSQMELCDDILQQLISEAKEVSYFPCIMSIVGIGENLAARLIAELGDMSRFKSRRAIAAYAGLNPKIRQSGDVDGIHLAIEKKGNRHLRCLLYLGASCNYRLKKNDQIYLFNQKKRQQSQSPLKHKAANIAAAHKLLVIIYALSKSGELYRS

SEQ ID NO: 294647 - protein, 419 aa, unidentified
MKTPGDIPFTAFIGIDWADAKHDVCIQAAGDERREFSQLSHKVEAIDDWAQSLYRRFGGPMAVAVELSKGPVVYALQKYDFFVIFPVNPSSLAKYRETFTPSGAKDDPTDAQFVLDLILRHAEHFAPLKPQSVEMRTLVSLVEQRRCLVNDRVRTTNRLRNTLKQYYPQPLEWFDRIDTPLFCAFIERWPTLVQVKRARRTTLQSFFHQHNMRRTHLLEARLTSIKAASPLTLDNAVITPHRLQALVLVDLLRVTLAAIKRFDEEIAELAPQHPDYALFSPLPGAGPSLAPRLLVAFGEQRDRFKNAAELQKYAGIAPVTERSGNKHWVHWRWQCPTFLRQTFVEWAAQTINKSYWAGLYYRQQRNKGCNHHAAVRALAFKWIRILYRCWVTRTPYDETKYLKALQERGSTLLKMAEAA

SEQ ID NO: 294648 - protein, 400 aa, unidentified
MRVVFGIDVSKVSSEVAILVNGEKVHNYTMSNDAIGFSRLLGDLKTVHKPEIIFEATGVYSRRLQSFLDEHGYAYTRLNPLEAKKQLDSLRVRKTDQIDAEKLAQSQFVLNRKTTYVQEEIYQNLRDLSRFYQNLTEDIVRAKNRLHKALQVTFPELENILSTPSGEQYWNLVIAFPCKDFVLDLSKDELSESIRQSTSKRISDKRVAYLAEKLIALANQSYCAVKKTSPMLEEVRYYAKELFRLSEQKQTILDEMVELAQPLPEYDILLSIPGIAETTATSIIGELGDIRRFQSANQINAFIGIDVRHYESGNFLAKEHITKRGNPYARKILFKCIHNIASASNTNPCHIADFYEKRKRQSQTTSTKPHTIASIHRLIRTMYYLIMHNKLYDYASTQNR

SEQ ID NO: 294649 - protein, 341 aa, unidentified
MEQYVGLDVSMRETSIAVRQNGKRVWRGKCPSDPGALADVIRQRAPNAARVVLETGPLSTWLYHALKAEALPVVCIDARHAKAALDMAPNKTDANDADGLAQIAEVGFYREVRVKGYAPMLARTLVGARGQLLRISIQLSNQIRGVMKTFGLIVPKGAGRVFETHARALLGTNEAVARVVLPLLEAWRAVRARAAELDRQLIAAARTSPACRRLMTIPGVGAVTAASFVAAVEAPENFRTSRAVGAWLGLTPRRHQSGEADYDGHISRRGDGHLRALVYEAAAAVLTRTRTDSALRSWGLELKEKVGFKRAAVAVARKLAVIMHAMLKTGATFDPAPNTTA

SEQ ID NO: 294650 - protein, 347 aa, unidentified
MRFYQPSTEFYCGVDLHAKTMYLCILDRQGTILLHKNLRTDPEAFLRAVAPYRASLVVAVECLHCWYWLGDLCAREGIPFVLGHVLAMRAIHGGKTKNDKIDSEKIARLTQGGLLPQAYAYPAAQRGLRDLLRRRLRLVRLRAELYEHVQTLHRQANRPLSGAAAKTAAAEAALPEPFADAAVQRNALADLAMAGHYDAIIYDLEHHLLAAARDTRAKELALLQSIPGVGPILALTLLYEVDRIDRFTTRQQFCSYSRLVYPRQESAGKQAGCKGRKMGNAYLKWAFSEAAVYAARFYPRIAAYLQRLEGKYGPGKSKSLLAHKLGRAVYHMLRKGTVFDEEKFLRG

SEQ ID NO: 294651 - protein, 376 aa, unidentified
MRNSTSTATGKARTTAKLSRQHVDWKHVVTIGIDVGDRFSYYCAIDADGAIVAQGRMSTTAGAFELELTRVPRKTIAIEAGVHSPWISRLLTRLGHEVIVANPRKLRLIYVNQRKNDRVDAEYLARVARLDRKLLGALEHRSELGQSHLSLIRSRDTLVRSRVRLIQHVRSAIKSMGAQVPSYTAHAFHKRIGKVLPEQLRDALLPLVETVEHLTARIGELDRRIERLAEDRYPETAVLTQVHGVGLLTALAFMLTIEDPQRFARSRSVGAWLGLTPGQHDSGESQPQQRITKEGDHYLRRLLVGSAQYILGRSAWTVICAAMASPSQHAAAKTRESERPWRSHVSLQSCFITSGAPWMTTSRFATANLDARLHRA

SEQ ID NO: 294652 - protein, 354 aa, unidentified
MKNITVIGIDIAKNVLQIHGMDSAGKKVLQKRIERGKFLTYMANLPQCLVGMEACGGAQYWATQLIKLGFEVRLMPPRKVKKYAEHHKNDARDAAACAEAVTRASMTFVTIKTDVQLDLQALHRARSFYIKERTRLTNMTRGLLAERGIVMPKGEAAFVKKIQALLGDEDFMGERRELLNDLYEMFKIIDEKVERHTNKLKKIATEDAHCQQLDTILGIGPITATALVAKIGNGSEFKRGRELSAYLGLVPKQHSSGDKQSLHGISKNGDRYIRQLLVHGGRSCLVSATRINKITKTFEKQDAHSQWIRELINRVGMNKASVAVANKNARIAIAVLKKQEAFDPALAHMDHFNQ

SEQ ID NO: 294653 - protein, 343 aa, unidentified
MQTITTIGLDIAKSVFQVHGVDADGRVVVRRQLKRRNVLAFFQKLPPCLVGIEACASAHHWSRELQALGHTAKLMPPAYVKPYVKRHKNDATDAEAICEAVTRANMRFVATKTPEQQSCLTLHRTRHLLMRQQTSVINAIRSHLAEFGIVAPVGRNGVEQLLGVVADSNEKRLPEIARACVAALGAQLRVLKVQILEFDRMIRAWHRSSEASKRLDQVPGVGPVLATALVASVADPRAFRSGRDFSAWIGLVPKQNSSGGKERLGNISKRGDRYLRSLFTTGALAVIRYAKIHGTRHRPWLTSLLARRPTKVAAIALANKLARMAWAMMAKGQRYKEPAALAA

SEQ ID NO: 294654 - protein, 425 aa, unidentified
MNYKQNEKINQVKESTLVVGIDIGSTTQYARAFDWRGIELGKVFTFSNSREGFEAFKAWMQHLQDKYRKSDVIVGIEPTGHYWFDLGAYLEDEGILLVMVNPYAVKQTKELDDNSQSKNDRKDPKVIAKLVTEGRYSAPYTPDGVYADLRIMVANRKRLIREMTQIKNRFARWFAIYFPEYTDVFGDYEAQSSMLLLKKVCTPEAIVELGAEKINQIWRDAKLRAVGMKRATTLCETAKRSIGLKKGSSAARYEMKLLLEDYEYKKAQLDAVMEEIEKLCRKIPESEQMLAIKGIGVITVAGFLAEVGDVRRFESPRQIQKLAGLSLRENSSGKHKGQTTISKRGRSKLRAVLFNAAIPLIAKNPEFKSLHEYYTTRANNPLKKKQSVIAISCKLIRVFYAILANGVTYDSQKLLSDIHRQPQAA

SEQ ID NO: 294655 - protein, 361 aa, unidentified
MKKMIKQTLGIDVAQKELVVCFGKLFDDFGIELFARKAFCNTPKGFAELLKWTTKLADKELPVHFVMEATGVYHESFAYFLDKLDLKVSIVLPNKVSNYMRTLCIKTITDKTAADAICQFGLERQLEAWKAPNLLYKQIRQLTRERDQIIAERTALKNQLHAESVEAHPNKNSIKRTKDRIKLLDKQVSQIMDELKQIIAQDTELKERVKIICSIPGIGLLTACVILSETNNFDLIRNKRQLTSYAGLDVKEKESGTSVKGKSSISKRGNKYLRKAMHLPSLSAIQHSERYKAIYARLVSKHGIKMKASTAVQRKLLELAYILVKNDTKFDPEYFMDNEKGTEAKTPIPLQSETCSTLTQN

SEQ ID NO: 294656 - protein, 406 aa, unidentified
MFIGWDWATETHDVTVMDDAGKRVDRWEFAHTEEGFARTLARLGKHGAPADLPVMIETSRGLAVDRLLVAGHPVVPVHPNAFHAMRPRWGASKAKTDAGDSMKLADYLRTDGHLLPRLEPTEQATLDLQALTRTRADHVEARIAAVNQLAALLDMHWPGGKAVFANLDSDIAMAFLERYPTPASAARLTAGRLEAWCKRHGYSGRKPGGVLIERLRTAPKAASRLSEAVVEQLVQVQVQLVKGIRTTIRTLDKTIAEAVETHTYAPLFATMPRIGRVSLGQIIGEIGPLLERARTSEQLIAEAGVVPVTRASGKSRTVAFRFATNRRARVALTAFADNSRHGSDWAAKIYNDARARQKRHPHAIRILARAWLRVMWACWRDGTCYDPAIHQANGKINTTTDTALAA

SEQ ID NO: 294657 - protein, 362 aa, unidentified
MLYLGCDVHKNYTTVSFVTEDGKVADTSSFYNDIEELKSLLGRFPEEEFSAVLEAGLNWGVIYDMLDSLSEVKNVSLAHPPKVKAIASAKIKTDKIDFKILGQLLRTDLIPEVWIPCKETRMLKDIVRFRAFTVRIKTMIKNRIHDVLRKSHINPPEVKDIFGKYGRMWMEDIELTDKRADKLLRYHLKLKDTFEEMEIELKKWINKEMKTNENLKLVKTIPGIREVFGPIIVLEIDDINRFPDPAHLHSYSGLVPSTHVSGNTSYHGRLIKGNRWLRWAFIEGAHTSVRVSPYFRKYYDGVKRKAGSQAASVASGRKLATIVYKVLKERRPYIEEYRIKQNIGRSPSVRPSGGITSRSFQE

SEQ ID NO: 294658 - protein, 353 aa, unidentified
MDKYIGFDIDSKKVSVCVVESGKKDYYATIGPDIGSMKKFLLSQRQKCIRINLAYEVSGYSGYLHDQLCECVDRIAVVNPIKATWIYRTAKKNDRIDARKMAILLSIGELPTVHVPNKEIRQWRQTILHRRNIVKSSTRVKNRIRAVMKSAGYFKAANRGKWWNRVNMAWMLLLSQGKELWQMQLGQLMDEYEFHNKQLEKVTHYLDEYLKSKPGCMLLMSIPGIGHRTAEAIMAYTEGVERFENARQYSSYFGVVPKLDESGSTRRLGHISKHGPSVVRWLLCEAAWKSIRKSPSLNSFYERVRNGDNKRKKIAIVAVCRKLLSIMRAMLTTGELFNEKLVLRQCGEIDKAA

SEQ ID NO: 294659 - protein, 353 aa, unidentified
MEYFAGVDTHKETHAVAIVDGLGRELEVFSIPASSAGYVNAMELTAKYAGLIWGVEGTGSHGRPFADALVRAGHTVFEVPGKLTKRYRGREKTDERDARAIAEAVLREREKLPRHLEADAEEATRLLYERRDRNVREQTAKINRIRALALRLELALPDDLSSVRALDAVKKALQKYHTCGFTDFQVVDEIGDLLSDLRLISKRIAELERRMRPFVKRLVPKLLELRGCSVISAAGLVGHTGSTLNYTDAHAFAAHAGAAPVKCSSGKYDSVRVSTGGNRQLNRCLHNIANTQMRTPSHAGEIYYKRKRSEGKTHREAMRCLKRRLAAVVFRILREEESRRQPTPTSIPIRAAA

SEQ ID NO: 294660 - protein, 324 aa, unidentified
MSDHMRVPVYVGIDVSKAFLDFSVRPSGEHWRSPNEFDVMESLVKRLQALQPALIVLEATGGFEVAVASALAAVGLPVAVVNPRQTRDFAKSLGRLAKTDRIDADDLAHFGEALHPEPRPLPDEAAQQLQAILVRRRQLLEMLVAEKNRLGLVHPLVKTSLQEHIAWLQRQLSDLDQDLHQRLLASPVWRAKENLLRSVKGVGPVTATTLLAELPELGTINRKQIAALVGVAPFNHYSGQMRGKRSIWGGRACVRNVLYMAALSASQHNLVIRAFYQRLLKAGKGKKVALVACMRKLLTILNAMLRTGQSWQPSLAVAKAPVAH

SEQ ID NO: 294661 - protein, 285 aa, unidentified
MMIIGVDYHPSFQQIAFLIEETGEYGERELDHGEGEAERFYRDLHERGIRVRVGMEATGFSRWFERLLAELGMELWIGDPAQIKAKRVKKQKYDREDARLLLRLMRENNFPKIWVPSPENRDLRQLLWHRHRLVQMRTRIMNQLQALAMNEGKRWKTKLWSERGRAELEKLPLAPWASRRRKELLELLDRLNPSIEELTAEVAREARKRPEVLRLMTHPGVGPLTALAYVLIIGTPVRFARGKQIGTYVGMIPTEDSSAGKQRLGHIICGAYGHPTRGTGAICPA

SEQ ID NO: 294662 - protein, 428 aa, unidentified
MKYNTQNAKIKSITEKTLIVGIDVGSETHFARAFDWRNYEYSKKPLEFSNTEAGFMTLKAWMADFAEKYGKNVVIPGMEPTGHYWFNLGAYLQDNGMKPVHVNPHHVKKSKELDDNNPNKNDRKDPKTIAALVNEGRFSYPYIPTGIYAEIRSLSNLRLQTQEEITRIKNRIARWFSIYFPEIKDVYRNPDSVSGLMILKEAPLPQDIVKLGVDGINKIWRDAKLRAAGLKRAKTLVTAAEHSIGSQEAPDSARIELKNLLNDYEIYKNREEDLMSLTEEKLSEIPHIDKLLEIKGVGLKTVSGFVAEVGDITRFDNPKQLQKLAGYAIVECSSGKHKGESHISYRGRKRLRYVLYEAAISMIARNEEFKEVHRYYRTRKENPLKKMQSVIAVACKVLRIFYTILTKGVTYDGAKMMQDIKRPQMLAA

SEQ ID NO: 294663 - protein, 362 aa, unidentified
MDYFCGLDIATETTALCVVDTEGTVICQASIATDPEAIYRCLKPYLRKLKRVGHEAGSLSPWLHPELLARGLPAVCLETHHVRNALKAQRNKTDATDALGLAHIVRTGWYRSAHIKSENGYRLKLLLTQRRNLKRKFLDIENTIRHSLKAFGIRLGAVGRAGFDNAVRRAVADDELTATLMDAMLTARAALWLQYTKLHALVVRFVAQNEVCSRFMEIPGVGPVAAMTFMTAIDDPSRFKRSRDVAAYFGLTSKRWQSGSSIDIQGRISKAGDADVRRALYEAASAMLTRFKGKDKVKSWGQEIAKRGCHNKAAVAVARKLAVIMHAMWTDGTCYVGDSSASESDRAAKASGKRKRLLGNLA

SEQ ID NO: 294664 - protein, 360 aa, unidentified
MAPATLPRNGQSIPFDHVVGIDTHRDFHVAVVLAPNGGKVGELKFPASSEGYEQLVIWSEQFGVRPVFAMEGTGSYGAGLCRVLLDAAYDVIEVNRPDRAARRRHGKDDPVDAEAAARAFLAGTATIIPKRGGDQVEMIRLLKVAKDSAIDGRTRALNQMRSLLITAPVALRERLKELSRSELIATCASFRHGVLDGPMAAAKRALRSLARRIQALDTELEALMSDLDALTQAACPGLRQSYGIGVDGAAVLLTAVGDNPERIRSEAAFAAICGASPLEASSGNRRHHRLNRGGNRQANATLHRIAVVRLRWHEQTKAYAERRKAEGLSSKDILRCLKRFIAREVFHLLMGKPPRRTAAS

SEQ ID NO: 294665 - protein, 331 aa, unidentified
MEIKEIIGIDVSKLTLDCCHHSSGSHKEFDNNLDTIASMVKWSLQVSGVSKKKLLFVFEHTGLYSDQLVQFLGGGDYLFNVVPGLEIKRSLGIARGKDDKADAKRIALYGYRVKDELKPFQIPSKTLEIFKRLMSVRKKLVTQRAGYIATLKEQARILNKQHNKVLFKVQGKMILTLDKQITIVEQEMNQLIEEDPELLDLYRLITSVKGIGGVTARFLIVYTVGFTTFESWRKFASYCGIAPFPFRSGTSIRGRTKVSHLANKEGKSLLSMCAVSAIQSNPEMKAYYNRRIDQGKNKMSTINIIRNKLLARAFAVVQRRTPYVNTMKFAC

SEQ ID NO: 294666 - protein, 326 aa, unidentified
MLCFLGVDVSKAKLDVALLLPNEKFKSKVFANDAQGCKSLLHWLQLTAPGVLAEVHVCMEATGIYHEALACFLHDQGVVLSVINPLLAKRFAESNGTRNKTDAGDAKCLALFCRDKKPARWEAPSPGVRALQALVARLDALLSMRQAECNRLDAAHPSVVESVRRVIADLDEAIARVKAQISSTIDDDPDLKKRAGLLDSIPGLGDKTIPQLLAYIGRPERFKSVKALIAYASLTPFIRQSGSSLNKHRGTHPTGHQELKRVLYFPAMVAGKYNPLVATFWARLKAQNKPGKVIVVACMHKLLAIAYGVLRSGKPFDANHLEPAAA

SEQ ID NO: 294667 - protein, 316 aa, unidentified
MRNCIGIDVAKRNFDLHSLKTGQDRRMENSTDGIRQCVALCNKIRPELIVTEATGGYEMALAAALQAEGFAVAVVNPRRIRDFARAAGQIAKTDKLDARIIAKFAATMEPMPTEQISENTQKLKALVARRSQLVGLHTAESNRLQHADGKEIRRSIAAVLKVIEAQLKTIDRQITEHIENTPQLRKRSEILDSVPGIGPVTAHMLVTELPELGRLNRRQIAALVGVAPIARDSGTFRGKRMTGGGRKKIRSRLFMPTLVAVRHNPILRDYYNKLLSRGKCKMVALVAVMRKLICILNTMARNNQKWNPNLKKSLDF

SEQ ID NO: 294668 - protein, 407 aa, unidentified
MRPIYERCCGLDVHKKTVMACRLTPEGSQTRSFGTMTGELIQLREWLLAGGITHVAMESTGVYWKPVFNLLEDQGMELLVVNARHVKAVPGRKTDVKDAEWLAELLQHGLLKASFIPDRQNRERRELVRYRRSLVEQRSHLVQRIQKLLEGANIKLGDVASDVMGVSGRAMLQALADGVDDPAAVAGMAKTALRKKIPELERALTGSVGHHQRFLLRSQFRLLESLEAEIAALDGEVAERMRPFQTALDRLDEIPGIGRRAAEQILVETGTDMSRFPSSAQFASWARVCPGNNESAGKRQYASIGGGNRWLRSALLEAAWSVSHSRKQTFFTARYRRIAARRGKKRAAIATAHSLLIAVYHVLRDGVVFQDLGPAHFEHRNREAIARRSLHRLEALGYKVTLESLPA

SEQ ID NO: 294669 - protein, 464 aa, unidentified
MTDKKPWRNRKERKEWGRRLQSEDPGLEVVHPHAAGIDVGNGMHYVAVRPDRDPQPVRRFECFTADLHCLAEWLQRCGVKTVAMQSTGVYWIPIYEILEERGIQVYLVNARHTKNLPGRKSDVQESQWLLKLHTYGLLNNSFQPPSEIRVLRTYWRQRGEHVRGAATCVQRMQKSLTQMNVQLANVISDVSGLTGQTIVRSIVAGEHDPRKLAELSDPRIHASREEVAKSLEGNWRPELIFVLQQEVVMYDTYQQRIAECDQHLQKHLASFADTIPLRPTAEEPKRKKTKPAKNAPRFELRSELQRVTGVDLTRIDGIDVMVAQTLISEVGLDMSRWKTEAHFSSWLGLCPDNRTSGDKVLARGTRRVINRAATALRMAAVTLMRSRTYLGAQYRRLRTKLGAPKAITAMAHRLARLVYRMLKYGQRYIDKGAEYYEHRYRRQQIEFLTKKAAKLGFQITLAQP

SEQ ID NO: 294670 - protein, 335 aa, unidentified
MLYAAIDIHKHAFQAAVLDPETGSVVEARFSADRECLGRWAEEWRGRVAAVAIEATTGWRWVWRELVSYGFEVQLAEPVQARALLGRRRTAKTDRLDARWLARLLAKEMLPASWIPPEEIQQLRDRTRLRKALAEDRRRWGQRLHAFLLHEGWPCSKARLLTPEGLRWAAALKLPEHARLQVDSLLAIIGALEAQLDTVDAELRRFARTDQRCQALQSIYGIGPILACHLLAEIGEACRFRRAEQITRLAGLDPVVDESGETRRRGHLAKAGSPHLRWALVEAAVHANRQSAPDVAVYRATRARRDATVARLTVARKIGKRVYHALRELELEAAA

SEQ ID NO: 294671 - protein, 409 aa, unidentified
MEVLHPRCAGLDVHSETVVSCVRIQEKGRARHEVRTFSTTTKGLVELRSWLVAEGVTHAAMESTGVYWKPVWHVLAVAIELLLANAMQVKNLPGRKTDVNDATWLSDLLAHGLIRASMVPPTQFQELRDLTRTRTQLLAERSRHIRRIQKALEDANVKLTNLMANVMGVTGRALLEALVSGKRIDESFVDASRRGKLKSTTEQMMEALQGEVRPHHRFLLDLHIRQYDDLSRAVEAVESRIEKLMEPFHVELDLLKTIPGVKGATAHTLLAEIGPDMSRFPSSAHLVSWAGLCPGHDESAGKRRSSGVRRGPRWLKTALVQAAWAAARKKDSYFRAQFHRLRARRGAKKAIVAVAASILTSAFHMLSRQVAFHDLGGRHFDQHDPDRTAKRLIRRLKDLGLNIQIRSAA

SEQ ID NO: 294672 - protein, 420 aa, unidentified
MPDDRCRLGSDDVVIGLDLASVEHQVVVLTADGQRLTRFKIPHSRVGLEELLRRTMPAALSRTGGSRVFAFEATGHVWEAVAYILRARGERYVVINPLTTFRVREARQLSREKTDLTDAEQIAELCRSGLVTRTQLEARPYLALRRAWGEYRRLREERARLKVLVAHQLYGLFPEFLRVWADLLPPGALAVLRTGLSPPRWPPCPSGSSWPVCASTAPVAESGASSWRRSTATRSKLSPAPTASTSSHAKSSRAVARIDVLTAQMTTVATEVDALLADLEETPYLRTIPGLGWASVAGLLAHVGAITKYRHGRQLIKLAGTNPSRRDTGQTVGRGQTMSRRGRAGLREVMYLATISCLQHNPRIRAHYDRLIQRADRPLSKMQALGACMNKLLLYAFAVMSRREAFQLDHDWQRTMSRVA

SEQ ID NO: 294673 - protein, 344 aa, unidentified
MLYVGLDLSRTRLDWQALDGEGAVVGIGAVPPDGDELARLARRLPELPVVAVIESMTGARFVHDRLELAGWEVRIADAVKARGIAPLACTTDKIDCWVLAELARRELVPEIWLPDPSVRAERERARLRLQLGKQRSALKNRVHAILFQHGIPCGTRDLFGAGGRRMLKQLALPEPWASTVNASVVLIDTLAEQITGCERELRALGADHPSIPPLLTCPGIGWILADTIASEIGDIDRFATARNLVGHSGLCPRVEQSGERDRRGPPRKNGPNYLRWALVEAAHTACRHPAYKPIRERMSSRHGKKRGTKIAAIEIGRRLSEAIWHTLTTNQPVAPAGAPASLAA

SEQ ID NO: 294674 - protein, 315 aa, unidentified
MTTHVGIDVAKDRLDIAVHESGEALAADNREDAFAELIERLKRLDPALIVLEASGGYEQALLFALLAAGLPAALVNPRQTHNFAKATGALAKTDRIDARVLAHFAATVHPAVAAPPSPERLALTELVNRRTALIEMLTAEKNRLRLAKTKVARRLIEQHIAWLKRQLKDTDQELKGVIARSETWQALERLLSSVPGIGRVATASLLALLPELGRLNRREIAALVGVAPFNHDSGRYRGARRIAGGRGAVRTVLYMCAVAALRCNPTLKAFYDHLKRQGKPSKVALTACIRKLLVTLNAIVRDRKPWQSRPANASA

SEQ ID NO: 294675 - protein, 377 aa, unidentified
MKTMTRIGLDIAKQVLQVHGVDEHGVVRIRKTLARAQVLEFFAQLPPCTVGMEACAGAHYWGRELTRLGHTVKLMAAQFVTPYRKRGKNDANDAEAICEAVGRPNMPFVAIKTEEQQAVLMVHRARSLVVANRTAQVNQIRGLLGEFGLTVPQGVASLRKHLPRLLEDAENGLPMLAREVLAGLLTQLHTLDQDIAQYDAKIRALAQASEPARRLMQVAAIGPQTATALVASMGDPHVFQSGRNYAASLGLIPRQHSSGGKNRLGAITKQGDRYLQTLLIHGARAFGQPFTKNPLWWRNSYGRPGRAAPTTRGGRYAVFAGAHLWGFSKNPSGVRSPYPLRRLSKGPSSDQMGRWVRFMAGALCGGNGANSRDRERW

SEQ ID NO: 294676 - protein, 307 aa, unidentified
MTAVGIDVGKASLDLAVEGHSAVTRFANNRGGIAKLVKRLQAVASPRIVVEATGGYEDPLLEACCDTGLWVARVNPRQARNFARATGELAKTDAIDARMLALMARLFADRLRRYEAAAPWQRELRDWLRRRGQLVAALQAHKQQAAMAPTKVRTLASRTIAAVKRELAAVDAAIRALIEQHATPAVHARKGLGPVFQASMLSLLPELGQLSRRQIAKLVGVAPMNRDSGQGQGKRRIRGGRAPVRVALYMATLSAVRWDPLMKAHYQHLRARGKLGKVALVACMRKLLGIVNAKRRDELRQQALIAT

SEQ ID NO: 294677 - protein, 418 aa, unidentified
MSDSKFLYVGIDVSKASNQVYAMDSDEKKFLSFSSPNNSEGASAIEQRLFEVLVKFAFTDVVIILESTGMYSYHIAVFLAASELLAKFNVLVFNINPKTSCNYRKTFCDLDKTDPKDSFLLADMARSGKYKQFTPVRGSQKLALQRLTRHRKHISELIGREKCYVLNNIFLKFSAFDSKIDGKSVFSDTFSASATEILSQFKTPEEIENSSIEDLVAILAKASKNRFENTVEVANLLKKCARLSYRLDKAAYDPINIAIASSLCLIRTFEKQLESIDKEILNLIKGLQTNEYASLISIPGIGPVFAAGILSEIGSVKQFANDSALAKYAGITWRTKQSGKFAADETPMTKTGNNYLRYYLLEATSMAILHNPEYRAYYLKKREEVTTHQHTRAVALTSRKLIRLIYGLVSKDQLFASI

SEQ ID NO: 294678 - protein, 343 aa, unidentified
MNVNTIGVDLAKNVFQVHGVDSAGKVVITRQLRRKQVLDFFSKIPGCLVGMEACGTGHHWAREISKLGHTVRLMPPSYVKGYVKRSKNDAADAAAICEAVTRPSMRFVPIKSTDQQALLMLHRTRDLLIRQRTQLINALRAHLAEFGLVAETGREGLAQLGAIITDESNHEALPSAMKQALQAIVDQLAALELQVGALDRAIHAHHRANDMSCRLETVPGIGVIGATAIASTVTDPSGFKSGRDFAAWIGLVPRQHSTGGKERLGGISKQGDRYLRRLLVIGATAVVRQARLHPQKHPWIMRLLAKKPAKLVAVAVANKMARIAWAIMAKGGHYRAPELAAAT

SEQ ID NO: 294679 - protein, 357 aa, unidentified
MSTYYIGADVHSNSTELAIEKRGKIVARYSVPTSIPAITNVLDSIQGKKYMAVEEGPMSGWLYRNLNDKLEQFISSDPRRNKLIASDGDKDDKIDAAKLASLLRGGYLRAIHHSDDNSQAELKHWVNLYHDRVRDAVRGINKIRARCRMHGVKISRAALRDPASRANWLQKTDHNALANQLRMLWIGYDATVQQVKFAKRQLSTLSKKHEIITQWSLLPGIGLIRATTIFAYLDTPWRFKKKNKLWKYCGVGLQRTTSGTDKKGKPKPARLKLPWAVNRTLKNAVLGAALSAINQKNNVFKDYYERMVQGGMITSNARHAVARKMLTVMWGMWKTNSRFNENYVFLSNRTTISLSKR

SEQ ID NO: 294680 - protein, 342 aa, unidentified
MKFYCGIDLSARDCHVCVIDEQLKIVIEQKLGNELTKICQLLEPYKANLKIVVESTFNWYWLIDGLQAEGFEVVLAHTLGLYLITGAKVKTDRRDAYSLAKLLLVGAVPTAYIYPVETRPVRELLRRRLHLVQVRAGEYGSLRRLLLRQGILSRKQQEIKTATETELEQWFAHPLVRLHASQELQRIELYSHQIAELEQTILALTKTEHSYELLLKLPGVGQTIALTILYEVGELTRFANVKDFSSYCRVVPGIAQSGNVTRRGRASKQGNHYLKAAFSQAAVHAVRCYPKVRRYYERQLKRHQGRGRQMICYHIIAHKLAQAAFHVLKEQTEYREELLFGR

SEQ ID NO: 294681 - protein, 344 aa, unidentified
MKHYAGLDVSVKETSICIVDEIGKVCRELKVASHPEDLLRVLQDPAWNLVRVGLEAGPLSQWLFNGLAEAGVPALCIETRHAKAYLKAQINKTDRNDARGIAQMMRVNLFRPVHVKTLASQKRRALLTARKLLQEKAIAIENDIRGLLRNFGLKVGVASAVMFEQRIRELVEGMPELGELMEVLLDARRKLREQFSKLHRKLLSIVREDEVCRRLMSVPGVGAVSALAFRATIDVPSRFRNSKAVGAVLGLTPAQHQSGESNWTGRISLCGDAMMRTLLYEGAQSILTRSVKWSWLKAWAMKIAKNRGLKRAIVALARRLAVIMHRIWVDGTEFLWTKEEAVSV

SEQ ID NO: 294682 - protein, 361 aa, unidentified
MKDTTIAVDLAKSVFQVAVSHKPGRVDAERRLSRDRFLEYLAKQPPATVLLEACGSAHHWARQLQPFGHTVRLLPAHDVHRYVRRNKTDRTDAKALLEADRNEEIHAVPVKTIEQQSIAALHRMRSTWLATRTARINTVRGLLREFGMVIPVGAPHVVPHVRELLATSSHVPDLMRTSLSSACDEIETLEQHMGAVERQLTALARSRDDVKLLQTIPGVGLLTATALVALVGDVRRFHSSREFASFLGLTPKEDSSALRRRLGAISKQGDAYLRMLLIHGARSVLLRAHGAGDATAFQIWARTTQQRRGHNVAAVAVANKLARIVWAVWRHQRPFAADYRSTITTQTATISTHQEDCTELT

SEQ ID NO: 294683 - protein, 388 aa, unidentified
MIYVGIDVAKDKHDCIIVDSDGVIRFPTFTIPNNKQGFRELLTNLKTCGSDFAQIKVGLEATGHYSDNLLEFLIANDLPTTVINPLHTNLYRKGLSLRKTKTDKVDAHSIVTMLRTEDLKPYSQSSYHVRELKSLTRYRFSLVQDCARLKSSFARLCVILFPELEKLVPSLHMASVYALLAEFPNAKAISESHLTRLTNLLSEASKGRYSKDKAIEIRNAAKASIGSYSEVKSLELQQTIQLIQMMEEQIAQAEARINPIVDSLHSPIMTIPGIGYRMAAIIIAETGNFANFDKAEKVLAFAGLEPSVYQSGQLTSTHAKMVKRGSKYLRYALFNAAKYVCHWDDGFRQYLAKKRAEGKPYNIAVSHAAKKLTRVIFHLVKTNQSFSR

SEQ ID NO: 294684 - protein, 314 aa, unidentified
MDATRYVGIDVSAATLDIAVHEGSLTQERNDAKGIAAVVRELQASPPTLVVLEATGAYHREVTSALAAAGVPVAVVNPRQVRDFARSTGQLAKTDRLDAALLARFAAVVRPTPRPVPDEATQALVAILERRRQLVEMLTAEKNRLGVASKHVRPSVQQIIRALEKALATTDDEVDRWIRSSPVWREKQDLLRSMPGVGPQTARLLIAALPELGHLTRREIAALVGVAPLACDSGTKRGQRRCWGGRARIRAVLYMAAVAAARFNPVIRALYRRLRAKGKPAKLALTACMRRMITILNAMVKTQRPWRAPALVTP

SEQ ID NO: 294685 - protein, 337 aa, unidentified
MEHFGIDLHQKHSEICGLDASGKGKVQERVATSETGLRKVFGKRKSCRVVLESGGQSSWAARLLGEMGHEVVVVNPRRIRLIAESSLKTDRIDAEILARLARQEDSQLRPVYQRSEGAQELRTRLRVRTSLVRVRTALINSVRGTLRAHGYRMSSCLAARFAARFVDLKMEAELRQVLDPLVATIAEVSTRIEHLEKDLVEESGSDELLVRFQEVPGVGPLVSLGYIGWMDKPERFQRSRDVGACLGMRPKVRDSGDRQWRGPITREGDGEMRRLLVQAAHAALHCRRDSALKRWALQLATRVGKRKAVVALARKIAVLLHHLWVTGSSYQAFPKAA

SEQ ID NO: 294686 - protein, 388 aa, unidentified
MRQSTPVQFGRLFVGMDIHKDNHAAVAVNCFGDPLFKQELGNEVKDFNQLIARVQAITKERQLNPVFGLEDTSGSGEFLARFLFNHGYEVKTINPVLVKRERDYETHPEKSDLADALGVAKVLIQRIDSVPAYNISETTEVSRDIRALTKDRETIVLEQTRLKNQLHALLHHSFGSMYKSLFRDVFAKKALLFWHNFPSAQILKSSRKRNTAKPDWITRRSADELPHASETQANQIRRKVKRLLAIREELNEIEKELDGLLGQTGQKLDTLPGCGPTLSAVVLAEIKDINRFSSPAKLAKYAGCAPRKLESGKRRRHVKTRSGNRRLNKALYQIALTQISNQGILKAKAYFQKKVNEGKSKKHALTCLKRQIVDIIWSMLKEKRAYYS

SEQ ID NO: 294687 - protein, 355 aa, unidentified
MNSIKYVGLDVHQSTISVAVLDSDGKLVMQSVLATQARTIVDFFHGLRGTLHVTFEEGTHAAWLYDLLVRRVAELVVCNPRKNALLKAGNKSDRIDARKLAELLRAGLLSPVYQGQRSTAAVKQLGRSYSALTEDTTRTMGRLKALYRSQAIACAGQKPYGSRHRESYLAQLREPGLQRRARRLYQQLDLLQQLRRDARHDLLLECRKHKESTWLRSIPWLGPIRTALLIARVQTPHRFRTKRQFWAYCGLALETRSSADYQIVNGQLQRRSKPVFIRGLNLNHNHELKNLFKSAATTASGSRGVLGSFYQNLLLKGMKPELARLTLARKIAAITLHIWKKGEPFDADYLKLHAA

SEQ ID NO: 294688 - protein, 353 aa, unidentified
MTNGSSLNETMGLDLSDKTGVYVVLDHEGEVCREGKVALTRQALSRAFGGGSPCLVAIEVGTHSPWVSRELALLGHEVVIGNPRQVKLISQNKKKSDREDALLLARLARLDRRLLRPVQHRGEQAQADLAMLRARSLLVAGRTSLINSVRGMVKTTGLRLPRCSAESFATRAQPHLPRELVPALEPLLAEIASLTARIKQITHAIEHAAAERYPETQQLRQVPGVGLICSLTYVLTLEEPQRFRRSRAAGAYLGLVPRQRQSGEQQPQMHITKAGDVALRSVLVQSAQYILGRYGPDSDLRRWGLKLAGEGNKARRKKAVIAVTRKLAVLLHHLWSTGQVYEPLRQADLQTVG

SEQ ID NO: 294689 - protein, 327 aa, unidentified
MKKNPAPVYVGMDVAKATLQVHLNGHQFEFKNDSAGHARLSKQLAKLTRPHVVCEATGGYERPVVEACHKANILISVLNPAHTLAASQAQGKRAKTDPGDAAALTDYGQRFQPEPTAPVPPAEREITELTLWLKQLIDHRAVVRTQAEHQANSFVGQRHEELLAHYQSQIETVEKEIKKLVQAQARFQQRVDCLTQIEGVGFRTALLTLVFLPELGSMNRGGTAALAGLAPWTRESGTMKGKRCIGGGRAQVRPVLYMAALSASRCNPVLAPFYQNLIKRGKPAKVALTAVMRKLVIHMNGELKKLAAKPVNEKTGKSNKTTKSLAK

SEQ ID NO: 294690 - protein, 388 aa, unidentified
MQVVAAESEAPISIRTDLCAIFVSLELRRSTWLVTSLSPGAGEKMSKHSVSASDTAGLLKRFADLQQKARTRTGRTFSIITIQEAGLDGFWIHRLLQGEGIESWVVDPASVLTSRRRRRAKTDKIDGETLVRTLLAYKRGEPRVCAMVKAPTPEEEDRRRICRERKTLTAERVTHVNRIKGLLFAQGIGDYEPLRRNRRGRLEELGTGDGRSLPAHLKAQISRELDRLEIILAQLKAVGSERDAMLEPAKEGPPTPASLLAQLKGIGPEFAAVLWSEGLFRSFNNRRQVAAYAGLAPTPWQSGSVAHEQGVSKAGNPRLRTTMIQLAWLWLRHQPDSALSLWFRERVQRNGGRGKKIAIVAMARKLLVALWKYAVHGILIDGTKTKAA

SEQ ID NO: 294691 - protein, 407 aa, unidentified
MFDRVAGLDVGKDSATVCVRVPGPRGGRRSQTRTFKTTTGSLQVMRDWLLKEQVSIAAMESTSTYWKPPFYCLEEVMDVWLLNAAHMKAVPGRKSDVRDAEWIAQLLEHGLLAPSFVPPPDIRRLRMLTRYREQLMGDRTRELVRLELMLEDASIKLSSVVSSLKTISARAMLTAMIAGETDPLVLADMAKGKLRRKMPELAQALTGHFDANHARLARSMLRRLDLVEQALAELDAVLVDAFQPWQHQIKLLQTIPGVGPKVAQVIIAETGGDMARFPTAAHLAAWAGLAPAMHESAGKQSPAGKRHGNKWLSGMLVEAAGSVARMHGKNYLAARHARLLKRRGMRRAQVAVAHSILVAAYWMLKRDEPYHDLGADWHRRRNDQAHTRRLVAQLEHLGHTVIINPAA

SEQ ID NO: 294692 - protein, 346 aa, unidentified
MEISTIGLDLAKNVFQIHGISATGEVVIRKALRRSQMLPFFEKLPPCLVGAEACGTSHHWARELTKLGHKVRLMPAAYVKPYVKRGKNDAADAEAICEAVTRQTMRFVPIKSREQQAALSLHRVRNLLIKQRTQLVNMMRSVLAELGVAIPVGISKALQIAREIVDGESKLDLPVEAANVIAMLAGQLLQLHAQLRKLDLRLAALQRSDDRARRLATIPGIGPIGATALAASVTDPSQFSSGRQFAAWLGLTPRQSSSGGKERLGRITKMGDKYLRQLLVIGATALVRYAKQKPDTVDPRFVALLARKPARVVSVAIANKTARIAWALMARGGVFERGHAPMLAIA

SEQ ID NO: 294693 - protein, 341 aa, unidentified
MTEIIRSGVDIAKNVFEVHAVNAQEQVVVRRSLRRNQVLAWFAKLPPCLIGMEACGTAMHWARELSGLGHTVRLIPPAYAKAYVRRNKNDPADARAICEAVGRPSMRFVPIKTLEQQGEAVTHKARQLLIKQQTMTQNSLRGLMAEFGIVVPQGPQHISKLLVILADPEDPRIPAVARTALNAMADLLAALEQQIETLDKTIRAQVRANPTARRLDTIPGFGPILSGAIAAIVADPRHFDSGRDFAASLGLVPRQDGTGGKVKLGPISKRGNGYLRRLLVNGATAVLNGKNARNDPWQAKLLDSKPKKLAAVALANKMARIAWAVMTRQETYRPRTVAAAA

SEQ ID NO: 294694 - protein, 343 aa, unidentified
MLTKNVIAIDLAKNVLQACHISIHGELLSNKPLSRQKMKEFLAKAKPSIVAMEGCCGCHYWGQLAEKFGHEVRIINPKKVKGYLEGHKTDHNDALAIANAAIQIGIKYSRPKSLEQQSKHSLESSRRFLSRNVVSLGQHIRGTILGYGIANPRGEKGLKASVQTVLDGETSIPVNVVSVISMLWEQYKQLNAKLIAFEKEKNALTRQIEPCQRLMEIEGVGETTAAMLYTTLGDGKQFKNGRQASAFVGLTPKQHSSGGKVFMIGIDKCGGVKELRSLLYLGAMSYVGRLPEKPKTQKDAWLRSIIDRIGFKKACIALANKVVRTAWAMLRYETEYKPVLITN

SEQ ID NO: 294695 - protein, 348 aa, unidentified
MNVHTIGIDLGKTVFHLVGLDQPGNVVLKRRPSRSQLLRQLANTPTCLIGMEACCGAHHLGAALVAQGHEVRLIPPQFVRPFVKANKNDYKDAEAIAEAVQRPTMRFVPIKTQDQLDLQALHRVRDRLVSRRTAVINQIRAFLLERGITFRRGRKYLQQRMPLILEDAEQNLSPLLRQLLDQLWQEWKVLASQIEAISGQIERIAQQDAVCQRLQQIPGVGPLVATATVAAIGNGSAFVKGRDFAAWLGLVPRQHSTGGKAKLLGISKRGNPYLRRLFIHGARSIFTQTHRDRLALNAWMNELEHRMHRNCAIVAVANKLARIAWAVLAKGANYHWPGTDQLEPREAG

SEQ ID NO: 294696 - protein, 339 aa, unidentified
MRMIGCDFHAGQQTLAMLDRDTGEITRHTLRHEGDSVGMFYRALRPPVVVGIEATGALGWFLQVLDELGITYYVGHPAKIREADSRKQKHDRRDAGLLLQLLVEHRFPAIWLPTSEQRDLRVLLQHRDQWVRLRTRVKNALQAMALGQGIRRRAALWTHEGQAMIAAWPLPLHAGHRRDELQALCRHLDDQIDRLDAAVAEQARQRPPSMLLMTHPGVGPVTALATEVFLGDASRFTNGKALASYVGLIPSEYSSGARQRLGALSKQGNPLLRFLWCEAAIAAVRRDVVLKRFYGRKLHQKGLGKARVAVARKLGIRLWIMLRDRIDYQEFCRRRPTSN

SEQ ID NO: 294697 - protein, 309 aa, unidentified
MEIVVGIDVSKERLDVAILPQEEVFAVGNDHAGIDELVERLKGIGVDAIALEATGGFEMLAVAGLSAAGLTVLVVNPAQVRAYAHAIGRRAKTDPIDAAVIAAFVLATKPEIRPLRDAETQALSELVARRRQIVQMIVAEENRLRMALAKQAQKSIKRLLTALRRELESLDADLDSHIRKSPVWRVREALLTSVPGVGATTARTLLAELPELGSLDRRQIASLAGLAPWTRQSGKWKGKSFIGGGRGKVRAVLFMAALVASRYNPDLKAFRDRLVAAGKPKIVATVATMRKLLTILNAIIRDGRPWQNA

SEQ ID NO: 294698 - protein, 350 aa, unidentified
MGDRITYVGLDVHKDGIVVALAEDGLRGEVRDYGRIANTPAALQRLVRKLGQEGVELRFCYEAGPCGYGIQRQLSASGHDCVVVAPSLIPKRAGDRVKTDRRDAGGLAKLHRAGELTAVWVPDPGHEAMRDLVRARLDAVRALRRARQQLSGFLLRQGCHYRRPAWTKLHRRWLAGLKFEQAVHHIVLEDYIATVEAAEARRDRLTAQIEAMLPDWTLAPVVAALQTMRGMALVNAATLIAELGDLSRFANPRQLMAHLGLVPSEHSSGASVRRGGLTKAGNSAARRLLIEAAWTYRFPARLSRELLLRQEAQPKPIREIAWKAQLRLCALSQTCPQRQTSQRRHGRDRP

SEQ ID NO: 294699 - protein, 412 aa, unidentified
MEVVHERCCGLDVHKKVVVACLIVPGKDGRRHKTVRSFGTMTADLLALADWLSEEGCTHVAMESTGVYWKPIYNLLEGQFELLVVNAQHLKAVPGRKTDVSDAEWIADLLQHGLLRGSFVPSAAQRQLRELTRYRKSLITERTRSINRLHKVLQDANIKLSSVVSDIMGVSSRSMLEALSREQSDPSQLASLARGRLREKRSELEKALDGIVKSHHRFMIVAHLEHIDFLEQAIARVSAEIEERLRPFEAELALLDTIPGVSQRTAEVLLAEIGADMTRFATHRHLASWAGMCPGNNESAGKRKSGKTRKGSPWLRCALVEAAHAASHSRDTYLAAQYHHLARRRGAKRALIAVGHTILVIAYYLLLRKEAYREIGGNYYDERDRHAVQYRLVRRLNNLGYQVTLTPAAALA

SEQ ID NO: 294700 - protein, 415 aa, unidentified
MSENIITAVGIDVSKGKSMVAVRQPGGKILLGPFQVEHNALGLKQLTETLKCIDGEIRIVMEHTGMYWRPVALTLKEAGLFVSVVNAILIRKFSDNLLRKVKTDKADSLKIANYALAFWNELEEYSLEEENRQMLKVQSRLYERTIKGSVSLRNGLISLVDQVFPGANDFFSGSPKESNGHFKWVDFIRHFWHKDCVTRLSLNGFAEKYRKWCNREGYRFISSDVARIYKAALESTATFPKSDSTKILIRQAADSLNAVYDTLHILRAEMLRLARLLPEFDVVMYMYGVGNITGSQLMAEIGDVRRFHSKSALVAFAGIDAPPFQSGNFEGSNCHISKRGSPHLRRTLFQISSTILKKSNPDSSIYQFMDKKRAEGKHFYVYMVAGAAKFLRMYYARVTGYLDAIEATENNNLTG

SEQ ID NO: 294701 - protein, 385 aa, unidentified
MSQLNDLSRSLTSLQQDNAIIAVIEMSQSSWLVAGIVPGIERHPLKKLEPNEGELLRLLMRWRAEATKMGCTITRIAVAYEAGRDGFWLARWLRAHDIETYVIHPTSVAVSREHRRAKTDRLDTGLLKRVFIGWLRGEPDHCHMVTIPTLAEEDAKRPNREREGLVRDRTRIVNRMKSCLARFGVRSFKPTLRKAPERLATLVTPEGVPLPANTLLELRRDMARLRFIMDQIKEVEEARAQRLEQAPQEKSHAMVRLLARVIGVGIETADMLVHEILSRSLRDRRAVARYAGLTGAPDESGSRRQEKGLAKAGNARVRRGMIQLAWRFLLFQKDSALAQWYCTRTESAGKKRKTMIVALARKLLIALWRLVTIGEVPAGVVLRAA

SEQ ID NO: 294702 - protein, 341 aa, unidentified
MKLIRVGIDLAKNVFQVHGVDRGEKVAWRRRLRREEWINIVRERAERGCEIGMEACGGAHHWARELQKLGYRVKLIAPQFVKPYVKSNKNDAADAEAICEAMARPGMRFVPVKTVEQQDIQAIHRVRASLVEQRSAKANQIRGLVAEYGLVAPKELLHLRRALPRWLEDEGNGLTARFRWLLRGLRDELVALDERIAELDREIEQIAQSEPDAKRLMQLRGVGPIIATAMLATVGDARQFRNGRQMSASLGLTPKQFSSGGKERMLGISKRGDAYLRSLLIHGARAVIRTARPKNDPLSRWVIRLADRSHPNVAAAALANKTTRIAWAMLSRGTNYEAAVN

SEQ ID NO: 294703 - protein, 343 aa, unidentified
MQVIIGVDPHKATHTAVAISTTEDELARKNVRATRAQVDQLLAWAEPFPTRVWAIEGADGMGYLLAQQLVATGEHVLNVPATLAARTRVLGSGRSNKTDPNDALSVAVTALRTRDLRPVQPVGHSEVLRLLAKRNTDIGDHRTRLVCRMHSLLLELTAGGIAKEINASDVDRFLAEVTPTTPAEQVRYDLAVELLEDIRRLDDQLKASHKRIRVAVAASGTTVTDLFGVGPILAAMLIGYAGDMTRFGNRDRFAAYNGTAPVEFSSGGRTVHRLSQRGNRQLNHALHMVAISQLRQPHSDGRAYFDRRVAEGKTKKEALRSLKRHVSNAVYRQLVADATRIRG

SEQ ID NO: 294704 - protein, 438 aa, unidentified
MSNKVIFNLDDLFISVGIDVGADFSWMSIALPNQQFVGKPYKILHNSIDSLTTAVSKIKEAEELYSLESRIFLESTGIYHYPLFCYLRDKGFNCSVINPIITKNSTNINIRKVHNDRFDSKKAALVGLKPDLKVSLMPSDLALNCRNLCREYYDLMDNRSAYVNKLQGELRMAFPQYLGIFSKVTINTSLTLLETYTSPSAFLKADKQEIIDIIKSTARFGLTYAQNKYNAIIQAATDANQFGYIIDSNIKRIRLYISFIRKYDEEINNILESLHELVDANEDADFVKQIHLIETFKGAGFLSAVSIMGEIGDFSAFSKPKQLFAYFGLDPAVKQSGKFEGTKVQMSKRGSAIARRVIHTLTLQSISISRNREAKNPVLREYYLKKCDSKPKLVAMGAVSHKVCNMIFAILRDNKPFKIIAPQEHIKQYNAAKCDIAA

SEQ ID NO: 294705 - protein, 599 aa, unidentified
MQVIYERCAGLTIRNRMVEVCVLILQTGGTVEKLLRNFSTRITDLLALEEWLGSLSIERVVMESTGEHWYLVYNLLEDGRHILPIQPQQLKALSGRKTDIHDCEWLADLLLHDQLKAGFVSPEPIRELPDLLRYRKMLLAERAREFNHLQKILEGTTVSLETIISEQHDAKVLKELAHGYLRPLFPALHLALAGQEHLYQQFLLQRIVTHVETCEDTLTGVQREIEQRLALFEELVTLLQSIPGMHLMAAIGILSEVGTDMSRFPTYKHLIAWAGVSSNSKQNGSRLLSDATTSGNRHLQVILNDVAKSIAHSEEANYLTMLYTRTVYWGGKRRAIREVAHTVLMITYYVIRDKKMYRDGADYSDKRNAVYSGQYNNRRSKGLRYTVPLAHPVQATRETRALFSAVETRSNVWRLFCIWAWIGLTSFGGGASSIFLIQREFIEKRNWVTSKEFSHFWNLCGVTPGTSQIALSILIGQKLAGTPGLIASMVGLVLPSAVVTYLLAAGFQRIESIPIMQAIWRGIIPATSGLMFLVALRLAQPLIAQGRQEGRPALTISLVMILACVIAIIFFKITIIVVLLAASLAGIILFTTVRSRSRE

SEQ ID NO: 294706 - protein, 431 aa, unidentified
MDKVIIGVDPHKLSVTIEARDSREILRATGRFGTDARSYQQLLRYARQWPERIWAVEGANGIGRPLAQRLLASGERVLDVPAKLAARARVFDTGQGRKTGPADAHAIVMVALRDKRLRELSPDPGLAVLRLLCDRRDELSGARAQALNRLHRLFLELIPGGAPVKKSTAQYRALLAAVRPRDPAGKTRRRMAAEEIADLEHLDAKLKAMKAELKAAVLASGSHLMDIHGFGPAGAARILADVGDVARFPGRAHFASWTGTAPIDASSGQHTHHRLPRAGNRRNGHVLDMAGIVQLRHDTPGRAYYRRRVADGKTPMEAMRCLRRRLSDAVYRQLGADARAPQAGPGGHSGATLSSSAAGLPPVTGTSDQPLPGPAPTTLPPPPVRKTPPPAPAGATRRRRAGGVNMERPAGRTTLTPTSAGAHSKPPGPPT

SEQ ID NO: 294707 - protein, 365 aa, unidentified
MTKIAYVGIDYHLNSLSIAVLIEGEKEPDQMVHLKNDDRVIRKFMSKISQNFQIKACYEASTNGYCFQRKMASWGYHCDVIAPSLIPRKPGDHRKNDFRDARALAQNHAHGMLSIVHLPSEEEESVRSLVRCRYAFKEISKRVKQQINSFLLGQDQHWKHSKWTHQHRTWLGKLKMSNSHLQQVLEEHLAHLDYLETRLRHLNEQIEEIAALPRYAPAIKKLCALKGIQTLTAMLLIAEITDFRRFPTPRALMAFLGLVPSEESSGEKRKGGAITKAGNQRCRTALIEAVQNYAKSSHISTRMKSALSQVDALTATIAMKCLKRLHKRFWALTLKGKLRPVAITAIARELVGFIWAMMQTEPSLA

SEQ ID NO: 294708 - protein, 388 aa, unidentified
MLYAGIDISKYKHDCFIATDLSEVVNDGFSFTNTAEGFAKLQKELELCGKGNVRVGFESTGHYGVNLKLFLEKIGVEFMEINPLLVKQHIRSNTLRRTTTDKICAKAIAGYMISKDFRPHQPEFYSTFALKQLTRFRSSLVSQRSRYLVGITNVLDYVFPEFKPLFGNKFSVTALYILANYPSPEAVANMNSRSYDILRRVSRGHFSMDKFVKLKTLAKNTVGVFDNCYRIEFETLLDLHSQIDSKIDEVEFKIAEIIAVMNPPTLSIKGVGAMSAAVIVSEFGDFSRFPNPHKMLSFAGLEPGYFQSGTAEHNGRMVKRGSAPLRCTLMNCSRAIILHNETFSTYYHKKIGEGKPHCIALNHVAKKLVRLIFALETKGEMFNPDLLK

SEQ ID NO: 294709 - protein, 330 aa, unidentified
MYLGIDTHTQYSQVAVVDDDGNLQDETRLPNDRLDELAEEYTGSEAVIEASGHYRPVYEMLDEHLDVTLANPSKNRIIADATVKTDRIDAKRLAHMLRADMLAESYVPEDEIRELRDLVRTRKSLVEERTAEKNRVRAVLKRTNNSYNSELFGPTGREFLAELSLSDTDRKIVEAHLSVIDEFTEQIDRLEDTIEKKVLESPAAQRLLSIPGVGQSTAALITAEVGEISRFDRHEELVSYAGLDPMVHQSGETDVHGSISKEGSAPLRWALVQCAHVSVKYDDYLGNFYTRLKRRKNHQIAIVATARKMLVSIFYMLKRQEPYDPPEVSA

SEQ ID NO: 294710 - protein, 473 aa, unidentified
MSKDSGTTRGDRRRNARRERLRAMVPRGGVVVGIDLAEDKQAIGVLDHDLRVVARKTVRVKVFRLGPALDWAIGQARAKGSGQVTVACEPTGPRWLQVQRLCSERGVPLVCIQPLVSHIAREQQDYTTHKTDEADCVMIARLAIELHCYIPEVLDETWADLRHLGRRRAQLITSATASVQRLRDFLSVCWPLAVEACAAPFGSLTWLAAMQVVTSRCGGDPGGLAALGLEEFTALVRQAMADWGGQRPYAPVCARVFAELSSTEGVVVSCRRGLLRRCAGELESLRRTRAQLREAEAGLVAVLEELGLSRLGDIPGLSAVGAAAILAETGDPRRYETSSSLVKHAGLAPSDNASGAFEGQAHISRRGRPGLRLAVWRAVWPLLMHNPVTAAKYQAMTQAADAAAEAAAKAGPGIRPAAAAAAARARRAKARVACAASLLRWIYSMTVHDTSWDAGAASGAASRPAPGRQAQAA

SEQ ID NO: 294711 - protein, 421 aa, unidentified
MKVVYPVCCGIDVHKRFLVATIVSVTKMQTLSYKRERFSTFNKNLQRLKHWLIENGCYDVCMESTGKYWVPVLNVLEPEMHVVIANPKWVRAVQGHKDDAKDSKWIAELFCFGLVKGSFIPSKDIRILREFTRYRAKLTNMRSSEKNRFQNGFTVCNIALDAVVSDMFGTSAQRITKYLLTDKEPTAQHCSSLLHRSLKKKAVAVVESIEGFQLTEEQKFRMLQIRQHMEYLNAAIQVLDEKLDQMAAPYAAAIRLFCTIPGMGRESALTILSEIGTDMTQFGSSKRLCSWAGLTPGNNQSAGKKKSVRITRAGVYIKPMLVQVAHAAVKCTSQPYYKVKYENIARRRGKKRAIIAIARMILTAIYHMFKTGEVFCPTDLRQIDMPEELKEKRRSRKIQNAIHLLKQQGILSETFVAPTCA

SEQ ID NO: 294712 - protein, 364 aa, unidentified
MQYVSNNTELSSHEETRCQFNGSTGVIKLGIDVHQQFYTVVVQEGGSNPKPPQRFRKEAFLHWAARLKQQGAAVHAVYEACGFGFGLQRQLAALGIACHVVCPQKLDEHNRRVKTDSLDAKALCLKLDRFVQGNQDALALVRVPTEQEEQLRAIHRQREQLVKARKQLEAQGRSLIVNHGIEPVQSWWKLRTFAALPVPAWLKELLANSQPILIALQEKIRVLSLQLQSAAGPDQPRGLGAMSSVVIDREIGNWHRFRNRRQVGSYTGLCPGEHSSGNTRLQSCVTKHGNPRLRAALVELAWRLVRFQPNYKPVLKWRSTLCKGALATGAARKKAIVAVARQLAVDLWRIRTGRVRAETLGLIN

SEQ ID NO: 294713 - protein, 397 aa, unidentified
MIAVGIDISKAKSTVAVIDSDGTVLASPFTMAHTQPEMEAFVTYLKGLGEPTTILMEYTGHYHYPVLKKLQDEGFPVCIVNPYQMKKYGDVEIHKAKTDKKDALRIAAYALEKSYKLVPYSSMEQKYEDLKFLSRQYSQRITYVAKLKVQLIALLDQTMPGITRILPLNSRNPEKCALLLFIKRFKSFDEIQRIGKARFLASYDVLAKKASERSASSKGLSIYELAVDSITTRGEGPYIWLSQNQCVDLLSATQNAADEIISQMRNIAETIPEYKVLRAMHGVGDRLGPIILAEIGDVHRFHSGKALNSYAGNDAPPYQSGQFESRNRHISKRGSSTLRKACYEVMQALKLTKPQDDPVYLFMLKKEQEGKPFNVARMAGVNKFLRIYYARAMELYK

SEQ ID NO: 294714 - protein, 341 aa, unidentified
MQITTIGLDIAKNVFQVHGIDGAEKVIVRKQLRRGQVMAFFEALAPCVVGMEACATSHYWARELTKLGHEVRLMPAKDVKAYVKRNKNDAADAEAICEAVRRPTMRFVRIKSAEQQGQLMLHRARDLLMRQRTQVINALRAHLAEFGITAAQGREGIKELLAIVAHEEGSRLPSDAHASLTVLATQLQAVQTMIGSLEKRIVAQHRSNEASKRLETIPGIGVIGATTIAAIVPDPRAFRSGRDFAAWIGIVPRQDSTGGKQKLGPISKQGDQYLRRILIVGAHAVLRRARQQPEKYPWLTQLLARRPFKVVAVALANKMARVAWALLAKGGTYRAPQLVAA

SEQ ID NO: 294715 - protein, 422 aa, unidentified
MNTTDYAVCVALDWSDQQHAFALQFAAANSKETGMIPGSPEGFHHWLEELRTRCPNQRGAVILEAGRNSVVHMLVEHPWLDIFPIHPATCARFRTAFTPSGAKDDVPDAEILLTLLLRHRDQLHQLHRDTAQTRELAALVVARRHAVDRRTQIGHQLRTTLKSYFPQALQLIGEALEHPMALDFLSRWPDLVSLKKARAATLRTFYYLHRARRPELIEQRIKLIGAARPLTQDPAVVAPAVMQVQMFVELLRVQEKHVARFDEQIAELFAAHPAAAFFRQLPGAGASLAPRLLVAFGDDRSRYPTPSSLQQYAGVAPVLERSGQKSWTHWRWHAPIFLRQSLVEWAGQTVAFCPWAKAFYWQHRNAGKGHQGILRALAFKWIRILWRCWQAHEPYDDARYIAALRRRNSPLIPLMESQNAAA

SEQ ID NO: 294716 - protein, 428 aa, unidentified
MIDHSHSTATMNLVAIDIAKDWNVALVQEPLGRRRTFKFANRSADHNEFVTYLHSLPGTVQIGLEPTGDYHRTIAYRLLSEGFDVVSISSLALARFREARFGTWDKNDPKDAQVILAMMAQGMVQVYWDPLFSGSHDWQELSNTYFQITLARTRLQHSLLLHHMPLYFPEFLRYWYSTRSEWFIRFLHRFPTSAAIRELDREAFITEAWELVGRKVSKRAKLEEIYALASESIGLPVALDSPAVEAFRLQLTRYLELNQQREQLDRRAQELLAANADFQRLKTLPGIGAITALTILAEAGDLRRFHHHRQFLKYCGLDLAKSQSGQSKGHEVLSKRGNKRLRLAFWMAGLVAVHQRENAFRDKYERYLSATPFDPDRKRKALTAVAAKMARVAYAVVKHSTDYQCFFEHRLPSGSIPLARAVEATSTS

SEQ ID NO: 294717 - protein, 323 aa, unidentified
MTKTSMERRTVEEGACAGIDVGKARLDCAVDGNEDVAGFANDPAGWEALAAHLAARGVDRVGLEATGGYEQGVFRALERRGFRVSRFGPQRVRAYAKVLGLRAKTDRIDARLIAAFTAAMCAEAPKPTDRRLDELAGMVRHYEQLKEHIACWKTQREGAEPAIAMEVDEIVRDHETRAKAVLRKAEARIRDHADLAERLDLMLSVPGVGKPTAIVLLVRMPELGRTSREEAASLAGLAPFDDESGQRKGEKHIAGGRARPRKALFSAAMIASLRWNPALVAQRRRLLAKGKAYRVVIVACARKLLGQINAVLTRGTPWTEAPS

SEQ ID NO: 294718 - protein, 339 aa, unidentified
MKYIPVGVDIAKHLIQIHFINEHTGEVVDKQLRSQDFLTFFSNREPCLIGMEACGGAQHWARELEKQGHKVKLMQGRFVKAFVMGNKNDVMDARAIWMAVQQLGKAIAVKTEEQQSILVLHRSRRQRVKFRTAQINALHGTLLEFSETIHKGRAAMDRELPAALERMKTKLPPYLITVLEDQYNRLSELDSLIEGLEKQLISVAKQSETCRRLMEIPGVGPLIATAAVATMGEASVFKSGREFAAYIGLVPKQTGSGGKVRLLGISKRGDTYLRTLFIHGARAAALLAKEPGPWITELKKRRPTSVAIVAMANKLARTVWAIAAHARQYDKNHVSIRPY

SEQ ID NO: 294719 - protein, 337 aa, unidentified
MNEQATRVVGIDVSKRKLDIALIANGKNKSKVFDNTPSGHGDLAQWLLDRGAGQEGTHICMEATGPYSEAVAIALVESGWQVSVVNPARIKGFAQGELARNKTDRADASLLARFCAAMRPSLWTPPSAEWRELRGWVDRLQALKDMHQQESNRLEAHTATGQASLVESVQTHLDWLMQQIGTLERDIDDHINRYPELKRDAELLRSIPGIGNTTVAKVLAYAGDVRRFANAKALAAFIGVTPRQRLSGSSVKGRTVMSRTGHADLRRALYMPGLVARRHNPVLRAFGDRLKTGGLAPKAVIGAVMRKLAHLIYGVIKSGQPFDANFSVNQLDFQDGI

SEQ ID NO: 294720 - protein, 315 aa, unidentified
MVKVVAGIDVSKASLDICAAGRTRRFANDATSWRTLGAWLRGLEVSRVVMEATGRYHRRVHQCLHDRGFEVVLVNPLRARRFAEAMGYLAKTDRVDALMLARLGAVLGDLEPVAPQDAFLNRLEDLLVSRATHVDARTMLRQMAGEVDGEGETVTRATVADLDDRIAALDAAIEALIARDPEQAERYSILTSIPGVGPVTAAALLCWMSELGGLDRRQAAALIGVAPMADDSGQHHGARHIRGGRRRPRDLLFMAATSAARCNGDLKIVFQRLKAAGKAHKVAIVAVMRKLIVLANTLLREQRCWSPEAPARSSA

SEQ ID NO: 294721 - protein, 368 aa, unidentified
MLKQSHYKVGCDAHKHYSLFAVFDRQGKPVKRTRVNHTPGAIRAFLSGFPPGTPVALETVGNWYWIVDEIEAAGCLPQMAHAAKAKMMMGHVHKTDKLDADGLATLLHNGTLPSIWIAPGSLRDERELPRTRMAFSKMRTALKNRMHSTLAKYALSLDTQSDIYAPKWLPQLLQLICSLPDETRRCMEQELELLGLVQDQIDRLEARILERVQMTPTIQLIQSVPGPAKILAIVIDREVGSIDRFPSPACFASYAGLVPRVRASGGKVHYGRMIKQANNYLKWAFIEAANVVVRQRHHPAWQSKHVVQIYERTRQRKGHSVAVGAVARYLAEATYWILKKDEPYREPISRQPAGTTSAASSKQGQAPA

SEQ ID NO: 294722 - protein, 388 aa, unidentified
MIYAGIDVAKLNHFASVVSSDGEVLVEPFQFSNDLEGFRSLSLVLDKYDRDQLLIGLESTAHYGNNLVEFLSAKGYRFCVLNPIQTSSTRKKNIRNVKTDKVDTFVIAKTLMQEEHRLFEKQDLDYLHLKALGRSRQDLMKKRTTCKIKLTSYVDQAFPELQYFFNGVHHKSVYALLKEAQTPEQIASMHMTHLSNLLRVASHGHFKKGKAQELRVLAQRSVGSNDSSISIQITQTIEQIELLDRQIDDDEAKIEEIVKAMGSVIMTIPGIRYTEAGMILGEIGDIHRFPNYSKLLAFAGLDPTIRQSGKFNASRTRMSKRGSRVLRYALIYSAHNVVKNNETFRKYYDLKCSQGRGHYGALGHCAGKLVRIIYKLLSEEITFDPNCL

SEQ ID NO: 294723 - protein, 408 aa, unidentified
MTIFVGDDWAEAHHDVHVMNQAGDELASRRLPEGLDGIGRLHELIAQYAGDPADVVIGIETDRGLWVDALVAAGYQVYAINPLAVSRYRDRHGVSGAKSDRGDAKVLADLVRTDRHNHRPVAGDSDLAEGIKVLARAHQNLIWVRNRHTNRLRNALRDYYPAALEAFVDLADRDTLAVLAKAPSPTEGAKLSVSQIRSALKGGGRQRNLDTRSETIQAALRTSQLRAPADVVKAFAATTRAAVGIVGELNRQISTLETELSDHFREHPDADIIRSQPGLGDILGARVLGEFGDDPNRYADVKSRRNYAGTSPLTRASGTRRVVLARYVRNRRLYNAIDQWAFCAITNSPGCRAFYDHRRAKGDGHHQALRALGNRLVGILHGCPQHRTPYDEDTGWAHRQTTINKQAA

SEQ ID NO: 294724 - protein, 382 aa, unidentified
MLSENTLRIAIELSVSSWLIAVRVPGADKSRLRRIDGGDARALLALIGEFRSFASAKCGQAVDVACCFEAGRDGFWLHRLLTAHDITTYVLEPTSILVNRRARRAKTDRLDAEGMLRVLAAWLAGDRQVCSMVRVPTPEEEDAKRPHREREHLVREKLRIENRIEGLLFTQGIRGRPSLRSWERDLAELRTGDGRALPRLLQAELNRLRRRLVLTLQLIREMEVERAETQATTIDDAVTKKITALQRIRGIGENFSNVLVHEVLYRSFANRRQLASYVGIAPMPYQSGGMDLDRSISRAGNQRARTTLIQLAWLWLRYQPASALATWFRDRVGTLQGRTRRIAIVAMARKLLIALWRYVETGVLPEGVELGVELGAAMVGPA

SEQ ID NO: 294725 - protein, 351 aa, unidentified
MPRRSTVRAVSTIGIDMGKNTLHMVGLDSLGAIVLRERVSRGRIKSRLANLPPCLIGIEAGMATHYVARELAALGHDVKQVPPAYAKPFRQGHKNDFRDALAVAEAVQRPTTRFVPPKSNEQLDLQALHRVRSRLVSQRTAVINQIRGFLLERGIIVRQGLRFLRQLLPDILAKRTNVLSPRMVRIVSDLAGDWRQLDDRIETVTDEIETLAKADDNCRRVMTVPGIGPIISSAMVAAIGNGSAFAKGRDYSAWLGLVPKQMSTGDRTILGRLSKRGNSYLRMLFIQAARVILVRPANWPKHGFGVWLVRAIQRLHPNVLAAALANKLARIAWTVLAQQRSYEARVTKAEA

SEQ ID NO: 294726 - protein, 423 aa, unidentified
MKLTYPTCCGVDVHKTFLVATIITSEYVMPHYRQKRFSTFYSGLVAFKKWLLENNCKDVCMESTGKYWVPVWNVLEDSVHVVIANPKWVSAVKGNKDDKKDSKWIGDLFRMGLVPSSYIPSKDIRILREFTRYRSKLVSMRSSEKNRFQNAFTVCNLTLDAVVSDMFGKSATDIENYLLDTDIVDPAQCVSLLRGSLKKNSSDVVEAVSGFNMTPEQKERVRIVQGHFADIDRRIAQLDGVIGNLVAVYEGQISLLCTIPGVDRRIAITILSEIGTDMTKFGSSKRLCNWAGLTPASNQSAGKKKSVRISRAGVYLKPALVEAAHAAVKATEKHPYYRIKFERLMKRRGKKRAIIAIARMILTAIYAMLSTGEVFNPCDLDKFDMPEELKKKRTLASAKEAVRLLVSLGVVPAGSISLDALAG

SEQ ID NO: 294727 - protein, 414 aa, unidentified
MDIMFHHVAGLDVHHKTIVACVRSVQPQGGVVEEVRSFGTMTRDLLHLSDWLAVLGVTHVAMEATGVLWKPVWNILEDRFQLLLVNPRDLKQVPGRKSDVRDCQWLAQLLQCGLLRSSFVPPRPQRELRDLTRQRAQVTAEHTRAVNRIHKTLEDANIKLGAVASDIMGKSGRAMLHALLAGERDPHKLADLAEARLRGKIPQLEKALEGRLTDHHAFLLRQLLDHVEYLERQIDAFSARIEVCLRPFVDDALMQRLDAIPGVNRRTVENVIAEIGTDMRPFPDAEHLSSWAGLCPGHEESAGKRIRNRTTKGNRWLRRALCEAAWAASHTKESYLGAQYRRLAARRGKKKAVVAVGHTVLVIFYHLLRTAVAYQDLGADHFDKLKPEQYRRYLVKRLESLGYQVTLTPKQTAA

SEQ ID NO: 294728 - protein, 412 aa, unidentified
MKVVHEICAGIDVHARMLVVCLLLANGEKEIRTFSTMTDDLLRLRDWLVAARCTHVAIESTGVYWKPVFNILEDALTVILINPEHAHALRGRKTDVKDAEWLADLLRHGLLKASFIPPPEIRELRELTRYRESLVREQSAVANRIQKLIESGNIKLAQVASDALGASGRTILWALARGETDPVKLAALAQRQLKEKRVQLERALHGRLTVNQRFVLRELLGRWEELEAADGRVSKEIDRYLQERPKLARARDNLDTIPGLGPRAAEIIVAEIGVKMKANFASDAHLASWAGICPGNKATGGKRLSGRTRKGNTYLRSALVQAAWGASLKKNCYLSSQFFRLVKRLGRKKALLAVAHSLLVIIFHVLQHDQTYTELGGDYFDRHHVEQQRDYYLRRLQMLGLKVTVEELSVAA

SEQ ID NO: 294729 - protein, 330 aa, unidentified
MKKWNVILGVDVSKLTLDICCAARKLHLKIDNHAQGFGMFKKWCKTNDIHLKDVLVVMEYTGGYEYRFIQFCEALSLSYCRIPGLEIKQSMGMTRGKSDQVDSFRIGQYGEEKIQRLTPSKPLDKNILLLKQLLSFRKRLVREKAGLQNTVKERKHMYPLKKTDTIARIAQAKIKANKQYIYQVEQEIMEVISSNGALLQNYRILTSLKGIGNINAWMTLAYTENFTSFTDGRKYAVYVGVIPFEHTSGSSIRGRKRVSHLAHKEIKQELNQAAKSAIMHDPEIRAYADRKLKNKAYPLVLNNVKFKLILRMFSLVKRGELYVENYKMTA

SEQ ID NO: 294730 - protein, 372 aa, unidentified
MKQNIIHIGLDVDDTQYHGTAFNKETGEVIEFKSRPTLKGLLQQLDRMARHFKGHKIKLCYEASYVGYCLQRDLISNGVHCDIVSPSSIPSPRGKAIKTDRIDAGYLAQFYANDLLTIVQPPDEEQEQDRDLLRSRQKVMQQRNQLRKHLQSVLRRSGLHYKAETGNKSHWTKHHYCWLARTIDGLSGSLKVNLDLLLRQLKALNEVLTGYGQQIDVLANSPRYQSAVQSLTCYKGVKNVFALTMITEIGDIKRFSHPRKLVSWVGMDIREYSSGGKYNRFGITKHGNRYIRTAFVEANQRGHRTAKIGQDLKSRRKHIAPELVNIADRCLRRLNKKGNRLLLAGKHPNKVKVACAREMVGFVWESLNKVAA

SEQ ID NO: 294731 - protein, 420 aa, unidentified
MAPLSDQPFTAYVGIDWADTKHDICLQAADGTRREFDCIAHQVGHIDEWANGLHRRFGGPIAVALELARGPIVAALQKYDFFVLFPINPLTLARYREAFQPSGAKDDPTDAELALDLLLHHPERFSRLRPQSAGMRTLMSLVVQRRQLVGDKTRFANRLCDTLKQYYPQALEWFDDRDTVLFCDFLTRWPTLAAVRRARTTTLEAFFHAHSCRCARLIEARLTSIRAASPLTEDPGIVIPCRLHVLALVAQLRAVLTAIGRFDREIAAVARTLPDYALFDSLPGAGLQLAPRLLAAFGEQRDRFQGADEVQKYSGIAPVTQRSGKKRWVHWRWQCPKFVRQTFVEWAAQTINKSFWAGAYYRQQRAKGSSHQVAVRALAFKWIRILYRCWQTRTPYDETAYLDALRKRGSPLLRNLELPG

SEQ ID NO: 294732 - protein, 334 aa, unidentified
MWHVGIDLHREFIVMAAVRDNGEIMEPVKIACQDTDAILDVMRSLAPFRAVVEASGTYRWLYDLLCPHGTILLAHPLRLRAMIQRRSKTDKLDAQLLANLLRIDQIPLAYVPPEPYQRLRDLVRCRAKLSRDRAEAKIKLRDMLARQNLVSPYKTPFGPRGLAWFGCQDFGPVGNMIRNELLARLWHYDRQIAAFDKQLEQCRPDFPQTEAIADIYGIGHYSALLIVAELGEVERFRTAKQVGAYAGLTSRVHQSGGHCYQGSITRQGSPWLRWILVEAAMKTVREDAALRNFYNRVRKRSSAKIARVAAARKLAEICWKRLRRWQREHAEKAA

SEQ ID NO: 294733 - protein, 354 aa, unidentified
MPQPNDLSRSLAALEQDSTLIVVIEMSHLSWLVARIVPCIERHPAKKLEPDEVALLQLLRRWSDEATKAGHVIARTVVAFEAGRDGFWLARWLRARGVEAHVIHPTSVAVSREHRRAKTDRLDTELLKRAFLGWLRGERDHCSMAAIPTLEEEDAKRPNRERESLVGERSRIVNRMKGTLARLGIRGFKPTLRKAPEQLERLHTPEDTLLPPNTLAELRRGMARLRFVADQIREIEETRLERLEQQPEEGAHAMVRLLARVIGVGIETADMLVHEVLSRNLRDRRAVARYAGLTGSPDESGIRRREKGLARSGNARVRRGMIQLAWRFLIFQKARWRNGSGLGPRMPALARARQ

SEQ ID NO: 294734 - protein, 359 aa, unidentified
MQLCRFLLKRHKGMKKIFIGIDFSKEKFDATVIKAEGVEERAERKHEVFDNKVSGFRRLIRWAKSVQDELDTSLWLFCGENTGGYSRALCNYLYGSGYDMWLENALSIKHSSALRRTKSDKADSGVIAEYAMRNYDQMRLYKPLGKNLERLREVFLYRHNLVKLKASMTTRKGEKKLTQDKSDISRFMAMSSKHLISEFNKKIEECDMRIQKIISEDEELRRNFEIITSVPGVGTQNAVCLMVYTDNFGRFDYDSRKIACYYGVAPFGRQSGTSVNTPPRVSPFANKLIKALLTQAALASVNFCPQMATYYHRLVEAGKKKPVAVNNIKNKLLHVITAMVRRGEKYNPDHDYYAALKAA

SEQ ID NO: 294735 - protein, 345 aa, unidentified
MPMFAAPDVSKKETQVHIVDVSGKCVWRGKVPTNPDDIGTILEPYAQQLEKVGLETGSWSSWLFHGLTDQGFKVACMDARQAHAALSVTVNKTDANDAEGLAHLLRTGLFREVRVKPWCDLRRRALLRARATLVRTAIDLGNAIRSALRLFGFNMAAGPGSGGARAFERRVEQHLAEQPGLAPVVMPLLDAWRAARKQVARHESSIRAEVRADERCQLLMTVPGVGHLNALGFVAAIGDTNSFPSGRTAAAWIGLTSRRYQSGEINMQGRISRHGDKLLRSYLYEAAAHILTRAKTDSALKRWGTALREKIGFKRANVAVARKLAVTLFAMLRSGKPFEGDGVAA

SEQ ID NO: 294736 - protein, 311 aa, unidentified
MSEQITVGIDVSKDRLDVHVRPLGEAFAVPRDGEGLANLCHRLTALAPALVALEATGGFEAVVTAALVAAGLPVVVVNPAQVRAFARALGKRAKTDPIDAAVIAHFAAATAPEVRPMPDEATRRLAALMARRRQIVEMMGAERQRLRHTAVARVRQSIERLIQALEKELAEIDRDIDTAVRSSPAWREAEDLLSSVPGVGPIVARSLLAELPELGTLDRKKIAALAGLAPFTRQSGSWKGRSFIGGGRSTVRTVLFMAALVASRYNPVLKTFYRRLLDAGKPKMLALVAVARRLLVILNAILRDKQPWRTA

SEQ ID NO: 294737 - protein, 332 aa, unidentified
MFIGIDVHKRYSQIAVLDKNGEIVEETRVENANLDDFAQRYAGSKAALEATSNYYHIHDTLLAYLDVTVANPGELKLISDSDKKTDRVDAKQLARMLRLGSVPESYVPTDEVRQARALVRGRQKLVENRTEYANKIHGLLSDHGITREVKPLSVKGREFLAELSLPAPWDALLESYLEIIQVLTEQIESLEAEIEERAGSLKETQLLMTIPGVSYFTALTIYAELGEVNRFDRAKEVVSYVGLNPIIRESGDSRFEGSISKRGSGRVRWLLVQASYSAVHTCEDEYLSRFYNRLARKKNSKTAIVATARKLLVSMYHMLDREEVYDPPGVSA

SEQ ID NO: 294738 - protein, 348 aa, unidentified
MTIVEDARAITGGVDTHADVHVAAALDPIGGLLGVREFPATAAGYARLLGWLGEFGTVCLVGIEGTGSYGAGLARHITAAGVRIVEVDRSDRQDRRRQGKSDPLDAVSAARAAQSGRARGASKGRDGSVEAIRTLMVAKRSAAGERTRSINQARALVLTGPDDLRARFAAHTPAALVAGLASLRPRPGGDVAGHATRVALRELGRRAQFLDSQLDRLDELIVPLVTAHAPGLLALYGVGPNTAALLLIAAGDHPGRLRSEAAWAHLCGAAPIPASSGKVARHRLNPGGDRQANHALWRIVFTRLGSDPATRAYAERRTAEGKSKAEIIRCLKRYVAREACRHLRPAAG

SEQ ID NO: 294739 - protein, 356 aa, unidentified
MEYIAFDAHKHYTLASVVTPDGQLVREERIEHERGAVRDFLKRCERGSPVAVETIGNWYWIVDEIEAAGCLPRLVNARKAKLMMGEINKTDKLDVRGLNRLQRSGTLPTVWIPPGELRDQRDLPRTRMVFVRQRTQLKNRIHAALAKYALHDLAVSDCFGVRGRALLRERFELLPPHTAYASQQLLGQVEELDRQVHAFEQRIQATFKATPAIQRLLTLPGVGYTLAVVIALEVGDVARFASAERLAAYAGTTPRVHASGGKSRFGPARPDVNRYLKWAFVEAANAICLHRGRVAHRHASRLYERLARRKGHAKAIGAVARHLAEATYWMLSKQEAYREPKSVGRFVRGGQARVAP

SEQ ID NO: 294740 - protein, 452 aa, unidentified
MSRKRKRNQKKSGVPVLSCLNLNAAGVDIGATEIYIAVPGDRDPQPVRCFPTFTEDLLAAADWLQACHIETLAMESTGVYWIPFFQILEARGFKVFLVNAHHVKNVPGRKSDVSDCQWLQYLHAVGLLRGSFRPEQAVCTVRSILRHRDSLVQMASSHVPHMQKALDQMNLQLHHVISDITGMSGVAILEAILAGERNPHTLAALRDRRIKASADTIAKSLVGDYRREHLFTLRQSLAAFRHYQELIAACDREIAQSLEEFESKLDPPPGSPSPSQDGSKAKASEPGFDLQTHLHRIFGVDLTQVPGIHVLTTQTLLAEIGPDLSSFDDGAAFASWLGLCPDNRVSGGKVLSVKTRKVKNRAATALRMAAQSLHHSQSFLGHFYRRMRAKLGAPKAITATAHKLARIIYHMVTTRHAYDETICAQNEVQNRQRMEARLRKQARELGLQVVAI

SEQ ID NO: 294741 - protein, 346 aa, unidentified
MVILGIDAHKRTHTVVAIDEVGRQLGTKTTKATTTEAHLEMVRWADGFGPERRWAVEDCRHLSRRLEADLLAAGEVIVRVPPKMMAHARDSARTYGKSDPIDALAVARAALREPDLPVARLDGPSRELRLLVDHREDLVRDRTGHINRLRWHLHELDPSWDPAPRSLTSYCHLDATSARLETMDGMVARIARYLVARIRELTVQERALKREIIERVKKLAPKLLSLRGVGALIAAKIVAEVADIRRFRSKDAFARHNGTAPLPVWSSNRVRHRLSRTGNRQLNCSIHRIAVTQKRCQPDAKAYLERRVANGNTSKEALRALKRKLSDVVYRALLADASEAFVAEAA

SEQ ID NO: 294742 - protein, 387 aa, unidentified
MNSTQSCIAIDVSKGKSHVCAYATKDELVQKPIEILHDREGFNVLDDLYNRLNTVEGSLPIFIYETTGIYHRPLKRYLKDKHYPQCEVSPLLAAKHRKNSGIRIPKSDKADPKSLARLFYDGDMHLSPNSAEVYYELLQLDRSYQALTKLMVTCKVHFKEKLDILFPRFEDCFDNVYTTYTLNLLEAYPHPELILHKRSDAIEHRLIKDGLQSGRAQQVAQALKGYCQNCVPGTSSESVDTQILRLFIQQIKFYTLERNHIIEQMTVMVEKFPLYKQLKSIPGIGPLLAVRLIAELGDLSRFRNNRQLIAYAGLDPLVYQSGQKDGKHLGISKKGNCYLRAILYQVIGISIQVSTDHPIKMYVQKKKQTHPNKSAKIAGCAKLLRII

SEQ ID NO: 294743 - protein, 393 aa, unidentified
MASFFVGIDVSKDSFSFAVCDENGAAIHAEDCPMDRVGFDAFFAGMGRFDGMLIGMESTSTYHLNLLLAIAQRGLRVCLVNPSLIKNFIASGSLRKTKTDQIDAAGIARFMHTHGAALRPFAPSAADALRELARRRESIAQEIARTKTDLKRLLTLSFPEFVVETNLFTATGLALLEYFPSAQAVREMVPAKRKKVFRSCVEVGFGRPSLLTYDRFVEIALASVGVANDALHAVIADDVAALRGLMERDEIITEYLVEAVRAHDNEAVDILVSIPGVGEITASHFIAEIGSVDRFETVEQLRAFAGTDPGIAQSGTMFKRKRIAKRGSPSLRRTAYLMTQGAVRCCAVFKNYYLKKRAEGMAAKKAMIATLNKLLSTIFSLLKHRRSFSLIYS

SEQ ID NO: 294744 - protein, 408 aa, unidentified
MQIIYERCAGLDVHKRSVVACLLFPENGQPHKERQTFSTMTPDLLRLRDWLKDHECTCVAMESTGVFWKPIYNLLEEHFQVFVVNAQHIKAVPGRKTDIKDAEWIAELLQHGLLRPSFIPPAWQRSLRDLTRTRSTLTEERSRVIARLQKGLEDANIKLASVVSDVMGTSAQHMLHALVQGELSPAAMAELALGNMRPKRAQLAQALTGHLQPHHRLLIVEHLAHSANLEQAMAQLSAEIAERLAPYEEILLRLETIPGIKRRIAEILLAEIGPDMSRFPSAAHLASWAGMCPGNHESAGKRLSGKTRKGSQWLRTALVEAAHAASHCKECYLSAQYHHIAFRRGKKRAAVALGHTLLIIIYHMLAEKKEYEELGGDYLDQLDRQGKEKRLVRQLEKLGFEVSLTPTE

SEQ ID NO: 294745 - protein, 315 aa, unidentified
MMNAPVFVGIDVSQAQLDIALRPAGRFTAPNDDAGIAKVVDQLRAVTPTVVLLEATGGLELPLVGALAAAALPVVVVNPRQVRDFAKAAGQLAKTDALDAQILAHFAEVMRPAPRPLPDEQTHALAALLARRRQLVEMLTAEKNRLASARKLVRTSLQAHITWLERELTRTDTDLAHAIRESPVWREKDELLRSAPGVGPVLTTTLLANLPELGTLTGKQIAALVGVAPLNRDSGTLRGKRTVWGGRAQVRAVLYMGALVATRYNPVIRAFYHRLCAAGKAKKVALTACMRKLLIILNAMLKHRTPWHANVAACA

SEQ ID NO: 294746 - protein, 330 aa, unidentified
MKQYDHVFGVDVSKKTVDITHVINQEFTHRQFSNDEAGMEQLMDWLKELKLDFDTTLFCMEATGLYCFPLTRFLAAHSIDIWIEHAVQIKKATALTRGKNDKVDSLRIAVYATKNLDRLRLWKPMNTTLEKIRHMASLRDRLVETKKKLLTPIQEFEDIGNHSMAKLLTKTIKSSLTAIDKDLKNIESKIIDIVNEDENLKLLYKLITSVVGIGFVTAINLLIHTNGFTMMKDARKLACYCGVAPFEYSSGSSVRGKTKVHYMANKKLKCNLHMASLVAVKLDADLKAYYERKVAEGKNKMSVLNAVKNKLLARVVAVVNKQQEYVKKSA

SEQ ID NO: 294747 - protein, 346 aa, unidentified
MLIFKTMTNPIIRQNVGIDISKATFTAAIAQKMLDQSVVIKSTKTFTNNLSGFEKMDNWITQFIDPQMAIHYTMEATGVYYEALAYWLYEHQRLTTVILAKQFKNYAASLNIKSKTDQIDAQVLAQMGVDRKLSLWQPHSSQMRTLKQFSRERNALKDEQTQISNQLHALTHSYQPDEKNLKRVQKRLDLIKEQIKEIEQDMKNILEQDPELKQRIEHVCTIKGVGFVTAISIIAEANGFALFRSKAQLVCYAGYNVIEKESGTSVKFKPRISKKGNKNIRKSLHFPSLTAIVHDQNMKKKYDLIYDKTKIKMKGVVAIQRKILVLIYTIFKKNEPFDENYFQKTA

SEQ ID NO: 294748 - protein, 391 aa, unidentified
MTFIVGIDIAKHKHECLVIDESGNSIVESFPFDNSVQGFDFFLLKMKSLPSPNKIKIGFESTGHYADNLKNFLIKSDYDFMEIHPVLINRYTKATTLRKTKTDKVDVKIICSYLNSVEYKSYSTKSYHTKNFKSLTRSRDSLVKERSLQLQRMTNVLDVMFPEFKPFFKGSLSSATARYILHNYGSPQKISNMNQSSYKKMCSELRRTISYAKFMSLKDLAKHTIGSSCELLEFQLQNYYVLYEHLNMMIKETDALILVEFEKETTYLDSIPGIGPITAATIISEIGSVDNFSNPAQLVAFAGLDPAFYQSGESEFTGRMVKRGSSFLRQAIMISAQSSLVHNPQMYEYYLKKRSEGKAHRVALSHVAKKLIRIIFALETKRQTFNTEQMK

SEQ ID NO: 294749 - protein, 427 aa, unidentified
MKDKILRITTTTMIVGIDVAKEEHWCRITDCRGIDLIKPFKINNSINGFECLIKNIVESKEKNHLEEVVAGMEPSGHYWKALAWFLKLNENVDELVGVNPYHVKQSKELDDNSPTKSDKKDAITIARLIRDGRFYDIYLPEGVYAELRVLTNTRSQYIKKVKCAKCALIAVLDDYFPEYEKIFKNLLGNTSVYLLKHYPFPKDIIDLGLEELAKEIYKASNGKEGIKRAKTLYKAALSSVGVREGSESAKFKIECLLDEIEFMQEKLERIEKLLEKKMAETELNDYFQSMKGIGPIISAVFIGEIGNVSRFDNWKQVRKLAGLNLAEQSSGKHKGKTKITKRGRPMLRSILYMAGVSTVNHNPEMRQLYYYLLNRPKNRLTKNQALIAVGLKVMRIMFHLAKSKEYYDPQKALGEIRLKQIQELIVA

SEQ ID NO: 294750 - protein, 321 aa, unidentified
MNKSTIFIGIDISKDTFDIYDPIQGHCQFTNNVKGFRSFYKTLSSDHWCVMEATGCYHQQLALFLFDKSIRVTVMNPLVIKRFIQMKLNQIKTDKSDAKMICQYGQEQDMELWHPSPQYVEDCKQLQTITQLYFKQSTAIKNKMHTLQTRGFNRGKMMSSLKRQLKSIQKEIKLLESEMEQLIKANQQDLYTKLNTIPGIGKKTAILLIVTTNGFKDFESSRQISSYLGLAPNERSSGSSIRGKTRISKTGNPIVRNHLFLCSFTASIHNPQGKALYDRIVAKGKSKKLALIAVCNKLIKQAYGISKSGLPYDKNYVSKLA

SEQ ID NO: 294751 - protein, 343 aa, unidentified
MQAITTIGLDIAKSVFQVHGVNAAGNVVLRRQLKRRYVLTFFQKLSPCLVGIEACASSHHWARELTAFGHTVRLMPPAYVKPYVKRQKNDATDAEAICEAVTRANMRFVPTKTIEQQSCLMLHRTRHLFIRQQTGIINSIRAHLAEFGIVAPVGRRGVEQLLEVVADTNDTRLPEIARACIAALGVQLRTLKAQILEFDRRITAWHRSNETSKRLDEIPGVGPALATALVACVADPKVFRSGRDFSAWIGLVPKQHSSGGKDKLGSISKQGDRYLRSLFTTGALAVIRYAKIHGTKHRPWLTGLLARRPTKVAAIALANKIARMAWAMMARGERYKEPIALAA

SEQ ID NO: 294752 - protein, 367 aa, unidentified
MKKLTRRPVRFKGITVGLDVHKSFIEYVILDRRGDEECGGRIESSREGASELLGIVRRRKAQYVLEAGGSSLWVFDLLSDHAGREQVHVAQPHRIRPIANSLEKNDANDAWWLAYLQFEGRLPEAWMPESEIRHLRIATREHRSAVDRRSDLIRRFKSHLTQEGRKINGKNFHSKDARRQAADLARTLPGTRGLALASLLRRIECLDQEIDVWRDEIARRCESFPEVKVMQDAIPGVGPQTAAVLFAELGAPSRYRSAKAYACATGLVPGLRESGGRKMRTGMSRAGSRHARWALTRAVVACARCKRGPGVSVTRWVNRRLRHKTKKPVYVAAGRKLAEGIWRLFALGEEFDLVRAFPGGKVSSKVA

SEQ ID NO: 294753 - protein, 326 aa, unidentified
MKKTIIGIDISKDSLDYCFIDIASHRKTHFGKLENSKTAIDKWLNSLDLHQVEFAMEHTGHYGALLATLISGHNASFYMINPLDLKKSLGIQRGKTDVLDAYRIASFTITNKHRLSTCKLPSKELGKIKVLMTARERYIKIAVQIKNSIKANEILNKTLDVKDVIFQEKKQIKAVEKTISFFESQMQSIINSSETLKTNYQKITKIIGVGQITAIKCIAETDNFTKFTNPRKFCCHSGLAPFQYQSGTSIKGKTKTHYHRNRSLKAILFKASGSAIQHDPQLKNYYNRKLNEGKHKLTVLNVVANKLVLRIFAVVKRDEPFVKLIA

SEQ ID NO: 294754 - protein, 430 aa, unidentified
MLVDRSGEHEPLFAAFVGIDWADQKHVWCLQTADSQKRESGELEHAPEAVEVWVAQLCQRFGQGPIAVALEQSRGALVFMLSKYERLHLFPVPSTMAGNLRDALYPSGAKDDPRDADLLLDLLLKHRDKLRRLSPDTEATRRVQNLVEERRKLVDEKTEQINRLTSHLKIYFPQMLDWFDRLDREAACALLERWPSLEELQKVPPVKLRTFFCKHHCRDQEVIERRIVGIRQAVPAIRDRAVMEAKSSVVQVIAQLIRILVQGIGELDRKIEEETAAHPDFFIFDSLPGAGPALAPRLLSAFGSQRARYGSAREVQAYSGIAPVIERSGKKKWVHFRWAAPKFLRQSFHEWAGRSIAQSQWARAYYEQQRQRGKGHHAAVRALAFKWIRVAFRCWKNRVAYDESMYLATLARRASLQSGSAIALSPAKTL

SEQ ID NO: 294755 - protein, 341 aa, unidentified
MNITTIGLDLAKNVFQVHAVDQEGRAIVRKQLRRTMVIAFFTKLPPCLVGMEACGSAHHWARELKRLGHDVRLMPPQYVKPYVKRGKNDATDAEAICEAVTRPTMRFVPIKATEQQAVLMLHRTRDLLVRQRTMLTNAFRGHLSEFGIIAATGMENISKLVTIVKENKDNHIPKAARTALRMIIGQLLDLKTRIDRLEEEIIACHRKNPESKRLATIPGIGPITASALSATITDASQFSSGRQLAAWLGLVPRQNSSGGKDKLGRITKQGDRYLRQLLVIGATSMLGVVNKRKTPDDDWVITLLQKKPPRLVTVALANKMARIAWAVMTRKETYTPREVRI

SEQ ID NO: 294756 - protein, 361 aa, unidentified
MGLKGPVPLMRNQRAHPLRVAQIPLYGGAAMYIGVDYHKKYIVATKMDESGTIMEQVRLNNDPDTLLGYAHTLPTGSKIALEATEGWYHFYELLENQCPDIYLAHPLKTRAIAEARIKTDKVDSTMLAHLLRTNLLPHSYIPPREIRDMREILRYRASLVSLRASIKNKVHAILSKNGIRMEYADIFGKKALSSLGSLSLRSCYTIELMGYIQVGETLNALIDKVSEVIEHQVKENPKARLLLTIPGISYYSALLVISEIGDITRFPSAKKLCSYAGLVPQVYSSGGKTRYGSITKQGSKWLRWILVELSHHFVKSSPRMEMMFKRISITHGKNTARVAVAREMLKIIYYMLRDNRPFMRR

SEQ ID NO: 294757 - protein, 350 aa, unidentified
MQYIAMDAHKKYTLVSVEPMAGGKPQETRIEHEPGMLRGFLERMDTGSPVAVETVGNWYWIVDEIEAAGMVPCLVHARKAKVMMGMVNKTDKLDARGLNRLQRTGTLPTVWIPPAELRDKRDLARTRMALVAQRTKLKNRLHATLAKYGLSVEVSDLFGKKGLELMGQALQKLPPETQFASQRTLETLDALAEQIGALEERMKEVFEETEEAMLLKTLPGVGFILSVVMSGEIGEIGRFSCPDRLASYSGTTPRVSASGGKTRYGGMRTESNQYLKWAFIEAANCVSLHRKKHPERTLSRLYERIRFRKGHGKAIGAVARNLAEAAFWVLKKKEPYRDPTGSQAVLPTKV

SEQ ID NO: 294758 - protein, 398 aa, unidentified
MLSIGIDVSKGKSTVCGMKPGGEIVYTPFEVQHTREGMSELVSLLRGSGEEVRAVLESTGSYHCPVVAALLENGIFVSVINSLRMKRFCSQSIRKVKTDRIDAMQIALYGLAYWQELQPTKLPEDTYRELQLLARQYYQMTSMLIKAKVDFNALCDQVLPGMQELMNDHAGRHKLSDFVLRYHHTTHILEMGETRFRKDYCKWAEKKGYRNCERMAVLIFATAQNGIPVLPNAPSTQIVITEAIRVLHTVEASRDAILTQMQALAKTLLEYSLVREMPCIGDTLAPRLIAEIGDVRRFHSKRALIAYAGIDAPPYQSGKFCANNRHISKRGNRYLRKTGYEVMQSYVMHKPANDPIFTFIEKKRSEGKSGKLAMVAGLNKFLRVYYGKVTELYRSLPQ

SEQ ID NO: 294759 - protein, 341 aa, unidentified
MQITTIGLDIAKNVFQVHGIDAAENVVVRKQLRRGQVIAFFKALPPCLIGMEACATSHYWARELAKLGHEVRLMPAKDVKAYIKRNKNDAADAEAICEAVRRPTMRFVEVKSAEQQAQLMQHRARDLLMHQRTQLINAMRSHLAELGIIAPQGREGVKELLAIISIEDNKHLPNDARASLIVLAAQLQALQTTIGAIEKRIVVQHRAKKESRRLQTVPGIGIIGASAIAATVTNPKIFRSGRDFAAWIGLVPRQMSTGGKPKLGPISKQGDRYLRRILVVGAVSVLRRAKNNPEKFPWITQMLTRRPFKVVAVALANKMARVAWALMMSGNTCRAARFATT

SEQ ID NO: 294760 - protein, 430 aa, unidentified
MLVQLSVVRYLPCPKTSFVNFKRPIMTSKLQKIHAQGAGIDVGSRQFFVGIENQEVKSFDTFTSGCHQVVEYLQQHSVTSVAMEATGVYWVTLHDMLRDVGIEVAVVNGRHVKHVPGRKTDVKDCMWISELHSYGLLKKSFIPEAQVKEMRHYMRLRENHIEQKIKAVQRMDKALVMMNIRLSSVVSDVQGGSSLRIIQAILKGERNSEVLLNLCDSRILKHKKEQMQQCLKGFYKPEQLFALKQSWEQYGFIEKQIAGCDVCIEKLLESLTINKPEPVLNEKPKRIYHNKPNVKNLHKMVQQLYDGKDLTVLPGITSYSLLKFFSVTGSDLKNWKTENHFTAWLGLAPNQYQSGKIKKYKRVKTNTEAGQILKECVQPLLRSKHLALGVFGKRISSRRGPSIAISNGKKISLLDLPDDKQWIGLCRKWH

SEQ ID NO: 294761 - protein, 361 aa, unidentified
MTSMTHHGSRITGGVDTHGLTHHAAVIDPVGRHLADAEFPATIRGYRDLLAWMRSHGTLAAVGVEGTGAYGAEPARVLTAAGVTVVDVDRPDRKTRRMRGKSDPIDAYAAATAVLSGRATGTPKTRDGVVEAVRALRLARRSAVKARTQAMNQIRGLLVSAPAMLREQVAGLDRAALIRTLARLRPGEDLSKPLTATRAALRRLARRHQAMDAEIAELDAEIGPLVKQAAPRLLELFGIGTETAGQLLASAGDNPERMRSEAAFAHLAGVAPIPASSGRTHRHRLNRGGDRAANNALHTVVLTRMRFDERTRAYVQRRTAEGLSKKDIMRCLKRFVAREVYRALTTPATGQVTQNSLTPAA

SEQ ID NO: 294762 - protein, 452 aa, unidentified
MAKVAKKSKSCKRTELKIVNPNAAGIDISTREMQVCVPGDRSGEPNRVFGTFTKDLRAIAAWLKECRIDTVAMESTGIYWLPLFGVLKDAGFEVLLVDPCQAKNYSGRKTDESDAEWLMLLHSYGLLRSCHQPENMVRRLRNLTRHRDNLIKSASREVLHMQKEMEQMNLKLNNVFSDILGKSGQAIIESILAGERNAEKLASLADKSCKASHEDIVASLQATWDDDHLFIMKQSHELYIYYREMTKKCEKEIETLMQKFTAEVDDDKLKKLRSRKQKAYRGDVSFDIERYAIGMWGVNVMRIPGINRNAVLRLASELGGDFVAKFETVDRFLSWANLVPNNKISGGKILSSKVPKRKNPVGIIFRQCANALWKASNTMGDYFRHTKARSGHLQAMVATGKKLATIFFTIIQRQQEYDEEVYTKNRKAQLERKIEYTKRKLARLELQVDACI

SEQ ID NO: 294763 - protein, 418 aa, unidentified
MEVLHERCAGLDVHKKTVVACVRRARDGGVEKEVRTFKTTTADLLALGEWLDGHDVNHVVMEATGVYWKPVWHLLDDGDRELVLANAAHVKNLPGHKSDVSDCDWLSDLEAHGLIRGSFVPNRQTQELRGLLRTRKQKVRERSSNTLRLQKTLEEANIKLDSVISNVIGVSGRRMIEAMIGGETDPVALAALADRRIKAPPEVLCEALRGRVTGHHRFLLGLQLEHIDALDRMIDKIDQQIDASVEPFRAAAGLLTTISGVNQLAGRAIVSEIGIDMSRFETAGHLISWAGLCPRNDESAGKRRSTRIRKGAPWLKDILVQCAWAATRTKATYLHAQFVRIRSRRGPKKAIIAVAASILTAAYHMLKNGVPYRDLGPQHFHSRNKQAQAKRLLARLRDLGFTAEFDSLKPIPDAVVSY

SEQ ID NO: 294764 - protein, 353 aa, unidentified
MRTSHYQNTLETISTIGIDVGKSTFHLVGLDKRGAIVLQQKVTRHQLGRRLSNIPCCLIGMEACSGTHFIARQLATLGHDVRLIPAQYVKPFLKGHKNDYRDAEAIAEAVQRPTMHFVSIKTPEQMDLLSLHRVRSRLVRQRTGLANQIRGFLLERGITVRQGLVPLRKALPEILSSKSDALSPRMINLISELIEDWRRLDERIAGVSTEIEALAKQDESCQRLMSVPGIGPIISSAVVAAIGNGAGFKQGRDFAAWLGLIPKQESTGDRTILGKISKRGNKYVRTLFVQAAHVVLERRPKTAKQGLWPWIEQASKRLHRNMLAIALANKLARIAWAVLARGHAYQPRITANA

SEQ ID NO: 294765 - protein, 341 aa, unidentified
MSYLGVDLHTNSFTVCRRTKQDKESIRTFQIARMADFRKTLRKRDLLAVEATGNTAWFVSQIRDRVRKVTVVNPFQFEVIRRSVKKTDKNDAKTLAFYLSKGMLPEARMKTKENAQLHSLATTRDKLVKQRTALINKIHNVLNSYGIKFKKESLGTEKGLKSIWAYEWDVIVQIELEVLVEQIRSLNKSIKTLDKEMSDHGQKLKGHESLTSIKGIAARSATVLLTVIGDVNDFADENKLAAYFGIVPRVSDSNETVRHGRITKHGSKLGRTTLVQCTLVAKRYNPYLRQYYERIKSHRGSGKAIIATARKFLGIIYNTLKNGWVFEDFPNFVLASSCVKK

SEQ ID NO: 294766 - protein, 405 aa, unidentified
MRKLRKRIVRVGVDLGKTVIQVHAVADDGTVIAAKKLPRSGFLSWCSELPQGCLIGIEACSSAHYWARELIKLGLDARLISPSFVGPYRMSGKTGKSDANDAAAVCEAASRPQMRFVPVKTPAQQSWCAVHSLREGYIEERGACMNRARGILSEFGILFPLSTERFHGELLKLLRQEDSELPSLARMALRRCVVHFDAIERQIAWCTGEIERHAATDPRAQLALKVFGVGPITASALVASVGDMNQFKNGRQFSAWLGLVPRTSSTGGKQRLGSITKRGDAYLRKMLVLGGRAALTAVSRRDDALSKWAVQLRARVGWSKAMIAIANRNARTLWCVLSSHGGRSADPPGRRWPQAGAGDSENSKCRLHGDQPSVTSLESEYPTAQPAWPVKARRKVALATDGIDS

SEQ ID NO: 294767 - protein, 370 aa, unidentified
MKSIIYVGMDVHKASFTLSCFSVTTQETFATVKISPDAKAIKKYLDGVSLSRSEECEFVCGYEAGCLGYTLYHQLTAMNIRCVIMAPTTILRNSKRVKTDRIDAENLARCLAYGGYKSVYIPTAQDEAVRDYLRMRDDHKLMLKKIKQQINAFCLKHNKIYPGNKSKWTQAHVKWLNALEFDGYLQDAFNEYMITYRELAGKVERLESQIEQLAELEEYRDKVKKLICIKGIKTHTALSLIVETGDFNRFQSAERYASYIGLVPGEHSSSEDQNRLGITKAGNRHMRMLLTEAAQCYSRGVPAKKSKDLKSRQKGASPEVIAYADKASIRLRRKYIRMELVNKKKANVAKTAVARELACFIWGMMTDNIA

SEQ ID NO: 294768 - protein, 463 aa, unidentified
MQERGEKSSQQNSEGEVEGLPVIRPHVAGIDLGSNEHWVCAPQVDGSGREVEKFGATTPELERMVEWLKQRRVESVAMESTGVYWIAPHEILERHGLEVVLVNTRELARVPGRKKTDRVDCKWIQRLHSCGLLTGSFRPAEQICMLRTLVRDKGNLVAEAGDWVRRMQKSLDQMNVRVHRAVSDLDGATGMAILRAIVKGERDARQLAKLRDRRCQKSEEEIAEQLSGHWREDHLFSLQQALRMYDAVQERIADYEREILRKLAEMERDDCRGQRTPTSNHPQKAKAIRKRGEEPLRQALYRMSGVDLTAIDAIGVGTVEVVLSEYGADLSRFATEKQFVSHITLAPRQAVSGGKPVKKKKRGSASTRVAAALRMAALSLRHSQTALGAYYRQIARRIGGDVAVFATARKLATLIYRLLKWGQPYVDEGAQAYEKRYQEQRLKRLTAMARDLGYQLTPKAAQA

SEQ ID NO: 294769 - protein, 398 aa, unidentified
MRKVAGIDVHKGFLEVAYRLPSGRIMTRRIEYTPKGIDRLIRLLRRHNITDVYMESTGDYYLPLYYTLKGANVKPHVMNAYKIRRPESNKTDTKDAVWLLEIGETELFSDSYVPDKNMQALRFLVRKRMKLIDRISDIKREINSIFWRLGLQAARYTKKLRSRKKRMLLLALLEGQLKPNKVDDDIRGLYNILSQPEFRAYIFVLKSRLADLAHYESQLDEFDREIAALAGKFEDAIRILMTVPGISFTLAVSILAEIGDINRFPSPANLASYAGLAPTARNSGGKRRSGRPSKKSNKYLRRYMFLAGMAAVRSSSSVVREFFTRLLGRGKHYKVAVVAVARKLLCVIWYLLRRGESWREDGYFKRPSRLPRGRRVRISVRDAIAILVRAGYEVRKKA

SEQ ID NO: 294770 - protein, 426 aa, unidentified
MSERDYSKQVARRQRIGSMSLVVGVDVGKAYNAVGFMNQEGKVLGSCAKVYNSREGFEQFMGMVEDLKARYGLKDVLIGMEPTGHYWRKLAYFAKEHGYEVRFIRTTALKHHRELDESSSAKSDKRDALTLTNITREGKYIDTVIEDGGMRHLRTLVKVREKIQKCNVSAKNSLHAALDDYFPELKEIFWSMHSRGLWALLQRCPFPVDVVPLTVSALKEIIARASRRRAEASRKAMAVSQAAKESIGLRQIGSADRYRLKMCLEEVKRTELMIKDIERKIKRMLKDNPEAEYLLSIPGIGPISAAVFLGELGNPSYFPGARQIVKYAGYDPQESDSGYRVSRKFISKKGRWLLRKHLFLMSMRVVVLSRYFQGYYQRKLQTKNRFGQLPRKKEILCAVAIKLIKVIFALLRDKRNFEDTVTCSVE

SEQ ID NO: 294771 - protein, 356 aa, unidentified
MLNDKKYIGMDVHKESISIAVRNEAGKIVMECVIETKASMILQVIDGLRGDLHVTFEEGTWAAWLYDLLKPHVTELVVCDPRKNASMREGNQSDKIDARRLAELLRLNHLSPVYHGEHGLRSLKELVRSYLTITKDLGRVMSRVKAIYRSWAIPCTGKQVYAPRHRAEWLGKITEPGVRRRAEFYYQQLDALRALRQQVRRDLLAESKKHPAWKRLCQIPSIGPIRAAVLLGILQTPHRFRTKRQLWAFSGFGIETQSSADHRSVDGQLERVKKPSSIRGLNRNCNHDLKNLFKGAAIVASSKPGPFQEFYTALLTKGIRPEMARLTLARKIATIALIVWKRGVNFDAQHLKPQTA

SEQ ID NO: 294772 - protein, 361 aa, unidentified
MNPLYVGIDVSSKSNVVYLMLPDGSKHSNFSVANSHDGSTQLVKRILSAIKSLSLDTVIIGLEATSVYGDNLVYFLREDATLVPYDKKIHVLNPKQVKNFKEAYNDLPKNDYVDSYVIADCLRFGRINKEVYQSDYRYKALQNLTRARFFAVQNLVKEKQRFINVLFKKYSTMTQEKVFGDTFSTTALAVYEEFESAEALASMDLQELTDFIMEKGKNRFPNPDAVAKAIQKAARSSYRLPKTVNDSVNQVLSISITSIKALDAQIKEFDKAIKAQMELLPNVLTSIPGIGPVYSAGIIAEIGDINRFPSQAQLGKYAGLAWTQNQSGDFEAENTKLIQSGNRFLKYYLCEGALSLVKCDT

SEQ ID NO: 294773 - protein, 345 aa, unidentified
MKYYIGCDVHKKYSVFVTRDERNKVSQPVRVEHEKEIYRRYLETLPAGSPIAVETTGNWYWIIEAMEQAGHHPALAHAAKSKLMMGKINKTDKLDASGLAALLRNGTLPEVWIPHGELRDQRELPRMRLTLVHMRTALKNRIHATFAKYGITFEEESDLFGKKGRIAIMQHLPELPTETRHSVEQELEMLDRLGEQIDEAEKRVKEVIAVTPEMKLLMSMPGVGPILAITIALEVGDVNRFPDNQRLASYAGTVPRINSSGGKTRFGKTRPDVNRYLKHAFVEAANTIVLNQARWPDRHTVRLYQRIKANKGHGKAVVAVGRHLAESTYWVLKKQEPYKEPVAMK

SEQ ID NO: 294774 - protein, 338 aa, unidentified
MKLYAGVDLHSNNSYLGIINKKEKEIFKKKLPNDLEEIVTALIPYRKDLEGIAVESTFNWYWLVDGLKDNGYRVHLANPSAIKQYEGLKHSDDARDAFHLAQLLRLGILPEGYIYPKEERPVRDLLRKRLQLVQQKTSHILSFKNLVSRNLGFQMPSNEIKKLTEDDVEGMFKEEHLALAGQANIATMHFLKGRITEIEKAVLKRAKLRDEYSNLLTVPGIGKILALTIMYETGEITRFQEVGNYVSYCRCVASNRISNGKSKGEGNRKNGNKYLSWAYVEAANYAIRGYPYVRKYYQKKMARTNKIVAIKAISHKLARASYYVIKDQEVFNPNKAFG

SEQ ID NO: 294775 - protein, 395 aa, unidentified
MFFLGIDIGKNNHVASMLDASGNPVFKAFSFANTTDGGESLLSKIDKHGANSKNLVVGLEATGHYWLSVYSFLRDHGFRQHVINPIQTDGWRKGVEIRKRKTDTIDSLLIADLVRYGDFIEARLPDEAVLSLKNLTRFRTYLVDSISDLKRKVICVLDQVFPEYQSIFSDVFGVASKEVLAQFGSPAELEELSTDTLAELLAKFSRRQFGSDKADELSNAAKTSFGVTFCRDSFTFQLRMMIEQIKYIESQVKDTEAEIKRIMQTLASPIMTIPGIGKTLGAVILGEIGDITKFDNSKKLVAFAGIDATVKQSGEFEGTQNRMSKRGSPYLRRALFQAALVACVGKKPDPVLSAFYQKKIDEGKHHNTAVGAVARKMCNIVFRVLTENSPYEVRK

SEQ ID NO: 294776 - protein, 445 aa, unidentified
MARFAGGVAQAGYVSRIRGLDPEQCLVVAVDVGKRSAAALVADHHGRIVADLFEFDQTVSGLSRFVTVIADAERRAGAQSIRIGVEAAGHYHRAVATSLARNGFDVVELNPFQVKTARVQLGRARVKTDRQDCLAMVELLVRGQGWPLHRHDGPLAEQAMWVAQRCRKLDAAQVLGSQIHALADLAFPGLTGCFASGLESRTLRMLLATVPDPARVAAMTPTELVGHAADHGVRMLRPKAAQVIAAAAEALCVPDAQRATAARMLASETAAFDILQSELADCEQHLAEILPHTPAGVLLSVPGIGVITASYYGAALGDPWRFRNADAAYRYSGLTPTSYESAGRRASTVRISKIGSVQLRQAMITLGTSIALHHPDFAAYKQRLRAAGKKPIVATIAVAHRAHRLAFAIMRSQKPYDATQWAASTAKSRQAGRSVTATRKVTGTT

SEQ ID NO: 294777 - protein, 315 aa, unidentified
MDALVKVIGIDVSKAKLDCWALPAQEAWGIDNDDGGIAALLTQLRTRAPELVVLEATGGYETQAATALAAAGWRVAVVNPRQVRRFAQALNRLAKTDRIDAQVLAEFGRAVNPQVRPLPDAQTQELAALVARRNQLVQMRTQEKNRLPMTLPPLRPRVKEHVAFLDAAIARLEIDLTAKLRSSEVWCERRDLLLDVPGVEPILTCTLLAQLPELGQLNRQRIAALVGIAPFHDDSGKHQGRRTTWGGRREVRTVLYMATLAARIHNPVIRAFYQRLRGNGKTYKVAMVACMRKLLTILNSMIKHGHAWHYEIKIA

SEQ ID NO: 294778 - protein, 385 aa, unidentified
MNTATIAQPFIAEAQTATLFVALELSKATWLVALHAPDRDKLSQHRLAGGDVEALFGLIDKTRARAEAQLGKPVRVVSCYEAGHDGFWLHRLLREHGIENSVLDASSLLVDRRARRAKTDRLDVVGLLRTLMALARGERQVCQVVHVPSREEEDLRRQHRERERLVAEKGQHMARIKGLLMTQGIRAFEPGRRDWRERLAALRTAEGRVLPACLAAEIERECRRLWLAIEMLAAVEDEIASRLQSADELGAEQIQRLIALTGIGPVSAGVLVREVFYRDFSNRREVAHYLGLTPTPWSSGSVRYDQGIAKVGNPRARRMAIELAWLWLRYQPGSALAVWFRTRVGAVKGRMRRIMAVALARKLIVALWRYLVDGIVPQGAVLKTC

SEQ ID NO: 294779 - protein, 311 aa, unidentified
MAQIIRVAGLDVSKDRLDVAVHGGERCTVAYDAAGLRELEAWLCRQHVTTVALEASGGYEREAAEYFEAQAFLVRVLNPLRVRRFAEARGRLAKNDRIDADTIAHYAETFSEVRPRRDAELDRLAEAIQARHAIQEMILACGQQLEHLRTAPLRREITRQQAGLARTLERITRGIAELVAEHADWATLAERLQTVPGVGPVLAHTLIALLPELGRIDRHKIASLVGVAPFDDDSGKHKGERHIAGGRRAVRRPLYMAALVAKRHNPVIAAFAKRLTGKAPKEIIVACMRKLLVILNAIARDGAHWRNLSPA

SEQ ID NO: 294780 - protein, 337 aa, unidentified
MNVNLIAIDLAKSTFQVCGVNRQGKEVFNRATSRKKLTALIAQYPGIPVAMEACGGSNYWGRTFQKNGHEVLMIPPPHVKPFVKGNKNDRNDAFAISEAARRPKMRVVAPRSLEQTDMILLHRIRERRVRARTALMNQMRGLLSEYGIVLPAGAATLRKALPLLLEDAENGLTIAARRYMQDLLNEWRDLDERIQADKQSIHVIARESPAACRLMDVRGVGDMIATAALAKLGRGDQFKNGRQFSACLGLVPREHSSGGVQKLGGISKRGDDYLRRMLIQGAWSVLRYAEGRQDRLSRFALEVKERRGKHKAVVAVANKLARIIWSLVRHETTYCPA

SEQ ID NO: 294781 - protein, 450 aa, unidentified
MKKKKSKRTKGQEEARPFEGLSKVHQNAAGVDLGATEIVACVSGGDEVQLVKAFGNYTVDLHAICEWFRKYQVETVAMESTGVYWIPLFEELERQGFECLLISSRSLRRVAGQKTDVEDAQWIQTLHSYGLLKGSFRPEGDLVGLRTLLRHRSQLLEHRAPHIQHIQKALLQMNIQLSQAVTDVMGMTGQKILRAIVVGERKSENLAALREPGCKHSEEEIAKALTGTWRAEHLYVMKQSLELYDFYTEKIEACDAEISRQYGMTRPEWVKGELPAVSDKKRHAHSKNAPRDAKEIREHLYRINGVDLSLVDGIGVSLAQTVTMEVGSNVGEKFPTEKHFCAWLGLAPKHDITGGKVLNNRTLKTKNRAGQAFRMAAQSVKQAEDGKGWIVRGYNIGDEEIPVTVTPWRRFAKAQRVNMAEETVSRLKVGRGGEVTVNARGNEVVTVKFS

SEQ ID NO: 294782 - protein, 410 aa, unidentified
MEVVHAHCAGLDVHKDTVVACVRHMTDGKITTTVRTFNTATAELLALSDWLSAEVVTHIAMEATGVYWKPVWNILSDGEFELVLGNAAHIKNVPGRKTDVKDAAWLADLMAHGLVSSSFVPDQTTQEMRDLLRTRKQLVRERTSHTQRIQKTLECANIKLDSVISNVVGVSGRRMLEALIAGQTEPKQLAAMAHGRLQATPAELEAALRGRVTAHHRFMLRLHLDQVDSFDEAIARIDKQVSDNDQHFRAAVELLKSVPGIGSLAAEVIVSEIGIEMDRFATAGNLVSWAGLCPKNDESAGKRKSNRLKAGAPWLKTTLVQCAWGASRSKGTYLHAQYLRIRARRGNKKAICAVAASILTTAYHMLKDGTFYEDPGPDYFDKRNKDQQANKLVNRLQNLGFHVILQPVSA

SEQ ID NO: 294783 - protein, 377 aa, unidentified
MSSSIIWIGMDVHKDTVMVAVYSDDAREPEIVQQLPNDPRKLKRFFQRWGRRGEIRSCYEASGAGYVLQREITEWGHDCEIVAPSLIPIRPGDRQKHDRKDATQLARLYRAGELVTIRIPSAAEERVRDLVRCRQCFQREILRSRHYVTKFLARRGLVYREGTNWTRRHRSWLQSLFQQGGLEPEDRSVFSEYLALLDYKVSRREDLDGQIEKLAFSPAYKPKIDRLRCFRGVDTLAAMTLVTEIGDWRRFERPGQLMAYLGLVPSEYSSGDREHRGPITKAGNSRCRHVLVQAAWKYKHRPTVSVDLKKRQSGQLPQAIVHAWKAQHHLHKLFHRIAARKSSRIAVVAVARELVGFLWAVMQELETEQAVTLSTAA

SEQ ID NO: 294784 - protein, 325 aa, unidentified
MEKLYCGIDLHKENLAGCIMNKDGTTVRKHIFPSSKKAIERFLCNIPNSEITIAIEACGLWRGAYEVLTELGYKVKLANPKKTHDIACKKKTDKVDAKILADLLRTNYLPEVWIPDEKTMRLRDLTRHKSNLTRLRVSVQQKIKGYLLLKGKKYGKLWNEKSLSKLAEDEPNMRNLVNVYWCLKTEEKEVLNRIRKTARCMSETNLLMSMTGVGDLSSLMILAEIGDIKRFKTPKELISYAGLCPGIYQTGSTERNVKNNAVNKWLKWIIYECSGRAIMLDPRFQEYFYRVQQRKGYQTGRRAAARKMITIIWHMLTNEEPYRAS

SEQ ID NO: 294785 - protein, 408 aa, unidentified
MQVLYPRCAGLDVHKDVIVACVRCVSTPVHQEVRSFQTTTTGLQSLDEWLSAHACTHVAMEATGVYWKPVWHILEADFELVLANAAHIKNVPGRKTDVNDATWIADLLAHGLIRSSFVPPAPIQELRDLTRTRKQLVREISQHSSRIQKILEDANLKLGSVLSNVLGKSGRAILHALIAGETNPERLADLAEGTARKKRAELIEALHGRIREHHRGLLKVHLELVAALEQALADIDATVGKTLAPIRDSARLLTTLPGVSDLTAQVMVAEIGVDMSRFPTAAHLISWTGLCPRSDESAGKRRSTRVRKGAPWLKTALVTAAWAAVRVKDSYLQAQFHRLRSRRGAKKAILAVAASMLTAAYHMLKHGIPYRDLGADHFSSRDRSKAILRLVRRLNDLGCQVQLTPQAA

SEQ ID NO: 294786 - protein, 460 aa, unidentified
MNRKRSKSKVDRTMPVVHPNAAAIDVGATMHMAAVRADRAPEPVRGFGTFTADLHRLVDWFTECGVETVVMESTSVYWIPIFELLDARGFTVFLVNARDAKHVPGRKTDVSDAQWLQRLHSFGLLRASFRPKGHIAELRAYVRQRERLLEYAASHIQHMQKALTEMNLQLHHVVADITGATGLRIIRAILAGERDPEALACLRHYSCHSSAETIAKALTGSYRAEHLFALDQALALYDAYHEKASACDVRIEAVLKELSIHRGRDHGSTPPALRRRNRTDQANALAFDVRAALFGLLGKDVTTIDGLGPYLSLKLIAECGDDLSSWPSAKHFTSWLGLAPSNKVSGGKTLSSRTRRSGGRAAALLRLAAVTVGRTDTALGAFYRRLSSRIGKAKAVTATARKIAVLFYNAVRHGMDYVDPGASSYETRYRTRVINNLHRRAKAFGFVLQPLEPKAGAAVS

SEQ ID NO: 294787 - protein, 408 aa, unidentified
MDVMWARCAGLDVHKDTVVACRRVQKGREVQHEVHQFSTVTKELIELGDWLEAEGITHVAMEATGVYWKPVWHMLEGRVQLVLANAAHIKNVPGRKSDVNDATWIADLLAHGLIRNSYVPPQPIMELRDLTRTRKQLSREIVSHTQRIQRVLQEANVKLDSVISNVLGVSGRRILQALIDGVEDPEALAALGSPRLECSPKALVEALRGRVTGHHRFLLRQHLELIQTLEGTIREFDEQIERVIQPFRGIVERLSTMPGLSRVSAQALVAEIGVDMAVFPEVGNLISWAGLCPRLDESAGKQRSSRVRKGGCWLKPMLIQCAWVASRSKGTYLQSQYLRLKARRGPKKAVVAVAASMLTAAYYMIRDGMDYRDLGGDYFRRRDSERVAQRLAKRIREMGYEVAITKAA

SEQ ID NO: 294788 - protein, 323 aa, unidentified
MREFTGIDISKKTFDIYFEQNGQGTHVCFNQNKQDYKRFINLIGNECICIMEATGNYHVKLSRFLYENKLKVLVENPLKIKRFSQMRLQRNKTDKADSKMIYEYGKMVFIEKEIVGWKPDSNEIAELKQYDTVRQQFTKQLTALTNTQEAMGQLSDLQEQVDGALKLMIKHLKDALNQLDMQMQQIVETHHKDSYKLLTSIPGVGPKTATMMICLTDGFRKFDAKQVKPFISYIGMSPRTYESGTSVKGAGHITKVGNGRLRTLLYLCSWTAKRVNPQCAELHKRLFEKGKPEKVIKIAIAHKLVRQMFGVIKSGSSFSTVRA

SEQ ID NO: 294789 - protein, 391 aa, unidentified
MKKISTVQIFEGEIFKEQRLTIGMDLGDRWSCYCILDEAGRILLEQKVATTPEAMKQAFAKIPRSLIALETGTHSPWVSRLLTELGYKVIVAHAQKVQLISKSNRKDDRHDARTLARLARIDPELLGPVRHRSAQAQIHLTVIRARAELVSVRTALVNAARGLAKSYGQRLPKCGTQQVSRELGAGLPAELREVLEPLLKEIESLNERIQEYEVRMERIARESYPQVELLKQVKGVGTQIALTYVLTLEDPQRFPKSREVGCFLGLKPGRRDSGESQPQMRISKEGDRYLRTMLVQGAHYILGPFGADSDLRRWGLKLAARGGANAKKRAVVAVARKLAVLLHRLWVSGEGSGRQGCESNKVEVLVPSIACIRTASISGACRGNEARSARM

SEQ ID NO: 294790 - protein, 376 aa, unidentified
MEKLAMQFVGVDIHTNKFTCCYRDENSPAGGKSEKRTETFFLNASGILSFMDTLTPETHVLIEATITTFAFARIIQPLVKEVIVANTYELKQISLARKNTDKIDADILCRILKMQVLSGEMAISPVTIPPGPIQDLRGMFKTYQLYKKQTTQIKNRIHSLVKEKLFGFTQEEIFDKRSRENLRSLMQSDEVLSFQINELLDTLEFLEGKIQSIQDMIMEYAAPFMSEIEILTSMKGISVFIAIAIIADIINVGRFKNSKAFTSYLRSAPRVSNSNTKESGKGTNKKGRKIAATLITQSLNHMLEASEKLKIWYNNLKIFKKAGLVRTALRRRIFAEIFQMLKKGEFHYGRNERLHEAKILHYKKFLEKRKNLVKTS

SEQ ID NO: 294791 - protein, 341 aa, unidentified
MARLMVGIDVSQRTLDVSVGTPEAGVRFLGTFANESEHFGELAAAVQQEAKDGDLGIHLVMEPTGGYEIPLARFALRQGWQISLPNPRQVRDWAKGQGRRAKTDRQDSAMLTGYGMSTNPPTWQPLPEAVAQLDALLERRADLKSMLRQELNRRHALKAQQAYQGAVAHSIDQTVGWLEGALAEIEEAIREHIDRHTDLKAEAKRLRTVPGIGERNVLDILVFLHRYSALTNNQGTGKGVTACAGLDPVHHQSGTSLHKRSLISKQGDTRARSVLFMGAFGGVRGNNPLRAFYQNLVQRGKRKRVALVAAARKLLVWAWAVFRSQQAFDPQRAQARRPAAA

SEQ ID NO: 294792 - protein, 340 aa, unidentified
MGDITTIGLDLAKNVFQVHAVDVAGSVVLRKRLRRGQVLAFFAGLPPCLIGLEACATAHHWARELIALGHETRLMPPSYVKAYVKRNKHDVADAEAICEAVRRPSMRFVPLKTAEQQSALMMHRARDLLIRQRTMLVNALRGHLAEFGLVEAQGLHKVARLIAIVMDEMDGRVPHIARQVLKVIVSQIEDIQTRIAGLETQVLAWHKSNPVSQRLATIPGIGPIIATAVAATVADPNTFRSGREFAAWLGLVPRQNSTGGKARLGGISKRGDSYLRRLLVNSAHTVLLCSKAAKADPWLTSLLSRKPRLVVAVALANKMARMAWAIMSRPDLYRHAAVAA

SEQ ID NO: 294793 - protein, 297 aa, unidentified
MERVIGIDVSKARLDVDSLEDGRRLAVGNDAAGMVALADQLGLGAGDLLGMEASGGYEVNAARVRDFARASGRLAKTDRVDAAVIARYGAFARPAPTPLVTGARQMLAGLLAYRRQLTAEITARSQQLGHLATPALRQRAEAALGRLRAERQELAQLIAQAIAADGALATAAALLQSMPGVGPVLGATLLAELPEPGTLDRRRIASLVGVAPLARDSGTRQRRRPIRGGRSGVRAPPSMAALVASRSHPTLGAVDQRLLANAKPPKLALVVLMRKMLITLNAMLRCATPWRQLPAAS

SEQ ID NO: 294794 - protein, 397 aa, unidentified
MYIVGIDIAKRKHEAAVIDGEGTVIIKPFSFTNNCSGYNRLLAMLTKAKLPLDEVSFAMEATGHYWLALFTRLQKEGFRVQVINPVQTNSIRSFYIRQAKTDPRDALLIAEVIRFGHFSESTLHPENIYELRELCRGRHAIVSMQADVKRKVVALLDQVFPEYETAFTNLFSDTSMAILQTCPTPKELSEMPLEELCHLIEVSSHKRFRMAKAQELQELARNSFGFAMAGDVFSTMIRLYAKHLDFLKQQVREMDCKIAEIMDTLDTPITTITGIGLTLGAYILSEIGDISRFSSAAKLAAYAGIDPTMRQSGEYNGVRNRMSKRGSPYLRHAIWLAASSAVLHDPALKLYFQKKRDEGKPYMASVGHACRKMVSIIYAVMRDNKAYTPYIPNEISA

SEQ ID NO: 294795 - protein, 346 aa, unidentified
MDATTIAVDLAKEVFEVAGADRASRIVQRLRLSRRRFEGYLEQLTPGTEVVMEACGTAHFWGRRCRALQLVPTLLPVQYVRPYVHRNKSDRADVTAILEARRCAGIHPVPVKTAAQQVLQGLHRVRQQWQKTRTARINAVRGLLREQGVPVAMGAATFHRQIPTVLATLDGQVPARFIHLLQTLLAEIRDLEQRIQDLDAELTQALAEDPVAQRLQSVPGVGVITASALLGGVPHIHQFQRGRQFASWLGLTPREAASGHRLWRGQISKRGDVYLRTLLIHGARSVLAQAHTRARVGRMALTPLQRWAIALAARRGFNKTTVALANRLARVIWAVWCTEQPYRIAA

SEQ ID NO: 294796 - protein, 349 aa, unidentified
MGEVSTIGVDIAKSVFQVHGVDADGAVVIRKRVGRAKVIEFFANLPSCLIGMEACATAHQWARELKKLGHDVRLMPPTYVKAYVKRGKNDAADAAAICEGVTRPSMRFVPIKSVEQQSALMLHRTRDLLIRQRTQLINALRAHLAELGLVAAKGHEGLQQLVMAVTESSDKRLPSNARFACQSLVAQLYALQTQINGLDKRIIQAHRANADSKRLEAIPGFGVILSTAVVATMIDPRAFRTGREFAAWIGLVPRQNSTGGKERLGSISKQGDRYLRRLFVLGAISIVGTARTRPDKYPWVTELLGRRPAKVAAVALANKMARTAWAVLAKGETYRTPTRSSSAAIAAIA

SEQ ID NO: 294797 - protein, 404 aa, unidentified
MAVRERIWVGIDVGKAGHHACAVDDAGKVVFSQKVVNGQAAIEELIARADRKAGAVVWAVDMTSGSAGLLLALLLGSGQPVLYVPGRLVNRMAGAFPGEGKTDARDARTIAETARLRGDLAPVPRPDELVAELRILTARREDLMGDWVRGINRLRELLASIFPALERAFDYSTRSALVLLTGYCTPAGIRAAGEAGLAEHLRSGGAWPTTIPSIVDKAIAAADEQTVALPAEAATAPLIMRLARQLLDLDREIKDLDKHITGRFGEHPHAAPITSVDGFGPILGAQLLADTGGDLRAAFGNSGRMAAYAGLAPVPRDSGRVQGNLHRPKRYHRGLRRVFYLAALSSIKVKDGPSRRFYLRKRQEDKFHAQALIALARRLVDVIWALLRDGREFHRSPQLTAEAA

SEQ ID NO: 294798 - protein, 347 aa, unidentified
MRFYTKQHQFYCGIDLHARTMYLCILNQDGEIVLHRNMKAAPEPFLKAIAPYREDLVVCVECIFTWYWLADLCAREGLPFVLGHALYMKAIHGGKAKNDTIDAHKIAVLLRGGMLPHAYVYPAEMRATRDLLRRRVPLMRQRAELLTHVQQTNRQYNLPEIGKKIAYKANRDGVAERFSDPAVQKSIEVDLALIGHYDHLLRDVELSVLKTAKQHNANTLYLLRTVPGIGEILSLVLLYEIHDIERFPRVPDVVSYCRLVKCAKESAGKRYGTSGTKIGNAYRKWAFSEAAVLFLRNNPAGQKYLARIENTHGQGKALTVLAHKLARAVYYMLKRGVAFDLNAFLQR

SEQ ID NO: 294799 - protein, 341 aa, unidentified
MQITTIGLDIAKNVFQVHGIDAAENVVVRKQLRRSQVIQFFQDLPPCLVGLEACATSHYWARELAKLGHEVRLMPAKDVKAYIKRNKNDAADAEAICEAVRRPTMRFVQIKSADQQAQLMQHRARDLLMQQRTQLINALRSHLAELGIIAPQGREGIKELLAIIANEDNQHVPNDARASLVVLAAQLQALQTMIGAIEKRIVKQHRASKESKRIQTVPGIGEIGASAIAATVTNPKIFRSGRDFAAWIGLVPRQMSTGGKPKLGSISKQGDRYLRRLLVVGAISVMRRAKLHPGKFPWITQMLARRPFKVVAVALANKMARTAWALMMSGKTCRAARYAAA

SEQ ID NO: 294800 - protein, 348 aa, unidentified
MRFIIGCDFHPGYQQIAMLDTETGELVKKRLAHVGEEVRKFYAGLPGPALVGIEASGHSQWFEKQLRELGHEAWIGDAAKIRAAADRKQKTDERDALLILDLLQQGRFPRIWVPTPEERDARQLLLHRHKLVRMRTQVKNQLQALALNQGVRRKSKLWSVLGRAQLESLALLPWAARRREDLLKLLDDLGQGILELDRAVAQQAWARPAARRLMTHPGVGPVTALAFVLTTGPVSRFRRGKQVASYFGLIPSERSSGGKQRLGHISKQGNAFLRGLLVEAAQSAVRHEPELRRDYQRLAQKKCRALAKVAIARKLAVRLYWMLRTDSDYAQLLQGLHAGQPESSCGRS

SEQ ID NO: 294801 - protein, 368 aa, unidentified
MLYNVAGFTTFVGVDLHKCSVTLKAVSAAGEPAGHLTISTKCVEKIECWLRELPQPVWLAVEACPFVEWFIDRYRQCVARLDIADATELASRRGKRRKNDPNDALDIARRLARGECPLGFIADSALMQLRKLGRHWRQLSRLLSRSKHAMKSLLNAANLRGPRFDGAGAQRWLLAQGHLLKPVQRQAFADYLDVVMLAERHRERLRRELLWAARSEQFAQTQLLLETVPGIGDIWGLIIASEIGPFDRFPNSDALEFWAGLTADLKESAGRTQSGNITKAGSATLRWAVCQAAVTLCLCDARQEAIRQRLIKRIGKAKANVAMGRRLLRTLYALVRDQKPYRCEQRIDRTTRLNQARAAHTAKTEKVA

SEQ ID NO: 294802 - protein, 320 aa, unidentified
MSETSVVAGIDVAKAHVDVFVETAPALSERHANDSEGHAALTARLEPLAVQLVVMEATGGLEAPLACALQAAGFAVAVVNPRQARDFARALGRLAKTDRIDAEGLAALGRVLLTRADLARYLRPLASTEQQDLAAWVARRRQLVTMLVMERQRLAGARRAVRPSIKALIEAIERQLDRVDHDMLKHVTAHFAELDGLLRSTDGIGPVASATLIAELPELGRLNRRQIAALVGVAPIARDSGQLRGRRRIQGGRGRIRRTLYMATLSAARHNPVIRAHYQHLVAAGKLKKVALVACMRKLLTILNAMVRTRSRFQPGPAAT

SEQ ID NO: 294803 - protein, 321 aa, unidentified
MVYIGIDISKNNFVVAYPSTNGYSTKTFPNSTAGVRTFIATLSVAEHHCVMEATGNYCFLLLYLLHQSSIAVSLVNPKQIKHFARMMMAVTKTDEKDACMIAMYGEKMNPPIYKMPSQSIILLKQKKTVIRQLRKQLVASKNLRGSLIVLPYRDKACVRTLDKTIDFLTKQIEQLEAELADIASSEFDKQLKALTSIKGIGITLATALILTTGGFTYFDNAKQLSRFIGICPTYQQSGTSVNIKGHINRNGDEHLRSLLYVASWVALRYNASCRECYLRLKANGKPSKVALIAVSNKLIRQAFAIATTDSTYIDGFVSTKK

SEQ ID NO: 294804 - protein, 372 aa, unidentified
MNYNTVYVGMDVHKESFTLCSCKYEDEKASHYQRTPASYKNVLRYLAFLRTIYGEDTRFVCGYEAGCLGYSLYHQLENFNVECVILAPTTMLEQRSKRRIKTDKRDAEIIAKSLAQHNYSPVHIPTETDNQTKEFIRMRDDHKAELKKIKQQILAFCLRQGYQYDGSGNWTAKHVKWLRSLKTEGLYKEILDEYLLTYTILTDKLNRLDQRIEELASKEEYKESVSKLTCFLGIKIHTALSVIVEVGDFQRFVSARKFAGYLGLVPGQHSSGDDRNGLGITKAGNTHVRRLLVESAQSYTRGKIGYKSRVLRSRQAGNSPQIINYADRANERLRRRYYQMVLKDGKKYNIAKIAVARELACFIWGMMTDNIY

SEQ ID NO: 294805 - protein, 338 aa, unidentified
MSIVFVGIDLAKNVFAVHGVNEAGQPALVKPAVARGKLLELVAALPPCTIGLEACSGAHHWARQFTAHGHTVRLMAPKFVAPYRLSGKQGKNDAADAAAICEAVQRPNMRFVPIKNLAQQGQLGIHRVRQGFIEQRTATINRIRGLLAEFGIVLPLKASTVRREATGCLEDLPGWANTAVGDLLSELHHLDERIGQYDRHIAQMAREDSRAQQLMRLKGIGETTASALLAMIGNGHEFKCGRQFAAWLGLAPSQYSSGGKARLGHITKAGDPYMRSLLVLGARAVLNRARDQTDGLSRWAIALAERRGYWRAIVAIAAKNARMCWAMLARDESFAMPA

SEQ ID NO: 294806 - protein, 343 aa, unidentified
MTISMLGIDIAKNTFQLHGADNSGKAVHRKRLARRELAAHVANLPACTIVMEACGGANYWARVFQSSGHTVKLISPQFVKPFVKTNKNDANDAMAIVEAASRPSMNFVPIKQVEQQDMQSIHRIRTRIVRNRTALINEIRGLCLEYGVVLVPGAARVKSSLCAAIADGDSELTVSSRESLQGLYEELVDVEARVKNLDTKIRLLCRKNESCQRILKIPGVGELTATAIVAAVPDPGEFRNGRHMSAWLGLVPRQSSSGDKQVLLGISKRGDRYLRTLLIHGARAVLSHYKDKDNDYTRWVGRKKATLSHNKAAVALANKNARIIWSMLDTGEDFNYGAHAAAV

SEQ ID NO: 294807 - protein, 414 aa, unidentified
MIIAEEPTGARVCAGVDWAKDDHAVCIVGAEGEALQRFMVTHDRAGLTNMVHRLLRAGVDEVGIERPDGPIVDALLAAGLTVLVIPPAQVKNLRSRYGSAGNKDDRFDAYVLADVVRTDRRRLRPFERDTVATTALRTTVRARRDLVIHRVAAANQLRAHLQIVFPAAAGLFDSIDSEVSLQFLERFTTQGQADWLSVKRLSSWLASIGYSGGTDPGVIYARITAAPRGTIGADAATHAVMTHAYIAVLRTLNTQIRTLAVNIGAQLDVHPDAKIFTSLPRSGSVRAARLLAEIGDARGRFPTASSLACLAGVAPSTRQSGKVKAVTFRWGADKELRDALCDFAGDSRHSNPWAADLYAKARARKCDHPHAVRILARAWATIIWRCWQDHTAYNPAEHGGLQRILTQDQQTVAA

SEQ ID NO: 294808 - protein, 316 aa, unidentified
MKTKTETKAAPVYVGVDIGKAGLDVSFPGQVPCRYANSAAGIAELIKVLRKLPGSQVVCEPSGGYERDLLESLWAAGLAVSLVHAARVRSFARAQGRLAKSDPIDAVVLREFGELLRPGTLAEPSPERERLAAFVQRREQLVNILSMEDQRLTQTRDPVVRKMSERLLKALETQIEEMDELIAAHIAADATLKSQSERLQQVQGVGPVTATTLLAELPELGTLSRNESGALGGVAPYNNDSGEHRGRRTIRGGRVKVRRVLYMAALVATRFNPILKTFYDRLVAAGKPKKVALVAVMRKLIVLLNHVLKNPQFKLA

SEQ ID NO: 294809 - protein, 474 aa, unidentified
MWYTGIDWADEHHDALTIDEKGHQMGSIRVDHTPQGFAKLDTFLMQIIGSASKEQMACIIETTHGLLIVHLLEAGWPVYPVNPRTVDRRRAASGAKTDTIDAYLLAKTGRADFADLHRLTPDSDKVAELKQLTRDQDSLIRTQTRLVNQLTACLKAYYPVALDLFSKLQQKSTLGFLQAYPTLETARAASLQEIQQQLKHTRHPHPADAAASIVELLHQPQLQADVVLTRTKSRLMLALVSQLLPLMEQIATYDKEIHTLFLTHEDHAIFESLPRAGQHLAPRLLAEIGDDRQRYQDASSLQALAGTSPVLYQSGMYSKAHRRLGCIKPLRNALHQFAWQSTQSETWAMDYYQRKRTEGKSHTVAIRALANVWVRIIFAMWTHRECYQTAAFELAQQQHARRAAYCSLHRQATVCSCRTDNLSCCVCISHLADLSHAIHPHAMAYSLLLAYRHFSSLLSSVFLVPQNWSKKGLT

SEQ ID NO: 294810 - protein, 347 aa, unidentified
MKFYTKQHQYYCGIDLHTKNMFVCILDSGGNIRVHQNTRTDPGALLRILAPFREDIVVAVECMFTWYWIANLCTQENIPFVLGHALYMKAIHGGKAKNDKIDSLKIATLLRGGMLPQAYVYPARMRATRDLLRRRNHFMRKRAELFAHIQNTRSQYNLPDPLGCIAKPQNREGIVERFDDPSVQKSMAVNLEMIEAYDRLLTHLERDIIASAKEHDLRSYALLQTIPGVGRILALVILYEIESILRFPTVQDFASYARLVKCLKESNGKSYGPSGKKIGNAHLKWAFSEAAVLFLKGNEPGKRYLERLSRKHGKAKALSILAHKLGRAVYFMLKNKEAFNQKKFLGF

SEQ ID NO: 294811 - protein, 342 aa, unidentified
MDHSAGLDVAVKETSVCIVDETGRIVREVKVASEPEELLAVLMNPAYHFKRIGLEAGPLSQWLYSALAEAGLPVICVETRHMRAVLKAQINKTDRNDARGIAQMMRVGLYRPVHVKTLRSQKLRMLLTHRKLLQSKAIAIDNDLRGTLRNFGLKVGMVGKVRFEARIKELVENIPDLAVLVEPLLIVRRVLREQFVIQHRRLLAIVRDDEVCRRLMTVPGVGPVVSLTYRATVDVPARFHKSKSVGAVFGLTCAKYQSGEVEWSGRISRCGDEMMRVMLYEAAQSMLRSKKWSWLKAWAMQIARRRGMKRAIVALARRLAVIMHRIWVDGTEFRWTREVAAA

SEQ ID NO: 294812 - protein, 353 aa, unidentified
MTAIHYIGFDVHKKSVSFCIKTADGEIVEEGTILAQRDALREWARERKHPWKGAMEATLFSAWIYDTLKPFAGELHIAHPARMKAITAGKKKTDKIDARTIADLLRCNLLPVCYVAPPEMRDLRRLLRYRALMVRESVRMKNKIAGLLMETGTPFHKEKLHGKKYFAQLLKDLEEVPESVQDLLRLSRSSMEMFETTQKRLIRQLLVQPKLGQRVDRLASISGVGPITALTWALEIIDPHRFSSCADVLSYCGLTAALKSSAGKQQRGPISKQRNLWLQTTLIEAAKLAPRWNPQLAAVHARELERGHRNRATLAVARKIAAYLLAVDKSGKPFELRSPEMADLAAATLQKAG

SEQ ID NO: 294813 - protein, 340 aa, unidentified
MTFKFIVGIDVSKNWFNFCIMGSNFEIINEGELKNSPNGVLAFIEFLADGGYLEDMDDILLIMEHTGIYVQHLSKAWLAKTGKLCLIHSAKVSNLLSGLDHWDEKTDAMDARRLAEFAFRFADKIELWQAQKPNIKLLQALQRQRSRTNAAINLLEVPIKESKMFDDKKLSKQLEANHKNNIKGLKKTLKKIDAELLKVINSDEQLKKLYRLITSVEGVGPVTAREVIISTSGFEDFLPNQAKAYARYCGVVPLEKQSGKIKRKPRNSKRANKHIKTLMTMGATSLIGTNGELGQYYRRKIGEGKKHFSVINAMRNKMILRIFAVVRNEVMYKKNLNLSL

SEQ ID NO: 294814 - protein, 383 aa, unidentified
MKAVCGLDVHKDSIYLCILHPDGELFEQVFGVLTFQLHEMCKLLKKHHVSEVSMESTSIYWIPIWRVLSPHFTLRLVNPYFIKQLPGHKSDVKDAQWIAECTMKELVNGSFVPPEIIQQLRQYDRRIFDLNEEIVRKESKVDAVLQRCNIRLSNYVSNIECKSYRTVVRRLSEGVTDPQELIKEIHGRIINKHGRETILASMEGVVSQAEIDVLRQLREEIDIAESHKKECQDKMSEICQKYFPEELRRLQTIPGIKERAATSLIAEIGTDMSKFETANHLAAWSGLRPRNDESNKKVKSRKTTHGNSYLRRTIIQCAWAASRQKDCFFSWFSYHQTVVRRKNKMKVIVAVARKMLVAVWHVLHDNVEYIDFKHDCEESANNG

SEQ ID NO: 294815 - protein, 333 aa, unidentified
MNECAVGVDVSKKKLDVCVATGDKIKTKVFKNTAAGHAEFNRWLSERALPADAPIVLEATGPYSEAVAIVLSEAGWAISVVNPARVTGFAQSQMSRNKTDKADAKLLATFAQRADLTIWTPPSVAVRQLRALVDRLQALTDMRQQELNRLEALDQGVPSNVTGMVEAHVDWLNAQIKTIQSEIDDHIDGNPELKHDAELMRSIPGIGHRASAQFLAYIGDVRRFKNAKALAAFVGVTPKQKQSGTSIQGRTMISRAGHRAARKSLYMPGMVAKRHNPVIIAMTKRLEKRGLTPKAIVGASMRRLVHMIYGVIKSGRPFQADIPMAGLAIQEGI

SEQ ID NO: 294816 - protein, 345 aa, unidentified
MELQTIGIDLGKTVFHLVGLNPRGEVVVRKKFTRKQLLHFTANLRVELIGMEACGGAHFLGRALREQGHEVRLMPAQYVKPYVKTNKSDYIDAEAIAEAVGRPKMRFVPIKSDDQLDLQSLHRVRERWVMRRTAVINQIRGLLLERGITLRKGRRHVDAALPGILEDASAKLSGALRMLLAQLKLELDHLQMRIDEADAVIKKTAGNNEACRRLVAIPGIGPITATAIIAAIGNGVAFKKGREFAAWLGIVPGEYTTGGKQKLLGISKRGNSYLRRLFVHGARAVLQQSAKQSSGLSSWLARLTTRTHRNVAAVALANKLARMAWAVLAKNEAYRPPILVGAAAA

SEQ ID NO: 294817 - protein, 375 aa, unidentified
MKEKVRFLGLDVHAQTIAVAIAEPDGEVRSLGTIANRAESIRKLVKKLGPTEQLKACYEAGPTGYVLYWQLAELGVACEVIAPTLAPVKAGDRVKTDRRDAERLARSYRSGDLTAVWVPDEGSEALRDLVRARESAKQDQLRARHRLSKFLLRTGQRPAAGVKAWTLAYMAWVRQLRFPQVAQESTRLDYLHEVEHMGERVVRLEKAIMEAVKLAAPAVQEVVKGLQALRGIAQISAVTIASELGNVSRFAGARQLMGYSGAVPSEDSSGKRTKRGSITKTGNAHLRRIAVEAAWSYRLRPGVGPALRKRQEGVPEEIKEIAWKAQQRLHKRYCRLAAAGKDQRKIITAVGRELLGFVWAIGIKAEAAAKQQMAA

SEQ ID NO: 294818 - protein, 434 aa, unidentified
MTATDSSARPRILVAIDIAKAKHEVLVELPTGKRRKMIVHNQLSDFRQLAAYLKRLEGALEIALEPTADYHRNLAYFLKVQGFAVKLVSSIAVARTREALHNSWDKNDPKDAQVILHLLRNGNTQYFYDPVIEQTNDLQELSKTHFQVSLRKTRVQHSLLNHYLPLYFPEAERFLSTSRSSWFTRLLFEFPTPQAITQLTENEFLERGSQLLRRKQSKAAVLRALYAKAQESVALPVPLESQAIATFRLTLAQHLELCRIRTELEETAHELLQDQLDYQILRSVPGVGPIIALTVLAEAGDLRRFGHERQFLKFCGLDLATSQSGAYRGRTQLSKRGNSRLRSALWMAARRATHMQENTFRQKFSRYLRADTTNTDLKRKAYTACTAKMARTIYGLIKHQQFYRAYREDAIPEPGGRTRSHGPLRQAASGGLTS

SEQ ID NO: 294819 - protein, 481 aa, unidentified
MSARRSPCTMKMRYADTHRGPVNVGDAWYCESAMSLTWELPAPRIVALSTQSRVVRTRLLRATAIPNPKEGAMEQLIARCAGLDVHKETVVVCVRVPGPGLDRLQHVRTFGTMTVDLLALRDWLTAQDVTQVAMESTGVYWKPVYYVLEEAVTCLLVNAAHMRNVPGRKTDVQDCVWIAQLLEHGLLRGSFVPPVPIRELRDLTRYRKVLIQERVRETQRLQKVLEDAGVKLASVATDILGASGRAMLEALVAGTTDPEVLAELARGRLRAKLPALRTALAGRFRGHHGFLVGELLAHLDYLEEAIDRLSQQLEDHLRPFAPLVQPLDAIPGINPRAIEGIVAEIGVDMRPFPSAAHLVSWAGICPGHHESAGKHTSGKTRKGNRWLRTALIEAALGAIRTKDCRLAARYRRIMRHRGHKKAVVAVAHTILVIIYHMLTHHVPYQEVGAAYLDQRDREQATRRYVKQLERLGHRVVLEPAA

SEQ ID NO: 294820 - protein, 368 aa, unidentified
MEKIGVVGGRGQEGLPAPKRPPDGTPVWMAMDISRSKAVYCLRWAGSEQRRLSTPLGIAHVRALLEHYRGCQVHVAYEACGFGYELAWWLQEHGIARMVIAPSRVERVPGLQVKTDRVDVGKLARKLEKGDLKAIYIPSRPVHEQRQIGRTYAQCLKERKRAQVRIRSLMQEQGRLGPLPAVGWKVYSAWLGAQNLPQSVRLCVQAHEQLRALADQQAQRMKAELYKLARGAEYRPLVKALSAQAGVGWQSAIRLVLELGDIDRFRTTAALPHYLGLTPSQYSSGELDHRGHILKCGPGFLRALLLQCAWSAIRQGHDTELQERFANLAPRIGHKRAIIAVARKLAIKLRGRWRTHLMASKPAAAVAV

SEQ ID NO: 294821 - protein, 412 aa, unidentified
MDTLIERCCGLDVHKDSVSACVRLPGPKRARRQERARFATTTSGLLALREWLQAHGVSHVAMEATGVYWKPVWYLLEADFELLLCNAQHVKRVPGRKTDVSDAQWLAQLLEHGLLRSSFVPPLPIRELRDLTRLRSSFVQERTRSSQRLDKLLQDAGIKLSSVASSLLGASSRAMLEALVAGSRDPQALAELAKGRLRAKLPALREALEGRFSDHHGLLIGQLLNHLDHLEQTISALSEEIESRLAPCARELELLQTIPGVGRCVAEVVIAELGTDMSRFGSHRELASWAKLCPGTKESAGKRRSAGTGKGPVWLRSMLVQAANASLRSRDSYLSAQYLRLRARRGHKQAIVAVAHSILVSIYYMLLRGEPYHELGPTHLQRYDREAQRRHHLRQLERLGLRVSVEPLAEAA

SEQ ID NO: 294822 - protein, 339 aa, unidentified
MQTMPIGIDIAKSVFQIHYIDAATGEIVNKALKRAVFLEYFSNRSPCLIGMEACGGAQHWARALTRLGHTVKLMPARFVKAFNIGNKNDAADARAIWLAVQQPSKSIAVKTEAQQAVLALHRMRQQLVKFRVAQSNNLRGLLTEYGEVMGRGRTALNAAFPVVLARLVERLPAVLIDTLRDQWNGLTELDKRISEIERRLGQWMKQDAAVKAIAEIPGVGLLTATAAVATLGNANTFRSGREFAAWIGLVPRQTGSGGKVALLGISKRGDTYLRTLLVHGARSVLRIQKDPQSWTEQLRGRRPLNVAIVAQANKTARTIWAILAHGTKYEQGHISKRPA

SEQ ID NO: 294823 - protein, 381 aa, unidentified
MEVTYTHCAGLDVHKKTIVACGIVSSPGQKPVRKTQTFGTWTSDLLALSDWLSGQGITHVAMESTGEYWKPVYNLLEANFTLLVVNAQHIKNVPGRKTDVKDAEWIADLLRHGLVRGSLIPPLPQRDLRDLTRQRTKLVQEKAAVVNRLQKVLEWSNIKLASVVTDVTGVSARAMLKALVAGVEDVRELADKAKGRLRSKRQQLEGALNGNVRSHHRFLLTHHLTHLDFLEAQIAIFDDQIQTQILAQTLSPQSSSNSSGDTIENNLRESDDSPLTGEQAIILLDTIPGVGQATGEMLLAEIGLDMSRFQSAAHLAKWAKLCPGNHESAGKRYSGRTGQANSWLRTGLVQAAHAAVKFHKSKVKSQKSKVLPLPEVRGFST

SEQ ID NO: 294824 - protein, 357 aa, unidentified
MFYLGIDQHAKQLTVSLRDSTGDVVLRRQVSTQPEKVLEFFERLTRRCVEHDCGFWAIVEVCGFNDWLLEMLKNFRCDRILLVQPEETDRRKTDRRDAAKLSEQLWLFRDRIAAGKRIDKLKIVTIPNSIRLQQRRLTTLRKDARAACSRSINQIKHILRRHNLQHHMPTKTFPTKAALLWLDTLQLAPADTLELRQHREDLERFTHRVAELDAAIAELSVDDEAAQLLMQTPGLAQFSAVALSSRIGDIKRFKRPRSLANYFGLTPGSRSSGDKVRIGRITKAGSGMARWVLGQASRHILRTDPAMKAWFNKIKRKKGSGVARVAVMRRMSTIIWHMLDKQKTYAQVRNLGIGLQE

SEQ ID NO: 294825 - protein, 352 aa, unidentified
MEKYIGCDSHQRYSVFVTMDEKGEAGVPVRVEHSGGELRKFLGTLPPGAPVAVEASGGWYWFVDALEQAGLEPHLANPLEAKKQMPGRKKTDKLDARGLATLLRVGTLPEVWIPPAKLRDLRGLMRTRLSMRQQGTFLKNRIHAAIRRYGLRQDAFAGLFSGKARITLSGYIDSLPDHTRFATTQEWEMLNQLERHIDRLEVRIREGICKLGWVRLLKTLPGVGDILGATIHLEIGDVNRFPAPPHLAAYAGLVPSVHSSGGKTHYGPTSAQANHYLKWAFVEAANAIVMHRDKYSEQHVGQLYQRLKERKCHGKAATAVARHLAESSWWILKKKQEYRAPHAAAMSSSRNG

SEQ ID NO: 294826 - protein, 332 aa, unidentified
MVAGTQGSLNKAGSRKMTQISTTAGIDTSKAKLDVAVHGRAEHWQVDNSPAGWRRLAVALTSAEVTRVGIEASGGYERGVVGYLRDKGFVVVMLQPLQVKAYARLHLRRAKNDRLDAVLIAACAAMIDQGRIEPDQRLVALAQHLTFVEQIEEDIARFKVRIEHVDDPRHRRMVVADIARLKARRLVELKRIVAALRAHDDLARRLDLVLSVPGIGERTAIALIVRMPELGRVSREQAAALAGLAPFDDDSGKHNGERHIAGGRRRLRRSLFAAALPAAFHWNKTLIELYSRLTKRGKAHNEALIACARKLLIYANTVVQRGTPWTETPAAA

SEQ ID NO: 294827 - protein, 399 aa, unidentified
MRTIIGLDVSKATATLSVATEGKTVYDSTITLDAIGFNTLKAMVSSYDRPEVVFEATGVYSRRLEKFLLDQGILYHILNPLVAKKRLDDGSRLRKNDIRDAQGLALTEFVKQPVAFKPRFIDPVYRELMDLSRYYDQQTEDLKREKNRLHRSIQLTFPNFDDEIDLSRRSGLAVLRLFPHPSRLRQGSFEAIKQKILELQLAGIGEGRADTLTRRLWQANAISYPAVDEQSLVIKQVQDQVDNVLRIMDGREETIAYMTMLAHQLPEYEILLSIPGIGENTAVRILSEIGDVRRFMTRAQINSYIGIDLVEIQSGDYTAQRRITKHGNPHARKLLYWTVVNMISSTAKPNHIRDFYVKKQETASRRKPLLVACMDRLIKIIHYLINTNQNYSDELACSR

SEQ ID NO: 294828 - protein, 341 aa, unidentified
MNVTTIGIDLAKTVFSIHGTNQHGKVVVRKRLNRPKLLAFFAQLPPCLIGMEACSGAHYWARELTKLGHDARIIAPRFVAPYRKSSKNDDNDAEAICEAVSRPNMRFVPVKTEDQQAVLCLHRIRRGLTKERTAQINQIRGLLAEFGLIIPQGRYHARHRIPEILEDAENGLPMLARRLLNNINQRILQLDEEILAYDREIEAMARRDEQAKRLMAIPGIGPQTATAILASAPDPRQFKSGRHFAAWLGLVPRQYSTGGKPRLGRITKRGDKYLRTLLIHGTRAVIAKLDDKHDQLSEWAKGLVERRGYKRAAVALAAKNARIIWALLMNQTEFKTQPAEG

SEQ ID NO: 294829 - protein, 342 aa, unidentified
MKDTMIGVDLAKNVFQLHGASMTGEVKFRKKLARGQFLRFMADQAPALVAMEACGSAHHWARELVRLGHEVKLIAPQYARPFVKRQKNDAAEAEAIVTAVRQPEMRFVEPKTPDQQARAVLFRARERIVHQRTELVNALRAVLYEYGQVVPLGIGHIKRIERMIEDDCIDLPEIVREECHDLLAQIGEKTARIDHKTKKLAELSRQSDDARRLQTMPGVGPMIALAVEAFAPAMVSFRCGRDFAAWLGLVPRQFSSGGKERLGRVSKAGQADIRRLLIIGAMARVSWASRKPPVQGSWLARMLARKPRMLVAIALANKMARKIWAMLTKQEEYRDPVVAVAA

SEQ ID NO: 294830 - protein, 424 aa, unidentified
MITAKQWFAGVDWASESHLVRLLDEQGGDVGERSFDHSGQGLAAMAGWLLAASGADDPGRIHIAIEVPHGPVVEALMDYKFDLWAINPKQLDRARDRYSPSGAKDDSRDGLAMASSLRTDPKFFRRLSPTDPLIIELREWSRIAEQLTAERTSLTNRLRQHLWRYFPAFLELATELHAPWLLELWKRVPTPAKAKRVHKASIAALLKRNRIRRFDAQTLLDVLRQTPINVAPGATEAATAHIVVLIESIRLTNRQIGDAHKQIDRLVGELPAARDDQTGQPKQRDADILASLPGIARTVRATLLAEASDALQRRDYHALRCLTGIAPVTIRSGKSRFVQRRYACHRRLRNAVFQWARVAVQHDPLSEAKYNALRARGLGHARSLRSVADRLLNVACSMLKSGSTFDPHRHPARRGSPSPTVIAA

SEQ ID NO: 294831 - protein, 387 aa, unidentified
MAQVNDLSRSLTAFDPISTLVVVVEMSKASWLVSGVVPGIERQPLKKLESDATALLRLIERWRNEAMRSGRPISRITLAYEAGRDGFWLARWLITRGIEAHVIHSASVAVSRERKRAKTDRLDAAMLMRVFLGWLRGERGHCGMVVIPTMEEEAARRPSRERESLVNERSRITNRMKSALARLGIRGFKPHLRKAPERLAGLRTAEGTGLPANVIEEFRRDMARLALVREQISSIEKTRAERLERAPDTGPHAMVRLLARVIGIGIETADMLVREILSRRLRDRRAVARYAGLTGSPDESGLKRREKGLAKAGNARVRRGLIQLAWRFLMFQKDSALARWYRTRTEGPSGARKTTMIVALARKLLIALWRLVTTGEVPDGVELRTAA

SEQ ID NO: 294832 - protein, 345 aa, unidentified
MKSRTKKTLYCGIDLHSNNAMYVVTDQTDKVVFKKRIQNQLPVIVSALKPFKSKLVTVAVESTYNWYWLVDGLMDQGYPVVLANPAAIDQYDGIKDANDLTDAAFLAHLARLDILPTGYIYPKEERPVRDLLRRRTLLVRQRTATKLSLQNMFMRQAALNINWRKIRKLTPEQRVNVLGDNEFLLFVTESQIELIEVFNKKILQFEKKVLEHAKLKPEFELLLSIPGVGLILALTIMLETGTIDRFKKVGDFTSYCRCVRAKRQSNGKSKGSNNSKNGNPHLAWAFVEVVHHAIRRSPQAKKFYDRKKSKRNGALATKALGAKWSKGAYYVMKRQEPFDLKRLFS

SEQ ID NO: 294833 - protein, 458 aa, unidentified
MVRNRSTNKAKPAMSLVHPNAAAIDIGATMHMAAVSADRTPEPVRSFGTFTADLHRLVDWFTECGVETVVMESTGVYWIPIFELLDTRGFAVFVVNARDAKHVPGRKTDVSDAQWLQRLHSYGLLSTSFRPKGRIAELRSYVRQRERLLEYAASHIQHMQKALMEMNLQVHHVVADITGSTGMRIIRAILAGERDPAVLAALRDSRCRADVETIEKALGGNYRAEHLFALEQALALYDSYQEKVLACDARIGTVLKELSLERDRCTTPVPPPGRRMPSTANALDFDVRAALFKLLGKDVTRVNGLGPYLTLKLIAECGDDLSAWPSAKHFTSWLCLAPHNKISGGRVLSSRTRRSGNRAASLLRLAAISVGRTDTALGAFYRRLAARIGKAKAVTATARKIAVLFYNALRYGMEYIDPGALAYETRYRERVIDNLQRRAKTFGFALQPLEPTPDNAVS

SEQ ID NO: 294834 - protein, 346 aa, unidentified
MSYSTTVGVDLAKNVIQISVVNGRGKELSNRSLTRKKFAEFLGKQKPSLVAFESCATAHYWARAAERHGHEARIIPAKAVAPFRQGHKTDSNDALAVAEAARRPNIKEAPIKTVEQQGLQAMLRARDRLIQECIAQSNHMRGILLEFGIAIPQGFASLLRALPEILEDGDSELPDFYRPTLHRMYHRMLELREDIDAMTKEVGELVKNHPVCRRLTDIEGIGPIGAMSLYATLGSGAAFAKGREASAYVGLTPRQYSSGGKANIVGLSKYVGNRKLRSVLIQGALAYVYRMKEPRSGKDRWLEQLIERAGPRRAAVALANKNVRTAWALIAQGTEYQRRPQLEMAA

SEQ ID NO: 294835 - protein, 340 aa, unidentified
MKKLYGAFDLHSSNNYLGISDEKDRRIYKKRLPNQPDVILAELEPYRDELVGIVVESTFNWYWLVDLLMEEGYRMHLANPAGIQKYKGLKHSDDQDDTFWLAHLLRLGILPEGYIYPKEERPVRDLLRKRGHLVKLRTSLINSLQGIIHRNCGVKLNATKIKALKVNNVAPLLSGQEDLALSGMVSKETIDYLGQQIRKVENIILGKIKLKDEYLYLLTIPGIGKILALTIMLEAGPMSRFQKVGNLTSYCRKVPSKWTSNNKKKGKGNKKNGNKYLAWAFSEAAEFARRYDDHARAFYNRKASKKNFMVAHSALAHKLARAAYYVMRDQVAFDPQKLFA

SEQ ID NO: 294836 - protein, 472 aa, unidentified
MKSKSSRKPNPVDPVAEEIPDAEHELVIERVAAIDVAKASGKVCVRLPGKTGRRFSRVWDVPARTGAVSELAEQLIESGVEKVTVESTSDYWRIWYYLLEAAGLDVQLVNARDVKNVPGRPKTDKLDAVWLAKLTEKGLLRPSFVPPAEIRQLRDYTRLRVDLTRERTRYWQRLEKLLEDALIKISAVASTLDTLSTRDMIEALIAGERDPGRLADLARGKMKAKRSELIAALDGRFDDHHRELARMLLDQIDTLTAQIATLTSRIEQLLAAMPDTRSRGDGGTGGDPDRPSTGHGVEPETAARFTDATLLTPVERLDEITGIGELNAQVVLAEVGLDMTRFPTPAHLVSWAKLCPRTIQSGPVTRGGKTGRGNPYLKGALGEAAAAAARTDTFLGERYRRIVKRRGKLKALVAVARAILVVIWHLLANPEARFRDLGPDYHTQRIHTERKLRNHIAQLTAMGYRVTLEPAA

SEQ ID NO: 294837 - protein, 345 aa, unidentified
MPIVGGLDIHRKQLTFDYLDTVTGEVKRGQVAPADRAHLRAWLARFAGRDDVAFAVEGCTGWRYVAEELAAAGVAAHVGEPADTAAARGRKRHAKTDKTDSRHLRRLLAEGRLPECWVPPAQILEYRALLETYHDLRAAHTAWVQRIHAVFFHQGAPALGEGALRTEPGLEALRAAAAACLSPAGQLQVATALDMLAAVEARMEMLRAQLRDAARHLTGAKVLAARLYGVGPVTALALTCWLGGAGRFSSSRKAVRFTGLDVTVWSSDRKGPPGRLSRQGPPVLRWAVYEAGKTHARSSAPDHGYYATVADRKNSKRAALSEARKIVRQACHILTELGDDALTAT

SEQ ID NO: 294838 - protein, 345 aa, unidentified
MPNTERGFAQLVDMFTAHHVQRVGIEGSGSFGRAVAVHLALCWQSGQPVAVVEVPTLMTSRERHGQLGKGKTDPVDALAIARITTREQQLPPVRLTVGAAADLRALLDYREDLVRERGALVNRAHAELGGLRPGYQQQIPIMTTRARVRAAVDLLGDDSSIRATLCRRRLERVLAIDAETAELKQQITRLVAAADTTLTDLYGVGPLVAARFLAEVVDIRRYPNRNAFAAANGTAPLPASSGRTVRHRFNPGGNRQLNRSLYTIALTQIRGDTEGRAYYERKRAAGKSKREALRCLKRRLSDIVFTTMRHDAASADASCDQASPPAWPLLVGVGAVDANEARLTA

SEQ ID NO: 294839 - protein, 342 aa, unidentified
MSEIKYCVGIDIASKTFTAAVGQMPWKLVVKPETFENMEDGYQMLLEWFEKHHLPASETIVCMEATGVYCEGLAYFLYAQGYRVAVEPPLEVKRAFKPYGRKNDAVDSEQISEYACRHCDELAWWKPRSEILEQVKALLAVREQFVTQKVAHHNALLALRRKVIRTSFGEQAYERLIQQLKNQVKAIDDEIRRLIESDPTLKEMLLLLLSVPGVGLLLAAHFLLLTQYSLDSKVLASFLGIAPNEHSSGTSVYKHDTSRHFGPPVIRKLLYLAACSVCAHRPQFQAYLLRKTKEGKPPRLVLNNVENKLVRIMCAVLHSRTAFIPNYHPVQPFAFQMALTKS

SEQ ID NO: 294840 - protein, 368 aa, unidentified
MNSVKFIGMDVHKKTITIAIAEEGSRESARVYGTINNDFDALDKFCRKMLSTSNQLNFVYEAGPCGYSIYRHLTQKGFDCIVAAPSMIPRKNGDRIKNDHRDAKSLARLHRSAELTAVYVPDAQDEAMRDLCRAREDAVIATRKAKQRLNAFLLRHAIIYSGKTNWSKAHFNWLADIAMPHCAQQIALQEYIDAVHENLNRVQRLTEQIQQMVPDWRLAPIVNALQSARGVSLIVATTMLSEIGDLGRFQNPRQLMAYLGLVPSERSSGCTIKRGAITKTGNKHARKALIEAAWAYRMQPRVSRALKKRQETLTDPVRQIAWKAQLRLCARYRKLMAAGKSNKLAVTAIARELSAFLWAIAKQQQPIT

SEQ ID NO: 294841 - protein, 338 aa, unidentified
MEFQILGIDIAKNKFDCSFIAAPNSPNGRKAKSKVLPNNPTGFAQLVVWLAKNNGADAPNIKVFMEATGVYHEALAEFLYAQGFAVYVFNPADAAAYIRSDNLHKTDKSDARALADMGIDRLAKGSAGKSLWQPAPPEVKQLKALLARLDALEVDLQREDNRMEKACAVSSPALVVDSIATMQTQLRKQIDGLKSEIDRHIDRHPDLKDDIRLLKSIPGVGEVVSLRMLTLYRSRDFKSASQMAAFVGLVPKKRESGQFKGQSRLSKRGNPLIRAKLYLAAVCATRFNPDIRAHCERLRAKGKTKMQTVGAAMRRLVQICYGVLKHRCEYQAQVMLAV

SEQ ID NO: 294842 - protein, 374 aa, unidentified
MLSARPAGACRPPPDQQKELAITTIADPERPRVTVGVDTHLDVHVAHAKDQLGRRMETVSIPTTPAGYQDLLAWARGLGEVEAWGVEGTGCYGAALTRFLGDQGQVVLEVNRPDRQARRRRGKSDPVDAEAAARSVQAGEVTTVPKAGNATVEMIRSLRVARQTAIKARTQAINALKALLVTAPAQLREQLRGRSAAMLVRQAAALEPGPLVTPTAAAKLALRCLACRYQALHAEVATLDTELARLVAKAAPGLVARFGVGPDSAGALLVAAGDNPGRLRSDACFSMLCGSSPIEASSGKTRRHRLNRGGDRQANAALYRIVVVRLRWHQPTKDYMARRLTEGKTTKEIIRCLKRYVAREMFTLLNQTVPTPAT

SEQ ID NO: 294843 - protein, 367 aa, unidentified
MRDDITYVGMDVHKRQTQVAMVRGDGQDVVEWSCATDMKRLARRLKREAKGELFCCYEAGPCGYWVQRELTKSGIRCIVVAPSLIPRKPGDRIKTDRRDALKLARLLRVGELTEVHPPMRDEEAARDLCRAREDAKGDLKRSRHRLQKYLDRRGVVWGKGAWTLAHRAWLRGMKLRDPIEQAVFDDYLRTVEWNEERVKGLEERLGALSEQAPYAEPVSMLRCFRGIDTVSAMTLVTELHGFMRFQSPRALMNYLGLVPSEDSTGERRRQGSITKTGNGHVRRILVEAAWHYRHRPYVSRGLRARRAGQPGHAIALADRAQQRLHRRYWHLVSRGKPTNKAVVAVGRELIGFLWAVLYPQSLETQQA

SEQ ID NO: 294844 - protein, 387 aa, unidentified
MPQPNDLSRSLVALDQNSTIIAVVELSHSSWLVAGMLPGIEHQPRKKLEASPERLLALLHRWRDEAVRAGRTITRIALAFEAGRDGFWLARWLAARGVEAHVIHASSVAISREHRRAKTDRLDTELLKRGFLGWLRGERGHCSMARVPTIAEEDAKRPNRERDCLVGERTRIVNRIKSTLARLGVRNFKPTLRKAAEHLATVHTPEGMPLPPNTLAELQRDMARLGFVVSQIREIEDARQKRLEQQHETGSHAMVRLLARIVGVGVETADMLVHEVLSRPMRDRRAVARYAGLTGSPDESGAQRREQGLARAGNARVRRGMIQLAWRFLMFQKESALAMWYRARTADSRSGTRKTMIVALARKLVIALWRFVTTGEPLEGVILRPAI

SEQ ID NO: 294845 - protein, 316 aa, unidentified
MANLTQSKSVVNVGVDVGKSFLDVCIHEKQIYFQEENNSKGIQSILKRLSYYRVERLVVEATGRYEFALVEAAYSKEIPVCIMKPLSIRRYAGAVEQLAKTDKIDAKIIAEFAAVIKPRPTPEKSKNLLAIKDLLSRRRQLMESRTQELNRLQIMGKSLEASCKRIIKVLDKEIDRIENLLTEHINEETEWSEKRELLIGTPGVGNTLIFTLLADLPEIGTLNNKEISSLVGVAPMNRDSGAMRGKRKVQGGRATVRTILYMATLSATQCNPVIKHFYRKLVAQGKHKKVAIVACMRKFITILNAMVRDKKEWCHA

SEQ ID NO: 294846 - protein, 367 aa, unidentified
MLRTNLHNPIDFNGQKFYVGLDVHKKSWAVTIRSRGIQVAHFTQPPGAESLVQYLEKNFPGGQYYSAYEAGFCGTSIHEQLCQEGVVNIMIHAADIPATDKQKKNKTDLHDSRAIAEQLERGNLNGIYVLTRAQQELRSLFRQRQDHVQEMVRANNRLKSCMMFFGVSLPESIGKKEYLSLKALAWLNDYEMITAAGKITLQQYAEALRYQRKQLYQTTKLLQGQIKLVHAKSYECIISIPGVGVTTTMGIIAEVADFNRFKDPDDYCSFLGLCPWEDSSGDTVKTKGMQPRCNRHLRPLLIEASWTAIKKSPALFAYYSKHAAKNSKGAIVKVSRKVALTIRAVALSGKLYQADYARPQQKPAAKG

SEQ ID NO: 294847 - protein, 337 aa, unidentified
MEANHMLYAGLDIHKKTCQTVICTQDGKIIKEGKINNKPEVIKDFFKEFKEITIAIEACVNWEYIFETLEEEGYHVVLAHPLKTRIIAESKVKTDKIDAKILSHLLRTGFLPTSYIPSKKTRDLRNLVRQRVALGKYRAKFKNKICAELLRRGIPYERGGAIFTDKGRRWLRSLHIPTIDTYLPLLESVMKETDKLELTFKKEGKTHKDIQLLITIPGIGTYSALLICSEIGDISRFRCEEKLFSYAGVIPSVHQSGEHKYHGHITKQGSKYLRWILTEVVRIHLIWTKKHKVETTISRFYQRIRKKKPENVAAIAASRKLLQIIYHMLKNQNEFRG

SEQ ID NO: 294848 - protein, 311 aa, unidentified
MDTTAQPAHTYVGIDVAKEHLDVAVGDDTPPARLAYTSDGLKQLLERLHELPGPQIILEATGGLEVRLMAELWAAHLPVARLNPKRVREFAKASGRLAKTDQLDARLLAQFGAALQPAATPLPSEETQTLAALVSRRRQVVDMRTMESNRLLSAAPTMQPHIQKHLTWLDEEIAALEQEISDFIQNTPAWAAKDALLQSVPGIGQITARTLLADMPELGTIDRKKIAALVGVAPFNHDSGHTRGKRYIQGGRPAVRSVLYMATLAATRFNPIIRTFYEHLLQAGKEKKVALVACMRKLLTILNAMLRDNSP

SEQ ID NO: 294849 - protein, 419 aa, unidentified
MSFKILKNNCCGLDVHKTWIYACIGITDSNGRTEYKQARFSSFTKGLQELCDWLVKYNCNDVCMESTGKYWIPVFNILEKNNLWVTLSHPKYTKPQKGNKTDRKDAKWICDLYMCGMVKPSFIPPADIRQLRDLVRYRFKLTCMITGEKNRAQNCLTVSNFKLDDVFSDVFGKSSRSITEQILQHPGETFDVAPFVDGRCKTPIEEIQAAVDGAISMEQAVKLRQCLNHIDELEKHQAEIEREIFRLSDKYESILNLIRTVPGFDKNPLTAIQVLSEIGGDMSVFPTAKNLILWAGCCPRNDQSNHKIKSTRISRAGSYFKPVLVQVANALIKSKKHPEFTTRYRRIKARRGHKKAIIAICRMILTAIWHILTDLKPYTPEGFLDSRPVNKEKVLTTSQALNLLKQRGYFIKDDPLSVS

SEQ ID NO: 294850 - protein, 367 aa, unidentified
MNNFFIGLDVHKATVSIAVAEDGREGEVRSWGTIQNTPAQISRLLKRLAINDRNLYFCHEAGPCGYGLYRQIIAAGHKCTVAAPSAIPSRPGERVKTDRLDAMKLARLLRAGELTPVWVPDTAHEAMRDLIRSRVDAMEHLRSAKRQLLAFLLRQGRIYASRKHWTRIHFEWLAAQEFTHPAHQIVFQDYVNAVLDNTQRHKQLVGMIEKMLPGWSMKPLHAALCTMRGIDTISAATILCATGDLRRFPTPGQLSAYFGLVPAEHSSGSTVRRSGITKTGNTEVRRILDQSAWCYRFPARVTRWQASTYSEADKKVRDVAWRAQVRLCGRYRALIARGKKAPVACMAVARELAAFVWEMGQVVPLPT

SEQ ID NO: 294851 - protein, 463 aa, unidentified
MPKARKSRKKLALKVDVTAGLETLHHHAAGIDVGNAEHYAAVPVGRDPQPVQTFGSFTADLHRLAKWLKACQIETVVMQATGVYWIALYEVLEGYGLQVNVVNAKYTKTLPGRKTDVLECQWLQKLHTFGLLNNSFLPPEEIRVLRTYLRQRENLVAAAGSCIQQMQKVLTQMNVQLANVISDLSGMTGMAILQAILDGQRDPQQLAALADPRVQASRKEIAQSLEGHWREDLLFVLRQVHDLYFTYLENITACDQRIEAHLKTMQAKVDVVAQPLPEARPKDRLPNRKHIPQFGLREELYRITGVDLTRIDGIQVQTAQVLVSEVGVDMTRWPTEDHFSSWLGLSPNNQITGGKVIRRGTKKVLNRAATALRLAAQTLHRSKSYLGAKYRRLRAKLGAPKAITAMAHHLARLIYRLLRFGTQYHDKGVEYYERKYRETEMKWLQKQAAKLNMQLIPTGALTK

SEQ ID NO: 294852 - protein, 386 aa, unidentified
MQKLNDLSRSLIPLELDCTLITVIEMSQSSWLVASIVPGVERQPLKKLTVDESALLKLLHRWRQEAEKAGHRIKRITVAFEAGRDGFWLARWLRARDIEVHVIHASSVAVSREHRRAKTDRLDTELLKRSFLGWLRGERDHCKMVAIPTIKDEDAKRPNRERESLVAEKSRIVNRMKATLIRLGIRGFNPKLKKAGERLEGLRTPEGEPIPPNTLAELLRDMERRRLVSAQIRRIEDARLERLEQASGDGSHAMVRLLARVIGVGIETADMLVQEVLSRNMRDRRAVARYAGLTGSPDESGRKRREKGLARSGNARVRRGMIQLAWRFLMFQKDSTLAQWFRARTENARGARKLMIVALARKLLIALWRLVREGVVPDGVVLRPAH

SEQ ID NO: 294853 - protein, 350 aa, unidentified
MKVTTIGIDLAKSVFQVHGVDEQAKTVIKKQLKRHQVAEFFVNLPACLVGMEACAGAHHWARKLSGMGHTVRLMAPQYVKPYVKSQKNDAADAEAICEAVDRKNMRFVAIKNVEQQSVMALHAARAGYVKARTALSNQIRGLLAEFGVVIPKGLAHMAARVPEALEDASNELTGMVRQLIQGLLEQLKALDVLAKELEQKIRGWSRQSQQAQRLEQVPGIGPITASALVASLGEVKNFEDGRQVSAWVGLVPRQHSSGGKTVLLGITKRGDSYLRTLLIHGARLAILAAQRRPEGPPQWLASLLGRKHPNVAAVALASRNARTVWALLAHKRDYDPKHGLDKRISAAVAA

SEQ ID NO: 294854 - protein, 429 aa, unidentified
MKKIINSSNGKKLQKVGKNATKIENTKRTPECNKGSRAGKAATKELMVEAQRQHRLGVQCLMQKLDLAQNEPKEAAPNDNAVYWIGIDLGDRKSNYCILDKNADIVAEGSLATTVTEFDLYFKAIPRSRIALEVGTHSPWTSSLLEGLGHSVCVANPRKIGGGKKKRSRKNDKLDARMLARLLKADPNLLCRIQHRGEKARHALVLLRARQAAVSARTKLICAVRGLVKSDGKRLSRCSADSFHKIERTEVPESLRDALEPLFKQIESLTEQIKGYDKEVKRMCKEAYPETERLRQVDGVGAIVALAFILTLDNPQRFAKSRDVGAYLGLIPRQYDSGDSHPQMRITKTGDRMLRALLVQSAQYILGPFGKDSDLRRHGLKLAARGGKNAKKRAVTAVARKLSVLLHSLWVTAEVYEPLRNSCPKVKVA

SEQ ID NO: 294855 - protein, 315 aa, unidentified
MFPTIGLDVSKTTLDVCVLKGKDDREFYKFDNSDQGHQQFLDLLANLKVALVVCEPTGGYEASICAVLHRHNYAIHRVNTLSFHNFAKSLSLAKNDRIDAYKLAYYGVSMDIKANYHQSEYQQQLKDLVARREYLVSQLSSEKKNLKHKEYSNIQTSIVKHITYLEGAIKDLDKQIDDFASTETEQAKKVELACSVPGIGKTLSYKLLAFLPELGDDTFDLNELAAITGLAPYCRDSGNKSGKRFIRGGRKIPRDALYMALLSGCHKIPLLKNLRARLLSKGKPKKVAIVACMRKLLGILHSIFKRREAFVEQIA

SEQ ID NO: 294856 - protein, 386 aa, unidentified
MPQPKDDLSRSLVALEQDKTLIAVVELSLATWLVGGLVPGVERDPLKKIVPDPQLLLRLLYRWRDEAVRTGQTIQRIAVAFEAGRDGFWLARWLRGHGIEAYVIHPTSIPVSREQRRAKTDRLDVALLKRSFLGWLRGERKHCSMAAIPTLEEEDAKRPTREREHLVGMRTRIINRMKGTLIRLGIRDFNPKLRKAPERVATLRTPEGALIPPNTLVELRHDMAHLRFVNEQIAEIENARQARLEQAPRDEANAQVLDLASVSGIGIETADMLTHEVFSRALRDQRAVSRYAGLTGSPDESGRRRREKGLARAGNARVRRGMIQLAWRFLRHQKESALVRWYEARVAAGKKKTTMIVALARKLLIALWRFVTDGVVPEGVALRPAR

SEQ ID NO: 294857 - protein, 402 aa, unidentified
MGVLILFYCGIDIAKNNHEASIIDARGKLLTESISFPNSQKGCEKLFKLFEKFEITPENVVIGMEATGHDWLSVYSFLIENKFNTKVINPIQSEAFRKMYIRQTKNDSKDSFIIAQIMRFGQYSETKLSEENIIALRQLSRYRLALVDSCSDCKRRVIALLDQVFPEYQRFFSDTFGVSSKEILLKCPTPEDVLAIPTNKLSKIFEKASNGQFGMEKAKNLKSIAETSFGISFAKDAFSFQIKQLIQQIIFIENQIEDLEKQISILLSKTNQVITTIPGIGETLGAIIINEVGDIYRLDSPSKLVAFAGLDVKVNQSGEFSGTKNKISKRGSPYLRHAIWLAANRAAFCDHILSVYYQSLKSRGKHHLTAIGAVARNLCNIIFVILRENRPYQIDPPLNLKI

SEQ ID NO: 294858 - protein, 349 aa, unidentified
MTIVENPTITVTGGVDTHAEFHVAAAVDANGGVLGVDTFATTTAGYRQLVAWLAGFGDISLVGVEGTGSYGAGLARHLAGKGIRVVEVDRPNRQARHRAGKSDSVDAIAAARAALTGTASGVPKSRTGSIEAIRVINVARRSAADEWIAIINQMRHIVFCAPDEIRARFNDLSPIRLARTCAGLKPRRSSGDIVRFTTLSTLRELGRRALFVRDQKRNLDTEMRPLIRAFAPALIEVHGVGYDTAAKLLVAAGDNPHRLRSEAAWADLCGVAPIAASSGKVQRHRLNRGGNRQANSAIYRIMLTRMSNDERTKAYVARRISEGKTMGEIARMLKRYIAREVYKSLPTTI

SEQ ID NO: 294859 - protein, 436 aa, unidentified
MDVLYKRCAGLDIHKKTVVACRLETLVDGHKVQEVRTFGTMTADLLRLLDWLQSWACTHAAMESTGDYWRPVYNLLEGHLEVLLVNAQHVKQVPGRKTDVSDAEWLADLLRHGLLRGSFVPPRPQRELRDLVRQRSNLVAERADVVNRLQKVLEDANIKLGSVVSNVSGVSARAMLEALVAGERDVSALADLAYGAMRKKRAELERALTGRLRPHHGFLVTQHLIHLDFLDEQIALFSAEIAQRMEPPPAEPPVEAPPPSGSQALSYSAALALLDTIPGVNRRVAEVILAEIGTDMTRFATPRHLASWAGLAPGNYRSAGKRLSGRILPGNRSLRQALVQAAHAAARKANCYLAAQYHRLAARRGKKRAIVAVAHSIVVIVHHLLTRHESYRELGGNYFDERKREAVVNRLVHRLEKLGYQVALEQEPRPASVAAS

SEQ ID NO: 294860 - protein, 363 aa, unidentified
MTHGICFVGLDVHARKTVGAAVQLGGGEVFRAQIAGAPMEAIGWLQSLPGPVRAVYEAGPTGFGLARAARAAGIEMIVCSPGAIPRQPGDRVKTDKRDALKLARLHAAGQLRAVLVPNLALEGLRDLVRAREDLRGDLMACRHRISKLLLRRGLVWAGPGSTWSQRHLSWLSRVRFDDPLVELVFSEHLACHEVLLARRDRLERAIDERAEAGPWSGLVGRLRCLRGVDTLTAVGLVAEVGDFAAFDHPRRLASYVGLVPSESSTGTRRRQGAITKAGSGHARRLLIEAAWHYRRPPRVSLALRRRQHDQPPAVIDAAWRAQLRLHGRWAALDARRGKKRTTVAAAVARELACFVWEIANQPD

SEQ ID NO: 294861 - protein, 397 aa, unidentified
MIAVGIDVSKSKSTVAILNGDGSIRAKPFDVHHVADELQALVDYIKRTSEPPTILMEPTSHYHYPLLKAFQEAEFPVCLINPYQMKKYGDTELRKAKTDKRDSLRIAQYALEKSYSLIPYTPQDQKYEDLRFLSRQYSQRISALTVAKVQLLSLLDETMPGITTILPLKSRDPDNCVLLRFIKRFKSFDVIRKMGKTRFLDSYQVLVKKTKDRFAGSKGLAIYELVLNSITTRGENPLSAMTQDQCVDLVSTAQKAADEINLQMRIIADTIPEYKVLRSMAGVGDRLGPIILGEIGDIRRFHSGKALNAYAGNDAPPYQSGQFESRNRHISKRGNPALRKACFEVMQALKLTKPQDDPVYLFLLKKEQEGKPYNVAKMAAVNKFLRIYYARAMELYK

SEQ ID NO: 294862 - protein, 333 aa, unidentified
MNKFKHFLGIDVSKEFFDAVLILEGKKEHPVHNQFINNYKGIRALVKWLRDMGATGENTLVCLEHTGMYGKLIIKYLIGFSFSLWVEMSLRIIKSIGIQRGKNDKIDAERIAFYALKNVESAVIYRAPRQVVDKIRTLLSLRDKLTTNKLRLLQYDNEMVDFDKELTKISTKFNKNTLAGINKDLLSIEKQLDKFIKEDENLNKIFNQATSVTGVGKITALYLICFTNEFTMYSNPRQLACYAGVVPFEHTSGKSIKGRAKVHYMANKTLKKHLHLCAMAATNYDPEIKQYYQRKVEEGKSKMLVMNNVRNKLIHRICSCIKNEKLFEVKKIE

SEQ ID NO: 294863 - protein, 326 aa, unidentified
MTECTFQAATSLFVGIDIAKDKLDLARSDSNALLTVDNSVDGFHRIVALLRTTGVKLIVVEATGGFEQALMDALLEADLPVARVNPGHVRHFARGLGILAKTDKLDAHVLVKFAQLASPRLAAKLSANQAELKALVICRRQLTHVGTEQANRRKSTTSKSAVKAIDAVVKAVEKQIEELDRQIRKLIDSDDDFNSTDKLLQSVPGVGSVLSSTLLAELDELGTTDRRCIGALVGVAPFNHDSGTLKGKRTIRGGRASVRTVLYMAALAAMRFNPLIRVFAERLKKTGKLNKVVIVACMRKLLALLNAMIRDNLSWNELKLVKALVS

SEQ ID NO: 294864 - protein, 428 aa, unidentified
MKYNKNEKLKQITDETLIVGVDVSKDFHVARALDFRGIELGESITFDNDHMGIDSFLRWANNLKAQFDKSTLIVGMEPTGPYWFNLARLLRSIDLKVVTVNPHHVKKSKELDDNNQTKTDYKDSKVIAQLVKDARFATPNILDGIYEDLRNYKKVKELIIKDLVASKNQIHNWLVRFFPEYPKVFKDWESKSFVHILRTYAYPSVIAKYSPEALYEELPKKIRKAAGRNKIIRLVNVCKTSIGSLEGHKSAAFELRNLLNKYEIAKQELEMVLEEMEELCSDMEETKLIGEIKGLTVKTACDIVSELGDIRSYSHPDQLIKMAGLSLKENSSGKKKGQTSITKRGRSGLRKSLYLAIFSLIRHNRGFKELHKYYTTRAQNQLKGKQSMMALARKLLRIIFTCVTKGESYDGQKMLEDIHRPKEFLATA

SEQ ID NO: 294865 - protein, 343 aa, unidentified
MKLHVLGIDLGKTVFHLVGLDSTGKVVIRKKCSRRQLLAFTANLQVQLIGMESCSGAHFLGRALREQGHEVRLMPAQYVKPYVQTNKSDFLDAEAIAEAVQRPRMRFVPIKSEEQLDLQALHRVRERWVMRRTAVVNQIRSLLLERGLTLPKGRSHVDALLPRILEDAQLRLSGCFRVLLAQLKIELEQSTARIEQMDGVIQKTAKENEDCQRLTEIPGVGPVTATALIAAVGNASAFGKGRNLAAWMGIVPGEYSTGGKQKLLGISKRGNRYLRTLFIQGARSVVQQRHKQAPGLSSWLAQLLARAHQNVVIVALANKLVRMAWAVLCKKESYRAPILAVAT

SEQ ID NO: 294866 - protein, 356 aa, unidentified
MTIVAHTRSFVIGVDTHARSHTYAVLDASNGQIRGCQKFPTTPKGIARAIAWAGRLSAGEANTLWVIEGAASYGAVLARTVSDTGYVVVEAPRMNAKARTGIGKSDPLDSQAIAAAVLPLSEHQLRQPRADSGTRQALRVLVAAREQMTQQKTMNMNALNALMRVNVLGVDARSALTLTLIREVSRWRSREEPLALSVAREETVRLAKEVLSLHDALAANQARLTELIAASEAAPLLEEPGIGAYTAAVVIAAWSHPGRVRSEAAFAALAGVNPIPASSGNTVRYRLNRGGDRRLNHALHVIAMSRMTYHPETKTYVEKRLAEGKSKREIRRCIKRYHARHLYRTLNALNAVPAAT

SEQ ID NO: 294867 - protein, 311 aa, unidentified
MAKLITQITLGIDVAKDELVICDWSDPEQFIRLENHPKAIRSWLRGFSCPVRIAIEPTSTYHLACVDEALKLGHAAYLINPRQLVHYREAVNLRNKTDPADAYLLARYLAHEADQLKRYQLQSRQAQHLWALMKRRALVVQTRKQLKQSLDGIKLASKALFQQIDNVLKRIDQRMQQLIRELGWWADYQRCRSIPGIGPLNAMALTVTYHRGAFSSVDAFISFIGFDVRIRESGRFKGKRKLTKRGEAELRRLLYCAAKPARSYHVFDQFHQKQIDKGLPKIAANVVLARKLARIAFSLIRNEQTFVKKEI

SEQ ID NO: 294868 - protein, 421 aa, unidentified
MTKGMTEKQWFAGVDWASENHHVYLMDGNGKRLGERQFRHGGAGLAEMGDWLIATSGGSPSMIHVAIEVPHGPIVETLLERGFNVYAINPKQLDRFRDRFSPAGAKDDSRDAEVLGDALRTDMRAFRKVELAEAILVELREWSRIADDLTTDKNRLANRLREQLWRYYPQMLELEADITAEWMLDLWEALPTPAKATRVRESTVKKILKDHRIRRIDAAQALAILRKPAVVVAPGTIEAATAHIRTLIASLRLVNEQLKGAHRQLEILCARLAEPVEKTDEEADAGQMSEQRDVAILASMPGNGRIVLATLLAEAWDALQRRDYHALRALCGVAPITKRSGKSRIVIRRLACHPRLRNAVYHWANAAIQYDDKSRAKYDALRARGHSHARALRSVADRLLVVACAMLKNGTLFNPSLAHSN

SEQ ID NO: 294869 - protein, 346 aa, unidentified
MRFYNRPHTYYCGIDLHVKTMYVCILDGAGQVLVHRNVPSTPAAFLEVTAPYREGLVVAVECMFTWYWVADLCAAEGIAFVLGHALAMKAIHGGKAKNDRIDSHKIAVLLRGGMLPQAYVYPAAMRSTRDLIRRRLHLVRKRGQLLAHIQNTRAQYNLPVFGRTLAYRTNRDGVVEHFPDPSVQKSIAVDLALIDQYDALVIDIELTIVREAKRHNADAFHRLRSVPGIGKVLALTILYEIHDITRFDRVQEFASYARLVKCKRQSGGKTIGTGGAKMGNVHLKWAFSEAAVLFLRHTEGKKLIARIEKQHGKGKALSILAHKIGRAVFYMLSRETVFSMEKFLAA

SEQ ID NO: 294870 - protein, 373 aa, unidentified
MKKRSSSRKQQKPTMKRKARKEGVTIGIDLGDKTSRYCVLSKDGEILHEGEVPTTKAGMAEAFSSFGRTRIAVEVGTHSPWVSRLLQGLGHEMIVANPKQVKLITESTRKDDRLDAQTLARLARIDPQLLRPIQHRSDKAQAALMIIRVRAALMAVRTSLVNTARGLAKSMGERLPKCDADQMGVLQAVSLPPNLRQVLDPLLKEVESLTEKIKNSDREVEQIARKEYPETALLQQVAGVGPLIALTFILTVDDKSRFQKSRDIGCYVGLRPRRGDSGQSQPQLRITKEGDPYLRTMLVQGAHYIISRRGPDTDLKRWGLHLAKHGGKRGKKRAVVAVARKLGILLHRLWVTGEVYEPLRNHNRRQEQNKIAA

SEQ ID NO: 294871 - protein, 346 aa, unidentified
MEISTYVGFDVSKSSIAATAVDPLGHRRRQEKLGTSDEEIRRFLEDLPGPIQVVLEACNVWEHIYDAAAATGAQVLLANPFQTKLVSKTTLKTDRVDSEKLAKLARLQAIPEAYVPTAEQRALRKLVRERVFYTHLWTGVANHVYAVLLQKGISFRPGLLQRRTLRHGVADARFPEIERGLQELASIEEVTHALDRAIRDAFEASEEAQLLATIPGVGKFTSVALVAFLCPIERFTSLDAVVKYCGLCPSVHQSATTSHNGPLVWDANRLLKWVLVEGQWNVRRHEGKGDVYRVGHRVARRKGMGSGAVAAARKLARITASVLRRRSPYQPHAPESSSRQRPIAAS

SEQ ID NO: 294872 - protein, 391 aa, unidentified
MVCVGIDVAKDKHDCCILDSEGTTLVDCFTIPNNMDGFKSLLQTIQDCSQKSDKIKVGLEATGHYSYNILGFLLDNDLPVYVMNPLHTNLYRKSLSLRKTKTDRVDAKTIATMLLSDVDLKSYTDTAYHNEELKSLTRYRFDKVQERAKLKQSVSRLVTILFPELEQLVSSIHGTSIYALLREYPGAKQISEAHLTRLANILVKTSRGHYRKDKATHIRDAARTSIGSVMPAKSLELKHTIKLIQELTSEINEIEDAIRKIMDELKPPILSIPGMGFYSAAMILAEVGDFSNFNSPDKVLAYAGCSPSTYQSGKLTNCYAHMEKRGSRYLRYALYTATKYVCYWNPVFTEYLTKKQAEGKHYNVALSHATKKLVRLIYALQKSGKAYLAVT

SEQ ID NO: 294873 - protein, 354 aa, unidentified
MQSQITAEPKLFIGMDIHKKSWSVHMRTDLCDHKGFNMPPDVDKLVKYVSNHFNGHQVALTYEAGCCGFSAARHFLNLGWQVKVVNPNDVPRSDKQVYQKTDKLDSRNLCKQLQQDQLRGIYVLTEAEEQLRSLLRQRNQVVKQLRVVKSQIKGLLLFHGITIPVEFDNPNWSKDFIAWITNIKWAHITGAASLKSKLRILAVLNTEYLQTSNELRAYCRKHHKKDYYLLKSIPGIGGLLAAAILAELGDLRRFNNETEFSNCIGIVPAIHQSSETNNKKGLTPRCKVLLRSYLIEAAWVTIRMDPEIQAYYRKHAARETKNAIVKVAHKMCRRILSVIKTETPYQINYTKNIK

SEQ ID NO: 294874 - protein, 353 aa, unidentified
MKPKFPTVTIGLDLGDKKHAICVLNSAGEIIDERTITNHRESLRRLSQKYPGSRIAMEVGSHSPWISRFFKALGHEVFVANPRKLRAIYANNRKSDQSDAYMIARLARVDPTLLSPIEHSTEEAQRDLLQVKLRDNLVRQRVDIISSIRFTLKSMGVMVASPNTTCFTKRCRKSLAGVDPKLLGMCEPSLRVVDELTQSIRELERRIEELCAEAYPETEFLQQIPGVGPITALSFVLTIGDPARFDSMRDVAPYLGLVPKRDQSGETDRRLGISKAGDAYLRRLLVSAAQYILGPFGPDCDLKRHGLHLVARGGRGAKKKAVVAVARKLSVLMLTLWYREEIYEPLHNHSAAA

SEQ ID NO: 294875 - protein, 520 aa, unidentified
MASTRTRCHSYRRRSPMSLGKLRGVLHPRVQQVGPEHFGIVCFDCHKASSKFLLADFYGRQLIAPTKVHHNRPELDAAIAQIRQAFEQHQLGDGLVVIERTGRYHRVVQRAFAAAGFETRIIHPFVTKQYRQPVDPSQKTDDADLGAIHRATVTGCALLEATRDEAWTILQLLIRHRRDLVRKGAALNCQIRDHLEAALPGYAACFDKLWESTIPWHLLRHFPTAGQLRDAGLTTLCHSLDEAGIRFQQRTIQTVVDWAHQAAPGDIGASLHRRIALALYEDRQRKTQEIKALEREIAGRLVQTPYVLLLSFPGINVVSAADFGGEAGPMEHYLNAKSITGRAGLRPSRYQSDQVDLANGPLVRNCNRSLRAAILGIADNLVVCNHHFQVLATQWRAQGKDPRHTRVKIGLRFCRIAFQMVAGRQVFRHPSIQGRHYILDKLTAFHLAHGTKMPDLLRDLQAAIGQIPRRQYAAEAKPLQDEYRKIHDGRRRGPQLLGDILPIVLARLGVDVVQSNESGE

SEQ ID NO: 294876 - protein, 452 aa, unidentified
MKSKRSYSAADVERVDVTVLLPLLTMGCIVAIDVAKTKFVAAIATAAGEVLKLIKFEHPRQTGLFLQLLTALSKSGRKPSVVMEPTGTYGDAVRYQCHQRGLSVHMMPPKHTHDFAEVLDGVPSMHDAKAAVVLAKLHAIKPARAWEPETEWCRDLRAWVDQRRPISRTLALYHGHLEGMLARHWPELETHLDVYRQRSWMSLMKTFPGPSAVAAEADAAKELLRKASRGQFDEERLDAVVAAAATTTGVPMTHGEKEKLRACVEQIELQTQRLDVVDATLAKLVEKDEVLSRMANVVGPVCAAAIGALVGSPMFFNNARAFEKAMGLNLKEKSSGNIEGKLAITKRGPGQVRHLLYLAALRLLKDASAIPLAWYCARKCHSAGQSLKAVVAVMRKLARALWHVGRGAAFDVTKLFDARRLDVGAAKTNRARKSAARGNRAPAQREGGAALT

SEQ ID NO: 294877 - protein, 400 aa, unidentified
MVSDFMKGRHNLMIYVGIDIAKLNHFASAISSNGEELIKPFKFTNDNDGFHLLISKLDLLDKDSLIIGLESTAHYSDNLVRYLVAKNYKVCVLNPIKTCQMRKNNVRKTKTDKVDTFVIAKTLMMQDDLRFITFFDLDMMDLKALGRFRQKTIKQRTRLKIQLTTYVDQVFPEIQYFFKSGLHQNAVYALLKEAPSPKEIASMHMTHLANLLKVNSHGHFTKELAKELRVLAQKSVGANDSAISIQITQTIQQIELLDSQLEKIEAEMTDIMKFNDSVIMTIPGIGYINGGMILGEIGDIHRFSNPNKLLAFAGLDPSVYQSGNFQAKTTRMSKRGSRVLRYALVNAAWNVVRNNATFKAYYDAKRAEGRSHYNALGHCAGKLVRVIWKMLTDEVEFNLE

SEQ ID NO: 294878 - protein, 355 aa, unidentified
MTIFNQFRNSHDGVRSVKRGGRSCHSMSALVCGLDVHKDSTYATILNDEGKIINQTRMSNERVLSYLTHYKVNRVAMESSTAVAPLYRQLESKGFEVVVSHPKKTRYIAEAKIKSDRVDSKTIAELARLDALPLSYVPDTETSRLREKVRRRVFLVRQRSKLKVKIKSVLLYEGIKPPSGHGLFTLKGVEWLHSLKFESIDSYLRIMSTFNGEIKLLSEQLEGLAEGDEDVKLLMTVPGIGYYSALLMKSEIEDIGRFPFPERLCSYAGLVPSTHASGGRVRHGGIIKEGSRWLRWVMVQAAQTHVRSFDSNVTRMYHRVAEKKGNRVGLTAAAHKLLLICYSVLKNKRSYYDQA

SEQ ID NO: 294879 - protein, 350 aa, unidentified
MIIIGVDFHPEFQQIASVDTDTGEFQEKRLTHREEAEKFYRALAGAGQKVRVGMEASGHARWFERLLAELQFELWIGDAAEICTKRVRKQKTDRQDAQLILRLLLEDRFPKIWVPSCENRDLRHLLWHRHRMVQARTRIMNQLQAVALNEGLRCKKRLWRESGREQLESFRLAPWASRRRQDLLELLDRLNPMITELTQAIEQEVEKCPEAQRLRTHPGVGVLTALAFVLIIGRAERFQCGKQIASYLGLVPLEDSSGKRRRLGHITKQGSSMLRFLLVEAAQVTARSIPEWRSRYFHLMMRRGRKIAKVAMARRLAIRLYWMWRKGWNYEQVVKFGSHAGQLGTGDGVQ

SEQ ID NO: 294880 - protein, 387 aa, unidentified
MTARSKGDRDVRTISAERPETTEVAVILGVDTHLNFHVAVAIDHLGRRLGESNVPTTAKGYERLLRWAKGFGPVRCAGIEGTSSYGAGLARHMRTRGIEVLEVERPKHRRRSSRRNLKKSDSSDAERAARAVLAGEASGVPKSAEGCVEMIRALRAARRSAIKARTQAVNQLQALRVTAPEQLRHRLRGLSTKELVSAAVRFRLGDGPSDVQAATKFALRSVARRYEALSAEIAQLEAHLDRLVAQAAPELVSLAGIGTENAATLLIVAGDNPQRLGSEASFASLCGVAPIEASSGKVVRHRLNRGGNREANRALYMICLVRMRRDLRTQEYVARRTTEGKSKREIIRCLKRYIAREVYRVLVAYGARSSPTGPQEEGHVAAGSSAA

SEQ ID NO: 294881 - protein, 419 aa, unidentified
MSNRVAKHLASIPPGTLLAGVDLSLDDLVVVVLNATANRLDRFRSDNHAAGYADFRQRLQRTVEKQGAAGVWVGMEPTNYYWKQLGYDLERHQIPFRLVNALTVKRHREGDQLDRSKDDWRDAFTIADLLRQGKFTETHLPHGVYAELQTGYTAYQRLRRDRGRQATLLVNTIRQLFPEFEQVFKDVSGATAGAVIGASLLPHVIRTHSENTFLASVRSHFTGRRLSVRQVRQLYALAKDSHGCREATTALCLMAQHQVEAIRLLDLQASQLLESLLTLFHTLPEAPYLLSIQGLTAPSALGLVAYTGDLTQYPHGSALIKLAGTQPTPNTSGRKTYSPTPFSHQGRSGLRTVVYFITLRLITQNDALAYHYQRLTTRTEHPLPKMQAIGACMNKLLWYVWHVVHRREMYDPQRWRSLK

SEQ ID NO: 294882 - protein, 355 aa, unidentified
MNDAKYIGMDVHQATISVAVRDSRGNLVMEAILETKAETILQFIRGLRGSLYVTFEEGTWAAWLHDLLRPHVARVLASDPRKNALLKAGNKSDRIDARKLSELLYLNKLSPVYHGEQGIRTLKELARSYLTITRDLTRVMSRLKAIYRGWGIPCAGQQVYALRYRAEWLGKILEAGVRRRAELYYQQFDALAALRQGARRELLAEARKHPAMRLLREIPAIGPIRAALLIALIQTPNRFRTKRQLWAYCGLALRTYTSGEYRFVSGQLKRSKKVLAVRGLNINHNHDLKNIFKGAATRAPATAGPLQDFYQACVARGVKPHLARLTLARKIASITLLVWKKGARFDAEHLKQQAA

SEQ ID NO: 294883 - protein, 374 aa, unidentified
MGVPSRKEACVMHYVGLDVHARRSSLCILDSCGKVVKRLEVKGSWPKLMERVAAEVPRPFSVCFEASCGYGHLHERLSALAERVAVAHPGKLRLIFRAKRKNDRVDAEKQAKLLYLGQVPLVHVPCGDVRAWRGLIELRRKLVGRRTAVKSQLRALLRGAGCCDAPAGKALWSKRGLKWLAAAALGEADALRRDLLLEELAQADERVGRVTRELDRRADAHPGVALLRTIPGVGPRTAEAFVAYVDDVRRFARTRQVGCYLGLVPCQDSSAGRDRLGHITGDGPPTARMLLCEAAWQAVRRSPSVKAFFERVMHGEPGRKKIALVAVAHKLARSMAAMLRAGEAWREEVQEQGRGQGQDRGQGQDRGQGQEPGA

SEQ ID NO: 294884 - protein, 302 aa, unidentified
MRRVIGIDTHRTFGEVVIWEDGRLRHVGRVDMTRTALEGFGKKLLATDEVVIEATGNCMAVSRVLTPFVKRVVIANPLQVKAIAHAHVKTDKVDAGTLASLYAAGYLPEIWTPDAATERRRRLVARRYQVVRHRTRIKNEVHSILYAHLIPRCPHADLFGRLGRTWLTSQPLPDDERAAIERHLRELDRLGDDLRVLDQEIAQSALDDAAIKRLITITGVNLAVAAGLVAAIGDIGRFSSPQKLVSYFGLNPRVHQSGLGAAHHGRISKVGRSHACAMLVEAAWATAKAPGPLHAFFAVVKT

SEQ ID NO: 294885 - protein, 361 aa, unidentified
MSNSTTWIGMDVHKESIVVAAVNGAGTVAARWETPNTSKGKDRLATRLSEFGTVRCAYEAGPCGYDLRRFLETKGIPCDVIAPSLIPKKPGDRVKTDKKDAEKIARMHRMGDLTAIHVPTPAQEALRDLLRAREDANEDLVRRRHRLQKFLLRQGRRHEGKNWTRDHWRWIRAQKFDDQNSETVLSEYIAAIDQEIERIGRLDAQIEQESKHPDIAPAVARLKALRGVGTLTAMTIFAELIDLNRFASPRELMAFVGLVPGEYSSGGRQWRGSITKAGNAHVRRVLVEAAWHYRHSPRGTGEAIRKRREGQPAAVIETARKAELRLYKKFTRMVMRGKRSTVAATAVARELVGFVWAIGRI

SEQ ID NO: 294886 - protein, 363 aa, unidentified
MPMKKPAQHFTAEVPRSITKVGMTIGIDLGDVWSHYCMLNEDGEVVDRGRFRTTPSGVEKWFTDLPKARIAMEAGTHSIWISEQLQELGHEVIVANVRELRAISHSDRKSDRVDAEKLARYARLDPKILRPIAHRTVAQQEALTLIRARNLIVRLRTAAVNAVRGLAKPCGYRLPASSTLCFAKRSLAVLPRALVQALGPVLEQIAEMTKKIKHYDRLIKRLTETEYPETQALIQVYGVGQLTALTYVLTLGSKERFQRSRDVGCYLGLRPKRSQSGDRDPQLGITKAGNIYLRTLLVECANHVLGPHGRDSTLRQWGLHLASRGGKQSRNRAIVAVARKLAVLLHRIWITQEPYIPFYGVAA

SEQ ID NO: 294887 - protein, 403 aa, unidentified
MNAVGIDVSKGKSMVTILRPFGEIVSSPFEIKHTSSDIHSLIKLIHSIEGESRVVMEHTGRYYEALAHQLSAADLFVSAVNPKLVKDFNNDSLRKIKSDKADSVKIARYALDKWQSLEPYSSTDELRAQLKVMNRQFHFYVKQKTAMKNNLIGLIDQTYPNANTYFNSPTRSDGSQKWVDFVSTYWHVDCIRKMSLNAFVEHYQNWCKRKKYAFNKSKAEEIYTKTKELVPVFPKNEITKHIIRQAIDQLNSTSVTVETIRTLMNETASKLPEYSIVMQFKGIGPSLGPQLMAEIGDVTRFTHKGALTTFAGVDPGVNESGSYAQKSVPTSKRGSSNLRKTLFQVMDVLIKTMPQDDPVYQFMDRKRTQGKPYYVYMTAGANKFLRIYYGRVKEYLSVLPDPS

SEQ ID NO: 294888 - protein, 362 aa, unidentified
MAHSVIFAGLDVHAAQTSAAQLEAATGELSVARLAGGTDPAVAWLRRLGPGARAVYEAGPTGFGLARAARDVGIDLRVVTPGLIPKRPTDRVKTDRRDAVRLARLLAAGELSFARVPTEAEEAFRDVVRAREDVRGDLMRARHRLSKFLLRRELVYPGPGGAWTQAHLAWLARLAFDDTASTLTITDYLAAVHALVQRRATLDAAITELVPDSPYAATVPVLRCFRGIDTLSAAGLCADIGDFARFAHPKLLAGFLGIVPSEHTSDDKRRQGAITKAGPSHARRLLVEAAHHYRRRPHVGVTLQRRQVGADPRVCDVAWRAQQRLYRQWQRLHGQRRKPSGVVTIACARELSAFLWEAATIT

SEQ ID NO: 294889 - protein, 348 aa, unidentified
MMIIGCDYHPRMQQIAWLDEETGECGERQLRHSDGEAERFYRERKPPGVQVRVGIEATGHTRWFERLLAELQIELWVGDPAEIAKQRVRKQKTDRRDAQHLLRLLVEDRFPRLWVPSAENRDLRQLLWHRHRLVQMRTRVKNQLQAIALNEGVQRKHQLWSREGRAQLESFALPAWTARRREDLLRLLDQLTPQIEELSQAIEQEAQKRPDVAGLMEHPGVGPITALAFVLVLGTPQRFGCGKQVGSYLGLIPCEDSSAGKQRLGHISKQGNTLLRYLLVEAAQSAVRTDVEWRKKFLRLALRRDPRIAKVAMARKLAVSLYWQWRNYAPPPGSGRTWNRSFDHSGVQ

SEQ ID NO: 294890 - protein, 412 aa, unidentified
MADVVAYIGLDWADERHSVHLQTADGRIEHLELEQKPAVLHEWVAQLQQRFGGGKIAVALEQRKGAVIHALLMYDCFVLYPINPKALARYREAFRTSGAKDDPVDSELLLDLVVRHRDRLRAWVPDTVESRTLQALCEQRRKLVNQRVALTNRLTSLLKQYFPQALEWVGDLASVQACDFLTQWPTLAAVQAARRSTVRRFYQDHNCRTRAVIDARLAAIADARPLTTDAAVIEPLSLSVQTYATQVRTVIEGIQVFDARIAAVFAAHADHDIFGSFPGAGDVCAPRLAAAFGTDRSRWDSAAELQAHSGIAPVTERSGKTVWVHHRLACPKFVKQTFHEFADQSIRFSRWARAYYDQQRARGNDHHAALRALAYKWIRILFRCWKERRPYDEETYIDALRRRGSPLAKHFA

SEQ ID NO: 294891 - protein, 406 aa, unidentified
MLYVGWDWAAETHDVTIIDHDARTVDRWALDHDEEGIDGTLARLAGHGRPGELPVAIETTNSLVVDRLLAAGHPVVPIHPNAFNAARPRWGASRAKSDPGDSWKLADFLRTDGHRLRRLEPVDPATAQIQALSRMRDDHVEAKVAATNQLAALLGRHWPGATRIFARLDSEIALAFLDDYPTPAAAGRLGEARMKMFCRRHSYCGRRPPAELVGRLRTAPEPTQALPTETLTELVRAQVRLLRSLLTTIADLDRAMGAALLEHTKAQLLAPMPRIGEVNLAQIVGELGPILDRAIDLEHACAQVGATPVTKESGKGRAVTFRWAANTRARKALSTFADNSRHQSPWAAQLYADARTRGKRHPHAIRVLTRSWMRVIWACWHTDTPYSPDRHGAERRIRQQPEKIAS

SEQ ID NO: 294892 - protein, 414 aa, unidentified
MQSWSEITYYAGFDWATDHHDVVIVNRSGQIVAEFQIEHTAEGWQRWREQVAVLSPGLAACVETSQGFVVEQLLESGVAVYPISPASAKAYRQRKVPSGNKTDHVDAWSLADALRLDGHGWKALAKEDPLVAELRLLCRDEVALIEERTALINQLQSALREYYPAALEAFEDWALPSAWAFVEAFPTPQALVSAGKRKWEKFLHTQQLARPQTYQKRMEIFACAAEFVSGQALTRAKSRLALARVRMLRVLKSQIDSYRAEIEKLFAQHPDHDLFGSLPGAGPKIAPRLLGEIGSDRSRFEDPCALQCLAGTAPVSYQSGQIHKVYLRRHCNKLLRHAVHLWANLSRKSCPWADVYYTQLRTRGKSHACALRCLGQRWLKILWKMWHTHTPYDAELHARNQLKHGSWVLKIQNA

SEQ ID NO: 294893 - protein, 340 aa, unidentified
MKKFLFIGIDFSKSNFDVTLLEEIGQKSFVQEQFENEPQGYKKCLKWLVKQSKIKPCDWLFCGEHTGLYSRGLSEFLSQKKLFMWLENPLQIKCSWGIKRAKTDKIDSLEIARYAIRFQDKAIAYKPADKETDSLKLLFSYRERLVKTKVAMEISAKEIRRVISRDETSRYIFEDSNREIERIKKKIENIESKMHKIVMDSQMRENYLLVTSVKGVGMMTAISLIIRTNNFVSFENARQLACYCGCAPFEKTSGTSVNGGTHVSRLANRELKVLLTQCARSAALHNKELSAYYQRKITEGKPDRVVINNIRNKLIQLICAVVKHKTPYQENYLNPWAECA

SEQ ID NO: 294894 - protein, 387 aa, unidentified
MYFIGIDISKFKHDCAIIDEAGDTVTASWSFANSCEGFSLLKQLLDALDGQKKIGFESTGHYGHNLKLFLEANNFSFMEFNPLLVSKFVRSKSLRNTKTDSLDAVSIAQYLMTVEYKPYPPSFYHMDQLKSLTRFRDSLVRQHSRQLVELTNILDKVFPEFKPFFDGRFSATALYILTHYQSPEKIANMNAKSYEALRKKSRGKFSMVKFAQLKTLAKNTVGRSDAFLLKQMEITIDIENQLDAKIDEIESQILECIRALNPPILTIPGIGELTAAIILSEYGNINKFENPAQLLSFAGLEPGYYQSGLAEHQGHMVKHGSSHLRYALMNACLPLITYEPVFAEYYAKKRAEGKPHRVALTHVAKKLLRDIFTLQTKNISYDPTLIR

SEQ ID NO: 294895 - protein, 444 aa, unidentified
MTRKTKKQRLTIVHSHCAGIDIGSREHWVAVNPEHCDEPVRCFTTFSDDLYALADWLESVQINVVAMEATGVYWIPLFEVLDARGFEVHLVNSRATRQVSGRKSDVLDCQWIWQLMSYGLLKGAFRPADDICGLRSYVRQRATKVQEQARCIAHMQKALTQMNVQLDNVVSDLAGKTGMAILRSIVAGERDPQRLAQLRDRRLRADEATVARSLYGNWRAEHLFALAQALAHYDFLHDQLAACDDAISQALNTLPIRTEETATPVKPIRSPQRTAAQQHQLHHALHAVMGVDLTAIPTIGIDTVLVLASEIGPDLSRFPTEGHFCSWLSLAPPTYISGGKSLPGRKHKVFNRAGQALRQAASNARRSQSFIGASHRARLARMDTAKAIKATAHQLARLIYAMLTKGQPYVERGIEEFETRRKDRQLRALKRKASTFGLALVEAA

SEQ ID NO: 294896 - protein, 423 aa, unidentified
MQAATEKGQVVWEAVLENCCGLDVHKDTVTACLLVGALNEQPKELLRTFATTTKVLLELRDWLEANGCTHVAVESTGVYWRPVFHILEDAVTVLLVNPYHMKQIPGRKTDLKDAQWIARLLRWGLLKPSLIPPKPIRELRDLCRYRKKLTEQESAEKNRIQKVLEDSNIKLASVASDVFGVSGRAMLEALLQGEMTPQETANLAQKKMRSKIPQLTEALDGYVSEHHRFLIRMQLEHLKYLEQAIDQIQLRIDEKLKPYQHQIDLICTTPGIDTKSAQHIFVEMGGDVKLFPSEGHLASWVGICPGNNESAGKRMSGHVTKGNRWLKAIIVQTAHAASHTQGTYLKAFYHRVAARRGKKRAVVAVAHKQTRIIYHELWDDKPYQELGENFFDLLNQKSLQNRLVRRLQGLGYHVELQPETVPA

SEQ ID NO: 294897 - protein, 343 aa, unidentified
MKLSYVGVDLAKNVFQLHGIDRHGQAVWRRRLRRKQWLKVLLETVEPGCIIGMEACSSAHHWARQLQANGYDVRLVAPQFVKPFVKSNKNDRNDAEAICEAITRPHMRFVPVKTVEQQDIQAIHRVRSTLMSQRNAKANQIRGLVAEYGIVAPRQMLSLRRAVPEWLEDAENGLSTCFRALLHDVWMDLQRLQERLAGLDRQIEQIAKDNPVTRRLQQLRGVGPMVATALVASVGDGSHFRKGRQMAAAIGLTPRQHSSGDKRRLLGISKRGDAYLRTLLIHGARAVVSQAKRRDDPLSLWVTSIAERSHTNVAAAALANKTVRIAWSMLRNTSDYNPALAVA

SEQ ID NO: 294898 - protein, 397 aa, unidentified
MIAVGIDVSKSRSTVAVIDSNGVVLASPYTIAHTQPELHALAKYLKELKEPVTILMEYTGHYHYPVLKQLQSEGFPVCLINPYQMKKYGDTEIHKAKTDKKDALRIATYALEKSYKLVPYSSMEQKYEDLKFLSRQYEQRISFVAKLKVQLLDLLDQTMPGITKQLSLTSRNPEKCALLLFIKRFKSFDEIQRMGKTRFLSSYETMTKKTSDRYAAQKGLAIYELAKDSITTRGDDPYIWLSQTQCVDLLSAAQNAADEIILKMQNIAQTIPEYAVLRAMHGVGDRLGPIILAEIGDIRRFHSGKALNSYAGNDAPPYQSGQFESRNRHISKRGSSALRKACYEVMQALKLTKPQDDPVYLFMLKKEQEGKPYNVAKMAGVNKFLRIYYAKAMELYR

SEQ ID NO: 294899 - protein, 350 aa, unidentified
MTTIARRITGGVDTHLDIHVAAALDELGALLGVESFAATAAGYGELLRWLEGFGTLELVGVEGTGSYGAGLTRHLLHHRVAVVEVDRPNRQRRRRKGKSDPEDAVAAARSAQGGDATGSAKTRDGNIEAMRVLRVARSSARSSRTQAINQMRSLVSTAPEELRAELRGLSIYKVLTLTSAYRHTGRTDVTTLTKLTLRMLARRALSLEEEVKEIDRLLKTLVAETAPELRAIDGVGTDVASALLVAAGDNPERLKNESTFAKLCGVSPLDASSGKQQRHRLNRSGDRQANSALWHIVFTRMVCDPRTQHYIERRMKEGRSKKEAIRCLKRYVAREVFAALPRSQFALDNP

SEQ ID NO: 294900 - protein, 344 aa, unidentified
MKITRVGLDIAKQVFQMHGVDENGKSRLRKQLSRAKVLEFFAQLPPCLVGIEACASSHHWGRELTKSGHTVRLMAAQFVVPYRKRDKNDANDAEAICEAVGRPNMRFVAIKSEEQQSVLMVHRARTLVVANRTAQVNQIRGLLGEFGLVVPKGVARLRRELPGILEDAENGLPALAREVLAGLLEQFHDFDTRVTAYDRQIRALAEASEPARRLMQVEAIGPQTATALVASMGDPRVFESGRSYAASLGITPRQHSSGGKERLGQITRQGDGYLRTLLVHGARAYLRVVDKKTDAKSAWARRLKERRHVNVAAVALAAKHARIAWAILAHGTEYRPAGPEVVAA

SEQ ID NO: 294901 - protein, 312 aa, unidentified
MDMANQYVGIDVAKATLDVAIGSDGELVQVENSEAGIARLLERLGEATPKLVVLEATGGYESVVAGAIVGRGIDVAVVNPRQVRDFAKATGVLAKTDRIDARVLARFAEAVRPEPRPLPTAEVKELDEYLSRRRQLVDMLTMEKNRQSIATTDRMKKSLKKHVDWLEEALRRANDDIDKAIRNSPAWREQEDLLRSVPGIGPVSARTMLAELPELGRLNRKKIAALVGVAPLNRDSGTLQGSRTCWGGRASVRQVLYMAALSAVRCNPVIRRTYLALRARGKKHKVAVVACVRKLLTILTAMVRDQRRWSPS

SEQ ID NO: 294902 - protein, 312 aa, unidentified
MTREAYVGIDVSKRWLEVCVHGESETRKVGNDEEGHLRLVEQMKGLQSALIVFEATGGYESRVAQALREAGCEVAVVKPTRVRRFAEGLGILAKTDKIDAQVIAQYAAVVKPAVNGAQTPSEERLAACVERRRQLLVELVAEKNRLSTCPASVREDIHEHIAWLEEHIDHLEAEIQLCISQNPDWQVRAEIIDSVPGVGAVTASTLVAELPELGQCNRQQIAALVGVAPFNKDSGPKKGKRRIFGGRSGIRRTLFMATFSATRHNPVIRAFYQSLLKRGKEKMVALTACMRKLLVIINALVKKSEVWRYVPA

SEQ ID NO: 294903 - protein, 343 aa, unidentified
MVHYVGLDVSLKQTSICVVNQLGLIVREGVVDSEPEAIAAFVRLNAPGAVRIGLETGPTATWLWTELKRLGLPVICIDARHAKAVLKMQINKSDRNDAAGIARIMQTGWFKEVRVKDLDSHSVRALLASRALLVKIKRDLENQIRGLLKNVGLVIGRAKFNVFTVRTEELIEDRPELIAVVGPLLKARKAIEQQTDDLDRKVLTLARYDAQVRSFMTVPGVGPITALCFRATIDDPTRFKRSRSVGAYVGLTTRRHASGEVDWTGRISKCGDAMLRSYLFEAAGVLLTRVPKWSALKAWGIRLAKRNGLRKAKVAVARKLAVILHRMWIDETEFNWSKKEVAA

SEQ ID NO: 294904 - protein, 349 aa, unidentified
MEQHEVILGVDTHLDTHVGAVVSETGKLLGTLSVSAETAGYLKLLTWANSLGLLRRAGVEGTGTYGAGLARVLRDHEIEVFEVNRPDRAARRSRGKSDPTDAENAARAVLAGKATAIPKEQSGAAEAMRAVSVARRSAVKAKTQAINQLRALLVSAPQDIRDRLLKTNTAGCVSNCARLRSLGNTPMLQALATTLRILAKRYLALAEELTTLDAMLEQLTLRHAPRLRERFGVGPQTAAVLVSVAGDNPERLKSDAALAALCGTSPLQASSGKTVRHRLNRGGDRAANNALWTIAMVRMRSDPRTRAYVERRTKEGMSNKEIHRCLKRYIVRELYPLILADLADSARAT

SEQ ID NO: 294905 - protein, 400 aa, unidentified
MISPQLQVAVDVGCRWHRVAVGDVAGELLEEFGVEHNAMGLADFFARIERLRVKFGWPVAVAMEGYNGWARPLDRQVLRRGWRLYNVNNLKLARYKEIFPAPSKSDAIDTRRMLELFRLRGQLRVARNVLQEVAPVPVENDKLKRLTRRRRQLVDEKGRVLNRLQADLQAVSPGLLAITGEADNLWFLSLLACREDLRKIAGLRKSTLLSLEGVGRKYASVIQAWQKQAVFSPDAEWAGPMIVIDAQRVLELKGQIQVLDRAIAALVERSEVARRIDTIPGFGNTCSGELAGEIGTLERFASEASLAVYLGMATLDNRSGDSEGAKPPRQVNVRAKAAMMVAVARHVEQVSASRVFYEKKRAQGKTHNQAVRALGRHVVRVIWSMLKNARDYELRPAARG

SEQ ID NO: 294906 - protein, 344 aa, unidentified
MQFFVGIDVSLDSSSICVIDERGVIIKEGKTDSEPAAIARFIRHKGRKIEHVGLETGSLSQWLHAGLTREGFRVTVMEARHVRAAFAAMRVKTDRNDARGIAQLVRLGWFKAVYVKAPSAQETRALLNGRQFLVDKLTGIENSMRASLRNFGLKMGQVSRSKWATRARELAVGIPALEVVIESLLRVREVLRQELRAIDRKLLDEARADPIVRMLMTAPGVGTIVALTFKSAVDDPGRFKRVRDVGPWLGLTPSRYQSGRTDIVGHITKAGDAGVRTALYEAATSVLSRVTAWSAIKNWGIRVARRSGMKKARVAVARKLAVVMLTMWRSETPFRWSATLPASA

SEQ ID NO: 294907 - protein, 387 aa, unidentified
MTKNKGRVVGLDVHLDSFAGAVVQGSDPASAVVLSTSTRVELERLEKWAWRHTSTEDTLVLEASGNAFAVAARLRAIGREVEILDSHRAGKVGKVYCANDRVDAVKIARIYLSALSPIVWQPDQKTLERREIFSAYQAVVKESTRAKQQLRSMLNEHCVRLEKGFRLCHPQAITRLLKEREWTPARRMLLQQLHGSLVAARARRTMLRRHMAQEIVAEAELLKLTRLCGISLITLYGLVSAVGDVRRFAHSKKLVAYLGLNPSVSQSGNFEGGGALKRHGRGALRALLIQSGKKLLEVNNPLQKWGLAVAARRGRNKAAVALARKLCVAVWHLLMGHVIGSLERLDTLETKLSKFATEIGPAALTAFGYNNRADFVQKKLYVLRSYP

SEQ ID NO: 294908 - protein, 404 aa, unidentified
MQFCGIDWANDHHDALCIDEQGHQLGSIRVAHSPDGLGQLDAYLERMAGPGGKDQIACIIETTHGLLIAHLLEQGWAVYPVNPRTVERRRAPSGAKTDIIDAYLLAKTGRADFQDLRRLDPDSEQIQELKTLTRDQDGLVQMQTRLVNQLTACLKAYYPVALDLFSKLQQPSTLSFLRAYPTLQTARLASVEDLTTLLKQARYPGAKRAAQQIAAHLQQPCLHASEVTTRTKSRLMVALLDQLEPLMKQIADYDEVIERLFLIHADSELFQSLPRAGVRLAPRLLAELGDDRDRYERASSLQALAGTSPVLFQSGTYQKAHRRLGCIKPWRNALQQFAWQSTLQEAWAREYYQRKRAEGKSHTVAVRALANVWARILYAVWKTKQPYQTTTFEQARQAHAPRVA

SEQ ID NO: 294909 - protein, 349 aa, unidentified
MRFYNRQHRYYCGIDLHVKTMYLCILDTNGQVLLHRNVTTTPEAFLTAVAPYRDDLAVAVECMFTWYWLADLCAAEGITFVLGHALSMKAIHGGKAKNDKIDAHKIAVLLRGGMLPQSYVYPSAMRATRDLLRRRLHLVRKRGQLLAHIHNTQAQYNLPAFERRLAYPANREGVSLHFPDPSVRKSVEVDLALIDQYDVLIADLEQTLVREAKCDDADAFHRLRSVPGIGPILALTILYEIHHIGRFDRVQEFASYARLVKCTHESAGKVLGTGGAKMGNVHLKWAFSEAAVLFLRHAHTAPVAKFMARLEKHHGKGKALSILAHKIGRAVYFMLARGTVFSMPKFLAA

SEQ ID NO: 294910 - protein, 337 aa, unidentified
MFMQVYGIDLSKEKFDVNFIDANGKEESLKVKNSLASISRFLSSVSEDGFLCAEHTGAYGDLLVYLCNQMNISIALIPGYTIKHSLGLVKGKSDPLDSKRIREYGERFTDKLEYTEYPEENIVELKQLYTLRYQLVRQRKSLRTIDKGRGVLPMQSIEVYNHLNNVMVKLDEEIAAIEDEIEALIMSDQEMRESYELATGVIGIGPVIATNLIIKTGNFKAIDTYRRAASYAGVCPFPKTSGKMVGKSKISPFADKELKTLLYMGAKAAVKHNKEFKLYFQKKELEGKSYFLIMNNVSNKLLRTVYSVVKNKTPYEKDHICLDPRERNTNSSTKKVA

SEQ ID NO: 294911 - protein, 373 aa, unidentified
MEDISKIHVGLDVHKDNISIGVAQPGREPGRLLTKIAHHLPKLLKQLDKLGMPAQLHVVYEAGPTGFGLARALLAKGYACEVIAPSKTPRRPGDRVKTDTRDCIMLAEYSRSGSLHAVWIPDAADEDIRDLSRAREDAIEARHRARLQLKSFLLRHDVRYAGKTSWGAAHYRWLAEQSFAGASHTAFTEYCLTVQAADQRVERLTQALEGAVTQWRFADVVAALQALRGVAMVTAIGLVAEIGDFSRFEHPRKLMGYLGLVPSEHSSGERTCRGSITKTGNAHARRLLTEAAWQYRYPARISRAAQLRQEGLSEQVRATAWKAQLRLSRRFAALNKRGLQINKACIAVARELAGFAWAIGQRAMVEAATKTTH

SEQ ID NO: 294912 - protein, 375 aa, unidentified
MLPPYQQRMLAGGTEDKEHAMSQNLDVSPAAIGIDIGKNSFHIVGQNQRGAIVLRQKWSRGQVEARLANLPPCRIGMEACVGAHHLSRTPKALGHDARLMPAKYVRPYSKGQKNDYRDAEAITEAVQRPTMKFVATKTADQLDLQALHRVRERFVGQRTGIINQIRAFMLERGIAVRQGLRFLRAELPNILATRTDALSPRMLRILEDLSADWRRLDARIEDLSSEIEALARQDKGCERLMTVPGIGPIISSAMVAAIGTGDAFSKGRDFGAWLGLVPKQLSTGDRTILGSISRRGNRYLRTLFVQAAWVVLVKVGPKHWDRYGLKSWIEAAKKRLHHNVLAIALANKLARIAWAVLHKGRAFECVKTNEAYRPA

SEQ ID NO: 294913 - protein, 335 aa, unidentified
MKNYLFHVGIDISKLKLDVVVIGSETPNLSDHFVVENTSKGVKEIVDYLIKKKIDPDKTLFCCENTGVYTAPLSIYLNGKKYDYWVVPAIEIKRSKGISRGKNDKADAKDIALYSIRSIDKLKLSTVAEIEIQQLKLLHNEREKIVKTILLFNSFLENEGHLPNVVCKVVLNINQKMIKNSKLALKAIELKMKEILNNHIELKKKFDLAKSVPGIGDQTAMYLLITTKGFTSFENARKFACYSGVAPFEYSSGTSVRGKTKVNHMADKKMKSLLQMCALTSVKYDPQMKAYYLKKRAEGKNAMLVLNNVKNKIIARVFCVVNRKTPFANTYNFAS

SEQ ID NO: 294914 - protein, 467 aa, unidentified
MRANWLQGCRSTEHRGTRSDRWLLLYFLTEKEHLMTNRLQVGIDFSQKQVDFCLLFPDGHPLESHVSFNNSCSGYDLAKQLLLEALDAYAFDGLDISGEATGYLWLPFFLQLAADPDLAPRHLDLFLLNPRWVKWFKKCFAEDHKCDEKDAFYIAERTRTLQPGVAWTPPASLALRFYTRFRFHIVQNLAREKCYFSAFLFLKASAYRRVEPFSNVFGVTSGLVLTQQPSLDDLAALPVQDLATQLYDLSGHHLSDPLENARKLQRVASESFALDDALALPVHRILELTLAHIRFLESQLQQVDQWIASELVAYPEMVQLATIPGVGPVFSSGIGAEIGDVQRFLQAPKWDKCRKRYRPRHLRDAEDAIAKIAGLWWPRASSGDFEAQDRRLAKSGNRYLRYYLIQAANLMRQRIPEYQAYYARKYRESSKHHHKRALVMTARKSVGLIVGLLHRNEPYRSEEARRT

SEQ ID NO: 294915 - protein, 343 aa, unidentified
MTMYVGCDAHKRYSIFATVTEKGFSGPPVRVEHSRGLFRSYLDTLRPGTAIAVETTGSWYWMVDEMEKAGHNPVLAHAGKAKLMMGQINKTDQLDARGLAVLLRNGTLPEVWIPPGELRDQRELPRTRMAMVRMRTMLKNRIHATLAKYAIQIHGVSDIFGVSGRKELSKCLGELPPQTRLSVEAELTLLDQVEAQIEVSEKQIREVVAETPAIKRLMSMPGVGPILAVVIAMEIGDVGRFAGPDRLASYAGTVPRVHSSGGKTFHGRVRSDINRYLKWAFVEAANVVTLQQGRWGDRHVVKLYQRIRDRKGHAKAVGAVARHLAEAAYWMLKKDEEYREPKA

SEQ ID NO: 294916 - protein, 419 aa, unidentified
MEQGLRSVSDVRTLNRKLWAGLDVGVETTRLCVLNDSGEVLQEASCPTCLESVHGELKWLRRRRFARVGIEAGTGTTLARGLRSLGYPVDMYETRQLSKFLRARRNKTDAGDANGIADAGRIGASMVSKVHLKSLDCQALLTRLIVRKHLIRERVGAANLLCRQLELYGGRISKCPRSKRLRIHVDAEIRRLFGKATAGAARDLRHLLDHCERLITYQYTFDRELKRFAAENEVCSLLMSIPGVGPLCALSFYATIAEPNRFTRSADVGGYLGLTPKLHQSGLSKRMGRISRMGNRAMRTLLVNASVQFMKHSAPEDELRKWAIRVQQRSGRGQARVALARKLAVVMLAMWKRGAPYSAPAACETEGFESTTKGESDPAKPQAQISAHSVLGPTPLTQTPNDSPRARRPDALALDPHSL

SEQ ID NO: 294917 - protein, 387 aa, unidentified
MSQPNDLSRCLAPYDQATTLIAVIELSLSSWLIAGMVPGLERQPLKKMAPDEAGLLRLLERWREEAVKAGSAINRLSVAFEAGRDGFWLARWLRTRGIDAHVIHSSSVAVSREYRRAKTDRLDTALLMRVFIGWLRGERGHCSMVAVASIEEEDAKRPNRERENLVGERTRIINRMKSALARLGIRGFKPELRKAPQRLDTLSTPEGIPIPINTLDEFRRDLVRLALVREQIDAIERTRIAQLEAAPKTGPHAMVRLLAKILGLGIETADMLVNEVLSRNLRDRRAVARYAGLTGSPDESGKKRRERGLAKAGNARVRRGLVQLAWRFLLFQKESALVLWFRARTESAAGIRKTKMIVALARKLLIALWRMVTTGEVPAGVVLRPSP

SEQ ID NO: 294918 - protein, 428 aa, unidentified
MTAQRECSREVALVAIDVAKAWNVVLMEKPDGKRQRFRVANTRADHDRLVELLKNQGVQCQVALEPTGNYHRPLAHRLLSEGFEVYLVSSVAAARFREAMFNSRDKNDPKDTVVILELLRQGRTLRYYDPVTEGIHDLQEISKTYAQITLTRTRLQHSILTHHLPLYWPEFSRYWHSSRADWFARFLIRFPVPEAVRRLDREAFIQEAWALVGRKVNKRGKLDEIYELASQTIALPINPDSLAVQAFRLQLERYLSLNRLRKELELQAVEAMEENEDSKLLRTIPGIGPILSLIILAEAGDLRRFGHHRQFLKFCGLDLAKSQSGASRGRERLSKRGNARLRCAFWMAGTVAIRMRENSFREKYQRYIRSDPTNPDLKRKALTAVMAKMARVAYAVVKTQSPYRTYHEAAVPSGSIPLSRAVEAIRTS

SEQ ID NO: 294919 - protein, 324 aa, unidentified
MSNAIIGVDVSKLDLSISLLIDKTYYQIKIDNNQEGFKTFSKWLKKHRITKVTACMEATGNYGTFFADFLYNNNHEVSVVNPLCISSFAKSKLSRHKTDKVDSMIIAEYASKNDLPLYVPKNSDLQELQNLYRCLQNLKEQYKQSQNYLENKDHLSSAICSSYKRLSQNITKEINKIELEIDELLIHNHELKQKADNIQTIPGIGKLTAVAILAESPDFSYFSNARELAAYAGLTPKHRMSGTSVRGKSNISKIGSSRLRKALYFPAIVAKNHNPLFKEFSQKLGSKGKPTKVIIIAIMRKLLHIVFGVVKHNTSFNPRFGLDI

SEQ ID NO: 294920 - protein, 343 aa, unidentified
MPELYYIGLDVHKKTISYCIKTRDGTIVARGTIEATRAALTAWAGAIHHPWVGALEATLFTGWIYDHLAPYAVELQVAHPAMLKAIACGKKKNDRLDASKICDLLRCDLLPRCYLAPPAMRELRRVLRYRHLLVSEAVRMKNKISGLLLEVGEPYDARRLHGRKYFHEHLDSLRDTPESVIELLTITRGSLEMFDSLQRRLLRGLDHHPLLRERVELLRSIDVVGEVTALTWALEVVEPRRFGSIGRTVSYCGLCSAQRESAGKAQRGPLSKQRNKHLQRVLIEAAKLAPRWNPQLRAVYERELKRGPRNRATLAVARKLVAYLWAVDTSGRPFVPRVEGEAA

SEQ ID NO: 294921 - protein, 411 aa, unidentified
MDVYCGIDWAEDHHDIALADRDGKLLARRRIGDDAAGLAQLLELLAGHGDSAGDLIPVAIETPRGLLVACLRATGRKIYPINPMAVARYRDRHSVAGKKSDHGDSVVLANVLRTDIGMHRPLPDDSELAQAIAVLARAQQDAVWDRTTAHNKLRSHLREYFPGFLVAFADARGGITRPEARAVLAAAPTPAAAAALTLTQLRALLKKAGRSRGIDIEATRLRDAFRIPQMRQPRLVEDAMGRQAIALLRQLDAACVAADDLEHAVTESFNLHPDAGIITSFPGLGPLTGARVLAEIGDDRSRFQDARGLKAYAGAAPITRASGKTKSVTYRRVKNNRLNATGYTWAFSALTASPGARAHYDRRRDDGDRHAAAQRNLFGRLLGCLHRCLATGQHYDEATAFPASTKLPAAA

SEQ ID NO: 294922 - protein, 420 aa, unidentified
MSKRRYGSVEFKRVDWSGLAEGLGGGRAVLAVDVAKEDFVAAVLGPDAGVRVTFKWQHPGQTLEVLECLERLADAVALEVVLEPSGTYGDALVGQLRRLGVAVYRVSPKRVHDAAEVYDGVPSLHDAKACELIGRLHLQGVSRVWEALGEERRELNAWLTRLEVSKGRHHAGLNRLEAHLSRHWPEVLGLLELGSATLSELVAAYGGPAAVAADPVGAEALMRRVGRAGLGEETIAAVLASARKNLGLPCVAAENGLLQWLAADNNATRRELHAIEQEIERRVAASTVPTRLGNVIGKVSAAVLVAALGDPKDYPDAASYTKAIGLNLKERSSGKHKGQLKITKRGPAVARFYLYFAALRLIARDPEVRRWYDRQNARPRALKGKTIVTLMRKLAQALWHVGRGATFAVTRLFAPEPRAA

SEQ ID NO: 294923 - protein, 343 aa, unidentified
MQTITTIGLDIAKSVFQVHGVDANGQVVIRRQLKRRYILAFFQKLPPCLVGIEACASSHHWSRELQALGHTVRLMPPAYVKPYVKRHKNDATDAEAICEAVSRPNMRFVATKTPGQQSCLTLHRTRHLFIRQQTSVINAIRAHLAEFGIVAPVGRHGVEQLLQVVADKSDKRLPEVARTCVAALGVQLQTLKAKILEFDRLIMAWHRSSETSRRLDDIPGVGPALATALVASIADPNAFRSGRDFSAWIGVVPKQNSSGGKDRLGSISKRGDRYLRGLFVAGALAVIRYAKIYGTKHRPWLTALLARRPTKVAAIALANKIARMAWAMMAKGERYKEPVALAV

SEQ ID NO: 294924 - protein, 343 aa, unidentified
MGEVSTIGLDIAKSVFQVHGVDVDGAVVMRKRISRAKLLEFFASVPACLVGIEACPSAHYWSRRLQALGHTVRLMPPSYVKAYLKRSKNDANDAAAICEAVTRPSMRFVATKSAQQQSGLMLHRSRQLLVCQRTMLSNAIRGHMAELGIISAKGRNGTAKLLEMIADEQDDRIPAAARFSLAILARQYAVVRAEIAAIEKRIHAWHRSSEESRRLEEIPGVGPIVATALVAEVGDWNTFSSGRSLAAWIGLVPRQHSTGGKERLGSISKQGNRHLRWLPVVGAMAVIRYARQHGTKRLWLARLMDRRPIKVAAVALANKIARMAWAMMVRRERFKEPKLLPAA

SEQ ID NO: 294925 - protein, 483 aa, unidentified
MEGKQKVAAQRRRKQKPAAAAGPVEIPDADHEVVIERAAAIDVAKATGTVCVRLPGKSGRRFSRVWEVSARTGVIGELAQQLIELDVEKVTVESTSDYWRIWYYLLEAAGLDVQLVNARDVKNVPGRPKTDKLDAVWLAKLTEKGLLRPSFVPPAPIRRLRNYTRLRVALTQDRSRYWQRLEKLLEDALIKVSSVASTLDTLSTRDMIEALIAGERDPRRLAALARGRMKAKHSELITALDGRFDDHHADLARMLLGQIDALSVQIDALTARIEELIAELPDAAGAIDRGDPSMGTGAGIDTDPDTGDDTRADPATVAHRAPSVIERLDQIPGIGQRAAQTIIAEIGLDMSRFPTPEHLVSWAKLCPRTIQSGPISRGSKTGKGNPYLKGVLGEAAAAAAKTSTFLGERYRRLVKRCGKLKALVAVARSILRIIWQLLSDPTARFHDLGADYHATRIHTERRTRNYVTQLMAMGYRVTLEPAA

SEQ ID NO: 294926 - protein, 317 aa, unidentified
MSTPLFVGLDVAKAHLDLAVHPTGEQWQVANTPDAFPALVTRLQALAPALLVLEATGGYEAAILSALAVAGLPVVAVNPRQVRDFAKALGILAKTDQIDAAVLAHFADRVRPPVRPLPDEATAELAALLTRRRQLLDMLAAERHRLAQARPTVRRNVQQHIRWLEQRVRDLDDDLTTRIHQTPVWRAKEDLLRSVPGVGPVLARTLLADLPELGSLSRRALAALVGVAPFNRDSGRLRGRRAIWGGRAKVRAALYMAALVATRRNPIIRAFYHRLLTAGKPKKLALTACMHKLLTILNAMIRTGQSWRISLAESTLD

SEQ ID NO: 294927 - protein, 362 aa, unidentified
MKHFIGCDVHKKYSVFVTMDESGTASRAVRVEHGNGELEGYLSSLPGGTPVAVETTGHWYWILDAMEKAGLEPHLAHALAAKRMMVSPNKTDKLDAKGLATLLRNGTLPEVWAPSGSLRDLRGLMRSRLALRRMGTGLKNRISSALARYGLPQQFRGDLFGAGEAATKCRQESVAALPEHSRFATNQELDLLEAVETCVTAVTEEICNSVGKLGWVRRLRTMPGVGEILGPTIYLEIGLVSRFPTPAHLAAYAGLVPRVSSSGGHTRLGRTRRECNRFLKWAFVEAAEVVVSHQESMSARHVVRLYRRVKNNKPDRHGQAVVAVARHLAESAWHILEHNQDYREPQPTPGMIQRFHTTGRPL

SEQ ID NO: 294928 - protein, 445 aa, unidentified
MHYKRLLTWIDGSSSYLSVGLDVGADFTWMSIALPNGAFIGKPFKIVHSDPRSRDLAVTKIKEAQETYSLKSRCFLESTGIYHIPLLCFLRDKGFDCSVINPIITKNSTNINIRKLHNDKFDSKKAALVGLNVSLKTSIIPEDSIVDLRNLVRDYYYFKDLQSAVALKLTAELKMSFPAYAKVFSKVTTQSSLKLLSSYPLAGDMLEASKDDIVETIRSTARFGEAYALRKYDAVIAAAQDASVFGRALPSNAVRIRLYIDTYQEYQKHLDALLKALHETVERLQDTLIYDQICLLQSLRGIGFLSAVVLIAEMGDFKLFPSPKKLYAYFGLDPAVKQSGKLNGDKVHMSKRGSSLARRVLHMVALNNVKVDKGSGTPVNPVIYDYYTRKCSGKKKPVAMGAVMHKICNIIFAMLRDNKPFEIITPEEHCQRFATEYPDKIRKAA

SEQ ID NO: 294929 - protein, 310 aa, unidentified
MDSITVGIDVSKDRLDVAVRPSGEVFAIERNPAGLEQLTLRLGALSPNLVALEASGGFETVVAAALAAARLPVVVVNPAQIRAFAKAIGQRAKTDPIDAAVIAHFAEATRPEPRPMPDEATRLLADLVARRRQILEMMVAERQREKRVTVPHLRKSIMRLLKVLERELTSVDTDINDAVRGSPAWREKEDLLASVPGVGPTIARTLIAELPELGQLSRRQVAALAGLAPFTRQSGQWRGKSFIGGGRTSVRTALFMGAMVAKKYNPVLRTFFNRLVAAGKPKMIALIAVARKLLTMLNAILRDRRPWQTA

SEQ ID NO: 294930 - protein, 432 aa, unidentified
MKHNQSSKQNQRIMRISETTLVIGTDVAKRNHVARAFNYRGIELGKRCLFTNDDNGLNNLIAWASSLQKEHGMNDIIMGVEPTGHYWFPLYHFMKCRGIEVVLINPHHVNKSKELDDNSPTKNDVKDAKVIGKLVIDGRYTKPQLPEGVYADLRVYMNQRERLNLDLNRAKARIHNWLDRFFPEYTQVFKKWEGKASLITLEHFPLPQEVVQAGETSIVATWKKNGVERAVGAKRAALLYRTASKSIGLTEGVTAAKHELAMCLEQYTMLSRQLDQLMELVEALVKQIPGAEEMMSIPCVKLTTVAGFLAEVGDLDNYVHSQQIVRHAGLSLRENSSGDRKGETTISKRGRCRLRALLYRVTLTLVAKNPEFRALHHYYTTRMDNPLKKKQSMIALCNKLIRVLFELGRKQKKYDSTKVLGPHREAQLQIAA

SEQ ID NO: 294931 - protein, 312 aa, unidentified
MTEIIIGADISKDHIDLHRLPDGKRLHVSNDRKGFAAIVKWIDSATLDRLVYEPTGPYHKAFECFMMTKGLRLSKVNPRFARRFCEAAGRLAKTDRIDAELLARYGQFLQPRILQTQTHIPSDLKEFHVARQALVKDRTAAKNRSKNLVNPLLKKQNAARLRQIESQLKAVTEAIMTLVSNDQTLKARYDILVSIPGLSQITAFALLIEMPELGELDEKAAAALSGLAPMTRQSGRWTGRAFVTGGRAIVRHALYMPAIVAIRFNRDMKAKYESLCKAGKPPKVAITAIMRKLIILANALLRDNRKWHIKQS

SEQ ID NO: 294932 - protein, 402 aa, unidentified
MAAISGIDWAAEWHDVHVSDEHGCVLAQQRFCHEEAGIDALIALLAEHDVRRVAIERPDGLLVGRLLAAGISVVAIHPNRLAAARDRFRAAAGKDDRFDAMVLCELGRTDHHRFPALAPSSDETLALRALVRTREDLVAARVALANQLRAHLDAAWPGARIFADVDSPISLAFLARYPSAADTRGLGPRRLAGFLARHAYSGRRTPEQLLDRLRTAPVAAIGELEAEARRSAVLALVCALRPLVEQISQLTSEIRGAIQAHPDGPIFLSFFRDPKSVVTAAGLLCEIGDNRARYPHADTLAADGGQAPVTKQSGKHRAVGFRWACDKRLRNHICVLADSTRHWHPWARDVYQRAIDRGCDHPHATRILGRAWTRVLWHCWQDGLTNDPTRHRALTRHLNQQG

SEQ ID NO: 294933 - protein, 366 aa, unidentified
MREQKNNRRDRTTIGLDLGDRWHRFCVLGASGKVVEEGSVANNRVALSELSSRYPRALIVMEAGCHSPWVSRHLEQGGCEVIVSNPRKTRAIYQHERKSDRRDALMLARIARMEPALLYPVRHGSEETQQDLLRIKLRDSLVRARVGLINSLRFTLKSLGYTIANPSTERFHKVVQSALPQSVVQMIAPSVQAIEELSLRIKLLEREIRTLTHTKYPETSWLEQIPGVGPITALYFVLKIGDPARFERVRDVGAFIGLCPRRDQSGENDPQLRISKRGDAYLRRLLVSSAQYILGPFAPPSALRQYGLALAAGATARAKKRAVVAVARKLAVLLLTLWKNKSPYQAFPQQREKMRIHDLERLRCIA

SEQ ID NO: 294934 - protein, 401 aa, unidentified
MKYGVGIDVSKGKSTVAILSIEGEVIEMPFDINHDVEDLEKLDKKLQKFSKEDLKIVLEQTGTYHLPILTYLLDKEYCVIAENALKIKKYLDRSLRKAKTDKKDSLKLAEYACDNWYKLKVNFIEEEKYKELRFLSRQYFSLNSMKVQQKVDFSDLTDMLFPGYYQLLEECNFVVGLKIFEKFSDPKIIRKKKLETFLNDVEKIAQKIGQQRASRNLAIKVYELAKKSVPSCPSNSSTQLILNKRVVALINLIETTNEIIAKMNEIAKNMDEYKEVRNMKGVGDRLAPLLIAEIGDIRRFKNAGSLIAYAGIDSPPYQSGKYEATNRHISKRGNKYLRKTGFEVMQSIKSFCRVDCEVYDYIVKKETEGKCKKSAKIAGLNKFLRQYYGILKKKYIELGTW

SEQ ID NO: 294935 - protein, 449 aa, unidentified
MTKSKRRLKGMPIIHQGAAGIDIGSRFHVAAIPPDLSEQSVRTFQAFTADLHAMADWLIQTGVTTVAMESTGVYWVPVYEILEDRGLEVILANARDARGVPGRKTDVNDAQWLQKLHACGLLKASFRPDRQISALRSYLRQRERHLDYCAAHIQHMQKALTFMNLQLHHVISDVTGVTGMKIIRSIVQGQRDPQKLATLRDGRCKATEETICAALVGNYQPEHLFALEQAVLLYDFYQLRVHDCDEKIAAALDALNQSTTVPDIPLPKPRHKTRQPNALNFDVRVPLYQLVGTDLTQIHGIGPYLALRLISECGTDLSRWPSAKHFTSWLTLSPGSKISGGKVLSSYSRKTNNRITAHLRLAATTVGRTNTALGAFYRRLSARIGKAKAVTATARKIAVLFYNAMRYGMEYKDPGAGHYEQQYRKRVVKGLHRRAAEFGFTLHKVECVS

SEQ ID NO: 294936 - protein, 397 aa, unidentified
MYIVGIDIAKRKHEAAVIDGEGAVIIKPFSFTNNCSGYNRLLAMLAKAKLPLDEVSFAMEATGHYWLALFTRLQKEGFRVQVINPVQTNSIRSFYIRQAKTDPRDALLIAEVIRFGHFSESTLHPENIYELRELCRGRHAIVSMQADVKRKVVALLDQVFPEYETAFTNMFSDTSMAILQTCPTPKELSEMPLEELCHLIEVSSHKRFRMAKAQELQELARNSFGFAMAGDVFSTMIRLYAKHLDFLKQQVQEMDRKIAEIMDTLDTPITTITGIGPTLGAYILSEIGDINRFSSAAKLAAYAGIDPTMRQSGEYNGVRNRMSKRGSPYLRHAIWLAASSAVLHDPALKLYFQKKRDEGKPYMASVGHACRKMVSIIYAVMRDNKAYTPCIPNEISA

SEQ ID NO: 294937 - protein, 358 aa, unidentified
MNGNKERPRVTAGLDLGDKYSYLCLVDTDGGEVIEEGRLRTTPEALRRRFASERPLRVAIEAGTHSPWVNRLLEECGHEVLVANARKLRLIYANKQKTDEVDAENLARLARLDPKLLYPLKHRGEESQAHMAVIRSRQALIGCRTQLVNHVRGAVKSFGHRLPKCPARSFHKRAAAHIPEVLLPALGPILEQIGSLTERIRDYDRRLETVSKERYPETELLRQVEGIGPLTALTFVLTLEDPNRFERSRSVGAYLGLVPATDRSGERNPQRRISKEGDEMLRKLLVGSAHYILGPFGSDSDLRRHGEKMASRGGKNSKKRAVVAVARKLAVLLHRLWVTGEVYDRLHNAHRRSQEEAA

SEQ ID NO: 294938 - protein, 348 aa, unidentified
MPDERIEVIVGVDTHTDTHTAVAIDQLGRRLDSIEIPATLYGYRSLLEWARPLGELCCFGVEGTGAYGAGLTRFLTDTGVRVVEVGRVNRQHRRRYGKSDPADAEAAARAVLSGQQAGVPKSRDGIVESIRTLHVVKRSALKARTQAANQMTGLIITAPEATRNELRALTALKRAKTAAKWRPGPGYDPVTVTRRAIRTLARRWLDLTAEINTLNRDLDELVQLAAPNLVAQQGVSRDVAAKLLIAAGDNPQRIHTEAGFAALCGVNPVPASSGKTSRHRLNRSGDRQANNALWIIAMVRLSRDPETRAYRDRRKTEGLTHREIVRCLKRYLARQLYPILLRDLATLT

SEQ ID NO: 294939 - protein, 426 aa, unidentified
MTMKVTYLTCCGVDVHKSFLVATIVKTTGGIEPSYQKKRFSTFNHSILEFKQWLLENDCHDVCMESTGKYWVPAFNLLEDEINVTIANPKWVKAVKGNKDDTKDSKWIGDLFRLGLVKGSYIPCKKIRILREYTRYRYKLVSCRSSEKNRYQNALTVCNVALDSVVSDIFGKSSTSIIDYLLEQADNSINHEEIASKLLRRLKSKEDAVIESIEGYQMTDSQKYRMRLVRAHMDYITAEINDVDSMIESMISSDPDYENAIQFLMTIPGVKRDSAITIISETGIDMSQFCSSKRLCCWAGLVPGSNESGGKKKSVRIARAGVYLKPALVQCAHAAVKSEKSPYYKKKYESLMKRRGKKRAIVAIARMILTAIYQMLSTGEAWNPSDLYKIDMPEALLEKQKTKAIKQAMKLLQREGLYPPPEPIAS

SEQ ID NO: 294940 - protein, 319 aa, unidentified
MHCIGVDVSKQELVTYDGVSERVFANTPGLAAFRRFVGSAADVVIVFEPTSTYWRRLETLCRTERIACCQLNPRVVPHYRQVGKGRSKTDKTDAELLYRYGNERGLEEAGQLSHDALAQSLAARLACHRVIQKARVAYQGLLDALDHDPGTERELVRELRDAIAELKEQEKAQLAAAQAIISTDEQTARRFHALLSVPGIGPMTALTLFTVFRKYPDINRQQLVALGGLDPIQVQSGTSVHGKSRISKRGNREVRKCLFEATLSAARYNPSIRAIYRRLKEEGKPDKVARIAAARKLLLLAHAIYESGEPFRATIEEVT

SEQ ID NO: 294941 - protein, 414 aa, unidentified
MERLYTCCAGLDVHKQTVVACLLRPDDAPARKEIRTFGTTTGALEELRDWLSAAGCTYVAMEATGVYWQPIYHVLEGYDELLVVNAAHMHAVPGRKTDVRDAEWIADLLQHGLLRASFIPSREQRELRDLTRTRTSLTDERSASVNRIQKVLEDANIKLAGVATDIMGKSGRDILAALIGGEADATAMADLARGKLRRKQEALEQALRGRMSDHHRMLIALHLEHVDLLDEQIDRLSAEIAVRLRPYEAALVRLETIPGVGRRTAEILAAEMGLDMSRFPTAGHLASWAGMCPGVHESAGKRKSGKRREGNKALRRALTEAAHAAARTKKKDRTYLRGQYRRLVVRCGKRKAAVAVGHTILRIAHYLLSHETTYQEQELVYLDERRRARTQQRALDQLKALGYEVTLAPKAPAA

SEQ ID NO: 294942 - protein, 358 aa, unidentified
MQTKVKTISFQGQNIYIGIDVHLKSWKVTIMLEHSFHKTFSQDPEPGILSDYLRRNFPGGNFHSAYEAGFCGFSVHRELVKYGIKNIVVNPADVPTTDKERKQKEDKRDSRKIARSLRNRELDAIYIPDREMEELRSLVRYRKTLVKDIGMNKSRAKAFLHYYGIRIPTELDSASQHWSARFTSWLKTVETATPCGGFVLSEIINTTEQLRLRLLKIERQLREISKSGPLAKKIKFLRSIPGIGLIVSMMLLTELGDITRFPNLDNLCSFVGLVPTTKSTSDKEKTGNITPRSNKILRNSIIEAAWISIRHDPSLALRYNELCKRMRPSEVIVRIAKKLLNRIKYVLKNEKEYVYSVI

SEQ ID NO: 294943 - protein, 340 aa, unidentified
MNTTQIGVDLAKSVFEVAVSHIPGRVHERHRLSRTRFRRFFADRAPTEVLLEACSSAHHWGRELQALGHRVALLPAADVARYRDGNKTDRADAKALLEAARNEAIDRVPVKSVEQQALSALHRLRQSYLQTRTARINALRGHLREFGVTIPLGAAQVLPRARAALAEERLPSYLRHALTEVLEEIATLQAKAAALQDQLDRLARQLPEASLLMSVPGVGILTATALLAFVGDIHRFRSGRDFAAYLGLTPREHSSALSRRLGGITKHGNSYLRMLLIHGARSALRAGHVAACPDDLRTWALALQHRKGHNIAAVALANKLARVCWRVWRDQRPFERRDAA

SEQ ID NO: 294944 - protein, 418 aa, unidentified
MKNDDYAALVALDWGDQTHAFARQIGGADRLECGAIEATAEALHAWLEQLRETCGGRPVALAVEAGRNALLHALLEHPWLTVYPVHPATSARFRRAFTPSGAKDDGPDAVVLLTLLRRHRDQLEPLSLDTPATRELAALVAARRHAVDQRTGASNQLGSVLKSYFPQALTLAGDDLTKPLALAFLRRFPELAAVQRARPATLSTFYRDHNVRSAERIAERLALAARARALVQDRALIAPAVREVAWLVDLLEVHARHIAGLETRIAEVFAAHPRAALFAALPGAGPALAPRLLVAFGDQLARYPNAQSLQKYAGVAPVREKSGARSWTHWRWAAPKFVRQSFVEWAGQTVVHCDWAHAYYDQQRRAGKAHHAILRALAFKWIRILWRCWHDQTPYDEQYYLAALRRQRSTLAVALPKT

SEQ ID NO: 294945 - protein, 343 aa, unidentified
MLHYVGLDVSLDQTSLCMLDATGRIVRETKIDTDPDVIAAYLGQTALTVERVGLEAGPLSQWLHAGLVAHGLPTICVETRHTKAALGAMPVKTDRGDARGIAQLMRTGWFKAVHVKTQQAQEWRLLLTQHRLLVSKLIDVEAEIRGTLRGFGLKIGRVGRAGFAVRVRELLADRPSLLRVVEPVLLVQAALLAQREALHRMVLQTVREEEVCRRMMTVPGVGPITALAFRATVDQAERFTRSRDVGAHFGLTPRRYQSGETDRSGTITKTGDALTRHALYEAATSMLVHATKPSSLRHWALAIAKRRGLQKARVALARRLAVVLHRMWRDGSVFHPQGRPAMA

SEQ ID NO: 294946 - protein, 414 aa, unidentified
MKYALVPVLPDVPPGGVCAGIDWASGSHAVCVVDVAGKVKDRFTAAHDGAGIAALIARLRQDRVGEVAIERSDGPLVDALLAAGFTVAVITSRQVKNLRSRFVASGAKDDGFDAYVLADTLRTDRARLRPLVPDSPATLALRQAVRFRKELVRDRVRACNRLRAHLQTAFPGAAGLFCALDSQLSLAFLAAFPSRQAASRLDEQAIAAWLGTVPFRGRAAPAGVLAARLAAAVPGTGDDAAQAAVTVQMAGAAADAAARIRALEAEIAARLAAHPDQHIFTSLPRAGTVRAARLLAEIGDCRSRYPDPQALAGAAGVSPVTRRSGTWISHHFRWDVSAHLRDAVCDFAADSRHASCWAAGIYDAARARGKDHPHAVRILACAWIPVIWRCWHDGTAYDPRKHYALQHILTRAGQ

SEQ ID NO: 294947 - protein, 344 aa, unidentified
MEHYAGLDVSLELTSVCIVDAQGGIVCETKVASEPETLIRLLSDQELEIVRVGLEAGPLSQWLHAGLITAGFDAVLLETRHVKAALSAMTVKTDRRDARGIAQLLRLGWYRSVHAKSANAQEVRAVLTARKLIQAKLLDLESGIRGVLRGFGLKVGPVSRGRFEARILELVDGNAILETAIGSMLAARTALETEFKRLHRELLTLVRDDAVCRQLMSVPGVGAIVAITFKSGVDDPSRFRRSRDVGPHFGLTPRKYQSGELDVTGSISKVGDRMVRTALYEAASVILTRTVRMSPLKSWAMGVAKRRGTKKARVALARKLGVILHRMWVDGTSFRWSNDAAVTA

SEQ ID NO: 294948 - protein, 364 aa, unidentified
MKRKVYVGMDVHKETIQIAYLTSNSKEILKEQQIKHNEVQIKKFIKKLKTEWNEIHCCYEAGVTGYPLYRYLKSLGVNCILVAPGKIPRQNTDKIKTDKRDAIKLARLMRSGELESIHVPSEEDEAVRDYLRSRDSLRLDLGRNRQRLMKFLLRKDIKYSTTKYWTVSHYKWLNNLHFNNEILQETFNDYYSRVRVQEENLNSMDKKIQEIAESEPYREKVGILRCFRGVDYLTAMFLLCEVNDFKRFKTAGSFMSFLGLVPGEYSSGSKRKQTGITKTGSPRLRRILTEAAWQHRFPGTGSKIITARRSGQPALVVALAEKASPRLHKKFRNLQLRGKTPQVMITAVSRELSGFLWAAMNLVA

SEQ ID NO: 294949 - protein, 311 aa, unidentified
MSFKILKNNCCGLDVHKTWIYACIGITDSFKRTEYKQARFSSFTKGLQELCLWLAKYNCIDVCMESTGKYWIPVFNVLEKNNIFVTLSHPKYTKPQKGNKTDRKDAKWICDLYMCGMVKPSFIPPADIRQLRDLVRYRFKLTCMITGEKNRAHNCLTVSNLKLDDVFSDIFGKSSRSITEQILQHPGEVFDVAPFVDSRCKTPIEEIQAAVDGAISHEQAVKLRQCLKHIDELEMHKAEIEREIFRLSQKYESVLDLIRTIPGFDKNPLTAIQVLSEIGADMSVFPTAKNLVSWAGCCPRNDQSSRKNQVH

SEQ ID NO: 294950 - protein, 320 aa, unidentified
MMAQNEVVVVGIDVAKDKVDACIRAFKLRQTWLSTAQGHRKLVAWLRKHQVNKAVMEASGGYERAWARVLREAGIEVRIVDPKRVRSFALSAGRLAKNDAIDAEMIAWFAETFSEAPSQPHDAAREELQALVKARLDLIDFRMRLVSQSEHAAPGLVQKAHAHILKSLASEIAKLEAAISAKIKSTPDFAERAEIIESVPGFAQTSSANLVAGMPELGQVSDEIAAALIGVAPYDDDSGKRRGERHIKGGRRWVRNAIYMPCVGAATQNNPVLKAYYQRLLAKGKEPKVAIIACMRKLIVILNTMIARRQKWDPSRYVLS

SEQ ID NO: 294951 - protein, 350 aa, unidentified
MDKELYIGVDVSKQTLDLAYYDGESIDWKKAHIKVSNNNAGFKKIGSWVAKVSKGFDIVLFCMEYTGLYTQNFRLWLEEKHYIYRMVEPRKMHRFEPDLDDGLRSLDRIKTDELDSFRIAIYCEQNHRKILRNPSKLPSPVYFKLKRLLAERKQTVKQSVLYKQQLHDICAYDTDLSVERKNGQLKTLNDALKGIDNEIDMYIKEDADISKNFSLLTSIPGIGRVVALETIVLTENFMAIDNPRKYACYIGVAPFKKESGTSVRKGSSVSKKGFKQAKADLSIACLVCIQHIPNIRDYWERKRKEKCSGIVFNAIKFKMILRMFAVIKRGTPYVETDNYRNGKNKQPGVN

SEQ ID NO: 294952 - protein, 356 aa, unidentified
MNKSNKLDFTGQPIYVGLDVHKKSWSVSILSEQCEHKTFTQPPEVDKLVYYLRRNFPGAQYHSVYEAGFSGFWIHDQLRERGIDCIVVNPADVPTKDKERAQKRDRVDCRKLARSLRSEELEGIYVPCRWKLEDRTLIRTRLSMVRKQTRCKNQIKGMLLFYGIHLPEELIHSHWSRRFIRWIERIRMEKGSGNIALKAHLEELKHLRKIIAALNRAILALARTEEYRVPVNLLKTIPGISTLTAMTLLTELYEIRRFPSLDELSSYTGLIPDTRGSGEKEHTGGITERRHPQLRCVLVEASWVAVRKDPALLMAFLQYCKRMRKTRAIVKIARKLLNRIRYVLRNQIEYVPAVLE

SEQ ID NO: 294953 - protein, 411 aa, unidentified
MLLFVGDDWAEDHHDVEVMDASGRRLAKARLPEGMAGMARLHAMIGQALGDDVDAESVAAGVKIGIETDRGPWVRSLVAAGYTVYPVNPLSAARYRERLAVSGAKSDAADAHMLADMVRTDSHQLRPIAGDSAGAEAVKVVARMHKTLIWERTRAGQRLRHALREYFPAALAAFEDLDAGDTLELLAKAPDPASAARLSISQISAALKRARRRDIPAKAVAIQAVLRAEHLGQPDVVTAAYAASVRALVAVLVTLNEQVKALQGEVEAHFGRHPDAEIIRSQPGLGAVLGARVLAEFGDDHDRYTSAKARKNYAATSPITRASGKKKTVMARFVHNDRLVDALMTQAFTSLRLSPGARAYYDRQRARGAGHNPALRQLANRLVGILHGCLKTGTVYDEATAWSHHHIEAAA

SEQ ID NO: 294954 - protein, 310 aa, unidentified
MGQTFIGIDVAKDRLDVHVRPSDEAFMVARDSEGLARLMERLRPLDAYLVVVEATGGFEQTLAAALVSEGLPLAVVNPRQIRDFARATGQLAKTDALDAKAIARFAEAIKPEPRPVPDDQARALGELVARRRQIIDMMTAERNRRRQLSSRRLIKSVDRLLAVLQKELTELEGDIGESIRGTPAWRERDELLRSVPGIGDVVARTLIADLPELGRLDRKQIAALVGVAPLNRDSGRMRGRRTSWGGRAKVRSALYMAALVASQRNPVLKAFYQRLISFGKPKKLALTAVMRKLLTILNAMVRDNKRWQNA

SEQ ID NO: 294955 - protein, 414 aa, unidentified
MDVLHERCVGLDISKKDAKACVRTPSTKRRGSFTTETTTWGSTTNAVLALRDHLLAARVTLVVIEATSDYWKPFYYVLAGELNVILVNARQVKNLPGRKTDVSDAAWLAQLGAHGLVRPSFVPPEPVRELRDLTRARTTATRERSRVVQRLEKLLEDTGIKLSAVASDIMGVSGRAMLEALIRGEADPQVLADLAKRKLRNKIPELTEALTGRFREHHAFLARLHLDQYDQLTTMIEQLTERIEEAMAPFRGALDLLDTIPGINRAVAEVIIAETGGDMNRFATAKHLASWAGVCPGHHESAGRTKNTKVRPGNPYLKGALGIAAFGAVRTKDTYLQARYKRLTARRGPLRALVAVEHSIITALWHMLTDNVPYQELGATYYTQRDPERATRRAVNQLNQLGYTVTLNPREAAA

SEQ ID NO: 294956 - protein, 323 aa, unidentified
MMGLPNSLCVGIDVSKMSLDIASNQTIRPFSASNDVDGFDAIIAELKQHSIALVLMEATGGLEAAVACSLQAQGFDVAVINPRQARDFARSMGYLAKTDRVDAAMLAQLAEVINRHPERARFIRNLPDAEREVLNAMVVRRRQLITMLTAERNRLYPSHPQSRKSISTIIGVLQDELKRINKSMEVHISTHFKTLAELLGGVKGIGAATIATLLAEVPELGHLSRREISALIGLAPFNRDSGNMRGRRTIFGGRANVRSALYMATIVATGHNPVIKQFYNRLVESGKAKKVALVACMRKLLTILNAMIKKNEPWDPSHHYLSQ

SEQ ID NO: 294957 - protein, 427 aa, unidentified
MSYKVAGIDVHKRMLAVVVSDVEGDGEYQFERRLFGSNPEQLRLLAEWLLEQEVEEAVMESTAQYWKPVWGALERLWKPIRQKREGAGPMSGTLHLAQAQSNRGPQGRKKDFPDAERLVKRLVARELTLSFVPDPDQRLWRTVMRRKYQLTRNRVQLQNRVEGLLEEAHIKLSSFVSDLLGVSARRMLKALADGETNPASLAALADRRLRATQEQLCDALGACMDLNPVYRRLLKMMLEELQLIEEQIGKLDKEMANLLQPYQDQVKRLTEVPGLGVDSAQQILAEVGSLAAAFPSAKHLSSWVGACPGDNQSAGVNYSHRSPKGNRAMRRVLNQCANAAVKAKGTIFEVVYRRSVSRLGHKQTIGAIAHRQCRLIWKILHDGVRYEERGPAVSQGSKQRRAWRMIRELRSLGYRVQLENLQQPNPA

SEQ ID NO: 294958 - protein, 342 aa, unidentified
MSEITTVGLDLAKNVFQAHGADASGRAVLRKKLRRDQVLDFFGRLPPCVVAMEACGGAHFWGREIGKLGHEVRLIPPSYVKPFVKRQKNDATDAEAICEAAVRPTMRFVPVKSEETQGAAMVFRIRELLIRQRTQAINALRGHLGEFGQVVPQGAANAARLIAIVEDADSGLPADAIATLTVLVAALSHLEAEIGRLDVEIEARARKNEVARRLMTVPGIGPLIATAIAVLAPPPEAFRKARDFAAWLGLTPRQHSTGGKQRLGATTKMGERSLRRLLIIGANSVIIKRHVHAAARPGTWLGGMLTRKPPMLARVALANKMARIVWALMARGGVYQSPALAA

SEQ ID NO: 294959 - protein, 379 aa, unidentified
MPHTLHHVGLDVHAETIAVAVAEADGSVRELGIIPHRPEAVRKLLAKLGPVADLRVCYEAGPTGYPLYWQLTALGVHCDVIAPSLIPTKAGDRVKTDRKDAVRLARCYRAGDLTAVWVPDAATEAFRDLVRAREVSKQDQLRARHRVSKFLLRHGRQRPEGMRAWTLKHAQWLARLTFELPTLQVVYDEYRATLAVLADRIARLERAIQAALPTLAPAQQALIGALATLRGVQTVTAATVVSELGTLRRFATPRHLMAYAGIVPREHSSGSGIHRGAITKTGNAHLRRVLVEAAWAYRHRANPASSTLRVRQADQPAAIVAIATKAQHRLCPRYRRLLDRGKQPLAVATTIARELLGFIWAIGQTIEPPPAPVGVVMPM

SEQ ID NO: 294960 - protein, 323 aa, unidentified
MDGSILETPQIFIGIDVSKSSWDVHLLPEGRSFTIRIDDGAVERLLGKLGSPTASLVVLEATGGFERELVAELIDAGWIVAVVNPRQVRDFAKALGRLAKTDGIDAETLALFAQRVQPRPTQKTPEKQQELEALVTRRRQLVSLRSIEKMRRPQAVHKTASRSIDKVLKVFDQQIAALDKAIARLIEADDDWRAKRDLIESVPGVGPTTSATLVAELPELGRLNRQEIASLAGLAPFNHDSGKFRGQRRIRGGRGALRAALYMAALTAKRCNERLRAFAERLHKAGKPFKVVITACMRKLLTILNTLVRSGTPWTPHPSVEQR

SEQ ID NO: 294961 - protein, 344 aa, unidentified
MRNPNILAIDLAKNVFQVCKTDSQGNVVFNREVTRLKLKALLCKQQSSLVAMEACASAHYWARYARDLGHQVKVMSARSVKAFQTKQKTDKNDALAIATAASLQHIHSVKIHTVEEQALQALERARHLALAQQVAQSNQIRGLLSEFGVVIAQGMSALRVNIPLVLEDAENGLPDSFRAVLHRLWAQLNVQIEHVDMLTKQLELSVSTDPVCQQLMKLEGVGPLGALGLALRLGKGENFTNGREASANIGLTPKQHSSGGKERIGHISKRNADKRLRSILFQGALSVISSVIKRPARTTKEQWLKALIERRGKKVAAIALANKTVRTAYALLKSNSEYQPQLLA

SEQ ID NO: 294962 - protein, 343 aa, unidentified
MELYVGMDVSLKETSICVVDGSGEVVFEGTVTSEPVAIAEVIRSKAAGALRIGLETGPTSTWLWHELRALGLPVICIDARHAKAALSMQINKSDRNDAVGLARIMQCGWYKEVRVKSVACHEIRAVLNSRGLLVKIKRDLENQIRGLLKNLGLVIGKAGGNVFRRRAEELIGGQGLLGEAVRPLLEVREKVSREIAALHQKLLDLARNDADSRRSMTVPGIGPITALAFRSAIDDPSRFRRSRSVGAYIGLTPRRHASGEVDWSGRISKCGDRMLRTYLFEAAGVLLTRVAHWCKLKVWGHRLWKRIGFKKAKIAVARKLAVILHRMWRDQTDFIWSSKETPA

SEQ ID NO: 294963 - protein, 351 aa, unidentified
MPRTSMVHAVTTIGMDMGKNTLHMIGLDSRGAIVMREKVSRGRITSRLANVPSCLIGIEAGMATHYVARELAALGHDVKQVPPMYAKPFRQGHKNDLRDAHAVAEAVQRPTTRFVPAKTDEQLDLQALHRVRSRLVGERTAVINQIRGFLLERGIIVRQGLRFLRQLLPDILAKRTDVLSPRMVRIVADLASDWRQLDERIEGVTDEIETLAKSDDTCRRVMTVPGIGPIISSAMVAAIGSGGAFARGRDFSAWIGLVPKQMSTGDRTILGRITKRGNGYLRMLFMQAARVILLRPASWPKHGFGGWLARAAQRLHPNVLAAALANKLARIAWTVLAQERSYEARVTKAAA

SEQ ID NO: 294964 - protein, 343 aa, unidentified
MELYVGMDVSLKETSICVVDDDGEIQCEGTVISEPEALARFIKTNAADAKRIGLETGPTTTWLWHELRALGLPVICIDARHAKAALSLQINKSDRNDAVGLARIMQCGWYKEVQVKSLSCHEIRAVLSSRAQLVKIKRDLENQIRGLLKNVGLVIGKAGGNVFRCRAEELLGSQGLLWEAVRPLLDIREKVSREIAALYRKLLGLARNDEDSRRSMTVPGIGPITALAFHSTIDEPCRFKRSRSVGAYIGLTPRRYASGEVDWSGRISKCGDGMVRTYLFEAAGVLLTRVPQWCKLKAWGHRLWKRIGFKKAKIAVARKLAVILHRMWRDGTDFQWSSKEAAA

SEQ ID NO: 294965 - protein, 325 aa, unidentified
MNVTTIGIDLAKTVFSIHGTDTHGKVVVRKRLNRPKLLAFFAQLPPCLIGMEACSGAHYWARELTKLGHDARIIAPRFVAPYRKSSKNDDNDAEAICEAVGRPNMRFVPIKTEDQQATLCLHRIRRGLTKERTAQINQIRGLLAEFGLIIPQGRYAARRRVPEILEDAENGLPMRARHLIGNINQRILQLDEEILAYDREIEAMARHDEQAKRLMAIPGIGPQTATALLASAPDPRQFKSGRHFAAWLGLVPRQYSTGGKVRLGRITKRGDKYLRTLLIHGTRAVIATLHDKQDRLSGWARDLVERRGYKRAAVDLPPITKPLTA

SEQ ID NO: 294966 - protein, 389 aa, unidentified
MTFFVGVDIAKYEHVATILDDSTGEFLVDSLHFDNNSKGFKLLLSNLSKLDRNDVVIGFESTAHYHQTLFSYLSGKKYRCFLINPFMTSRFRSLSLRNAKNDNIDSRAIASYLSFEYRHLLEENFFLNELKELCIHRDAIMKRSSRLKIQLLSYLDRVFPELESVVDKHGIHSKAIRAILKERPTAASISSTRIDHLLKLAKDASHNRFPQAKIKAVKEAAISSVGISSDAIGLKIRQSVQMLESLEKQIDEVEAAITSSPTVIDSPLHKVKGLNSIEIAYIMSAIINIDRFASPDKLIAYAGLDPIIRQSGTWQATQTRMSKRGNKLLRYALIWSANNIRKHPSKMKDYYDRKIAEGKSHYNALGHCASKLCRYIFFILNHPDDDFIN

SEQ ID NO: 294967 - protein, 354 aa, unidentified
MSQTVNAAIAVVGIDIGKNSFHIVGHDERGAIVLHQKWSRGQVEARFANMPPCLIGMEACVGAHHLSRKLRALGHDARLMPAKYVRPYSKGQKNDFRDAEAIAEAVQRPTMKFVATKTADQLDLQALHRVRERLVSQRTGIINQIRAFLLERGIAVRQGQRFLRAELPRILATPPDVLSPRMVRMIEDLAGDWRRLDERIEDLSNEIEAIARQDAGCERLMSVPGIGPIISSAMVAAIGAGDVFTKGRDFAAWLGLVPKQISTGDRTILGKISRRGNRYLRVLFVQAAWVVLIKPKVWERHGLKPWIEAARKRLHHNVLAIALANKLARIAWSVLARGRAFEARKMGQAVNHSA

SEQ ID NO: 294968 - protein, 330 aa, unidentified
MHVAGIDVAHKTLGVVLSADEKAGKAQEFANTADGHQALVKALKAARVERICLEATGSYHLDLALALDAAGLALMVVNPKAAKRFAEALLTRTKTDAVDAAVLAQFAQRMPFEPWQRPDNQALALRACARRLEALNRAKTEAKHQLHALTQSQTTPEVVLADVRLTITQCEAQIKDLRTWAEGLIQADTHLQEIFALLTTVKGIATASAIQLMGEILVLPADMRAKQWVALAGLDPRQSLSGTSVHKKPRLSKAGNRYLRLALFMPALSAARHDRHVNGYYRHLIEERGLKKIQAVCAVMRKLLHAIHGMLKSRQPFDGSRFYTLAATPT

SEQ ID NO: 294969 - protein, 408 aa, unidentified
MFAGIDWASTEHAVAVNDDAGRALASFMVEHSAEGFDKLVARLRALGEPGGLTVAIERPDGRLVDRLLEAGHPVVAVSPNAIKAWREGEVVSGAKSDPGDAAVIAEYLRLRFHLLEPLQPFSDHTRALRAAVRARGDLVAQRTAAHNQLEATLDAFWPGAKKVFSDVTCKIALAFLRRYPTPASAAKLGEKQMAAFCRKHGYSGGRSAAELVERLRRAPAGITAVAETAARKAAVLAYVGVIASLNAAIKDLDKEVATALGEHPDGEIFASLPRSGLINAAQMLAEWGDCRQAYGAPEAVAALAGMSPVTKRSGKYKAVHFRWACNKRFRTAVHTFADNSRHGSDWAAGVYAQARARGADHPHAVRILARAWIRVIYRCWSDGVGYDPAKHKAAVALAARDKPAPQAA

SEQ ID NO: 294970 - protein, 466 aa, unidentified
MRQRKQAVKRSMTTTPSNPLELLNPNAAGIDIGAAQHYVAVPAGRDSDGQDVRCFSAFTADLHALARWLKACGIDTVAMESTGVYWIPLFELLEAQGLQVHLVNPRSVKNAPGRKSDVLDCQWIQQLHTYGLLSGAFRPEEQICVLRSYVRQRAMLISSAATHIQHMQKALDQMNIKLHQVVEDITGATGMRIIRSILDGQRDALSLAQLRDARCKHDVATIAASLHGNWRKEHLFALKQALELFDFYQSQITACDSVIEEHLHSFDAEHRSPPDAPGAAGKGSKHPFGFDAHGHLQRISGVDLTRIEGINVTTAMGIIAETGVDMNRWPSEKHFGSWLGLCPGTKISGGKRLSSRSKPTANRAAHLFRLAAYSLHRSKGAIGAFLRRKKAQLGAPKAITATAYKIARIFYNMLKHGTEYFALGQDYYEKRYRDRLLNNLKRNAQTLGYQLIQLTENTKEMVNNPV

SEQ ID NO: 294971 - protein, 337 aa, unidentified
MNITTIGLDIAKRFFHVVCCNEQGRLVSKKMLKRAQVLAFFQNHPSCLVALEACATSHYWAREIQKCGHKVKLIPPQHVKAFLIGNKNDYNDALAIAVAAKQPHIKSVGIKSIDQQDSQAQHKVRELAVRQRTALCNQIRGLIAEYGIIFSQGVNNVRKNISLMLDDETTQLSNVFKVLLAQLQEQLKSLDNCIKTFGKTITISAKSNPICQRLQTIPGVGPMISSAYFNEIGNGSNYRRGRDVSASLGIVPRQHSSGGKDTLLGISKRGNGYLRCLLIQGAKAVVSRAGTKNDKLSQWINRLVQTRGHNRACVAYANKMARMAWAITVSGEEYSPS

SEQ ID NO: 294972 - protein, 408 aa, unidentified
MNEESGWTPSPCLGLDVHKATTTATYLGRDGRTKRVWTFPTTRSALTALTREVDPQTPIVLEASTAGKAVATVLKEAGRELHMASPRDVGLIAKSSVKTDERDSAKLAHLYQAGFLPECYIPPPEIDRMRSVVRQRQDLGYKVVLVKNQVHALVTRALLDAEMSGVSDWFGASGLRKLVQLPLSPDERTALARYLRQLTYLATQEEELQRELAQLAVDREDVRLLMSIPGVDYYTAVALVGEIGDIRRFPTKQTLASYAGLVPRADNSGDHVSSHSHVKPGDMVLKRFLCGAVMGMLMANQDTAVKRFYQKKSKQIGGAKAQVAAARKLSAVVWWILTNRVPYREQDEGLTARKESKLDRVAQVPAPTVSLEELAKVGAEMEAKAEVLGRLQRECVVPSTEEKKEGNG

SEQ ID NO: 294973 - protein, 394 aa, unidentified
MIYIGIDVASRKHDCCILNEKGDELSVFTIPNDKQGFEYLLSEVENHSSEKSLSDARIGLESTGHYSINIQNYLLHKRLSVKIFNPLQVNMLRKAQSLRKTKTDKSDSKFLAMLLFSDDSKSYSLPVLSISELRILTRNRHRLVQMKTKLKISLSRLITILFPELPYVVWSANQKSCYAMLLEFPTAKKIACANIIRLTNVLSVNSKGKYGREKAEQIRELAKNSIGLDSRASGFELQQTIRLIQNLQVEIDVLDKEIKKIMNSCASPILSIPGIGYTLGAIILSEIGNIENFSNPGKLLAFAGLEPSTYESGNYVASKTPMVKRGSTYLRWAMLQAARLVAYRDETFSCYYDKKRSQGKHHFVALTHTAKKLIRVLFHLMKTGQDFAPQSYTA

SEQ ID NO: 294974 - protein, 355 aa, unidentified
MPPILAERLAERVDAVIGVDTHTDTHTAAIVTPIGTVLAELTVPATAGGAAALLDWADTQTSTLGTGRRVWALDGARSHGVGLLRVLRAAGESALEAPKPEKTRRRRGGKSDVLDAVHAARAVLAADHLADPRADGDREALRILHVCRRHYSDTRTATINLFKSLILTASDQLREQLRGRNTLRQVQHAATLGTTGSDSSLEQLQRTQLAVLAEQILTLDQNLKTNLADIRALVMRMCPALLEQPGIGPVTAAIALTAWSHHGRVRSEAAFAALAGVSPIPASSGRITRHRLNPGGDRTLNAAIHTIAKSRQRCHQPTKNYIARRTSEGRTLPEITRSLKRYIARQIWRIIEATP

SEQ ID NO: 294975 - protein, 377 aa, unidentified
MEKTTRRLRKARVTIGLDLGDKRHAFCVLDRCGEILKKGSLHNERNELAKLASAYPGALVVMEAGTHSPWISRFLDSLGMEIVVANPRKTRTISQSERKSDDRDALVLARLGRVDRNLLSPIVHGSEEAQHDLLQIKLRDSLVRARVAVINSVRFTLKSLGYRVSNPSNERFHKVVLDEVPDSVRALIAHGVASIAELTARIKALELSIARLATEKYPQTIYLQQVSGVGPITSLYFVLKIENPQRFKRTRDIGAFVGLCPKRDQSGETDKELRISKCGDRYLRRLLVGAAQYILGPFGPESALRDYGLRLAQDGTARAKKRAVVAVARKLAVLLLTLWKSRQPYEPFPIMACPDLTGAMRPQTPHRSPRQAFGGNS

SEQ ID NO: 294976 - protein, 322 aa, unidentified
MAMLSFGGIDVSKDRLDITVLPDEQCSSVSNDAAGWAELIEQLRGSSITAIGVEASGGYERGVVRALLAAGMSVRQINPFKLRQFAKASGILAKNDRLDARMIASFVAIMPTRPAQQQAPMIEQLAAMLTVRRQLSDHKVAAENVSRLLEGAMLQRLSRRRIAGLTADIDLLDQRLVEIVTADPALAHRFRLLTSMPGVGAVLACTLIALLPELGQMSRKQVAALVGLAPYDFDSGKLKGRRCIWGGRARVRHVLYMAAMSASNWNPGLKAFHDRLEVAGKKPKVTIVAVMRKMITTLNAMVRDNVVWADRLSSRHSVPTAR

SEQ ID NO: 294977 - protein, 381 aa, unidentified
MTTPATCHVPESTTAGTLFVAFELSEKTWKLGFTTGHGQKPRERTVTARQQERVLDEIAQAKRRLGLPETAPVVSCYEAGREGFWLHRFLQAHGVTNQVVDSSSIEVNRRRRRAKSDGLDVRKLLSMLMRYAQGERQVWQVVKVPSVDAEDHRHLHRDLETLKQERASTATRIQGLLSSQGLRVPSLTKLPEQLDALRLWDGSPLPPGLRRRVLRVYDQYTFLSAQIAAVEAERRAQLQASTDARIEQVRQLMQLKGIGINGAWLLVMAFFGWRAFKNRREVGGLAGFTPTPYQSGESAREQGITKAGNRHVRWMTTELAWSWLRFQPDSALSVWFRERFGSGGKRLRRIGIVAVARKLLIALWRFLETGVIPAGAVLKEV

SEQ ID NO: 294978 - protein, 428 aa, unidentified
MSYRIAGIDVHKKMLAVVVSDVEIESEYQFERRMFSSNPEQLRSLAAWLVEQKAEEIVMESTAQYWKPVWGTLERYWKPLCEKREGARRRSGTLHLAQALSNRGRRGRKRDFVDAERLVKRLVARELTLSFVPDAEQRLWRTVTRKKYQLRRDLVRIHNQLEALLEEAHIKLSSLVSDLLGVSARRMLKALADGETNPAALAALAHQRLRATPEQLCDALGACTELKPVYRRLLKMTLEHLQILEQQIAQLDQELATLLHPHQDAVERLAEVPGFAVDSAQQIIAEVGPAAATFPSEKCLSSWVGACPGEEESAGVNYSHRSPKGNRHMRRLLNQTANAAVKAKGSIFEIIYRRCVPRLGHNQAIGVIAHRQCRLIWLILHQGTRYEERGPAVTKRSRYQRTWRMIRQLRNLGYRIELPNPQASQAQA

SEQ ID NO: 294979 - protein, 402 aa, unidentified
MNAVGIDVSKGKSMVAIMRPFGEIVSAPFEIKHTASDINSLVELINSVEGESRIVMEHTGRYYEVLAHQLSKANLFVSAINPKLIKDFDNDSLRKVKSDKADAIKIARYALDKWQNLKQYNVMDELRNQLKTMNRQFGFYMKHKTAMKNNLIGILDQTYPGVNTYFDSPARSDGSQKWVDFASTYWHVDCVRKMSQNAFIDHYQNWCKRKKYNFSQSKAEEIYGKAKELVPVLPKDAITKLIIKQAVDQLNSASTTVESLRTLMNETASKLPEYPVVMAMKGVGTSLGPQLMAEIGDVSRFTHKGAITAFAGVDPGVNESGTYEQKSVPTSKRGSADLRKTLFQVMDVLIKMMPQDDPVYQFLDKKRSQGKPYYVYMTAGANKFIRIYYGRVKEYLASLPES

SEQ ID NO: 294980 - protein, 406 aa, unidentified
MKPTYFLGIDAAKHKMRATLSNRSEHVLFEKDLSVEATGLRQLLAAIKRQVNDPEQLLVLIEATGLLHLNWSAALTKAGYAVAVINPLIARRLYTLQNSIRDNKSDPIDARGLCTIGLLHGEKLLVHYRFSLRPEQFTLQRAQSVRKALRSALSNLKKTYQSLMDLSFPELGGLLQLDGVGIRQLLIQAPTPAAIAGKRLCTLEKNWMVRPKAAALKVLAADSMADPGLAAASGPALVALLQSVAAMEARLHALDQQIAKLACTSVDPQTKALIETIPGFGPVNAAKTLAWLPTEILHSGSNRKVAARLQAFMGNDPRLRQSCQCKGHTKMSKRGVEMLRTAFFQSAFSAAHNDPELRAYYQCKRAQGKTHQVALSHLMRILTRRLVAVLRSGKPYQSHYNLKNAA

SEQ ID NO: 294981 - protein, 416 aa, unidentified
MSNPILVGIDVHRKTNTVCAMDSQGQELTERFTVDNNRPGTDEFVEQVASIMSDGDFDCIHIAAEATGWYWFHFFHALSQDGFLNQWPMNLYPVNPRLTKNFKKTYVDMDHTDTTDAFIVADRLRMGRDLPAPFHYDDVYWPLRILMRYRYHVVHNLAREKAYCMAVVYLKASEYTRVKPFSNTFGVASQAVLKEFSSIEEIAAIPFDQLVEFIDSKGKRRFPDPNENAGKLQKVADDSYSLPEAMKQPVHMILNLSLQHINFLERQQKRLDAAIAQRMESILHTLDTIPGFGPVFSAGIISEIGDIQNFNCDQAKVAKYAGFKWRRHHSGDFKADESKLTRTGNRYLRYYFCEAANSVRRCDTDYAAFYNRKYKEVRKHQHKRAIVLTARKLVRLVVRLLATNQPYQPGRCATKS

SEQ ID NO: 294982 - protein, 414 aa, unidentified
MFAVGVDVSNGRSTIAVLGTKRTMVVKPYEVPHTTNGFAELVKRLHGLGGEVRIVMEHTGRYYESFAMSMCRAGFFVSAINPLAIKDYQEGITVRKVKTDKADALKIAQFAIDKWEILPQYTPMDTIRYELKTLHRQFQLSSKTRTALNNNLIALLEQSYPGVNKYFSSPVRSDGSQKWVDFADTFWHVDCVAKVSRKAFVERYRKWCKSHSYSFSEAKAEEIHEESRQKFPLVPKTDTCRLLVREAVAQLNAVSRTVEAYRSEMDRLASQLPEYQTVMAMTGVGKSMGPQLIAEIGDIRRFAHQKSLVGFAGTDPIKDDSGDKISGSKPSSKRGSPYLRKTLFVIMTILLQLQPLDDPVYQFLDKKRSEGKPYHVYMTAGMTKFLRIYYGKVRNSLKEQGLWEQSDVVEVNPD

SEQ ID NO: 294983 - protein, 343 aa, unidentified
MKLSYVGVDLAKNVFQLHGVDRSGKVRWRRRLRRHQWLGALMEAADPSCEIGMEACTGAHHWARQLQAGGYTVRLIPPQFVKPYVKSNKNDANDAEAICEAMTRPHMRFVAVKSVEQQDIQATHRIRAELKDQRNAKTNQIRGLVAEYGLVAPQTLLALRRAIPDWLEDAENGLTDYFRSLLHGLWGDLLALDERIKELDKQIEQLANGNEVTRRLQQLRGVGPMVATALVATVGTGEQYRKGRQMAAALGLTPRQNSSGDKHRLFGISKRGDAYLRTLLIHGARAVMSQARHRDDPLSRWVTDIAKRSHPNVAAVALANKTARMAWAMLQHGTDYDPALAVS

SEQ ID NO: 294984 - protein, 336 aa, unidentified
MVLSLDGVGEVLQEQRLGTTPKAMREVFGKMPRCRIALETGMHSPWVSRVLHELGHEVIVAHARNVRLIGESRKKDDRLDAQTLARLARIDPQLLCPVKHRSAKAQADLTVIRARAGLVRARTALVNTARGLAKSYGERLRGCNVRNMNPEKAEALSPELQAALQPLLAALESLSERIVEYNERIEKLAQESYPQVALLKQIKGVGTLIALAFLLTLEDAQRFRKSRDVGCYLGLQPGRRNSGQSEPQMHISKEGDPYLRTLLVQGAQHILGPFGADSDLRRWGLKLAERGGRNGKKRAIIATARKLAVLLHRLWVSGEVYEPLRNSHQRAKLAAA

SEQ ID NO: 294985 - protein, 404 aa, unidentified
MWYAGIDWADTHHDALVIDEKGSQVGSLRVDHTPQGMSKLNAFLEQIIGTAPKEQMACIIETTHGLLIAHLLEAGWPVYPVNPRTVDRRRSASGAKTDTIDAYLLAKTGRADFADLHRLTPDSEKVAELKLLTRDQDALIQTQTRLVNQLTACLKAYYPVALELFTKVQQHTTLVFLQTYPTPQAAKSASIEQITQVLKKAGHPNPLAVAPKIVERLQPPHLQADAVITRTKSRLMLALVSQLLPLIEQIAQDDKEIDTLFLTHEDHEIFESLPRAGQGLAPRLLAEIGDDRKRYQDASSLQALGGTSPVLYQSGMYSKAHRRLGCIKPLRNALHQFAWQTTQSEAWARAYYQRKRAEGKSHTVAIRALANVWVRIIFAMWLHHRCYETATFEQAQQQHARRVA

SEQ ID NO: 294986 - protein, 339 aa, unidentified
MELKRISIDTSKHVFTIHGVDQREHPVLRREIRRTQFEPFFAKLEPVEVALEACAGSHHWGRLLSRLGHRVKLIPPQYVKPFVKRSKNDRNDAEAIGEAASRPAMRTVPLKTTEEQAATIIVKHREMLVAQRTQAINALRGHATEFGIIAAKGCPNIAALLAVLAADEAIPVSARTMFAEMGEHVAELDSKIEALDRRLLDQHKVNPVSQLLAAIPGVGPITAITMTLTVDPGNFESGRHLAAWLGLTPREHSTAGKHRPGKISKAGNERLRQLLVVGAMSVIRVAKPGSRSASGWLLQLLERKPRKLAAVALANKMARIIWAMMARGEAYRRQPVTAA

SEQ ID NO: 294987 - protein, 389 aa, unidentified
MICVGIDVSKYKHDCFILTDFGDVLNEGFSFANNAEGFGQLQRELERCENGDEIRIGFEATGNYGINLKLFLERIGYPYTEINPLLVKKYIRSNTLRRTTTDKLSAKAIAGYISEKPYRLHPSEFYQKFALKQLTRLRSSLVTGRSRYLIHLTNVLDCIFPEFKPFFGNKFSVTALYILANYPSPKAIANMNALSYDILRRKSRGKFSMDKFVKLKSLAKNTVGVFDECYRIELDALMELYSQIDAKIFELEKEITEIIEILNPPTLSIKGIGAVSAAVIVSEFGDFSRFENPGKMLSFAGLEPGYFQSGTTEHHGRMVKKGSSSLRCTLMNCSRAIRLHNEVFAAYYQKKINEGKPYNVAVNHVAKKLVRLIFALETKGEIFNANKLR

SEQ ID NO: 294988 - protein, 343 aa, unidentified
MKIVRVGVDLAKSVFQVHGVDRCEKVVWRKKLGRAEWLAALLEKIEPGCEIGMEACGGAHHWARQLQKRGFTVKLIAPQFVKPYVKSNKNDANDAEAICEAMSRPSMRFVAVKSVEQQDLQAIHRIRAELCSQRTAKGNQIRGLCSEYGLVAPREMIQLRAAIPCWLDDLENGLTPRFRRMLRGLWLDLLNLELRVKELDQEIEIAAATAPVATRLQQLRGVGPIIATAIVANVGDAKQFSSGRQMAASLGLTPRQNSSGGKERLLGITKRGDTQLRTLLIHGARSVLRTAASKNDRMSRWVTHIAETRHHNIAAVALANKTARIAWAMMTKGTDYQPGAVAI

SEQ ID NO: 294989 - protein, 375 aa, unidentified
MSNHSEAFVAFDTSKLRNAVAIADSGRTGEIRFLGEIENSATGTAKLARKLAGKYERLTFCYEAGPTGYELYRQIKSLGQECIVVAPSLIPRKPGDRVKTNRRDAVSLARLLRAGELTAVWVPDRHHEAMRDLTRARDTAVDDLRSKRQQISAFLLRQGLHYCAGKKTWSQAHLNWLASQKFEYPEHRLVFEEMMMAMRQAQERLERLEQAIRAAVPDWSLADLVTALMAMRGIDLIAAATFLAEIGDLSRFQSPCELMAYLGLVPSEDSTGDCVKRGPITKAGNRRARRMLVECAWSYQHPPRVGKDKQEKIAAAPRAVREIAWKAQSRLNRRYRALIRRGKLKTVAITAVAREFAGFIWAVAREATAARATAK

SEQ ID NO: 294990 - protein, 350 aa, unidentified
MPTLTANDVVVTGGVDTHQDVHVAAALDQLGRVLGTESFPTTVAGYRRLLAWLRRHGTVDKVGVEGTGSYGAALARELAAGGVEVIEVARPNRQVRRRYGKTDVVDAIAAARAVQSGEATGKPKSHDGPVEALRTLKAVQRSGNKARTQALNQIHQLLVTAPEDLRARLRPLKRRELLATCAAFRIASDDDSLPAMTRLALRELAQRVLHLDEQLASVTKRLHRITSNVAPELVAVHGVGPEVASTLLVTAGDNPHRMRSEAAFAALCGSNPIPASSGKTNRHRLNRGGDRIANAALWRIVVVRLSCDDRTRDYLARRQAEGKTKTEAIRCLKRYVAREVFNAMPLITAI

SEQ ID NO: 294991 - protein, 415 aa, unidentified
MDRSPSSSSPVDPASFTYVVGIDIGSQTCSFCTLKPDKSQVIKPSEFANAPAGFAVLVDKLERLGVSPEQILIGLEATSRYGDNLYRFLQSRGYQLCLLHPRQTHQFAQQRGLRAKTDKLDATTIARVLLSGEARRGYVPTDLIATYRELARLQTQLTEDITRCRNEIHALLQVLFPEFTQVFADPCRPTALALLKLYPSAQAFVAAGVETLAAKLHELSPRNYGLQTAQQLVSLAQHTISSGVALSARSTSLKILCDQLEHTQANLLQLEKELENLMKTDTGAKGLQSVPEFAGKTIAVLRAELGDVERFACSSQAVAYAGLDIEVKQSGKSKGQAKLSKRGSGRIRRILYMAVVRCIRLTDSAFGAYYHHLVARALPRRAAMMAVVRKMLMVAYRLLKTKEAYDPTKVHNWPP

SEQ ID NO: 294992 - protein, 443 aa, unidentified
MSESLPVGASEPVWAAFAAIDWADQKNFWRLALAGSQEHEQGQLENTPEAVEAWAANLQQRFGGRPIAICLEQSRGALVYMLTKYPHLVLFPVHPTTAARYRETFCPSGAKDDPSDTASLLDLLLRHRERLRQLQPDTVETRLLHFLVEERRRTVDEKTRQSNRLTDCLKLYFPQILHWFDDVTSPLVGALLERWPSLDQLQRAHPGTLRKFLADHNCRSAECIQERIDAIYAAVPATNDAAVREAGAMTARALLALLTTLRSSITAFDRRIAELVAAHPDGALFASLPGAGPVLVPRLIVAFGTRRERYDSALQMQCYSGIAPVKEASSKTKWVHFRLACPKFLRQTFHEFASHSIGPSEWARAYYQHLRDDEKKSHHAAVRALAYKWIRIIFRCWKDGKPYDESVYLQSLRRRGSLLGTTLAPATCVGWKPVAGFQKLSRK

SEQ ID NO: 294993 - protein, 322 aa, unidentified
MALKNRIIVGIDVSKDTLAASIFDGSTHEYVYLEYTKKAINKEFIKRFENLKTSVVFVMEATGIYHSKLAYWLHGAGFDVAIINPLIIKRYAQMKLSRVKTDKSDCAIIAEYGYKEELHLFKPKSKETIELGNLLKAVEDFLHQQSITRSQKHALMHQADYSKEIVAVYEKHIAYLTKEIKKLKKKIELLLKQYFTNEYKLLNTIKGVGIMSSAMIISVFDSFKNFDNAKQASSFAGIAPAPYESGTSVKKRGSISKQGSTLARKLLYMATLSGMQFNELLKAQYIRLLQNGKSKKQAIVAVAHKLLRIAFGVLKHNRPSYN

SEQ ID NO: 294994 - protein, 407 aa, unidentified
MRVVHERCAGLDVHKKTVVACVITPEGSEVRTFSTMTAQLLALSEWLQEKGCRAVAMESTGVYWKPVYNLLEAADLEPMVVNAQHIKAVPGRKTDVRDAQWIAELLRHGLLRASFIPDRSQRELRELVRYRRSLVQERTREANRLQKVLEGANLKLGLVASDVLGRSGRAMLAAISQGTDDPVALANLARGRLKQKSEQLQQALQGLVGSHQRFLLHEQLSHIEELEARISRLNSEVEARLSPFEPHLERLQTIPGVGRRVAEDLLAEIGSDMSRFPTHRHLASWSKICPGNRRSAGRAKPEHIGGGNPWLRSTLVEAAWAAALSKDTFLAAQYHRLARRLGAKRAIVAVAHSILVIAYHVLREAKPYHELGATFHDQRAQKTLVRRLTQRIEALGFEVKLEEKKAA

SEQ ID NO: 294995 - protein, 468 aa, unidentified
MTSRLRTSITVEIVSPGLSRATIEARPERAADRAPAHGRTSLPPRGPVGCCRRGTRRPRRLIGKCRAGAAAGNVSAEGEAIRSNDYRKDTTVKAPSTRPAAVLGLDVGKSSHWACLIDRDGEVLASAPVRNREAELDALFASAPAGTLVVVDQFRNIGSLAVRRARAAGLGVAHLPGLAASRAAGLFAGEAKTDERDAAVIARTALGVPDSLSGVPGRSEALEAARALSSQRDHVVACATRDKNRLRAVLLESCPALEAAVDLSDRRWLELLAGFGGAWGIARSGAEGPRAEAAGEAAAASTAPPPALVEAENRQVRFLAARISEALDEAGALEAETAALLEGDETYACLLTVPGIGPRTAAQLAVSVDIGRFPDHDHLASYCGIAPRVRSSGTSVRSVRASRRGDARLKSLLIFSCNSLVRSSGRYGEYYRACRARGMGHGRALKAVARKRLRAIYAVMRDRVPYRE

SEQ ID NO: 294996 - protein, 324 aa, unidentified
MTDAVLGIDVSKNTFDTNLGAGTKARSKSFANSPAGWHHLIAWLGEHKIGQVHACLEATGRHGLGIALALHEAGHVVSIVNPAQIRDFARTKLGRNKTDQVDAVHIREYAELFKPRPWTPPSPAMRRLCELQTIRAGTVAGLTEWKNRRRSGIMDDLALSLAKTTIQHFASQLEAVDQAIAETIDNDVELSAKRDLLVSVNGVGEALAGIVLAELPGPDILGSSAAVTAYAGLNPQQHQSGISVNRPVRISKIGNAVLRTALYMPALSAMRYNPAVAALVDRLKAQGRLKGKQIVIAAMRKLLVLCFGVLKTGKEFDPAMAMGK

SEQ ID NO: 294997 - protein, 376 aa, unidentified
MENDSTLYVGLDVHKDSITVAYALGTGEVELLGKIGTTKTDIDRLCKRLQSKARHIVIVYEAGPCGYGLYRQLVQKGFDCMVCAPSLIPKKPGERVKTDRRDAVKLVRSLRAGDLSAVYVPSVEDEAFRDLARAWVSAKDDLKRARQRLKGFLLSHGVRYTGRADWGPAHRRWVSTYAFESSWQQLAFEEYRRTIEDRLAQCDRLEAALRDAVVNWRFYPAVLGLQTMRGVQFTTAVGMLAELGDLSRFAHPRQLMGWLGVTPSEHSSGEKRRQGSITKNGNSYARKLLVEAAWSYQHPARVSPGIQRRHDGIPKPIVDRAWDAQLRLCRRFRKLITRGKQKNIAVVAVARELAGFIWDISRLAMSLAIPCEPLTT

SEQ ID NO: 294998 - protein, 382 aa, unidentified
MQASTVDTPTARHCGTIFVAIELSQKSWLVTLHSPDRDRISRHKLEGGDHCALLALLERVRARAAGKLGSAPKVVSCYEAGYDGFWLQRLLMAAGISTLVFDPASIAVEQRSRRAKTDRIDGELLLRTLMAYLRGEPRVVRIVRVPSVEQEDARRASRERDRLVKEQTGHTNRIKALLRLVGMAVGYPRRRDWLNWLERQRDRQGQPMSPHLLAEVTREHARLMLVRQQLAALEQAQAVQASPVPAAMAERRDLLQRLKALGPAFATTLTNEVFYKDFRNRRQVGAYCGLTSSPWRSGGIDREQGISKAGNPRARLKAIELAWLWLRHQPESELSRWFRTRTANAGKRARRIAIVALARKLIVALWRYLTTGLVPAGATMKA

SEQ ID NO: 294999 - protein, 406 aa, unidentified
MKLQNHVFVGVDTHKNQHTACILSCVHQKIASIQTPNNPVEFDKFIQDIKSVKSPDKSLIFGLEDTQGLGHSLSQWLLDKGYTVKEVNPALTRRERHHSTNPDKSDEIDAEAIANVLITDFNELPDAFYDANFKAIKHLNNQRQTMVKEQTKIKNRLHNLIHQQYSEYQKFFSNPFCKTGLAFFEEFAHPSDLKYYAEDRLNKFLKNQVKSIRNDKAAKILSHVNKNKKKAADAKARSTIIKRLIKQLKLLSESLNKINQKLKSAVEKSQYQLTTMPGIGFKMAAMFISSIKNIDRFESASKLARYAGLAPVEHSSGTSKRLNLKKYGCRDLNHAFYMLAFQQIGNNKNPASYSYYQKKLKEGKSKKIALICLQRRLVDIIYAMMRDRSAYKLPQNIGYEVLDKAG

SEQ ID NO: 295000 - protein, 316 aa, unidentified
MYLGIDVSKLTIDCCLIVDGQNYQKKFQNNKGGFEQLINWLQSHKVNDKLHCVCEATGTYYEALAEYLYSRYTITVENPRKIKGYAIAELQRSKTDTQDAKLIAQYCQDRKHKLKAWKPPTKEQKQLQEIARYLDYLKQQRATEKAKQHEAPDYIKSHIQTTISNLTAQIQIVKKQLLQFYKDNPSYNNLRKRLKTITGIGEQATAVLLSTYKRHEFKNARQFTAYLGLDPRKFQSGTSVNGKSRISKIGSSEIRKSLYMPALVAYRCNAFPEFVGRLKNKGKHIKLILIAIMRKLAVIAFTILQNGQDFQVERYK

SEQ ID NO: 295001 - protein, 355 aa, unidentified
MNAIKYIGMDVHLATISIAVLDVNGKLTMEVTIATQSSALLDFIRGLSGTLNVTFEEGTAAQWLYTLLEPHVAKVVVCDPRQNPRRLGEKKSDRLDARKLAEGLRLGTLKPVYHGNALGPALKEVSRSYRTLVSDTTRVMSRLKALYRARGIRCAGSRVYSPRFRDQWLQQLREPGVRGRAERLYKQLDLLLPLRQEARAALLSESRKHPAQKILRSIPTLGPVRVALLLALLQTPYRFRGKRQLWTYAGLALVTRTTADYQVLDGQVTRSRKPALVLGLNANHNHFLKALFKDAAVTALTRPGPFRDFYTTRVAQGMEPELARLTLARKIAAIALTLWKKGECFNAEHLKTQTA

SEQ ID NO: 295002 - protein, 353 aa, unidentified
MKRSSKYVALDVHQATAAATVRERSGRVIHRAILPTEAVALVEFFRGMRGSVHVVFEEGTQAQWLHDLLVPVVDQVVVCGRRGERRGNKSDRVDADRLSQRLLSGELRVVYHGSRDRLTLQELSRAYTNLVEDSTRTMLRLKALYRARAIGASGRSIYNPEHQQEWLDRLPDRGARLRAEALYAQLVVAQELRPRAKVAMMAEARRDPAWNTLCSIPFYGPVRVALILATMKSPWRFRSKRNLWAYAGLAVVTESSSDHEFVAGRAVRRRRRPLTRGLNRNHNRILKNVFKAAAASSLAQPGSFRDLYDGMIARGMRPEMARLTLARKFAALTLRLWKKGERYDPTKLTVRPD

SEQ ID NO: 295003 - protein, 414 aa, unidentified
MDSGYKVAGIDVHKKMLAVVVTDVAMLGDYTFEHRRFGTGTAELKALADWLSQQGVREAVMESTAQYWRPVWLALEPVCQLHLAQAQSNKAPKGRKRDFVDAERLVRRHVAGELILSFVPDEEQRLWRTLTRSKQQLTRDRVRLRNQMETFLEDSRIKLSSHLSDLIGTSGRKMLRALAQGETDPAQIAALAGGGIRASQEQLGDALSGAAQLIPVRRQILKLFLEHLDLIENQIEALHQSLAAQLRTHQDAVSRLAEVPGLGADSAHQIIAEVGPRAAKFDAPGQLASWVGCCPGREESAEVSKSDSSPKGNPSMRRILCQAANAAVKAKGSVFQDMYHRLVPRLGHLKTVWAVAHKLCRIVWKILHDGVTYEERGRTPDARTIQRRIGKLLRQLRALGYPLQPPAALPANAA

SEQ ID NO: 295004 - protein, 347 aa, unidentified
MTLTIVDEARAVTGGVDTHADAHVAAALDPIGGLLGVEEFPATPPGYARLLAWLRGFGTVSLVGIEGTGSYGAGLARHICAAGIRVVEVDRADRQDRRRAGKSDPLDAVSAARAALSGRAAGAPRGRDGQVEAIRALMVAKRTARAQRTQTINQARALIITGPDDIRTRFTGQAPAGLVAELAALRPRPGSMVRYHTLLSLRELGRRAAYLDGQLTRLDELITPLVTARAPGLLSLFGVGPDTAAALLIAAGDHPARLRSEAAWAHLCAAAPIPASSGKVSRHRLNRGGDRQANHALWRIVLTRMGSHPATRAYVARRSKEGLSKPEIIRCLKRYAARETYRHLRHS

SEQ ID NO: 295005 - protein, 323 aa, unidentified
MVKNNNFFGIDISKDVFDVVKNGENHYQFSNNIIGFKKFLKLLDSNSYCIMEATGVYHYALALYLYQNDLPVSVVNPLVIKRFMQMHLRTIKTDKADAKQISLYGIQNKLAPWKPAASYITESKDIFELISLYIKQRTMLKNRLHSFNTKSSQKMVKIELNKSIRHLDKAIQKLESKLEVIIKTYHQKMYSNLKSIPGLGPKTVLYMILITEGFVKFESAKQIISYSGLSPTQRISGSSIRGKSRISKQGNSKLRNLLFMCSFNACKVNRPCKALYERIVAKGKSKKLALIAVENKLIKQAFSIAKSGLQYDENFVSIKPSYS

SEQ ID NO: 295006 - protein, 418 aa, unidentified
MSRSKSSAILSVVHHNCCGLDIHKDKILAALVITEDDGGVSEEIREFGAFTDDLYQLKQWLLDAGCHVVAMESTGVYWRPVHNVLEDLIQVILVNARHVKNLPGRKTDVSDSRWLAGLLRHGLLRGSFIPGKHVREWRDLSRLRRVFVDSLSDYKRRVHKLFESANIKIDSIASDLFGVTGRNLIDILVSGKEIMLEDICSCTRGRLKGREDELFKSIRGFFTEHHRFQLVSILTLIKTVETQITAMHDRLRGLLSDRKDKIKMIMEVPGISNVSVYSVLSEIGDTLEQFETSSAITSWCGLCPGNNESAGKRHSGRSPVKSNHLKTIMVEVAWGAVKSKGSYYREKYYSLKARIGSRKAIIAIARRILKAIFHILKYGVPYRELGEQYLINLNHEARLKNLSKQAAKLGYAVVPLTA

SEQ ID NO: 295007 - protein, 407 aa, unidentified
MFVGIDVAKESLVACAMDDQGEDVFPSYSVENNRPGCLKLINLIADNANLLQPDIIKIGMEATNVFWEHCYRLIKKHELLNSNFKLQLYTVNPKVVSNFKKAYTDLPKNDNVDAWVIADRIRFGRVENSSSPEALYRALRHITRHKFKLAQQIKAEKARALNLVFLKFSDFTQKSPFGTFTKASMALLENYTLREIVNTDVLELAEFLHQNSNNRLGGSTPIEKITTALKKAARNSYRLKPEIDQAITQTLSMTFDNIRFYQSQNKRLKRVLKRQLKAIPQTLITVDGIGPVLTAGIISEVGDIHRFDKETNLASYAGLTWSEYQSGSFTAEETHLTKKGNKYLRYYLVEAANSLRVHNDRYKSYYYKKYNEVPKHKHKRALVLTARKFVRLVFALLSKGEIYQPRR

SEQ ID NO: 295008 - protein, 434 aa, unidentified
MKNGTNAKLAEITFNTLIVGVDIAKEVHYARFVDYRGSEAGKTVSFRSDKGGFEHIISQIERICNSKVLKAPYDKVVIGMEPTGHYWKSFANYVIKLVKKEYKVVCVNPYHTKKAKELDDNSPTANDKKDAITIARLVKDGRYFEPYLPEEIYAELRILTNIRHGLLKRNSSAKNNIIAVLDEYFPEFTTVFKNPLKGKASRQILKSCPFPSLILEMGEAEVLLEIKKAVKKTVGLKKVRELMCAAENSIGVEYGLASAKLKLQIQIDALELVEKQLGEVEAAMEKMLSASGYAKQMLSIKGIGVVSAASFLGEVGDPLRFDNARQISNYAGYNLTENSSGKNKSGTGISKRGRSQLRSVLYKMALTMVAQNNEMKQLYGYLKNRRDNPLKKKQALVVISKKIITVIYSLLKKQEIYNPELVLGAVRKEMLAVA

SEQ ID NO: 295009 - protein, 321 aa, unidentified
MNTEKFVGIDVAQATLDYASRPEGTVGQVANAPSGIATLVELLQSVLPTLVVVEATGGLERPLVAALSAAQIPVVIINPRRARDFAKAMGYLAKTDRIDAAGLAELGERLRPPVRPLPDAAAQELAALVTRRQQLVNLHTAETNRLPTALPFLQEGIRAHLVWLEEAIAKVEHEITTRIDGHTQWRRTADIVDSAPGVGPTTAATLVAALPELGELTGKQIAALVGVAPLAHDSGKRHAQRHIQAGRSAVRAVLYMATLTATRCNPVIRAFYARLLKAGKLKKVALTACMRKFLVILNAMVKHGAYWDPSAASTSQSVPTN

SEQ ID NO: 295010 - protein, 340 aa, unidentified
MNKSRDFDPCGIEVSARTLVVERRRPGQPDAVREFANTAAGHQALLRWLESAGRALRVCLEATGLYGLDLALTLEAAGVALMVANPRAVRHFAQAMMRRSKTDRLDAAVLTEYAARLPFRPWRPPSPRALQLLAVARRLEDLTEMHAAEKNRLHAASLSAALPSILRRDVERSLQTLERALARLTRAAQEFIAADPSLAERYQLLLSIPGLGPTSALHVLAELLLLGPDLDVRQWVAYAGLDPRQYTSGSSVRKKARISKAGNKHLRRALYMPALVASHHDAHLGGFYQRLLARGKTKMQALVAVMRKILHAIYGIFKHHQPYDGAQLFARPSPQEVICP

SEQ ID NO: 295011 - protein, 521 aa, unidentified
MEHCAIDLGGRKSQVCVRASDGTIVHESRPETLALKEFLQGRPKSRVIVETCAEAFGVADVALALGHEVRVVSATLVRTLGVGARRTKTDRRDAQTLSEVSCRIDLPSVHVPGQRSREVKTICGMRDGLVTARAKLINTVRGWLRGQAVRISSGATPGFTARVREIGDLPDHLGAQLRAIDSLSREIKIADERVEGLAGADPVCRRLMTVPGIGAQTALRYTAALDDITRFHDSHRVEAYLGLVPGERSSSEREQRLSITKAGATSVRWLLVQAAWALRRCKTVEARPLQLWTLEIEKPGQADCHGRPGAEAHGHPLRNLEERDQLRPHQDHADALANKGTDDSCPEAVTAIDLVSPRARSADCGPANGSAYAPPEREYSNETARRLSPAAPHRATTEGVVCPCGAGHFILQINHEVCPNQTASPAGERDLRFASTRALTTSRSGSQATEPPPRSVRNFRNELPRDQHTCALRPVHEQPNTARVGRALGSRTLRRFAYQFRSRREKIRMARQSTTAAYASP

SEQ ID NO: 295012 - protein, 366 aa, unidentified
MSNHPHYKVGCDAHKHYSLFSVLDAGGHLIQRVRINHAPGAIRAFLSQFPPGTPVALETVGNWYWIVDEIEEAGCLPLLAHAAKAKSMMGHVHKTDKLDAGGLATLLHLGTLPAVWIPPGDLRDERELPRTRMAFSKVRTMLKNRIHSTLAKYALSLDTHSDIFTAKWRPQLLQVLEHLPAETRRCVQQELELLDLLQTHIHRLEARILERVELTPAIQLLMSIPGPAEILSIVIDRELGSIQRFPAPKHLASYSGLVPRVRASGGKVHYGRMIKQANNYLKWAFIEAANVIVRQRHHANWRGKYVVRLYERTRQRKALAVGATARYLAEAAFWVLKKGEPYREPVPRRPAGRTSPASPKQGQARA

SEQ ID NO: 295013 - protein, 412 aa, unidentified
MQVVYARCAGLDVHQKTVSACASVCEADGKKRRQVRVFGSFTGDLLVLADWLREQGVTHVAMEATGVYWRPVWAVLEGQFEQLLVNPQHIKAVPGRKTDAKDCEWIADLLQHGLLKGSFVPPSPIQDLRDLTRYRVELRQSQSRVANRIQKLLEQANLKLGSVASNTLGVSGRQMLEAIIAGQDSPEQLAQLARGRLKSKIPQLEQALAGRVRDHHRFLLAEFLEEWDWFERRIVRLEAEIDKQAHPFEQALALWQTMPGIDHVTACSLVAEIGVNMNQFPTAQQLASWAAVCPGNHESAGKRKSGKTRDGNKWLRRTLCQAAWAVSRKKNCYLSSQFKRLAARRGPKRALMAVAHTMLVIGYNMLKTGQGYRELGGNYLEQINKDQLQRHFVKRLQKLGFKVTVEPSLEVA

SEQ ID NO: 295014 - protein, 408 aa, unidentified
MNAVGIDVSKGKSMVAALRPMGEVALLPQEFLHTEVGLEQMAYAIITLGENTRVIMEATGRYHEPVAAALHEYGIYCCVLNPLFIKQSGGGSIRKVKTDKADAMKIAKYGLDNWVDLREYTPMDTVRQQLKLCSRQYNLYMKTVVSLQNNLISLTDKTFPGVNELFSSPERADGHQKWVDFVMTFWHCDCICRVSEKAFTERYQKWCKRKGYHYSAEKALDIYAGSCGHFTTLPKNDNTKLLITTAAQQLLAGKMTLAALRAEMARLARQLPEYDTVHAMYGVGEITAAQLMAEIGDVRRFPRRSSIVGFAGVDPAVNQSGKHAAQSTPTTKRGSPHLRKTLYQIVCTYLRKAPEDEPVYQFLDKKRAEGKPYFVYMTAAQNKFLRIYYARVKECLEDFDAQQNSAQS

SEQ ID NO: 295015 - protein, 412 aa, unidentified
MTQSSEYLVRVGIDWASESHQICILDQDGHRTEHTVPHTSAGLAALATELVALSPEDPGRVAVAIEVPRGAVVDTLLERGLHVFALNPKQLDRFRDRHTVAGAKDDRRDAFVLADSLRTDRPAFRRVHRNDPVLVELRELSRLDDDLREELSRLSNRLREQLHRFCPDTLALCPAADEPWFWALLDRALTPPRPKPLSIKAVTAVLTVHRIRRLTVDTVHAALQVPPLRVAPGTLEAACAHIALLLPRLRLVHDQRTRTVGARIETLLAALAKEDVTGEHRDVTILRSLPGVGRLVAATVLAEASRPLAERDYQTLRAHAGAAPVTRQSGKKAIVSMRLACNARLRNAVYHWARVSAQVDPRCRAHYDRLRQAGHEHARALRGVADRSLDVLMAMLTSRTLYDPERRCPKAA

SEQ ID NO: 295016 - protein, 407 aa, unidentified
MRDYIGVDWGNAEHAVWVEDEAGAKVASRTVPHTAEGFAAWARWLDERRAGGRELWAAIERPDGRVVDFLLDHGVVVYPVNPKALDRARDRFRMSGAKSDQFDARVAAGFLRTDHPHLQPLRPSSEAAQELKGLTRDYTRQVRQQTRLLNQLTVTLTEYYPRALEVCEDLKSRWGQAFLRAYPTPQALSALTARRWQRWARDHRLSTERATTLWATIERPQLAVPAHVVRVKARRLGVLLEQFAVTSGAVETYRQAVADVFAQLPAAQWAASLPGGQSGTTIPTLVGELGDAPGRWQSAAHLQGQAGSVPVTEQSGQGHPLIKFRFACNTHLRAAIHQLAFLSLRHSEWARAQYDRCRKRGHSHHHALRVVGAKWLKIIFALWTRGIPYDEQYHLASMARHQLRQPA

SEQ ID NO: 295017 - protein, 346 aa, unidentified
MQVSTIGLDLAKQVFQVHGVNAEGAVVLRRRLRRPEVVKFFSMLPSCLIGIEACATAHHWARELSRFGHEVKLIPPSYVKAYVKRGKTDAADAEAICEAVSRPSMRFVPLKSAEQQSALMLHRGRDLLVRQRTMLVNAVRGHFAEFGIVAPQGVRRVGELAALLIEEDATTLPPLARQALRVLLAQLQALDDQIANLEAAVIASHRDNEASRRLASIPGVGPITASAIVASVANAHQFKSARHFAAWLGLTPRSYSTGGKERLGGISKQGDPYLRRLLVTGATCVIRYARRKAPGEAGWVKALLARRPARLVSVALANKMARIVWALLVRGNTYQAPAATMTAATT

SEQ ID NO: 295018 - protein, 343 aa, unidentified
MSIAVLGIDLGKNSCSVVGLDESGAVVKRRRMHRDSIAVFAKALPSCVVAMEACCGAHHLGRSLMAQGHTVRLMSPEYVRPYVKAQKNDDRDAEAIAEAATRPTMRFVELKSEGQLDAQTLHRARDRLVGERTALINQLRAILLERGIVVPQGRRKLEQHLGTLDETDLSLSPRMRALIDDMRAQWCELDRRIVSLDDEFADWARMDETTRRLTTIPGIGVLNATALVAAIGDGHTFDRGRDLAAWLGLVPRQVTTGGRSRLVGITKRGNKYLRKLLVHGARSAMRTLAHSATPLGAWLRALLGRVHRNAVVVALANKLTRIAWAVLRGGKPFIAADAAATAA

SEQ ID NO: 295019 - protein, 324 aa, unidentified
MRSKLVAGIDVSKSSLDMSYNTSSGEVIHIKVSNDTIGFKKLLKLAGSDYLYVMECSGPYYLRLSIFLKEHNVDVSVSNGLIVKRFIQMKGERNKNDKKDSYWIHRFGMEQELKLWEIPSDSQVKSKQMLAGISLLKRQSTMLINQLHSFETLHLQDKDTIKSLRTVLKKIEAEINKLERKMEDTIKEWNKKQYENLLSIPGIGKRTASLLMIQTDGFKKVDNYRQLISMVGTAPREFRSGSSVRGKVRICKMGGKDIRSVMYLGAMSAAIYNPACKALYQRLIEKGKNGKLAMIAVVNKLLKQSYAIAKSGEKFDREYAMKIS

SEQ ID NO: 295020 - protein, 351 aa, unidentified
MPRTSSVHAVTTIGMDMGKNVLHMIGLDSRGAIVLREKVSRGRITSRLANLPCCLIGIEAGMATHYVARELAALGHDVKQVPPAYAKPFRQGHKNDFRDAHAVAEAVQRPTTRFVPAKTNEQLDLQALHRVRSRLVSERTAVINQIRGFLLERGIIVRQGLRFLRQALPDILAKRTDVLSPRMVRVIADLASDWRQLDERIEPVTDEIDTLAKSDDGCRRVMTVPGIGPIISSAMVAAIGNGAAFARGRDFSAWIGLVPKQMSTGDRTILGRITKRGNGYLRTLFVQAARVILLRPASWPKHSFGVWLARAAQRLHRNVLAAALANKLARIAWTVLAQERSYEARVTKAAA

SEQ ID NO: 295021 - protein, 351 aa, unidentified
MKPEMSVLGIDIAKRVFHAVGMDERGKIVVRKRLSRHDLMPFLAKLPPVLIGIEACGGAHYWARRFREHGHEVKLMAPQFVKPYVKSNKNDSRDAEAIAEAVTRPTMRFVPIKDVDQQDIQALHRVRERLMGERTALVNAVHGLLHEYGIVIPKGVSKFRHAVVGKLESEKDKLTPLSQEMFWQLVEEFAALEAQLASYQEKLDTLAQSHPECQRLMTIPGIGPLTATALVAAVSDASAFKNGRQFAAWLGLVPRQYSTGGKERLLGISKRGATSLRKLLVHGARATIRWVGLKTDRRSQWIRQLVERRGKNRTAVAVANKNARIVWALLTSHQDYQPATSSGEQTRVSAA

SEQ ID NO: 295022 - protein, 341 aa, unidentified
MKVSTLGIDLAKNVFQLHGVDHEGHTILRKKLTRAKFVQFVIQLEPCLIGMEACSSSHYFARLFTRYGHEVKLIPPQYVKPYVKTNKTDAADAEAICEAVTRPNMRFVQIKTEEQQAVLALHTERGILIRERIACANSLRATLAEFGITIAAGQSHLTRELPAILEDGENGLSPFVRTSIYRQSKHIRELEEQVKQVEEALASWYRTQEACQRMAKIPRVGMLTATYVVAAVGNARQFSTAKQFASWLGLTPKEHSSGGKQQLGGISKRGDGYFRYLLVHGARALTAWVNRNGAVEENSWLQGLLERKHYNVAVVAMAAKTARIMWSILSHNTEYQPRQLA

SEQ ID NO: 295023 - protein, 363 aa, unidentified
MKEGKRRYVGIDLGKREYTMAIIGKTGKITHHQGKTSIQGRQALYKRLEKGDKVALEAGNLAFVMAREIQERVGSEVRVLNSGKLPYIWDAPTKTDREDAMKLAHLIEERRDEKLPLVPLPSEQEMERRETIANYGRKVKERTKAINQLHSLFVKQGHTEVVRKHLATAERREEAILLLTGQVRRDAEDIVQHLDLHEQRIKELKGKIQGEVKSDEDMKRLQSIAGVGPIVAYAYVAHVGDGSRFSKGAQVSNYLGFVPRLDYSGTIQRQGHITKRGNGYLRGLLVQAAWVMVRSRHGGSLKERFTYLTAFQGKSKKKTIVSIGRRIAELMYSVLRNKTTYEERPWKRPANDSGGLAGQAMSA

SEQ ID NO: 295024 - protein, 372 aa, unidentified
MNKKLIYIGLDVDDTQYHGAAFDKETGEIVSFKCRPTLKGLVSQLEKMQKYFEADSLKLCYEASYIGHCLQRDLMQAGYYCDVISPGSIPRKGTKSIKTDRIDALDLAQFYANDLLTIVQIPDAETEQDRDLLRSRQQLMKQQVDLRRHVQSLLRRNGRHYRAETKNKTHWTKHHYCWLERTAEGSSGSLGVNLRLLLRQLKSINEIISAYSEEIESMAKQPNYQEAVSALTCYKGIKNLFALTMITEIGDVKRFAHPRQLGAWVGMDIREYSSGGKHHRFGITKQGNRYLRTAFIEANQRAYRTTKLSREIKARRANTNPEYIAIADRCLRRLSKKGNRLLEAGKHPNKVKVACAREMIGFVWESLNKVAA

SEQ ID NO: 295025 - protein, 364 aa, unidentified
MWIIGCDYHPSGQQVFGIDAESGEIVADRWIAHTGTEVDEFYSRLPAGTVVGVESSGNMQWFERRLERYGLRLRLGDAAQIRAKETRKQKHDRRDAELIARLLREGNFPDLQWVPTLEERDQRQLLMHRHKLVRMRAQVKNQLQHIAMNQGEQKKRQLWTQAGRELLEKLQLDPWTARRRDDLLRWLDLLNRDCASLEMAVRQAAEARADARLLMTHPGIGPVISLAFVLTVGRIERFERSRELVSYLGLNPSEDSSGARRRLGGISKQGSSFMRMLLIQGAQSAVRGDEELGRQYRRLASKKHRAVAKVMVARKLAVRMFWMLKTQKTHSELVRTRGSSSHPGVSETDRLSERPASPRIQPKG

SEQ ID NO: 295026 - protein, 401 aa, unidentified
MQQDQQHDSVDVFVGVDVGKGQHHAVALDRNGKRLYNKAVPNDEAKLRALISELRAHGRLLFVVDQPATIGALPVAIARDEGVMVAYLPGLAMRRIADLHAGEAKTDARDAAIIAEAARSMPHTLRSLRLADEPLAELTMLCGFDDDLAAQITQTSNRIRGLLTQIHPALERVLGPRLDHPAVLDLLERYPSPATLAAASEKTLANRLTKLAPRMGKNLAAEIVQALNEQAVIVPGTQAATIVMPRLAQQLAALRKQRDEVASEVERLVLAHPLWPVLTSMPGVGVRTAARLLTEVAHKAFASAAHLAAYAGLAPVTRRSGSSIRGEHPSRRGNKVLKRALFLSAFAALRDPISRAYYTRKVEQGKRHNQALIALARRRCDVLFAMLRDGTIYQPKAADNA

SEQ ID NO: 295027 - protein, 372 aa, unidentified
MSKSSTLFVGMDVHKETIDVAIATNRLNGKVRHYGQIQNRIDAIDKLVARLKREAGTLKFVYEAGPCGFGLYRHLTRKKHECAVVAPSLIPKKPGDRIKTDRRDAMRLAQLYRAGDLTPVYVPDVDDEAIRDLSRAREDAMLDQKAARQRLKSFLLRHGIRYEGRANWNEAHLRWLTSVLMPTPAQQIVFQEYVNTVTERSRRVETLERMLKEQAQDWHYAPVVNALQALRGIRFINAVTVVAELGDLTRFDNPRQLMCFLGLVPSQHSSGERTRLGPITKSGNRHARRNLIEAAWAYRYKAKVSREMQIRQEKLPIKIRDIGWKAQTRLCARYRKLVARGKNKNIVVVAIARELVAFMWDIAHHVRLKSVR

SEQ ID NO: 295028 - protein, 343 aa, unidentified
MTEVTTIGVDLAKNVFQIHGVDASSQPVIRRQLKRSQVLSFFKKQPPCLVGMEACASGHHWAREVSKLGHEVRLMPARYVKPYVKRNKNDAADAEAICEAVTRPTMRFVPIKTREQQSGLMQHRTRKLFVRQRTALINAMRAHLAEFGIVAGVGRNGVEKLVRLIDKGDDERVPSAARECLLALRDQLEAVKFRIHELDLRILAWHRSSELSLRLGEIPGVGPLIATALIASIPDPHAFRSGRDVSAWIGLVPKQNSTGGKERLGHISKAGDRYLRSLLMIGAFSLIKRAKQAGSTPRPWLAALLARRPTKVAAIALANKIARIAWAMMVRGTRYSEPAVRAA

SEQ ID NO: 295029 - protein, 331 aa, unidentified
MRRTAGNRLRLNQLAAADLDRFRLTLDADDEIAVEATGNSAWFRAEVISCVGRVVVVNPKQFGVIRKSVKKADKNDARALAFFLARDMLPETRVKTVQESELASLTHTRDLLVVKQRTRLLNKIHALHTRHGLKLKKESLGSKRRLNALEIGRFSRLEQAELRIVRNQALGLTDAIAALDREIEAAAETMEGYDGLVSIKGVGPRVAAVFLSGIGDVADFEDADKLAAYCGIVPRVNQSNETDNRGRITKRGDKLMRTTLVQCTLIAIRYSGYLNAFYRRIKDRRGAGKAIIATARKLLKIIYDTLKNGWVFEDFAAFKIAGQQIPAGQSS

SEQ ID NO: 295030 - protein, 408 aa, unidentified
MNTLYVGIDVSSRSNVVYLMLPNGNKHSNFSVANSHEGSVQLVKRIHSALTSHSLDTVLIGLEATSVYGDNLVYFLREDTTLAPFNRKIHVLNPKQVKKFHDAYNDLPKNDYVDSFVIADCLRFGRINKEVYLGDYRYKALQNLTRARYFAVQNLTKEKQRFINVLFKKYSTLTQEKVFSNTFSTTALAVYDEFESAEALANMDLHELTAFIIEKGKNRFSNPDAVAKAIQKAARSSYRLPKTVNDSVNQVLSISITSMKTLEAQIKEFDKAIKSQMELLSNVLISVPGIGPVYSAGIMAEIGDINRFNNQAALAKYAGLAWKQHQSGGFEAETTRLIPSGNRFLKYYLCEAAFSLVRCDKEYSDFYHLKYKEVNRYQHKRALALTARKFVRLVFRLLKDNRLYCLAK

SEQ ID NO: 295031 - protein, 331 aa, unidentified
MKYYGMDIHKKYSVFTAVDEKGTILEQGRIPNEKEAIASVMNHSDGEAKVVIEATSNWYYLYDLLEGMGNDVCLANPLQTKAIASARVKTDKVDAETLAHLLRTNLIPTSYIPSARIRELRELLRYRASLVKMKTVVKNKIHALLIKNGLQHPFTDLFGKAGKAWLSELEIRPVYGNSIKGYLKVLKVLEEEILPISQEIGKMAPADPKASLLTSVPGIGNYSALLIWSEIGDIERFPSPKNLVSYAGLNPSVHSSGGVTRYGRITKQGSHWLRWILTESASIASRHPGKLKDFHRKIARRHGIKTANIALARKMLTICFYLLKNGEEYRE

SEQ ID NO: 295032 - protein, 345 aa, unidentified
MEQISRIGMDTSKHFFQLHGVNAQEKVVLEKKLRRKEMAAFFANLAPTAVGIEACGASHYWARTLRSFGHEVRLIAPQFVKPYVKRGKNDAADAAALCEAMSRPTMRFVPAKTAQQQATLMMVGVRDRLIRNRTQLTNAIRGYGAEFGFTAAKGTAQVDPLLERIQADESVPALARALFAAQAREYAQLQEQIAEIDGMLLARHKADERGRRLAQIPGVGPIGATLLPAKAPAPELFGSGRQFAAWIGLTPRNHSTGGKVKLGGITRAGDEALRSVLVVGATAVILHVRRSGRGPAWIVDLLKRKPAKLAAVALANKMARIAWKMMMTGESYSDRSAPAGVTGAA

SEQ ID NO: 295033 - protein, 354 aa, unidentified
MNTTQNSTKSKIVKVIGVDLAKDHCDVIGYDENGKICLRLDGCSYAKLREILSNLPQAVVLMEACKGSMFHARSIADLGHEVRLVKGADVKALRNINHKNDLRDAAYIAKLYFVPGTTYVYIKSQQQQSLQFLQNEYKSLQELRIQAGNQIHAGLEEFGCPVRKSSKFIKTRMVAHLEKHAELIPEDVMASFKRRREIWLNLRQQEEEAKRRLEQVAATDANAKRIMTVPCVGPQTAVGLLVHVGVDFGRFKNSRQFAASLGLVPKQNSTGGNNTLNHITKCGPKRLRSNLVQCAQLVLMYAEKWKGNFGDWVRKMRDNGKKHGVIVCAIAAKLARIIYRLMKDKVDYTPVLSC

SEQ ID NO: 295034 - protein, 354 aa, unidentified
MAEALKNSIAFVGIDIGKNSFHVVGLDECGAIVLRQKWSRGQVEARFANMPPCLIGMEACVGAHHLSRGLQKLGHDARLMPARYVRPYSKGQKNDFRDAEAIAEAVQRPTMKFVATKTADQLDLQAMHRVRERLVSQRTGIINQIRAFLLERGVAVRQGLRFLRSELPGILARPSDILSPRMVRIIEDLAGDWHRLDERIEGLSSEIEAIARRDSSCERLMSVPGIGPIISSAMIAAIGAGDVFSKGRDFAAWLGLVPKQISTGDRTVLGKISKRGNRYLRVLFVQAAWVVLIRPKSWERHGLKSWIEAAKKRLHRNVLAIALANKLARIAWSVLAHGRSFEASKLAAAVTQPA

SEQ ID NO: 295035 - protein, 371 aa, unidentified
MEHTRFVGLDIHKERISIAVAESGRSGAVEYLGEISNDPVAIGKLCDRLERRGDALAFCYEAGPCGYGVHRQLTSLGHRCDVVAPSLIPHKSGDRVKTNRRDATMLARLHRAGELTPVWVPDADHEAMRDLIRLRSVVRQIVTRTRQHLQGFLLRHGRKHGRGTAWRMAYRRWLSTLAFGHPAQQIAFQDYTDAVMDAERRLRRVEEQISGLLPEWNLRPVVDALQAMRGIALINAVVLVAEVGDFTRFSNPRQLMAYFGLVPGERSSGETIRRGGITKTGNTHARRALVEGAWAYRMKARIGRHKVDRIEALPKIIRDIGWKAQVRLCTRYRRLRARGKTANVVNVAIAREMVGFIWSIACTVQSTPKTA

SEQ ID NO: 295036 - protein, 401 aa, unidentified
MVSDFMKGRYNLMKIFVGIDIAKLNHFAAAISSDGEILIEPFKFTNDADGFQLLVSKLESFDKNSIIIGLESTAHYGDNLVRYLVAEFYQVCVLNPIKTCQMRKNNIRKTKTDKVDTFVIAKTLMMQDDLRFITFFDLDMMDLKALGRFRQKTIKQRTRLKIQLTTYVDQVFPEIQYFFKSGLHQHAVYALLKEAPSPKEIASMHMTHLANLLKVNSHGHFTKELAKELRVLAQKSVGANDSAISIQITQTIQQIELLDSQLEKIEAEMTDIMKFNDSVIMTIPGIGYINGGMILGEIGDIHRFSNPNKLLAFAGLDPSVYQSGNFQAKTTRMSKRGSRVLRYALVNAAWNVVRNNATFKAYYDAKRAEGRSHYNALGHCAGKLVRVIWKMLTDEVEFNLE

SEQ ID NO: 295037 - protein, 418 aa, unidentified
MTETFEWYLGIDWGNEAHQLCLVDASGRVCGERVVPHTVAAVHDAVQWVRAQAGAPPAAIAVGIETPRGALVDTVIEQGFPVFALNPKQLDRFRDRFSAAGAKDDQRDAHVLADALRTDRRAFRLVRPDDPLLIQLRELARLRDDLQEEETRLTNRLRDQLYRIDAAWLTLSPAADEPWLWALLAETPDPQAWGQLPRRRVAAALRTHRIRRVTADDVVQALHQPRLTAAAGVTDAVAVRLESLIPQLILVHDQRLTTERRIDRLLARLATAAFADGEPREHRDVEILRSLPGVGRMVTATMLTEATGPLAARDYGMLRAYTGAAPVTKRSGKRAFFVHMRYACKQRLRAALYHWSRVSIQHDAAARAYYDALRARGHAHARALRSVADRWLRILIAMLKTGTLYDASRFVHTTEADA

SEQ ID NO: 295038 - protein, 356 aa, unidentified
MSRHSVEAGDLAGLLARFWAIRDKVSARTGISYPIIVIQEAGLDGFWLHRALEQEGIESHVVDAASIAVSRRRRRAKTDRIDGEALLRVLLAFKRGEPRVCSMARAPTPEEEDRRRIGRERKTLLVERIQHVNRIKGLLFSQGIGDYEPLHRDRRRALEAVRTGDGRELGANMKTQIGRELDRLELLLDQIAAVEAERDAMLAREAEAKAAQDAKRTPAAVEMLMDLKGLGPETVAMLWTEAFYRSFDNRRQLAAFVGLAGTPWQSGSIDNEQGVSKGGNHRLRTAMIQLAWLWPSHQPGSALARWFVERTKDASKLQRKKMAVALARKLLVALWKWVDAGVVIEGAVLKSAAKAS

SEQ ID NO: 295039 - protein, 345 aa, unidentified
MKIVGCDLHTRYQQVAMLEGETGELIERRLEHENGEARGFYAALSSPVRVGIEATGHTRWFERMLAELGHELWIGDAAQIRASMVRKQKTDARDAAHVLDLLLSDRFPRIWRPTLEERDLRQLVWHRQKLVWMRNAVGNQLHALAMGEGVCRKKKLFTKKGRAELESLALGPWASHRRQELLKMLDQLDESLHELDQAVERQAEQNADAVRLMTHPGVGPVTSLAFVLTIGPVARFERSKQVVSYLGLNPREHSSGGRQRLGAISKQGNPMMRSLLVEAGHTAARLDAELRQDYQRLKQRRGSGVAKVAMARKLAVRMYWMLRSPASYAQLVRMQGSPRGTLVGQ

SEQ ID NO: 295040 - protein, 334 aa, unidentified
MPSILHPSRPRIVVGVDTHKHAHVAVAVDQVGAVIGEITIPVDRAGYAELQRWAHQLAGQDRGTEFGVEGCGSYGAGLASALRRAGHRVVEVNRPDRSLRHQRGKNDTIDAEAAARAVLSGIATAVPKTADGTVEMIRQVKIAKDTATKARSQAIITLKTIIVNAPAELREILEPLGDKALIEECRKLRYESMSGPVDAARYTLRALADRYHALEQETRLHDRVLTTLTNRAAPALTSLFGIAEDSAAELLIVVGDNPERIHSEAALAKLCGACPIPASSGKTSRHRLNRGGHRQANAALHRILVVRMRFHEPTIAYVNRRTTEGKTKKRRCAA

SEQ ID NO: 295041 - protein, 367 aa, unidentified
MKKVSIAATKQSRNISQQKLTIGLDLGDRNSWYCVLDERGQIQLEQRVGTNAKGLREVFGAMPRSRIALEIGTHSPWISRLLSDLGHEVIVANARKVRLIGESRKKDDRMDAQTLARLARIDPELLYPVKHRSAKAQADLTLIRARAGLVRARTALVNTARGLAKSYGERLRGCNVRNMNPEKAEGLSPELQRALEPLLACIESVSEQIREYNERIEELAQASYPRTALLKQVKGVGTLIALTYMLTLEDPHRFQKSRDVGCYLGLQPGRRNSGKSEPQLHISKEGDPYLRTLLVQGAQHILGPFGIDCDLRRWGLKLAERGGKSGKKRAIVATARKLAVLLHHLWVSGEAYEPLHNSSRTTVAAAA

SEQ ID NO: 295042 - protein, 406 aa, unidentified
MEGPIITVDVSKGSCHYQPFIENGHPMRKPKQLSATIDGFQKLGQTIKDLEAKTEREDIPVIFEATGVYHRPLQKYLEDHKIRYYIISPLLSATYRKTDLHSNKTDALDCAHIAKAYYCEKELRQYQAQQQEYKRLYQLSRIYESELVHLRKRKVSLRSMLDIIYPRIDKTFKGNQNLYDPIPMEILKRYPHPSLLLSHREDTIVKTVGHRTGHLKGYTERIVHKIYEKAKECYSGCEINDIEVINLPRLIENVQEQKKKCDSLLKEMIEIARTCPYFASVVSIVGIGENLAARIIAELGDVNRFDNRAAIVAYAGLNPKIQQSGDIDGLHLKISKKGNKHLRCLLYLGAQCNYRLRKEDPLYEFTKKKRQQTQCPLSSKAAYTASAHKLLVIIYSLCKNGTLYHS

SEQ ID NO: 295043 - protein, 408 aa, unidentified
MNPLYVGIDVSSKSNVVYFMLPDGSKHCNFSVANSHTGSSQLVKRILSAMTSCSLDTVLIGLEATSVYGDNLVYFLREDAALARFNSKIHVLNPKQVSKFKEAYNDLPKNDLIDSFVIADCLRFGRINKEVYIGDYRYKALQNLTRARYFAVSNLIKEKQRFMNILFKKYSTMTQEKVFSDTFSTTALAVYDEFESAEALADMDLHELTAFIMEKGKNRFPNPNAVAKAIQKAARSSYRLPKTVNDSVNQVLSISITSIKALEAQIKEFDKAIATQMELLPNVLISIPGIGPVFSAGIMAEIGDINRFHNQAQLAKYAGLAWKQHQSGDFEAQTTRLINSGNRFLKYYLCEAAFSLVRCDKEYSDFYHLKYKEVNRYQHKRVFALTARKFVRLVFRLLKDNRLYTSAE

SEQ ID NO: 295044 - protein, 345 aa, unidentified
MHIASIGIDLGKTTFHLVALGEGSKVVVRKKFSRTQLLAYTANLPCSLIGLEACAGAHFMGAALREQGHEVRLIPAQFVKPYRKSNKNDFIDGEAIAEAVTKQNMRFVQIKTQEQLDVQAMHRVRDRLVQRRTALINEIRGFLLERGIPFPAQPIHLRKNLPTGVEDAEQNLSPRLRWLLDRLWQEWKQTEIDIQTVTDEIERISNEDERCQRLRQIPGFGPLVSTATVAAIGNGAAFRRGRDFAAWVGVVPRQYSTGGKQRLFGMSKRGNIYLRRMLIHGARAVLFRIKYDTAGLGQWVHRLNQRAPRNKVVVAIANKLARIAGAVLSSGRDYRHQPLPQRAAA

SEQ ID NO: 295045 - protein, 331 aa, unidentified
MDNSLYFVGADIALKKFDAAIRLDGNRYKHKVFANTPEGFTAFHAWLQGFGSHFHILMEATNVYHEDLADYLLVQGLTVSVINPRCIPNFAKSTNMRSKTDKVDARLLADYAYCNAARLRKYAPLATNYRTLKRLMRQLTHLKKIIAKEQVRIQMMMDALCVEISQEIIAGTKALAKELEKKIKELVKEDKVLSRNAQLLQSIPAVGWMSAMYLLSHLGDGSRFRNSKAAATYMGLTPIVKQSGDSLHIVSGISKMGPRDIRDVLYAPAMSYAFGPWKERVYAPFVQRLAANGKAPKEVIVALMRKLVSIAQAVLQHQRPFDSAILVGKAA

SEQ ID NO: 295046 - protein, 348 aa, unidentified
MAHFVGLDVSVKETSVCVVDDAGKVILEQKVPTEPADIIALLTSLGVSYGRVGIEAGPLSQWLVNALTAAKLPVICVETRHMKALLTAQQINKTDRNDARGIAQMMRVGLFKPVHVKTLVAQEQRMLLTSRKLLQRKLLDLECELRGTLRNFGLKVGVVAGGRYEARVRELVSGFSGLAAIAEPLLNVRRIMRQQLAVLHKMLLDTVRDDPVCRRLMTAPGVGAVVALTYRATIDQPQRFVHSRAVGAHVGLTPKRYQSGEVDYDGRVSKCGDALLRTMLYEAAQVLLTHGSKWSWLKAWGVRVAQRRGIRRAIVAVARRLAVVLHRMWVDGSEFRWSRDNVAVPTAA

SEQ ID NO: 295047 - protein, 457 aa, unidentified
MTRRKHSRPARDIAPVHPHAAAVDIGATLHVAAVRPGSDPEPVRTFGTFTTDLHRLADWFEQCGVETVAMESTGVYWIPLYEILDQRGFEVVIVNARDAKNVPGRKTDVSDAAWLQRLHEYGLLRASFRPKGEIATLRSYLRQRERLLEGAAAHIQHMQKALTEMNLQLHHVVADVTGVTGLRILRALVAGERDPDTLAAYSGPRCKAPAETLRAALVGNDREEHVFALAQALELYDIYQAKVAACDQRIEAVLERLKAANPPPAAALPPARPRRRQANEPGFAVREALHAILGADPTQIDGIGPSLALTLVGECGTDLSAWPSAKHFTSWLSLAPHNKISGGKVLSARTRRSGSRAAALLRLAAVAVGRTATALGAFYRRLAARVGKAKAVTATARKIGVLFYNMLRHGMDYADPGASAYEARYRQRVLSNLRRRAKSLGYVLQKADPASAAIAVS

SEQ ID NO: 295048 - protein, 398 aa, unidentified
MKKNSKREDAKKQNDVTAQKKRDYRADVQRLLLRLGKQSKAAEEIAYYIGIDLGDRKSNYCFMGRGEEYLAEDQMPTTLEAFAAYFKAIPRSRVALEVGTHSPWVSNLLEGLGHEVYVANPRKMESIRKNKRKNDKKDARTLTRLVRADPQLLHPIRHRGIQAREDLILLRARDALVGARTKLINCVRGLVKSVGGRIPKCCSESFARQAVAAIPESIRETLLPIVEQIGAMTVQIRKLEGQVKKMAGKKYPETGLLKQVDGVGDLTALAYLLTLENPERFAKSREVGPYLGMVPRQDDSGESSKQLRITKEGDTMVRKLLTGSAQYILGPFGPDSDLRRFGLKLAARGGKNAKKRAVTAVTRKLAVLLHRLWVTAEAYEPLRNARLQEEALAAVAKA

SEQ ID NO: 295049 - protein, 338 aa, unidentified
MIVIGLDVHKHSVTAVAVDEAGRPLGETQIPVGSDELLAWAAVFDSQRLWAVEDCRQLTSWLERQLLAVCEELVRVPPKLTVPERRAGRTRGKSDPIDALAIARAALREPDLSRPRPDERVYRELKLLVDHRDDLVDLRRRTQQRLRWHLFALDPTLSVPLRMLSRSSHLERVSRWLARQDQELQVQLARELTARCRVLNREIAALDQQLEQRTAQVAPALLELPGCAAVTAAKLLAEIGPISRFRSDAQLARHAGVAPLEASSGRSQRHRLDRGGNRQLNAALYRIAITQSRYHPAARAYLERKTAEGKSRREALRCLKRLLARAVFNTMKTSPALT

SEQ ID NO: 295050 - protein, 417 aa, unidentified
MASVVEIVYPTCCGIDVHKNFLVACIAKTDERGNTKHVIRRFSTNTGDLRKLADWLMLYNCKDVCMESTGKYWIPVFNILEQTCKVVLTHPKYVKAIKGKKTDKKDAKWIAELFKCDLVRNSFIPPFSIRQLRDLCRYHAKLTYMVSSEKNRSQNCLTTCNFKLDAVFSDVFGKSASRILDTLIAQGNSDFDIAPLLHKRCKATVEEVRDALDGELSYAQAEKLKLIKSHMQGLENLKSALENLIHQLAEQFQPEITLLLTVPGISSTLTAIRIIAEIGNDMSVFETAKKLCSWAGVTPQNNESAGKKKTTRISRAGAYLKPLLVQIALASSSSAKNPEIRDKYLALKKRRGHKKAVIAISRRLLTAIWHMLSKREAYNAELYHKADKPPKNRVLTPEQAFALLRRKGYQISESVPA

SEQ ID NO: 295051 - protein, 371 aa, unidentified
MKQQTKSSHITVGLDLGDRRHRFCALDERGEVVEQDSICNDRVSLRKLACRYHGALGVMEAGAHSPWISRFLEALGWRVVVSNPRKVRAIYQHERKSDQRDALMLARIGRMDLALLYPVRHGTAEAQQDLLRIKLRDSLVRARVAVINSVRFTLKSLGYTVRNPSSERFHKVVMEEVPESVREMITPSVQALAELTARIKMLELEINTLAQMKYPQSAQLQQIPGVGPITALYFVLKIEDPNRFAHVRDIGAYAGLCPRRDQSGESDPQLRISKRGDAYLRRLLVSAAHYILGPFGPQSALRAYGLMLAADGTARAKKRATVAVARKLAVLLLSLWKSQQPYQPFPGACLNGKQEDRRSGTIALHRMEATD

SEQ ID NO: 295052 - protein, 370 aa, unidentified
MNPIYIGVDFHSREQTICYLKTETGELVIKELKHQDKEQLRAFYQQFLGQVIVGLEASGYSPWFEALLEELGCEVWLGDPVEIRRRARWRQKSDRRDAELIWDLMVHHEFPRLYQPPLASREVLRMLRYRQKLIKMRTMTKNSLQAIAMQAGLAKGSRLFSTAGQEEFGNATMSPVLQWQRDHWFSLLKPLNEQLLETMVWFKAQSKDDNQIKRLRTHPGIGLLTSLCLRHTLQPVSRFRNQRKVVAYAGFDPMIRTSAERAIYLGISKAGSRMLRYLLVEAVHTAVRYDEDLKRFYKRVAERRGRAKAKVATARKLLIRAYIMMRDEIDYAEFRRRAVAVRLARRSQVNPPTSGGLPGVLIGQSTSPGV

SEQ ID NO: 295053 - protein, 425 aa, unidentified
MNLLILKGVPMALKIVYKICCGIDVHKTFVVACIASTNDKGVTSYESHRFSTYTSGLKTLLQWLLNRNCKDVCMESTGKYWIPVYNILENDCSIVLAHPKYVKAIRGKKTDKKDAKWIADLFKHDLVVGSFMPPADIRQLRDLMRYRFKLTCFQSSEKNRLQNCLTVSNIQLGNVVSDTFGKSAQAILDKLLENPADTSFDLEPLIYKSLKKKLPELRDAIDGYITPEQVGKLKVIKAHYESLESRKAELEELILALAAPYQQELAILQTAPGIRSDFTAIGIISEIGTNMEAFPSAKHLCSWAGLTPTNNESAGKKKSVRVSKAGCYIKPLLVQCANAVVTSKKHPEIRNRYLRLKKRRGHKKAIIAIARMLLTALYHMLKNGENYNAELYRKSDLPPADWEITVEQAIIIARNQGYKIKSATA

SEQ ID NO: 295054 - protein, 407 aa, unidentified
MDLLKTVFGIDVSSRKSNVCIMVNGQKVNDYAISNDMVGFNRLIGDLKQVTKPQIIFEATGVYSRRLQAFLDMHELRYVMMNPLEAKRKTKDDLHQNKTDKLDALYLAKLQSEHPQRLAYVQNKEYQELMANNRIYEQASHDLITNKNRLHKAVQLTFPEIEHLMVNPRGKNYWSIVLRFPHPDIVLETKEADIIDFLKGLTGIGKKRANDIAQSLIRLAKVACPAVKKNSAHIRGLKMAINNILSAEEECQTALQEMAKLAPKRDLEILTSIPGIGENTALRIISELGDIRRFNNPSQLNAFVGVDPQVYESGNLTAHLSISKRGTAIGRKVLYLAINQIQSAKKAGNPCHIADYYEKRKRSSETASHKKAAIASIHKLLRTIFALIKNDQLYSYDVAKHNQRLLS

SEQ ID NO: 295055 - protein, 429 aa, unidentified
MRTESAPGARGPVFCGVDTHADSHWLCVLDWRGRKVLSRQFPADAAGYEALAGAIAAAGEPACIAMEGTSSYGAGLTRHLASLGMPVREALSPAGMQRRRPGQGKCDEADAERAARAAMSGSKLGTPKSQDGWVDGVRCMLAARSGAVKARTSAVNTARSLLTTAPEGLRSRFRGMGGPRLMEELPSVRAEGALGAALGALADLWAAARDAALDMERAIEASLEENCPALLAMYGCGPVSAAKLAVAAGDNPGRLRSEASFAAICGACPIPASSGKTVRHRLNRGGDRQANSALHEIARQRVMRDPETAEYAERARARGKSDREVMRCLKRYVAREAYRALMRPHEIRRPEDASELVAARRAAKVSQVRAASILGTSEKYISMLERGQRELKPIRRAYEAWVEAGLPLDWDRQAFEAERKMDSKKHLAK

SEQ ID NO: 295056 - protein, 344 aa, unidentified
MNNLRRVGVDLAKNIFQLHGVNRTETSTWCRRLKRDNWIKGLLNKVEPGCEIGMEACTGAHHWARLLQAKGFHVKLIAPQFVTPYVKSNKNDANDAEAICEAMSRPGMRFVTVKTVEQQEIQAVHRIRSELVGQRTAKGNQIRGLVAEYGLVAPQQMNHLRAALPEWLEDAENGLTNMFRRLLHGLWEDLKTLDKRIAEMDKEIALIATNDPVAKRLQQLRGVGPMVATALLAAVGDGKQFSNGKQMAASLGLTPRQHSSGGKDRLLGISKRGDSYLRSLLIHGARSAIYAARGKEDRLSQWVISIATRRHPNVAAAALANKTARIAWAMLRHDTDYNPELAAA

SEQ ID NO: 295057 - protein, 392 aa, unidentified
MVVSVGIDVSKDKHDCFILSSEGEVLVDVFTIPNTMDGFNCLLQRIQDCTTPQGKMKVGLEATGHYSYNLLGFLLDNGLATYVLNPLRTNLYRKSLSLRKTKTDRVDARTIASMLLSDAGLKPYTDTAYHNEELKSLTRYRFDKVKERAKLKSSVSRLVCILFPEMEKLVSTLHTASVYTLLEEFPGAKQVARAHLTRLKSLLETASKGRYKRDMALEIREAARNSIGSRMPAKSLELQHTIRLIRELDTEIVEIEEQIQSLMDELASPITTIPGMGFRMAAMILAEVGDFTRFDSPDKLLAYAGMSPSTYQSGQLKNCYPHMEKRGSRYLRYALYNATKYVCRWDPTFAAYLAKKRAEGKHYNVALSHDAKKLVRLIFAMEKSRQPYCSAA

SEQ ID NO: 295058 - protein, 353 aa, unidentified
MRRPKDRLIAGLDLHSNNLMIGVINQDGKRVAHRKVACDLEEVTAFLKPLKPQLESMAVESTFNWYWLVDGLRAADYPIDLANPAKIEQYNGLKHADDKDDAFYLAELQRLKILPKAYVYDPELRPVRDLLRRRTSLVHQRTSLLLSFKSLYARTTGQKLDLSEAKKLEPKQASELYEHPANQLIAQLQAEHIQALGQSIRRIEKGVLASAQELPMYEKLLTIPGIGRILAMTITMEVGDVRRFQTDGDFASYCRMVDAKRLSNGKCKADNNQKCGNKYLAWVFVEAANYARRFDEHCRRWYDRKAAKTSPIIATKALGCKLAKAAWHVMVSQGDYDPKRMFPELAVPSEKKP

SEQ ID NO: 295059 - protein, 322 aa, unidentified
MASFLGIDVSGLSLDALVRPEGIKISVPNNLAGFVALEKSLRGLNIKRILLEATGGYEREVMRFLQDAGYKVLRVNPRRARSFADSMGIKAKTDAIDAEVLAHFAEVIPDKPALQISPDRALLRELLQQRDRLVQQRDDDRRRLKQTQSMVVAHFLKANLQHFRLQIKLVEQAIKQQAAILNDERIAQLIQVKGIGLVTAGKLVALLPELGRVESREIASLVGVAPFNHDSGKSVGKRSISGGRFEVRRALYMACLVAVKHNPALKARYEALRGRGKFAKVAIVACMRIFIVRLNAMLRTGTPWRDLALPVPENTARLQGTA

SEQ ID NO: 295060 - protein, 414 aa, unidentified
MESSYRIAGIDVHKKMLAVVVTDLTQGTEFHFERRKFGALDSDLCALAEWLNEQQVREIVMESTAQYWKPVWRHLEPEYKLYLAQAQSNRAPRGRKRDFTDAERLVRRYVAGELILSFVPDPEQRLWRIATRTKNQLTGDRVRLQNQLEALLEDSRIKLGSCVSDLLGLSSRRMLKALADGERDAAKLAAMAEPELRASQEQLQDALRAAGTLNDLHGQILRLFLERLELIEQQMAQLDQSIAAALHTHQSAVQRLAAVPGYGVDSAQQVIAEIGPQAATFPSPAQLASWVGVCPGREESAEVSKSSRCPKGNRQMRRILAQVAQAAARTKGSIFQGLYRRLLPRLGHGKAIWALAHRLCRLTWKILHQGVEYKELGQQMNPKLVRQRTNKLTRQLRALGYDVQLTVLSSNAQA

SEQ ID NO: 295061 - protein, 474 aa, unidentified
MVLPCACEAIISKEHKGMSQRKRKARKSKINVKNLPQHLRHINLSAAGIDIGSDRHLVAVPEGSDDVSVRQFGAFTSDLHKIADWIEKCGVTTVALESTGVYWIPLFELLEQRGFEVKLVDARHVKNVSGRKSDVLDCQWLQQLHTYGLLQGAFRPPDEICVLRSYARQKEMLTQASSMHIQHMQKALQQMNLLLHNVVSDITGVTGMKIIKAILAGERDPNVLALNRQEGCRSSKESIAKSLVGNFRDEHMFALKQAVELYQIYQTMIGECEQALIKHLGTQPDVTDDQPPDSGKHVRARERMRADVDVREKLFKMTGVDLFAIPGLAADTLLTLTSEIGLDMAPWKSDKHFTSWLGLCPGTKMSGGKALGRRTKRNANRGAQAFRMAAASLAKSQTALGAFYRRIRSRTDGRRAITATAHKIARIYYSMLTKGTAYVEAGQQAYEQRYKERRINALRKQAHSLGFQLQPSAS

SEQ ID NO: 295062 - protein, 367 aa, unidentified
MKKVSTVATKQRKNFSQPRLTIGLDLGDRNSCYCVLDEAGQIQLEQRVRTTAKALLEVFGAMPRSRIALETGTHSPWISRLLTELGHEVIVANARKVRLIGESRKKDDRLDAQTLARLARIDPALLSPVKHRSAQAQADLTVIRARAGLVRARTGLVNTARGVAKSYGERLPGCNVRNMNPEKADGLSPELQRALEPLLSAIEELSERIAEYNDRIEVLAQASYPQVALLKQIKGVGTLIALTFLLTLEDPHRFRKSRDVGCYLGLQPGRRNSGQSEPQLHISKEGDPYLRTLLVQGAQHILGPFGIDCDLRRWGLKLAERGGRTAKKRAIVATARKLAVLLHHLWVSGEVYEPLHNSSRIPVAAAA

SEQ ID NO: 295063 - protein, 380 aa, unidentified
MGDHIAAFVAFDTSKLRNAVAIAEAGRLGEVRFFGEIDNTAEATAKLVKKLAAKYERLAFCYEAGPTGYGLYRQITELGQECIVAAPSLVPKKPGDRVKTNRRDALDLAKLLRAGQLTAVWVPDARHEAMRDLTRGRGAAVQDVRMKGQQVSAFLLRLGRHYAGKTAWTKAHMTWLASQQFEHPEQRIAFEEMLLAVHQAQERVARLEQAIRTAVPDWSLAEVVEALIAMRGIDMVTATAFLAEIGDLSRFRTPRELMGYLGLVPSERSTGERIARGPITKAGNRRARRLLIESAWAYRHPPRVGKDKQAKVAAAPRAVREIAWKAQHRLYSRYRALTRNGKLKTVAITAMARELAAFIWAVSREITNAGRAAAQQGIRG

SEQ ID NO: 295064 - protein, 409 aa, unidentified
MNKVDIAPFEVFCGIDVGKSLNHIVALDRYGDKPLINRKVPQEEAEIRAALEEAGDFGLALVIVDQFGAFGRLVVGVAKSMDIPVAHMSPRRFRQVAETYGEDKFDEKDAYILADASRTTPRNIEFVGNRAESMAEIKVLSSRRDDIVEERTRCYNRLHDFIHQVSPPLEELFSKRKLHNDLEIRLIARYGGPIGFRQAGRARASTWAAELKYHCVDGPKKVEQVFDVLDRQTVMLPGAAVIEEQIRSIASRIIELLAEEKRLNLMIEQRAKMIPEVDLLQSIPGVGLVYAALIAVEIGDIGRFRDSNHLASYAGVAPRKEESGTSVHKRRKRKGGNRRLKNALMQSSQRSVQCDPLARAYYERKRAEGKKHLQALRALARHRVTVIFAMLNEGTFYEPPVEVDENGRG

SEQ ID NO: 295065 - protein, 346 aa, unidentified
MSHYVGLDVSLKEVSVCVVDEQGSVVKRAILPTDPDVIADHLSREVPDAERVVHESGILATWLTRELEKRGVPIICIDARMAHKALSARLNKSDKADAEGLAQLSRTGWFTEVHIRSEASDRVRALVGARERLIRMRKDLEAHIRGVLKTFGIRMGPVLRAHHRQGFRDQLAEAGACDPILGLLAQTMIPIHKTLCASAEALADELMHIAKQSTLACRLMTVPGVGPLVALNFIATVDDASRFRRSSDVAAFLGLTPRRYQSGEIDRSGRISKCGDAEMRRLLVSAATSLMTQVRRFSPLKSWAIRLSARKGFKKAAVATARKIAVILHAIWRDGTEFNLKREPAT

SEQ ID NO: 295066 - protein, 361 aa, unidentified
MRTGPKHLGRRTAMEHYAGIDVSLELSSVCIVDAKGKIVRETKVTSDPDALVAFFKGLSFPVARIGLEAGPLSQWLYAGLAQAGFEAALLETRHVKAALSAMTVKTDRKDARGIAHLIRMGWFRPVHCKSPGSQEVRALLVARKQLLGKLLDVELSIRGILRGFGLKMGVVTRKTFEARARELSSGQTMLETVVGAMLTARVALQSEYAKLHKTMLVIVRDDKICRRLMTVPGVGPVVAITFKTAVDDPTRILKSKAVGPLFGLTPKKYQSGETDVTGGITCVGDTMVRTALYEAANILLSRVTRFSALKRWAVEVAKRRGLKRAKVALARKIGVILHRMWVDGADFRWTKAELGSGVAAQ

SEQ ID NO: 295067 - protein, 359 aa, unidentified
MQTQSNKIDFNGQNIYAGLDVHLKNWKVTIMTEKLTHKTFLQPPKPEALYHYLTKTFPGGAYHTAYEAGFCGYWIHNKLLNFGINSIVVNPADIPTTGKEKVMKDDARDSIKIARSLRNGDLNPIYVPSLPTLEDRGLVRTRATLVRDLTRYKNRIKSFLYFHGIEYPEAFSRPQTHWSNRFNKWLEEVEMTEPSGKASLNILLAQSSHLRASILQTTKQIQELAKTDRYKTQHGLLRSIPGIGLLTAMVILTEIETIDRFETFDQFCGFIGLVPSTHSSGDNEVIGDITPRGHSVLRSAIIESAWMAARLDPALNKCYHDYCKRMEPNKAIIRIARKLVSRVRFVLKNNQFYVCSVVK

SEQ ID NO: 295068 - protein, 372 aa, unidentified
MGHNTEAFVGIDTSKLRNAIAIADGGRGGEVRYLGEFPATEAAIRKLVAKLATKYRHLTFCYEAGPTGYGLYRLLKSLGHECLVVAPSLVPKKAGDRVKTNRRDAVSLAKLLRAGELTAVWVPDERHEAMRDLSRARQAVKKDLQGKRQQISSLMLRLGRIYPGKTTWGPAHMRWLMAQKIEHREQRIVFEELLEGIRQECERVERLENAIREVLPEWSLAEAVVALQAVRGIDLIAAVGVLAEIGDLSRFKNPRELMRYLGLVPSENSTGDKVKRGGITKAGNGRARRILVEAAWSYRYPPRVSRDKQPKVEAAPRRVREIAWKAQTRLCGRFRSLERKGKRRTVIATAIARELSAFIWAINRELMAHRQA

SEQ ID NO: 295069 - protein, 453 aa, unidentified
MNRKRSKSKIDRTMPMVHPNAAAIDVGATMHMAAVGADRTPEPVRSFGTFTTDLHRLVDWFIECGVETVVMESTSVYWIPIFELLDARGFTVFLVNARDAKHVPGRKTDVSDAQWLQRLHSYGLLRASFRPKGQIAELRAYVRQRERLLEYAASHIQHMQKALTEMNVQLHHVVADITGATGLRIIRAILAGEHDPKVLAQLRDYRCHASAETIEKALTGSYRAEHLFALEQALALYDAYHEKVSACDARIEAVLKELSIGRGRKSDSLLSPRRPRTDQVNGLAFDVRAALFALLGKDLTQIDGLGPYLSLKLIAECGDDLSAWASAKHFTSWLGLAPSNKISGGKVLSSRTRRCRSRAAALLRLAAVTVGRTDTALGAFYRRLSARIGKAKAVTATARKIAVLFYNAVRHGMEYVDPGASFYETRYRTRVIDNLHRRAKVFGFVLQPMEAVS

SEQ ID NO: 295070 - protein, 349 aa, unidentified
MAVTIVEEARAITGGVDTHADVHVAAALDPIGGLLGAGEFPATAAGYARLLGWLGGFGTVCLVGIEGTGSYGAGLARHVTAAGVRIAGVDRSDRQDRRRQGKSDPLDAVSAARAAQSGRARGASKGRDGSVEAIRALMVAKRSAAGERTRTNGQARALVLTGPDDLRARFAAHTPAALVAGLGSLRPRPGGDVAGHATRVALRELGRRAQFLDTQLERLGELIVPLVTAHAPGLLALYGVGPNTAALLLIAAGDHPGRLRSEAAWAHLCGAAPIPASSGKVTRHRLNPGGDRQANHALWRIVFTRLGSDPATRAYAERRTAEGKSKAEIIRCLKRYVAREVYRYLRPGG

SEQ ID NO: 295071 - protein, 417 aa, unidentified
MNDSELWKQYRAFGAVDWASEKHSIVVVDQAGKVIEDFEIEHSALGWKKFREKLQPYGSIPFAIETSQGTAVEQLLEAAMIVYPLNPKSAQAYRERKAPSGVKDDRLDAWSFADALRVDGQDWKALRPEEPLIKELRLLCRDEVALIEQRTAFIQQLRHALAEYYPAALEAFEDWTSVSAWIFLQRFPTPELLAQAGKRRWQKFLHSRRLWGSDQGPRRMEIFAHATELSGSAPTAKAKSLLALSLVQMLFVIEKQLAVYRQRIEELFARHPDHDLFGSLPGAGPKIAPRLLAEIGDDRERFDGDTQNLQCFGGTAPVTKRSGKYRHCHQRWACDKHLRHAIHLFAEQSLSRCAWAQTYYQHHRQKDRSHANALRRLGHRWLKIIHKMWMDRTLYDPELHHRNQLQHGSWIFQLKEC

SEQ ID NO: 295072 - protein, 354 aa, unidentified
MNNITFSNSSFFVGIDTHLKNWRVTIRNSGLELKTFSMNPSPADLYKYLFSHYPEGTYSIVYEAGFCGFWPQRKFNQLGINCIVVNPADVPSSGKEKVVKTDPCDSRKLARELENGSLKAIYVPDINHEQLRSLMRLRFRLVQNQTRIKNRIKMLLYNYGIIIPKEHIKNPRWSGYFIHWLKSIKLNSTAGQFTLDDLLLQLDQIREHLKQVLKQLREEAKQENISSVISSLVSVPGVAFITAMSLYTELIDIKRFNSLDHLASFVGLVPSVYSSGETDYTRGISFRHNRFLRPLLIEAAWTAVKTDPALTFKYKELIKTMAKQKAIIRIAKKLLRRIRHVWINQDRYIKALVA

SEQ ID NO: 295073 - protein, 372 aa, unidentified
MKQNTTELENPRRRVVRKNKQRELTIGVDLGDKTSRYCVLDREGNVLFERSTATTKKGLAQAFASMGASRIAMEVGTHSPWVKRLLESWNHEVIVANAHRVRLITESTRKDDRLDARKLARLARVDPELLSPIRHRSEGAQAHLVMIRARAVLVEARTKLVNSARGVTKSFGERLASCDPDQMRVKCLVGLPSSLQSALQPLVTAVESLTRQIHEYDNKIAQIARSEYPETARLRQVTGVGELIALTYVLTLEDPQRFRRSRDVGGYLGLRPKRRDSGASRPQLRITKEGDVYLRMLLVQGAHYILGWHGVDTDLRRWGLKLAARGGKNAKKRAVIAVARKLAVLLHRLWVTGARYEPLRHSQIASSLQVAV

SEQ ID NO: 295074 - protein, 345 aa, unidentified
MENRYDIGLDVHKKTISYCVKDASGRIHAEGTILATRFDLDRWMKTLPQPWTVAMEATMFTGWIYDHLLPHAAAVKVAHPLMLRAIAAAKKKNDRIDAHKIADGLRCDFLPECYMASTKIRERRRTLRYRNLLVHQAVQLKNKISGLLMEAGVSDNKQKLHKVGYFKELLATNPDINEGLRPLLRLCRETLVRLQKTESALVRSLQRDSLLAERLERLMTIPAVGPITALTWVLEVDDVKRFSSIKKAISYCGLCGAEKSSSDIVKRTPISKQRNKHLQSVLVEAAKMAPRLSPELALIYDREKQKGNANRATLAVARKLVAYLLAIDRSQRDFFVVEKENRAAA

SEQ ID NO: 295075 - protein, 397 aa, unidentified
MYIVGIDIAKRKHEAAVIDGEGTVIIKPFSFTNNCSGYNRLLAMLAKAKLPLDEVSFAMEATGHYWLALFTRLQKEGFRVQVINPVQTNSIRSFYIRQAKTDPRDALLIAEVIRFGHFSESTLHPENIYELRELCRGRHAIVSMQADVKRKVVALLDQVFPEYETAFTNMFGDTSMAILQTCPTPKELSEMPLEELCHLIEVSSHKRFRMAKAQELQALARNSFGFAMAGDVFSTMIRLYAKHLVFLKQQVQEMDRKIAEIMKTLDTPITTITGIGPTLGAYILSEIGDISRFSSAAKLAAYAGIDPTMRQSGEYNGVRNRMSKRGSPYLRHAIWLAASSAVLHDPALKLYFQKKRDEGKPYMASVGHACRKMVSIIYAVMRDNKAYTPYIPNEISA

SEQ ID NO: 295076 - protein, 483 aa, unidentified
MEARQAERRLVGIDLGIASRHSVRVLEADGRAVCRASCVPTVQSLAAVEQMALAGAPQGTALAVVFEPTGPAWMPIAVFFARRGHAVYRVSSAKAADLRRFLRRHAKSNGIDAETLARMPLADPGGLQPLELPGADAAALDRRVRACARLTQAASEHKTRIKDLVRQLLPMTPLTGDLGKADLAVLEHYGDPRALVAAGEAELTRLITTTSNKQQGQERAGQWRAAAAAAAELYGDHPAVPFAELAAEVATEVRLLRAIQAELAAHAAAREQHYLQADPGQLARSLPGFAEISAPVLIAAMGRPGRFRDGTRFKSYTGLAPRASETGQTDRKGQPMSKAGPSLLRATFFRAADTARRQDPQLARIYYLQMTERGATHLKACCVVAGHLAERAWAVLNRGTPYVICDNNGNPVTPGEAKKDHRGQVDRRRGHPQTPPQPQDSGEGPSGGHNRAGQTRRPSPPPIVAAPGQGRQPRHLTSPAPAR

SEQ ID NO: 295077 - protein, 451 aa, unidentified
MAKRGEKRERRSVVLEPDAAGIDIGAEEIYVAVPPDRDEESTRRFSSFTCDLHALADWLGRCRIQSVAMESTGVYWIPLFQILEERGFKVYLVNAHYLKSVPGRKSDVSDCQWIQYLHSVGLLRASFRPSEAICAIRTLWRHRGSLLEMAAEHILHMQKALSQMNLQLHHVLSDITGTSGQAILDAILSGKRDPVALAQLCHSRVQSPRDKVAQALVGDYRPEHLFTLKQSLEGYRYYQKLILELDQETARLMQALPSATEHPMPPRTKATAYHRQGNDPRFDLRSELYRIAGVDLTDIPGVSAATAQVVLTEIGTDVSRFRNASAFASWLGLCPEKRVSGGKVLSCKTRQVKHRTATALRMGANSLCRAKGYFGEFFRRMRARLGTAQAITATAHKIARILYHVLSTKEPYAETVFHRCDEQAQRRAEMRLRKQAARLGFQLLPNPVTGE

SEQ ID NO: 295078 - protein, 407 aa, unidentified
MEVLHPRCAGLDVHSELVVACARIAQGQRIERETAEFGTSTRELLRLQEWLAEREVTHVAMEATGVYWKPVWHILEGSFELVLGNARQMKTVPGRKSDQKDACWIADLQAHGLINRSFVPPRPIQELRDLTRTRKQMMGEHARHVQRIQKVLEDANIKLVGVLSDIMGVSGRKILTALAEGERDPEKLAGLADPRVKAPRAKIVEAVRGNVTEHHRFMLSLHLRQASAVEAGVVMVEARIEKALEPFRRQVELLCTVPGVKVNAAASILAEIGVNMKVFPSADHLVAWAAISPGLNKTGGKTKSSRTKRGRWLKATMTQCAWAASHQRNCYLNARFHRIKSRRGSRKAVIAVANTMLRAIFHMLTNDVPYQDLGADFFDRENQDRTVRRLTTRLKKLGYEVELRRAA

SEQ ID NO: 295079 - protein, 409 aa, unidentified
MEQIFVGIDVSKDKSTYIAINDRGLKILGPITVANNKAGIDKIIEGLKAHQTGEILFAMEVSSNYWENICSHLKEREYKAVCLNPYQVKKYRQAMGTRIKTDSIDAAAIAELVKSSGAHEMFISSGEALDLKELVRVKHSFEDRVKNLKKSVLSALSLVFPEYTGIIAHPFSKVSIDLLKTYPTAVHFAGSASVSKLVKIFRKYQGCNFGPDKAKELINSAKDSFYSGRAHNTRGLTLSMQLDEISSLEAKIKIIEDNLKEILAPKDKYPSDFDILNSIKGIGLGTIATFIACIGDISRFSSSEKLISYIGLYPRIFESGKYKRKNPSMVKAGPKELRHMLYLSSVASIKHNIQLRKYYLDRVSEGMPGKKALIKVSVKIAKMMYSMLKSRSSYNENRVFFQETPILVG

SEQ ID NO: 295080 - protein, 338 aa, unidentified
MQITTIGLDLAKSVFQVHCLDSAGGAIRKKLRRSEVLGFFRSLQPCLVGMESCATAHHWAREIGAFGHEVRLMPPAYVKAYLRRQKNDAADAEAICEAVSRPTMRFVPIKSTERQGVLVLHRTRELLVRQRTKLINAIRGHCAEFGLVAPQGPRRALELIEQVRDGAVPSLPEIACNALLILGEQLTILAAQIHALERRLLAWHRQNQASQRLATIPGVGIITATAMAASVTDPSLFRSGREFAAFLGLVPRQNSSGGKDKLGRISKKGDGYLRKLLVVGATSVIRRSRTADLATAPWVRALLERRPARVVTVAMANKTARIIWAVLTRGEVYRPTAA

SEQ ID NO: 295081 - protein, 430 aa, unidentified
MKSNTQNAKIEAITEKTLVLGIDVGSETHYARAFDYRGIEYSKKPFKFSNTEAGFVTFKEWILDLKERHEKDKVVPGMEPTGHYWFNLGKFLQDNEMKPVLVNPHHVKKSKELDDNNPTKNDRKDPKVIAGLVREGRYMIPYLPDGVYADLRTASNIRFQLQAELTRIQNRISRWFNIYFPEYKTVYGKPDAKSGMLILKAAPLPEDILTLGIDGVNQIWRDAKLRAVGKARAKTLIEAAEHSIGSKEGTMSARMEIRMLLEDYESKNMRLQEVMVLIEELVKEIPMAEKLLEIKGVGIRTVSGFLAEVGDISRFNNPKELQKLAGLAVVENSSGKHKGKTTISRRGRKRLRYLLFEVAMSLVAKNPEFRELHNYYTTRRLNPLKKMQSLMAIAAKLIRVFYAMLTKGVDYDPKKMISDIKRPTVYLQAA

SEQ ID NO: 295082 - protein, 389 aa, unidentified
MIFIGIDIAKYKHCACVNNPITGELLVEPFFFKNNKDGFNDLLSSIKPYKDSLIGLEDTGHYGNNLIDFLRANDFNVALINPRLTKMYRNALGWTAKNDKKDSLLITKVLMDKDNYRLLSDKDLIMSELKEITRRYHDGQEDINRFKNRLQKAIDIVFPEYNKLFGSPYGIVYNRLLESFGSADNIANTDIRTLRKAFRIEGKGRRISLTAETLKESAKNSIGINSEATVLEIKRLLDTIKVLESYSIQYQDKIKELSLKLNSPIISIPGISHITGMTILAEIGDIHNFDHARNLVSFAGVAPYVVQSGEFTAPKTSITKKGSSYLRKALYQCSLTVITNNPVFHKYYTLKISEGKSHFGAKSHVVRKLIRIIYHLLINNIEFNEKQVI

SEQ ID NO: 295083 - protein, 419 aa, unidentified
MSLNVEGASFFVGVDWAADTHAVCVQDAGGRKVAGFTVEHTADGLATLVRRLARIGAADVMPVAIERPDGRLVDVLLEAGHPVVPVKPNAIKAWRDGEVLSGAKSDAGDAEVIAEYLRLRRHRLQLATPYSAETKALRTVVRTRSDLVEMRVAATNQLSALLDAHWPGAKAIFADVESPIALEFLTRYPTARHAQHLGVKRLAAFCVKHSYCGRRTAEQLLARLRGAPAGTLDETICEAVRDAILALVTVLKALVGTVRDLDRSTIATLGEHPDESIFTSLPRSGQINAAQMLAEWGDCRQAYDSPDAIAALAGATPVTNQSGRHRAVHFRWACNKRFRVAITTFADNSRHANPWAAKVYTDARARGHDHPHAIRILARAWIRVIWRCWNDRVAYNPAQHGNAVRLTQPRQNDVLAARG

SEQ ID NO: 295084 - protein, 283 aa, unidentified
MRFYTNQHRYYCGIDLHARRMYICILDAEGTVRVHRNGPATPEHFLSVIAPYRDDIVVAVECIFTWYWVADLCAHEGIPFVLGHALYMKAIHGGKAKNDKIDAHKIAVLLRGGMLPMAYVYPREMRATRDLLRRRCHFMRKRAELLAHIQNTASQYTLPAFGKKIAYKTNRTDVAERFPDPEVRKSIETNLALLDHYDRLLTDLELHLTRSAKVHDVNAFYRLRSVPGIGKILALVILYEIHDIHRFPRVQDFVSYCRLVKCAKESDGKRYGYSGAKIGNAHI

SEQ ID NO: 295085 - protein, 510 aa, unidentified
MGWIVSGVSHGASGSVSFRLDLWFEPARVIDALSPRNRRVLTPDWGHVGCWDRERLNRRSGQRASLLGCRAFSTGLSGHGIGYQLMRGPGVAVSKVTCGIDWAEGHHDIAVVDQSGDLVAKRRIEESVQGLAELTTLLAEAGDRSDDPIAVAIETPRGLLVAALRASGWPVYPINPMAVARYRERYSMSGKKSDHADAMVLANILRTDADRHRQLPADSDLARRITVLARARQDATWRRTRACNELRSVLREYYPGFLQAFAGVTTNLITREARAVLALAPTPTMAASLSKRQIAAALRRSGRQRGINALSAQIHAALQVPQLRQPAPLEDAMGMQALALLGSLDTECASTDSLGHAVITAFEQHPDHMIITSFPGLGDLTGARILGEIGDDRERFADARALKAFAGSAPVTRASGRSTTVTCRRVKNNRMAAVGFVWAFVAAGRDGSPREHYLARRARGDHHPAALRHLYNRMLGQLYHCLHTGQPYDRTKAYPSHTAQTAEPLTTAAA

SEQ ID NO: 295086 - protein, 356 aa, unidentified
MDLVHPRCAGLDVSKRDAKACVRVASGGRAAATSTVTTWGSVTNQVLALREHLIAEQVTLVVMEATGDYWKPFYYLLEDAPFEVLLVNARHVKNLPGRKTDVSDAAWLAQLGAHGLVRGSFVPPEPIRQLRDLTRTRTTMVRTRAREIQRLEKLLEDAGIKLSSVASDISGVSGRLMLDALIAGQRDPAELAELAKRRLRSKIPALAEALTGRFTEHHAFLAKVHLDLIDQQAHAIAELTGRIEVVIEPFRSARDLIVTVPGISVLVADVIIAETGADMSRFPTAGHLASWAGTCPGSNESAGRVKSTKTRPGKPLPQRRPGDRGNVSGPQPRHLPGREVPAHRLPSRTDQGDRRG

SEQ ID NO: 295087 - protein, 359 aa, unidentified
MTATLTWVGLDVHARSTHAAAIERESGELRRARFGAGSEEVVAWLRTLPQPVHACYEAGPTGYALYRVCSEAGIHIDVVAPTKTPRAAADRIKSDRKDAELLVRCLLAGSLSPVCVPSAQVEAARDLARAREQVRADLARVRHRVSKLLLRYGRVYEAGGTWTQAHRRWLSGQRFPESASELAYADYLAAVDGLVARRAALDERLSRIACEGEWWPTVARLRCFRGIETLSALALTLEVGDFARFRRSAELAAWLGLVPSLHQSGETERRGSITKTGSGYARRLLVEAAWHYRREPRLGATLAARHEGQPDHVLQIAWRAQHRLYRLHQRLRQRGKPGNVCVVAVARELSCFLWAAAIA

SEQ ID NO: 295088 - protein, 350 aa, unidentified
MLIIGCDYHPSFQQIAYVNTEGGELGERRLVHPEEAEQFYGELKQRNIAVRVGMEASGHARWFERLLYGLQFELWIGNAAEIRTKRVRKQKTDRQDAQLLVRLMMEDRFPRIWVADAENRDLRQLLWHRHRLVQMRTRVMNQLHVVALNEGLQRKKALWRPAGRNELESLVLAPWASRRRQDLLSLLDQITPKIQKLTQALEDEVEKRPVTRRLMTHPGVGPLTALAFELVIGTPDRFHCGKQIASYVGLVPEENSSGNRRRLGHISKQGNALVRFLLVEAAQVTVRTQSQWRSKFFHLAMRRGRKIAKVAMARKLAVHLYWMWRQGSDYGQLQKLGSHAGVLGNRDGAQ

SEQ ID NO: 295089 - protein, 370 aa, unidentified
MGPAVEPQLREAPVMSEGSCVGLDVHARSVVAGVIDVGSGEVRSLRVPPGNEGTVAWLKTLPAPVRVVYEAGPTGYGLARGCAEAGISCVVAAPSKIRPAADRVKTDRRDAERLARLLRLGEITPVRVPGPEEEAARDLVRAREDARGDLMRARHRLSKLLLRHGVVYEATAWTRAHDAWLRRNRFGGGPLAIVFDECYARMLDAKTRRDTLDKAITELAASDSYVDVVERLVCLRGVSTLTAFALTVELGDWNRFRPESLGAFLGLTPSENSSGERRRQGGITKAGNSHARRLLIEAAWHQRSAPRLSVTLERRRTGKSLAVRAQADRSARRLHGRWGALEARAKPRLIVVVAVARELAGHCWALATME

SEQ ID NO: 295090 - protein, 484 aa, unidentified
MSKVTCKKEKTKKASSSKIKESKPSVVQMQVVRPNAAGIDIGDTVHAVAVPPDRDKEPVRQFGAFTCDLEVIVKWLKRCGINSVAMESTGVYWKPLYGLLIMNGFEVCLVNARHTKNVSGRKTDMSDAAWIQQLHSCGLLRSSFLPDDLTETLRTLIRQRKAWIQDSNRCIQRIQKNFELMNIKIHTVIRDIMGKTGKAIIEAIINGEREAKNFLPLIDARIQASEEDIEKSLEGNWRSESLFVVKRCYRQYQELQVHISECEKEVELVLRQMAAAKNEGVVESVEAKDDSIDSAKAVGGKSAEKKEEKKMVKKKSKNAPVYDVRRYVEQIHGVDVLEIFGISETTALEILSETGTDLSRWPTANHFVSWLNLCPNNKITGGKLVSSKIMKKQPNTAAQAFRAAANGVRRSNNWLADYFRRMRAKGGHKFAITATARKQALIYYKMVTEKEAFKAVDIEIYKEKQKQSKIQYLEKRLAELRNAS

SEQ ID NO: 295091 - protein, 343 aa, unidentified
MSIMIGIDPHKASHTAVAVDSFEFVIDELRIRSCSTQAAKLRDWADGFRDDRVWGVESAQGLGYLLAQQLIAAGETVLDVPAVRASRVRTLSSGRSQKNDPNDARSVAIAALRADDLATVLSDDHTRILRLLAKRHRDLGRAKNRDCCRLHALLLEMFPGGAGFKMSYMTRTNALLDTFVATSSMGRQRLEIARDLVEGIERLSEQMKVSKRRIAAAVAASGTSLTEVNGLGPITAAMIIGYTGNIDRFPTRHRFASYNATAPIEASSGPKVRHRLNPRGNRQLNYAVQIIAISQLRHDSLGRAFYDRKIAEGKTSKEALRALKRRLSDVVYRHLVNDAKRNR

SEQ ID NO: 295092 - protein, 446 aa, unidentified
MSDRTGLSRGDRNRNVRLARLRQLLPPENAIVGIDLADDKQAAVVTDHDSRVIARRRVIARAWELGGLLDWALARARAAGFGSVTVACEPTGHRWRVLDQLAAERGLALVCVQPLLVYRARESEDLTRDKSDPKDAVIIARLAAGLHCYEPERADAVWARLRHLGARRLQLTTDATGQVNQTRDLLECAWPAVLAASGKPFRSATWRAAVAVTLDRSAGDLARVRRLGPARFEAAVRRELPRWGATRPCLRIVRAVFAALGDSAGVIAHRPGALERAGLAMADWHDTRKRLADTETRMAAVLDDLGLTELVTSITGLTPVGAAAILAETGDPARFATPRSLVKHAGLCPRDNASGAFQGKTPISGRGRPGLRVAAWRAVRAALPNNPVLAAKFTRLTTRDDNRLARQQARTACAAALLRWIHVVITQQVTWDPAIAAGSAPLQQAA

SEQ ID NO: 295093 - protein, 317 aa, unidentified
MSFVGIDVSKTQLDIAERPGNKRWSAVNAEADIGKVVETVGALSPQVIVIEATGGMEVPLVAALSQARLPVVVVNPRQVRDFAKAVGRLAKTDRIDAEILAHFGEAVKPEVRTLKDEDTQMLTALVMRRRQVIEMLTAEKNRLGISPKVVHKDIEQHINWLQARLEDIDRHLDSAIRKSPVWREKDDLLRSVPGVGQVLSVSLITGLPELGTLSRRQIAALVGVAPLSCDSGLFRGKRTVWGGRSHLRSVLYMATLNASRFNPVISGFYRRLVEAGKKPKVALTACMRKLLVILNSIMKNRIPWQADYSTCPTPPIP

SEQ ID NO: 295094 - protein, 343 aa, unidentified
MQTITTIGLDIAKSVFQLHGIDAAGTVVIRRQLKRRYMLGFFEKLPPCLVGIEACATSHHWSRELQALGHTVRLIPPAYVRPYVKRQKNDCSDAEAICEAVGRPNMRFVPTKTIEQQSGLVLHRTRSLLIRQQTSVINAIRGHLAEFGMVAPVGRNGLETLLSLVATEDDTRLPEIVRASIEALALQLRALKAQILEFDRKIIQWHRSNELSKRLDEIPGVGPALATALVASIADPKSFRSGRDFSAWIGLVPKQHSSGGKPRLGGITKQGDRYLRSLFTIGALAVIRYARIHGTQHRPWLAALLARRPTKVAAIALANKMARMAWALMVKGERYREPAALAA

SEQ ID NO: 295095 - protein, 315 aa, unidentified
MTNLVAGIAVGKEKLDVNLSTEKKVRLWSNDETGRAELSDWIVGQGVSLVVVEASGGYEAALVSELVGRGQQVALVNPTRVRAFARAEGVLAKTDKIDAQLIARFGATMKPAARARREKQQVDLTEQITRRRQLVLMATAEKNRWQTASPTMREHIGNHLAWLQTEIEALEVQISQTIEANPSWAETAKRVDSVPGIGFITAATLVAELPELGQLNRQKLAALVGVAPFNHDSGKHRGKRHIFGGRTSVRSVLYMATLSAIRHNPVIREFYQRLLAKGKLKKVALIACMRKLLVILNTMVKTGQDWNPPNSLLVI

SEQ ID NO: 295096 - protein, 342 aa, unidentified
MEHYAGIDVSLECSSVCVVDGSGKIIREAVVPSEPEALIGWFGSIGIGLARIGLEAGPLSQWLYAAMKQAGLAVELLETRHVRDAFKAMPVKSDRNDARGIAQLMRLGWFRPVHCKSIGAQEVRAVLTARKLVQTKLLDVENSLRGILRGFGLKVGKTTARSFAGRIQELVEGHPNLEAIGAALLAVRSVMLREFNAFEKRVRAMSRADARTRLLMSTPAVGPIVALTYAAAVDDPARFKSSKRAGAHFGLTPRKYQSGQTDRSGRISKIGDASVREALYQAAHVMLTKPVKGCTPLKSWAMRIARRAGMSKAKVALARKLAVILHRMLANATPFNPAAAAA

SEQ ID NO: 295097 - protein, 470 aa, unidentified
MNHRRLVGIDLGIATAHTVRVLDGEGTVVAKRKAWPAAASLGEAERTALAGCPEGTRLEVVIEPTGPAWLPVAVFFTARGHQVFRVSSQKAADLRRFLSRHAKSNGIDADTLARLPLVHPAGLQPLQLPGAAQAALDRRVRATDRLTRQAATHKVRIKDLARQLLPMSPLTGDLGAADLAVLERYADPRALAPAGQAQLTALIAQASHNHQGAGRACQWLDAARASLELYAGHPAVDFTGLAAEIATEVRLLRAVQAELTAHAAEREACYRQVDPAGLARSLPGLAEVSGPALAACMGDPARFRHGKQFRSYTGLAPRASETGETDRKGQPMSKAGSSLLRTTMIRAADNARRQDPQLARIYYLQMTERGKDHLGALCVVAATLAERAWTVMRRGQPYAIRDTDGRPVTPAEAKKIIAGYWTVPPEIRARRRSKKTGKVPQKVLEGQYARGGLPQHNTPPRHEKSVKAKP

SEQ ID NO: 295098 - protein, 414 aa, unidentified
MDTIFENVAGLDVHQKTIVACVRRRQPQGGIVEQVRTFGTMTGELLDLSDWLEKAGVTHVAMESTGVLWKPVWNILDGRFALLLVNPRELKQVPGRKSDVNDSQWIAHLLQCGLLRSSFVPPRPLRDLRDLTRQRTQLIQEQTRIANRIHKTLQDANIKLGAVASDILGKSGRAMLGAIVAGERNPRKLAELAEGRLRGKIPQLKQALRGHLTEHHVFLLQTLLSHLDFLEQQVAAFSQRIGVCLGPFLNPEQMRRLDEIPGMNRRTIENVVAEIGTDMSRFPDEEHLSSWAGMCPGNEESAGKRVRHRTTKGNCWLRCALTEAAWAASHTKHSYLGAQYRRLAARRGRKRALTAVGHTLLVIVYHMLKAEVPYKDLGPDFFDKLKPEQYRRYLVKRLEALGFIVELTPKETAA

SEQ ID NO: 295099 - protein, 375 aa, unidentified
MREKLRFLGLDVHAETIAVAVAEPDGEVRSLGTIANREDSIRKFIKKLGATEQLRACYEAGPTGFVLYWPLTQLGVECTVVAPTLVPKKSGDRVKTDRRDALKLARSHRSDDLTAVWVPDEGSEALRDLVRAREAAKQDQLRARHRLSKFLLRSGQRPAPGVKAWTQIYMAWIRQIRFAQMAQESTRLDYLHEVEHMGERVVRLEQAIAEAANLASPEVQEVINGLQALRGIAHISAVTIAAELGQISRFKSPRQLMGYSGAVPSEDSSGERTQRGSITRTGNAHLRRIAVEAAWSYRLPPGVGPALRKRQEGVPDEIKEIAWKAQHRLHRRYCRLAATRKDQRKIITALGRERLGFIWAIGIKAETAARQRIAA

SEQ ID NO: 295100 - protein, 442 aa, unidentified
MAHLPVLDPLAAFVDVGSEQMYVSIAGGEPKVFGTFTAQLHELRDWLLSQKVKSVAMEATGIYWLPLYSVLEAAKLQVLMVNGKHTRNLPGRKTDMKDCQWGATLHAHGLLRAGFVPPAEIRRLQDYLRLRQDHITLAAGHVQHLQKALERMNIKLHDVISNLVGRSGMAVIRSMLEGERDPERLLALCDVQIRQQKAERIKASLQGTWAEEHLFALRQALESWEHYQRLIRACDQQIEAVLCSIDVDPPTSPPSKAHKRGGANAPQIDDLHPMLVALCGGNDLTVLPAHTDYSVLQLIGEVGTDLTQWPTEKHFTAWAGLAPGSHQSGKRQRSAKRRRNRAGRLFCVMARSLARSKHIALGGFYRRMAGRRGGLIANIALARKLAALFWRVMVKGLDYVEHGLQYYEAQALETKQRSMRRLAKQLGFSVTPIQTEAQNASA

SEQ ID NO: 295101 - protein, 411 aa, unidentified
MDRVYDICCGIDVHKKLIVACLRKGNKNEIREFGATTRELLTLADWLKESDCKMVAMESTASYWKPLYNILESSDLNAMVVNAHHMKAVPGRKTDVKDAEWIADLLQHGLLQASYIPDRDQRELRELVRYRKSLTGERSRELNRLQKMLEGANIKLSGTVRDINGKSARNILEYLITGETFDEAKYDEMYENKVIAHNLKASKEQIIDDLNGVMSPLQRRMMKELLIHLDELNAHIKNLDDEIDNFMKPEEKKASQAIQSITGIGNTSAQAIISVIGTDMSRFPTDGHISSWAGLCPGDNESAKKRKSGKTRKGNALLASTLVTCAHSAVKNKQSYFYAQFMRISAHRGKKRAYVAVAHSMLIAIYHILKDGVVFKDLGSDYYNQFNKERKINAYLKKLKALGWEAPVVAA

SEQ ID NO: 295102 - protein, 323 aa, unidentified
MNTLDFLGIDIAKKTFNVALLRNDKLRHKKFENSPEGFKQLDSWLVKQGVIEIHACLEATGSYSEGLALHLHQAGHKVSLVNPARIKAFGQSELRRNKTDRADATLIARFCSMHRPAAWVPPPAEIRELQALVRHLDDLIGTRTQLGNRFTDGPKVKSVLESLKTLIEAVDVEIKLTRKKIREHIDQHPGLKEDCELLETIPGIGAQTATTLLAEIEHLRHYKHARQAAAYAGLSPRLRESGTSGKRSRLSKTGNSRVRKALFMPAISAKQHNPVLRQFSERLARRGKPKMAIIGAVMRKLLHLAFGVLKTRKPFDPNHPVAA

SEQ ID NO: 295103 - protein, 393 aa, unidentified
MFYLGIDIAKNTHVASLLDEKGKTIFKGFSFSNTTEGGKSLLEIVKKYSDFTDVTVGMEATGHYWLSIYSFLYDYDFHCIHVINPIQTDGWRKGTEIRKRKNDIIDSVLIADLIRYGDFVETTLSNEDLYSLRNICRMRNYLIQSASDLKRKVICVLDQVFPEYQTIFSNTFGTTSKQLLLDYSSPSDFEELSVEALTETLEALSRKKVGQSTAEKLINSAQNSFGVTFSKESFKFQLKLLIEQIQFIDNQVKECETKIKELMKKINSPITSIPGIGPVLGAVIISELGDIKRFDKPSKLVAFAGIDATVSQSGEFEGTHNVMSKRGSPYLRKALFQAALVASNTDPVLKAYYQKKRAEGKHHKTCIGAVSRKMCNIIYFVLKNDKPYEVPNK

SEQ ID NO: 295104 - protein, 339 aa, unidentified
MSAIVTIGIDLAKNVFAVHGVDATGKSALVRPSVPRGKLLELIAALPPSLIGVEACSGAHHWAREFEKFGHTVRLMAPKFVIPYRLSGRRGKNDAADAAAICEAVTRPNMRFVPIKSIEQQGQLMVHRARQGFVEQRTATFNRIRGLLSELGIVLALKAAVVRREAMARLEDLPGWANTVIGDLLSEVTHLDERIAQYDRHIALMARQSIEAQRLMQLCGVGETTATALLSTIGNGRDFKCGRQLCAWLGLVPGQYSSGGKQRLGRITKAGDPYLRSLLVLGARAVLAAAKTKSDPISRWAVSLEQRRGYWKAIVAIAAKNARLCWAVLSKGEAFRLPA

SEQ ID NO: 295105 - protein, 438 aa, unidentified
MSNKVIFNLDELFISVGIDVGADFSWMSIALPNQQLVGKPYKILHNQMNSLTTAVSKIKEAEELYSLESRIFLESTGIYHYPLFCYLRDKGFNCSVINPIITKNSTNMNIRKVHNDRFDSKKASLVGLKPDLKVSLMPSDLALNCRNLCREYYDLVDYRSAYVNKLQGELRMAFPQYLGIFSKVTTNTSLTLLDTYTSPNAFIEADKQEIIDTIKSTARFGVTYAANKYNAIIQAAHDANEFGYILDSNIKRIRLYISFIRKYDEEIKNILNAMHELVNVNEDTVFVKQIHLIETFKGAGFLSAVTLMGEIGDFSAFSKPKQLFAYFGLDPAVKQSGKFEGTKIQISKRGSSIARRVIHTLTLQSISVSRTGEAKNPVLREYYLEKCKSKPKLVAMGAVSHKVCNIIFAILRDNKPFEIINPQEHIKQYNAAKCDIAA

SEQ ID NO: 295106 - protein, 368 aa, unidentified
MRKSSTDLGSVMTSFIGLDLADKESTFVGIDGKARLVEEGKVATTPGGLGKAFGSRDRCRIALEAGTHSLWVDRLLREMGHEVIVANPREVPLIYRNKRKSDKLDATALGRLARSDPELLHPIKHRGKQAQIDLAVLRARDGLVAARTQLVNLVRGTVKSYGERLPRCSTKSFPTKAAAALPADLSPALTPVIEQIAELTRRIDQYDEEIKRLTAERYPEAGALQQVKGVGPITSLAFVLTIEDPGRFETSRDVGAYLGLTPGRRQTGESDPEMHITKAGDVFLRKLLVQAAQYILGPFGSDCDLRRWGLCLAGTPASAEGQPRKGSRQRKKRAIVAVARKLAVLLHALWRNGEVYEPLRWASKREAA

SEQ ID NO: 295107 - protein, 409 aa, unidentified
MDSLYVGIDISSKNNVVYIMMPDGSKHSSFSVSNNPDGAAIIVDRVTSVLLALNTQNVVIGMEATSVYGDNLMYFLRESGSLGRFDRKLHMLNPKQVRKFKEAYPDLPKDDYTDAFVIADHLRFGRINKEVYMGDYRYTALKTLTRARHQIVETLTREKQRFMNLLYINFSGFAQEKVFSDNFGATFLALIEEFSSPDELAYMDTDELTEFIKTKGRNHFDDPEKIAVQVQKAAKNSYRPPQVIADSVNQALAISMATIRLLQKQLKEYDKIIAKDLAVIPQTLTSVKGIGNVYAAGIVSELGDINRFSDQAGVAKYAGLVWTRHQSGNFEAEDTGLINMGNRHLRYYLCEAADSLRKCDPEFRRYYDLKYKEVTKHQHKRALVLTARKLVRLVYTLLKTNRLYNPPEV

SEQ ID NO: 295108 - protein, 364 aa, unidentified
MAVVGIDAHKDWHTLVAVDDVGKRLAELTVQARAKGHQEILAWLAQFEDVQVAVEDCRHLTRRLEADLLDAGHKVVRVHTRLMAGMRRGGRRPGKSDPIDAEAVARVALREDGLPTAELPGPMREVKLLSDHRRSLVARRTALQAKVRWFLHEIDPDLHVPSRGLRRYHLLEELLGFLEQRQGVIVEIARDLLQDITSLTQRINDIERRLGKLVRASHSTLVEVPGLGVLGAATIIGETASVRRFTGKDAYARFNGTAPIPVWSGNKVRVRLSRGGNRRINTALHMAAVTQVRLGKEGSAYYDKLIARGKTKTEALRLLRRRLSDRVFSAMRADEHRGTKAATARPGSEAAVAGPTVTELRSAA

SEQ ID NO: 295109 - protein, 424 aa, unidentified
MVAVMIGIDPHKASHTAVAIDPAEVPLGQLQVRACAAQAERLLGWAQAWPQRTWAVEGAGGVGHLLAQQLLAAGERVLDVPPKLAARVRLLAAGNINKNDPNDARSVAVAALRSAEVREARRDDHAAVLKIWSKRYGDLGRARTQVACRLHQVLCELIPGGVSKEITAGQAGRILETITPADTVEAARWELAAELTEDLRGADAAIRETRKKIAAAVRAAGTSLTGLFGVGPVIAAAAIGDVRHVSRFPDRDHFAAYNGTAPIEVSSGGRKIWRLSRRGNRKLNHAIHMAAITQIRYRHSQGRAYFEKKLAEGKTGKEALRCLKRQISDAIFACLQADARRAAAKSPGGQPGHHSASRAAGSHPDHRLFGQATPGPATHPTTATAAFPAPLPSRASGQPGQGPGAARPRSGARRASSTWPRASR

SEQ ID NO: 295110 - protein, 322 aa, unidentified
MTLPASSRGYHEMETWARSFGPVRAFGVEGTGSYGAGLARFLQGRGHNVIEVNRPNRQIRHQHGKTDPLDAENAARAVLSGQARGTPKSGTSSVEMIRHLKVTRDTAVKSRTQAMVTLKTIIVNAPAALRESLEALTGKMALIRHLAALRPGAMTSPTASAKAVLRALARRWLMLDAEIKSHDADLDALTTVCAPTLKEAHGMATGTAAEMLILVGDNPERIRSEAAFAKLCGACPIPASSGKTTRHRLNRGGHRQANAALYRVVIIRMRSHLPTLDYVRRRTAEGKGKMEIIRCLKRFVAREIFGYLCRASRAPTTVPSTS

SEQ ID NO: 295111 - protein, 325 aa, unidentified
MQGKESSEQETSKSYVGIDVCQDWLDIHILPAGVTWRVPNTDQGHRQLKRRLEQYAVDLIAIEATGKWHRQLHRSLHASGYRVAVVNPLRARLFAEATGVLAKTDQIDARMLATFAMSLTPTARPPAPENMEAIKELVRARASAVDEQTALKNQRVSAAIAFLRRQLLSRLKRINRDIEALDAEIVKLIAAEENLARRYAILLSIPSFGPVTAATLLVCLAELGSCDRKQIALLAGVAPIADQSGKREGRRTVHGGRATVRRALYLAALNAARWNRDMKLLYARLVAAGKLKKVALIAVARKLVVLANTLIREERLWQISTPRNA

SEQ ID NO: 295112 - protein, 341 aa, unidentified
MKVSTLGIDLAKNVFQLHGVGCNGQTVLKKKLTRDKFLPFLMQLEPCLIGMEACASSHHFARVLRQYGHEVKLIPPQYVKPYVKTNKTDAADAEAICEAVARPNMRFVQIKTAEQQAILVLHTERNILIRERTACANSMRAILAEFGIIMPRTLSQLYKKIPEILEEYDNELSPFVRCSVARQLEHLQGVKDQITLIEQELSRCAKTQPACQRVMKVPGVRLMTATYLVASVGETGNNFISAKQFAAWFGNSVPREFSSGGKQRLGRISKRGDRYFRYLLVHGARAVAAVIERHKDNMPWLYRLLNKKAYNVAVVAQANKTARILWSMLVHHTEYRTLSVV

SEQ ID NO: 295113 - protein, 350 aa, unidentified
MNYYAGIDVSLEQSSVCIVDEQGKIVREVKMASEPGALAELFTGLGFPLARVGMEAGPLSQWLHEGLAVSGYDVVLMETRQVKAALSAMTVKTDRKDARGIAQMLRMGWYRSVHRKSLAAQEVRTLLTARKLLVGKIVDVEMTVRGLLRGFGLKVGMTTKPKFAARVRALMSGQETLEAVIEPLLRCRDVLREEMAGLHRKVLGIVRADDLCRRLMTAPGVGAVTALTFRAGVDDPARFTSSRAVGAHFGLTPRRYQSGETDVIGSITKAGDESVRSTLYEAALSLLVKVKKPSALKAWGLAVAKRRGLKRAIVAVARKLAVVLHRMWMDGTEFRWSREPTAQPIEAVAA

SEQ ID NO: 295114 - protein, 411 aa, unidentified
MDKVYDKCCGIDVHKKLIVACFKKGNKQEIRDFGATTRELLEMADWLKEGGCEMIAMESTGSYWKPLYNILETCELKAMVVNAHHMKAVPGRKTDVKDAEWIADLLQHGLLTASYIPDKDQRELRELVRYRKSLVGELNRELNRLQKMLEGANIKISGTITNINGKSARNILEHVLTGKQIDSAEYDILYEQKVIAHNLKATKEQIIDDLNGVMSGLQRRMMRVLLNHVDELNTHIKELDNDIDNFMKPDEKKAAEVIQDISGIGNTSAQAIISVIGTDMSRFPTDSHISSWAGLCPGNNESAHKRKSGKTRKGNAMLRDTLVVCAHAAVKNKSSYFSAQFARISAHRGKKRAYVAVAHSMLVAIYHILKDGVVFKDLGADYYNQFNKERKINAYLKKLKALGWEAPVVAE

SEQ ID NO: 295115 - protein, 495 aa, unidentified
MKAKACKAKGKHSNSSKRGAKITVRRGADGMEIVNPHAGGIDCGAQEHYVAVPPQSVEPGEPVVRCFSAFTEGLDALVEWLKACGVTTVAIESTGVYWIALCQKLEAAGIEVFLVNARHVRHVPGRKTDVKDCQWLQRLHSFGLLSASFRPEDAICRLRSLQRHRLNLISTAGAEIQHMQKALQQMNLHLHHVVSDISGVSGLRILDAILAGQRDASQLAKLRDHRVYKSTLAQMEAALVGDYRPEHLFVLGQSLQAYRFYQARTQDCDAEIERLLQQLAERFESSSVLAAELSQPEVLNDAAPSQNPRPVKRKVKRKPQANEPKINLADYLRRICGVDLTQVIGLNVLSVLLIVSEIGVDMSKWRSAKAFCAWLGLCPRNKISGRKVLDTRTCKVINRVATTLRLAAQAVGRTDTALGIFYRRKKAHLGPPKATTATARKLACLVYHLLKYKEQYREPDPATYQLKVQKTILAKIQKQAAALGYKLLPNALVPA

SEQ ID NO: 295116 - protein, 393 aa, unidentified
MICVGIDVAKDKYDCFILSSEGEVLADVFTIPNNAEGFDTLLQTIRRCARPEDKIKVGLEATGHYSYNILGFLLNEGLDTYVINPLHTNLYRKSLSLRKTKTDRVDARTIAAMLMSDVDLKSYTDTAYHNEELKSLTRYRFDKVRERAKLKQSVSRLVTILFPELEKLVPSLHMASVYALLSEFPGAKQVAGAHLTHLKAVLYGASKGRYGRDMAVTLRDAARCSVGSVMPAKSLELQHTIRLIRELDAEIEDIETAIQSMMDEMQSPITTIPGIGVRMGAMILAEIGDFSRFDSPDKILAYAGMSPSTYQSGQLSLSGPYSHMEKRGSRYLRYALYNATKYVCLWDPAFAAYLAKKRGEGKHYNVALSHAAKKLVRLICALEKSQQSYRNAA

SEQ ID NO: 295117 - protein, 374 aa, unidentified
MKIVGCDFHPSWQQVAVFDAESGEIVERKLVNGDGEAERFYRELESPALVGIEACGNSQWFIELLERLGHEVWVGDAAQIRASYVRRQKTDRRDAGHILRLLMEGRFPRLWVPSAEQRDLRQLLIHRHKLVEIRTRVKNGLQHLALNRGLQKKRSLWSARGRADFEKLPLKGWTARRREDLLKLLAELDRQVGELDTAATLAAEEHPQARLLMTQPGVGPITSLAFVLTIGDVSRFKHSGQVASYVGLIPREHSSGGHQRLGSISKQGNRFLRQLLVEAAQSVNRLDEGFRKQYAARCHHKPKGVAKVAAARKLAVRLYWMLRSGVGYPEIAHIESSSGVPLTGMSGVTGEPLRGSPVIASQVVTLNERSRIQQ

SEQ ID NO: 295118 - protein, 342 aa, unidentified
MNLPIRIGMDTSKSVFQLHGVDENEVVVVRRQFRRAEMIRYFERLPPVLVAIESCGSSHHWGRLLQSFGHEVKLIPPQYVKAYVKRGKNDAADAEALCEAVTRPSMRFVPLKSKERQAACMLMTVRERLVSVKSQLSNAFRSYAAEFGIVGPAGRQNVAALIKRVLEDDSLPEMARDLFRLQADEYAAVQARLAKIEAKLMKWHREDDISRRIATIPGIGPIGSSMLSMKAPPPETFRSGRDFAAWLGLTPKDHSTGGRQRLGGITKAGDSVLRSTLIVGATALLRHVRKGRHKPTPWLASLLERKPPKLVAVALANKFARIAWRLMISGGVYNQPVAAMPT

SEQ ID NO: 295119 - protein, 443 aa, unidentified
MDQCAPYPLRGRAARDGVCVSVRVLRDVLRKAEDMNHNVAGIDVHKKVLAVAVGKATDDALVFERKLFGTVGRSLAELAEWLKERGVKEVVMESTAQYWKPVWLALEGSFDLHLAQARSNLAPRGRKTDFRDAERMVRRLLSGDLTLSFVPSAEQRQWRLLARSKYQLRRDRVRLQNQLEGLLEEGRIKLSSVVTDLLGLSSLRILRALAAGENDAVKLAALADKRLRVSGEDLAEALRGSLTRIQRLLLNQFLTRLDVIDGQIRELDRTLAEEMEQYSDAIHRLSQIPGVGPDAAAQIIAEIGPKAAAFAAPEKLASWVGVCPGRQESAGESTSNRSPKGNRPMRRILTEVAFAAVKTKDSHFQEVFRRLVPRLGIKKAIWAIAHRICRLIWKLLHEGAVYIEQGARGQDPQAIRKRARKLVGDLRRLGYKVLIEEPTPKAA

SEQ ID NO: 295120 - protein, 370 aa, unidentified
MKEFSKYVGLDVHKETIAVSVAQANGGEVRYLGDIANTPEAMVKLVKQLRKGDAKLSFCYEAGPCGYGIYRQLTELGWDCKVVATSLIPKKAGDRIKTDRRDSMMLARLLRAGELTAVWVPDGLQEALRDLTRAREDMKHLQRQAKQRLLAFLLRHGQRYDGKSNWTQTHFRWFETVKFEQPVQQIVLQEYIDTVKDCGKRVDSLDRQIEQTAQASAIWPVIEALMALRGVNLLTATTVMAEIGDLTRFANAPQLMAYLGLVPSEHSSGGSVRRGGITKTGNSHVRRVLVEAAWTYRHPARKTATLQRRAERTPRAVQEIAWNAQKRLCARYRSLEARGKLKVQVCTATARELAGFIWAIGQVVPVLTNK

SEQ ID NO: 295121 - protein, 352 aa, unidentified
MEYFAGLDVSLEMTSICIVDADGVVMKEAKVASEPDDLVAFFEQCGMAMKRIGLEAGASSQWLYGGMAEAGLPVVCIETRHAKAALSAMPNKTDRNDARGIANIMRTGWFRAVHVKTQTAQELRFLLVARQTLVRKLMDIELAIRGMLRSFGRKMGVVSKRNFEARVLELAGDRTMLMRALNPMLTARRALALEYANLQKVAMDFARDDDVCRRLMTVPGVGPIVALTYRATIDVPSRFRRSKSVGAHLGLTPRTWQSGEVARNGRVSKSGDVMARAALYEAAHILLTRVKRWSSLKAWGMRLVKNRGHKRAVTALARRMSVLMHRIWVEGTVFIWKTGDGQVAAPAAVAGA

SEQ ID NO: 295122 - protein, 360 aa, unidentified
MDKDKYVGMDVHKAMTVVAVLDGSGRLVAEAIIETRAETIKDFVRGLSGKIHLTFEEGTQSAWLHWLIKPLVAELIVCDPRRNKLMAVGNKSDKVDAKKLAELLRSGSLKGVYHGDAGTKKLKEVVRLYLTLMSDAIRVMNRIKAIYRGRGIPTTGTAVYRAESRLDWIAQILDEGSRVRLEALYRQLDFLSEQRKHARKEVVTEVRRHAAYRILIQIPSLGPIRIAIIIAVVVSPHRFRTKRQFWPYCGFGVVTVTSADYVTIDGKISRSNKPVGTRGLNRNYNRHLKAVFKDAAQYASRKPPFKQHYDQLIAKNMRKQMAMLTLARKISAITLAVWKAEDCFDSGRLSDPDKLKEVVA

SEQ ID NO: 295123 - protein, 407 aa, unidentified
MISVGIDVSKSKSTVAALGFGKEVIFKPFNIYHVKNDVNKLIGKIKSLDEDVKIVMEATEIYHIPILISLVNEGFFVSVINPLKMKRFCQALSFRNVKTDKKDAIHIAEYGLMNWNDLIEYKEDKEEYVRLKQLNRSYQHYQKIRINHLNYLDKEIEKRHPGLKKLIHHANGNYQKDKLIDFVERWTNSEKILKRSQKQFVNDYEKWAKKKGYHPNAQKAITIYQNALESIPTISSSNSKIDANVLDSIEFLRVINKTLNNILSQMKEIATELEEYKIAKEFSGIGEKLALQITAEIGDIRKYKNKKSLISFAGIDSPPYQSGNFSAKQRKISRRGNPILRKVLYMVMLCMKKAKDENNPVYKYIIKKEKEGKAKKVSNIAGINKFLRIYYAKVMEEKSKEELLKAA

SEQ ID NO: 295124 - protein, 397 aa, unidentified
MYIVGIDIAKRKHEAAVIDGEGTIIIKPFSFTNNCSGYNRLLAMLTKAKLPLDEVSFAMEATGHYWLALFTRLQKEGFRVQVINPVQTNSIRSFYIRQAKTDPRDALLIAEVIRFGHFSESTLHPENIYELRELCRGRHAIVSMQADVKRKVVALLDQVFPEYETAFTNMFGDTSMAILQTCPTPKELSEMPLEELCHLIEVSSHKRFRMAKARELQELARNSFGFAMAGDVFSTMIRLYAKHLDFLKQQVREMDRKIAEIMETLDTPITTITGIGPTLGAYILSEIGDISRFSSAAKLAAYAGIDPTMRQSGEYNGVRNRMSKRGSPYLRHAIWLAASSAVLHDPALKLYFQKKRDEGKPYMASVGHACRKMVSIIYAVMRDNKAYTPCIPNEISA

SEQ ID NO: 295125 - protein, 465 aa, unidentified
MTKKRQSQVRDNLRVQGSRSLTLLNPDAAGIDVGASEHYVAVPPERAEQPVRRFGAFTEDLHKLAQWLLQCGVRTVAMESTGVYWIPLYQILEDYGLAVKLVNARHVKHVPGRKSDVQDCQWLQQLESFGLLSGSFRPEAKICVLRSYMRQRQMLISHASRHIQQMQKALTQMNLKLHQVLSDLSGQTGMRIVRAILQGERDRLKLAALKDPRVKSSLGTIAKSLEGDYRAEHLFALRQAVELYDYHQQKIAECDQAILKEMQALETRAAPDAMPPTPLKRKKRSRHNPLPFDGQAELYRIMGVDLTRIDGVNEATVQLLLSELGLDLCKKWPSEAQFCSWLGLCPNNEISGGKVLRRGTRKVINRVANALRMCAESLLNSKSALGAYARRMRAKRDSKIAISATAHKLARLIYRTLKYGQEYSDIGQAQYEAKYHANAIKSLQKRARQLGVQVIDSNPPTVVVP

SEQ ID NO: 295126 - protein, 353 aa, unidentified
MGIVVALDVHRNQITFKALDRETGELSRGRIAPAARVDVRAWLERFAGRQAEFALEGTTGWRFVVEEIERAGHRAHLADPAETAAKRGRKRRAKTDNADCDLQLRLLLAGELPESWIPPAHILELRTLVRLRKTLIDQRTAWQQRIHAQLFHQGVPAGLRLRTEAGREALAKAELSPAGRELVALGLRMLDALDLELAPLDQELRAFARRQPGCRALIERLYGVGPVSATAILAELGDPRRFSSSDDAVRHAGLDITVYQSDSKRAPGHLSHKGPAVLRWALFEAAQSAARTSSPDRSYYLQVAERIDHNRACLSVARKLCRRAYHILRELGDEALLPIEQAATDEEAIAAAA

SEQ ID NO: 295127 - protein, 403 aa, unidentified
MTMRRRAWVGIDVGKTSHHACAIDETGKVVWNQKVSNEQRAIEQLVTRACKGAEQVQWAIDLTSPMALMLITVLLCAEQSVVYVPGRTVNTMTHAFRGEGKTDAKDARVIAETARLRNDLSNVVLPDELVVELTQLTGYRADLMADWVRGINRLRALLGSIFPGLEAAFDYSTRTPLILVSGLCTPAEIRAAGIDGMTAFLVDNHAWPTGIVKSAATAAALANEQPLALPGEAGTAALVKRLACRLLELDREIKDIDKTITARFRDHPYARIIESLPGFGPGLGAEFLVVTRGDPASFATAGRLSSYAGLVPVPKDSGRITGNLRRPKRYNRRLRRVFYLAALSSLRADGPSRRFYDRKRAERLIHTQALLALARRLIDVLWALLRDDREFTPEKPITATAAA

SEQ ID NO: 295128 - protein, 409 aa, unidentified
MRRVKGKRSASSIVGCAPKCAEPHAETPEGVLPQTFRGGRPVSETITSFVGLDVHKDSTAIGEAEAGRENPRFIGTVGPDLGQLLKALKSLGKPETMLVVYEAGPCGYGLARQLRSRGYRCEVVAAGKIARRPGERIKTDRRDALTLARLARSGDLVKVIVPDEGDEAMRDLSRAREDGVRARLKARQQLKALLLRHGHRYGGKSSWTLAHERYLAAVSFAHPAQDIAFAEYRQAVREGHERVERLTEALRTQAEHWRLKPLVAGLATLRGIDFVAAVTLTAEIGDFGRFAHPTELMGFLGLVPSEYSTGDTRRQGDITKTGNSHARRVLVEAAWNYRFPARLSRVLQIRQEGQPKAVREIAWRAQLRLAHRYRRLSSRKLHPNKICVAIARELAGFLWDIARQVKLAT

SEQ ID NO: 295129 - protein, 339 aa, unidentified
MTIVGCDFHPGWQQVAVFDSETGEIRELKLENGHGEAERFYRQLSSPALVGFEACGNTQWFEDLLERLGHEVWIGDAAAIRASYVHKQKTDRRDAGHILKLLMEGRFPRLWRPSAAERDLRQLLIHRHKLVGIRVRVKNGLHHLMLNKGVQMKRKLWSAAGQKALRELPLEGWAAQRRQDLLTLLSGLNPQIGQLDEAVERAAQANRRAQLLMTQPGVGPITALAYVLTIGDVSRFQRGKQVASYLGLIPSEKSSSNRRRLGSISKQGNSFVRMLLVESVQAVNRLDAGFRQQYKHRCHRMAKGVAKVAAARRLAVRLFWMLRTNTAYPEIARIEGSPR

SEQ ID NO: 295130 - protein, 416 aa, unidentified
MDVVNPRCAGLDVHKATVVACVRGPDTRRSARHAETKTFSTTVGGLTQLREWLLGHGVTTAALESTSVYWRPVYAALEDRVELVLVNARHVKMVPGRKTDVRDCEWLAHLLECGLLRASLVPPRAIRDLRDLTRLRKSLVRERGHHVNRIAKILELAQLKLSCVVTDIMGKTGRAILEALALGIDDPAQLAAGAQGSLRKTRAELREALRGGLTPHYAFLLQQHLSLIDTLDTHLVAIDARIEGAMVPFAAEAALVETIPGIATRSAQAIVAETGVDMSRFPTAAHLASRPACVPAITRARESDTRRARGRGRRGFVRRCRRRPGPPRGPRRATTTRFSIEYEPAPGRRRLSSPCSTPLLLRCGTSSRSVLRTTISERTTSIVATPIAFAAITSDASSGLATASCSSTRWRDRTVS

SEQ ID NO: 295131 - protein, 402 aa, unidentified
MIFINCLGIDIGKSESVVAHYKDEVLVKEMVIQNNQNGYRYLKNYIKHLDSLFILFESTGIYSRGMKRFCEIHKIDYLEMNPLEAKFKTSSLRSWKTDKSDAHKLALLAFRMKDSKVQRQSEEIYFELRERARFHLEMEINQNRLKVELVETLHQTFPGLEKLFTNRYSKIALNIAKAFPHPDFVSTLTHDELVEKVLHSTDKGISVNKAHKYVQKLIEIKNNSFPNVDKSSFLLQKVQYLCDKLLIGIEEMKEFDQEMIDLAKNTTEFENIISIPGIGELTAALLIGELGNIREFKTNKQLNAFVGIDIKRYQSGTSKSRDTINKRGNKKARRLLYLIIVNIIRGRNHYQSHIVDYYYKLREQPHGKTHKTAVIASINRLLKTIHYLIVNNKLYDYQKAPH

SEQ ID NO: 295132 - protein, 400 aa, unidentified
MNRTRTVAGLDVHKDSIYLCIMGYDQAIIWENTYGVLTPDLRQMHHDMRAHGVTEAAMESTAVYWVPVWTELCESMELRLVNPYFIKQLPGRKSDVKDARWIAECLLKNLIKGSFVPEPIVQDMRKLNRRIMDLCEDTTYNSNKLDAALQRCGFRLSNYVATTKSKSYRSVLKAIIDGQTDPDELLRLVHGRILNKHGRERVKAALTGSFSETDLIVLRQLKETLDLIEKQTADCQQELVRLCKEHYPKPYERLQTIPGVKERAATAIIAETGVDMKMFATAASLVGWCGLKPRNDVSNGRFKSRKVTHGNRYLRQILIEIAWAASRTRNCFFSHFSYLQTTVKKKNKMKIQVAIARKILVALWHMLSKEEDFIDIYLKRQEELKRTEGQIKLLESYMAD

SEQ ID NO: 295133 - protein, 347 aa, unidentified
MKFYTTLHKYYCGIDLHAKILYVCILDQQGDKLVHQKIGADPQVLLRLLEPYIGNIVVGVECMHCWYWVSDFCQTHEVDFVLGHALYMKAIHGGKAKNDKIDSYKIASLLKGGNFPLAYNYPREMRATRDLLRRRTGVVRHGASLKAHVVNTDSQYNLPAQSLNLKNIRARESLLHHYDDEVVQRTIELDMVLLNCYAKELAKVEYFIEKQAKQHHGTYLYIIRSFPGIGQILGLTILYEIGHITRFKSVQNFASYSRLVKCKAESAGKTYGTSGNKIGNGHLKWAFSEAAVLYLRGNDKAKNHLNKLQRRMSKGKALSALAHKIGRCIYFMLRDKTVFDEKKFLKG

SEQ ID NO: 295134 - protein, 412 aa, unidentified
MLKIIYPVCCGIDVHKNFIVACIASTNDKGVTTYKSSRFSTFTNSLRKLSEWLSSNSCTEVCMESTGKYWIPVYNILEVTCNITLAHPKYVKAIRGKKTDKKDAKWIADLFKHDLVAASFMPPLAIRQLRDLMRYRFKLTNFRSSEKNRIQNCLTVSNIQLANVVSDTFGKSSMKIIDHLLENPNDKDFDFVPLLHASMLDKVDDIRLALDGIITPEQQQKMYIILQHYDELERCKFNIESLILSLSEPYAKERSLVSTVPGIKNPFSAIAIISEIGVDMSVFPTAKHLSSWAGVTPQNNESAGKKHSVRISRAGVYIKPLLVQCANAVVKSDKHPEIKGRYLSIKKRRGHKRAIIAIARMLLTAIYHILKKGEPYNAELYKKAEIIPQTRKITVAQAVLIAQRHGYSVISN

SEQ ID NO: 295135 - protein, 338 aa, unidentified
MQLYAGIDLHSSNNYLGIIDTNDKRLFGKRLPNCIKTISMALKPFRKKISGIAVESTYNWYWLVDGLQDKGYKMHLANPSAIQQYEGLKHTDDKWDSFWLAHMLKLGILPQGYIYPKKQRPMRDLMRRRLRYVSQRTSHVLSLQSMLNRHLAMQLNSNEIKKLKLIDADKLFKDPFSASAVRHSISTISFLDTTAKRIEKQIMASAKLEKSFQVITSMPGVGHILGLTVMLEADDFSRFESPGNYASYCRCVKSERTSNKRKKGEGNRKNGNKYLAWAYVEAAHLIIRFCPEANAFYQQKKARTNGAIATKALANKLARATFCMMRDQTMFDVKKVFR

SEQ ID NO: 295136 - protein, 398 aa, unidentified
MRREEVGCYEVLCGVDVGKDAHCCRAVARDGETVLLARTVGQDEGEISAFLSELSSIGRALVVVDQHGGFGALVVTLALAAGVDVARIPPSRFARASELYGEGKTDESDAMVLARLPVEAPRHVDLVADPGEEVERAKVLVRYRHDIVCERTRAYNRVHDALGRCLPPLERELSGPALHTSLALAMLARWGASGLACARWCDVRRWARSRKGAGPAAEEAAGRMWRAARSQSAAMPAADVLDQVIMADAARIIELERLDDELSEQIAGLCAGLPAVGVLLSMPGVGEVYSRTIALEAGDVGRFDSASKLAAYCGVGKCPRESGKRRGRKRRRCYNRRLHTAVMESAKIAIRKPGPDRDYYEKKLAGGMNEHQALHALARKRVSIMYAMLKSMEPYRAA

SEQ ID NO: 295137 - protein, 329 aa, unidentified
MVYVGIDVHRKRSQVAVLDEAGTQLSNRNYENSSGDLRAVLDELEPGTGVAFEAAYGWGWLADLLEECELEAHLAHPSACKAIAHARLKNDKVDARILAQLLRTDFLPEAWIAPKEIRDLRSLLRHRGSLVRVRTSFKNRIHAVVADEGLKVEVGTLWSAEGETWLARVAMRPMHREIVDDCCGLLDALATPIRRLDAEIRDQAEPDPRVEALRSLYGVGLITSMTLVAEIGEISRFPTARKLCAWAGLTPSVHNSDVKVRHGHITKAGPAAVRAVLTEATYQARHVAPFAKYFEEVAKRRGKRIATVALSRKILARCFHILKSLEEPA

SEQ ID NO: 295138 - protein, 386 aa, unidentified
MKDETFVPREYDVFAGLDVDKKSIAATFSSPQGFIRSLHMPYSVDYLLNHVRKHFGDQKVAFVYEAGPTGYGLYDGLVAQGYRCLVAAPSMIPRAPGQRVKTNRLDSRGLSESLRGGQLKSIHVPSPIYRELRHLTQLRDTVVREAAANKQRIKALLLLEGIGFPPATAGRQWTLRVKAQLRKLRCSRTVRFKLDQLLDSLEFCEKQVVSSTKEIRRFCKEDVELFQSIEYLMSIPGIGWIVASQLLARMGDWREIDNVRQLGSFLGLVPTENSTGDSVDRGSITRAGDGRLRSKMIQAAWSAIRQDGELREFYRSVCQRNPRGKGARIAIVAVARKLSTRIYAVLKKQRPYIVRKQVHSAPLTQEETSPQGTTRRCAEPGETDNS

SEQ ID NO: 295139 - protein, 342 aa, unidentified
MNYYAGIDVSLECSSVAIVDATGKIVREGKVASDPVALIAWFRVFGLNVIRIGLEAGPLSQWLYAAMKEAGLAVELLETRHVRNAFKTMAVKTDRKDARGIAELMRVGWFRPVHCKSMDAQETRAILTARTLVQSKLHDIEASLRGILRGFGLKVGKITSNRLAGRINELVVGHPTLQIIAEALLAAHEVLLRQFKGFEKRVRIMAREDAKARLLMTATGVGAIVSLTCSSAIDDPGRFKKSKTVGAHYGMAPKKYQSGETDYTGRISKAGDKSVRTALYQAAHIILTKPVKGSVLKSWAMRLAKRIGMKKAKVALARKLAVIMHRMLVDGKPFNPAAGAAA

SEQ ID NO: 295140 - protein, 342 aa, unidentified
MDHYAGIDVSLECSSVCVVDGSGKIAREGKVASEPEALIAYFGSLRLCVVRIGLEAGPLSQWLYAAMKEAGLAVELLETRHVRKALETMPVKSDRNDARGIAQLIRLGWFRPVHCKSIGAQETRAVLTARKLVQSKLLDVENSVRGILRGFGLKVGHTTNRSFAGRVEDLVVNHASLHMIAAALLSVHAVLLRELKAFDKQVRSMARVDVKAKLLMSAPAVGPIVALTYASAIDDPGRFTSSRRVGAHFGLTPKKYQSGETDYTGRISKIGDATVRTALYEAAHIMLIKPIKGCAPLKSWAMRIARRSGMKKAKVALARKLAVILHRMLANATPFNAAMAAA

SEQ ID NO: 295141 - protein, 429 aa, unidentified
MRQVALDVHQGFCEVAIREDGKTRSAGRVATGRDTLELFAGSLSPTDEVVMEATGPAMEIARIIEPHVARVVVANAQDVRAISHARVKSDRFDARTLAELLAAGMLEPVWVPDVETSGLRRRVARRAALVRQRTRAKNEIHATLSRCLLGRSPFSDLFGKEGRVWLGEQELGTEEQETVAGCLRQIDFLDAEVAQIDQKLSGWASGSKDAHRLMSIPGVGAGVAVTLMAAIGDISRFDSPRALVAYLGLDPKVRQSGDEPPRHGRISKRGNAQARSVLVEAAWVAVRQPGPLRAFGERIRARKGGQVAAVAVARKLACLCWQLLTKGEDYAYAQPSRVRAKLRRVELDAGAPPLRTRHAGQRVSASAAERDAERELTERAEAAYRRLIADWKATGPATKKGAGATRGHASSRPTERQAARQAQAQTPAL

SEQ ID NO: 295142 - protein, 389 aa, unidentified
MNLYYGIDVASEKHNCCIIDEKEHVLHEFSFSNDQTGFSKLLHFLDHPGIPNGVKRHIGLEATGVYGENLTEFLRRNGFEVTTFNPLSVKKQLTATTLRKTKTDKSDAKFLAVMLARGNYEPDATTSYHISELKSLSRRRFLLVKKRSGAKNVAKSLLTKLFPEYSKLFTDTFGVTSMAVLMKYPAAREIAACRPSVLAKLLERSSRGRFGLEKARTMIDLAKNSVGNYSAADALSLSMTLEEIEFFSRQIERVEREIHLIFKEHPSPLLTIPGIGEVIAAMIISEIGNINRFSNPNKLLAFAGLEPSIYQSGKFSPDSGSMVKRGSPYLRWALMWAARLVPRYSITFGDYFDKKSLEGKHFNVATSHVAKKLVRVIFSLLKNNSVFSE

SEQ ID NO: 295143 - protein, 395 aa, unidentified
MKYGVGIDISKGKSTIAILSIEGEVIKEPFEFYHNQKDLDNLNLLLNNYSKEDLKIIMEETGTYHLPVLSYLIDKGYCVIAENAFRIMKYLDRGLRKAKTDKKDSLKLAEYACDNWYKLKMPIIEDKNYKDLRFLSRQYFAFNSIKIQQKVNFSNLTDMLFPGYYQLLDENNYILGLKVFQKYSINIIKKKKLETFINEVDKIAQKIGHKRAGITFAKKVYELAKESIPSCPSSEYTQLIIDNCVVALIQSIETTKEIISKMQEIANKLPEYETVKSMPGAGPRLAPLLIAEIGDIRKFKDSSSLIAYAGIDAPPYQSGQFEATNRHISKRGNKYLRKTGYEVMKAIKSFYSTGNEFYDYMVKKESEGKKKKVAKIAALNKFLRQYYAKLIKVYN

SEQ ID NO: 295144 - protein, 347 aa, unidentified
MLYAGLDLSRQRVDVHLMNQAGEPVQVTAAPPDVDGLRGLARQVSGFGEPVVAAIESMNGARFVHDQLELHGWEVTVADAQKVKGLAPLACKTDRIDAWVLAELSRRELVPAVWLPTPEVRAERERARWRLHLVRHRTALKNRIHATLLAFGRPCPTSDLFGPGGRQVLARLALPEPWAGTTTAAIALIDDLDAQIEECEHDLRRLGADHAYVPLLMTAPGIAWVLGYTIAAEIGDITRFASPKKLCGYTGLCPRVYQSGSRDHRGPLSKNGPRYLRWALLEAATHAARHPAYHGHYQRIKTRLGHQRGAKVARVEVARKLTEAIWHMLTTQAPFRPARPHAHPLAA

SEQ ID NO: 295145 - protein, 317 aa, unidentified
MIVAGIDTGKATLHLCLLPTGERFSVSNDEGGIATLVAHCRAAGVVRAGIEVASIYHRPAAWALRAAGIETAELQPRQARGLAVALLRRAKNDTIDAFVIARLVEVLSGPWKQPPAAHLEALAEALTFIDMLDERLVVLKTQRERFTAKRFLASLEREIKALEKQRRGELSRLIANLRKNPTLSERLDLLLSIPGLGERTAASLLIRMPELGSLTREQAASLLGVAPFDDKSAQRDGQRHIAGGRARLRKTMFMAAFAAALHWNGDLKVFYQRLRAKGKAHNAAVIACERKLIILANAILMRGTPWHNTRGMPCLAN

SEQ ID NO: 295146 - protein, 374 aa, unidentified
MIVIGADTHKRQHTLAGVDEVTGRVAGEKTVPVKRAALQDMVRWARSLGEDRVWAIEDCRHVSGGLERFLLVCGERVVRVPPMLMAGMRRGARERGKSDAIDAVAIARAAIREGIDTLPAAQLAGPELELRLLVDHRERLVALRTGLINDLRWNLHDLWPELEIRSRSIHRSAGWQDRIARRLADAKQTARVRIARDELRRVRDLTRFIDRLEREIASLVAKLAPQLLAEQGCGALTAAKLVGEIAGINRFQTDAKLARMAGVAPIPASSGRTDRHRLDRGGNRQLNAALHRIAITKARVDPDTAAYLARKHAEGKNRSEALRCLKRHLVRRVWHLLQPPGPVTAPRTETRPPMIAPAGITIACTSTSGPFSLT

SEQ ID NO: 295147 - protein, 331 aa, unidentified
MLYVGIEVAKYKHDVAVLNDQGKWVLKPLTFSNSRAGFETLLNTLSQLNQDYLVALEDTGHYAFNLLHFLHEQEITTYTYNPLLIKEFAKSLSLRKTKTDKKDARVIALKLLADPKREQFRHDNKHEELKILTRYINRLKKKQSDWKVQYTRCLDIIFPELDKLIGKQSDYAYELLSRYPNPQKISVADFEQLLTIKRLTVPKIQDILKVAPHSIGTTSPAREFELIEIIENIKHYNKLITKAENRVDELMAEINSVITTVTGIGNRLGSIILAEIRNIHTFDSPAQLQAFAGLEPSIYQSGQVDLSGKMVKRGSPHLRWALIQAAKSVAR

SEQ ID NO: 295148 - protein, 365 aa, unidentified
MTKKKQKETDAMKTYVGIDLHSNNSYFAVMSESGERLFHKRYSNKKTDIMKALEQVNKFGEINRLAVESTYNWYWLIDFLHELGYQVDLTNPAAVHQYNGLKITDDKSDAYFLAELLRLKILPKCWICPKEDRPLRDLLRTRMHFVQNRTSLKNSLTSLLARQTGQQLSYSKLIVLGREEVNKLVGHEDITYRISQLCSQIYTLDRSIKDIEKRAFEKKKLSPEFRNLTTVPGIGKILALVIMVETGDINRFKKSGNYTSYCRCVGTDRKSNGKSKGSNNKKNGNKYLSWAYAEAAINLKRFNSSANKYWQKKAARAPKILAYKSLAAKLTKACYYIIRDQKEFDEKLIFGYEGETGAQLLKTAI

SEQ ID NO: 295149 - protein, 352 aa, unidentified
METVVERPAALDVHKEQVTACVRVPGEGRSREQHVAEFPTTVAGLLTLRDWLAAFGVEQVVMEATGVYWKPVWAILEDEFECLLVNARHVKQVPGRKTDVKDAEWLCQLAEAGLLRASFVPPKPIRALRNLTRYRKTQIQERSREANRLHKALEDTGIKLDCVATDILGKSGRAMLDALVSGTTDPEVLANLAKGKLRAKIPALKEALEGRFDHLHAVWIGAILSHLDFLDEQIANLSDAIGEQIAPFEKAVELLCTIHGVQRRTAEVIIAEIGVDMQVFPTAKQLASWAGQCPGNDQSAGKRRSGKTRKGRICRIRHMPPYVAPKTMLRRRSGGARVGWDRACRVNIFRVG

SEQ ID NO: 295150 - protein, 336 aa, unidentified
MNYIGIDPAADSFTFTRYIPDSKLAGNSSTFDSHADGIAQFLASLEKQGCTPEQTVMCIENTGVYSELLCYTLHQAGFQILLIEPIKIHRALGQGTAKTDPLDSLKIAEYAYRFRDKLKLWEPHEAITEQIRVLLSTREQLVKQQTALSNARQALQRKYIQTPAANASLDVMIQQAKEQIKQLEQEIKRLIKQHPTMANIVNLIVSAPGVGILLAAHLLVITKGFSEPITYRQMAAQLGIAPLEHTSGTSVKRKPLSRGYGPRTMRKLLHLAARSVVTHKRTYQLYYHRKLAEGKPKTLVLNNVSNQLLRVLCSMLKNKKPYIDGYVSVYPRLLVS

SEQ ID NO: 295151 - protein, 326 aa, unidentified
MEHELHYIGIDTAKEKLDVDVLRPDGRHRTKKFANTTKGHDELVSWLKGHKIDHAHICIEATGTYMEPVAECLYDAGYIVSVINPALGKAFAQSEGLRNKTDTVDARMLAEFCRQKRPAAWEAPHPLERALRALVDRHQALTDMHTQELNRTETAREVQRPSIDAHLLWLEAELKRLEKQIKDLTDDDPDMKHRRKLLESIPGIGEKTSAVLLAYIGLKDRFAHARQFAAFAGLTPRRYESGSSVRGASRMSKAGHVSLRRALYMPAMVATSKTEWGRAFRDRLAANGKKGKVILGAMMRKLAQVAYGVLKSGVPFDASRHNPVAA

SEQ ID NO: 295152 - protein, 311 aa, unidentified
MNRKTVHIGIDVSKDTLDLSPFDQKPLCVKNTSAGISSLIARIKALPDKAVICCEASGGYEKLLLAMLPAAEIETACVNARRVRCYAESKGILAKTDKIDARVIAMFSENNKPRTIESLPKWHEEMKSLLIRREELHQMRKAEKCRLDPVPHAAVADLIREHIIHLGVCIRNIEREIRKLMEKDNDLAEKVKRLSSVNSIGLIAATSLLAYLPELGSITDNQAAALAGLVPYNRDSGTKKGKRVVHGGRMRIRNALYMPAVCAIRRNHVWREVYQRLVAKGKPGKVAITAVMRKMVVLANRLMADPTFQIS

SEQ ID NO: 295153 - protein, 341 aa, unidentified
MMIIGCDFHPRFQQIAFVDQETGEYGERRLSHPEEAERFYRSLAGRSVRIGAEATGNFRWFRHLMEELSHEFLLGDATAIRAACPRRQKTDKRDARHILSMLVEDRFPVVWQPSVENDHVRQLLLHRCRLVRMRTRIKNQLDAIAKNEGLLSPRVWSPKRRSQIEALPLPGWYAHRRADLLGLLDELDERIRPLDEAVHDAAEDNQEARLLMTHPGVGPMVSLAYVLTIGDWRRFPRGKQVGSYLGLIPAEESSGNTRRLGQVSKQGSVLVRWLLVEAAVHAQRHDPSWHRQYVRLSMNKHHGVAKVAIAHKLAVRLYWMLRSGEDYGKVKERGSHAGQSV

SEQ ID NO: 295154 - protein, 384 aa, unidentified
MPADYRHDQTAIRIDLGAIFVSLELSRATWLITSLSPGRQKMSKHRVRGGDIAGLLACFAELRAKAQTRTGQLFPLIVIQEAGLDGFWIHRVLQSEGIESHVVDPASIATSRRRRRAKTDKIDGEALIRALLAYKRGEPRVCAMVKAPTCREEDDRRICRERSVLTAERVAHVNRIKGLLFGQGISDYEPMHRCRRARLDELKTGDGRPLPPQLKAQVSREVDRLELLIQQIKAVEAERDALLASTESADKPAPTALLLGLKGIGPEFASVLWSEGLCRSFANRRQVAAYAGLAPTPWQSGTVDREQGVSKAGNPRLRTTMIQLAWLWLRHQPDSALSRWFHERIERSRSRRKTIIVALARKLLVALWRYVTAGIVIEGATMKA

SEQ ID NO: 295155 - protein, 340 aa, unidentified
MKESKQFFIGMDVSKLWFDVSLMIVINHEKQNIITQRFDNTVQGIQSLHKWLKQHQVCFDESSLAVIENTGVYHRLIWQYCSKHDLPLHIGNAAAIKWSLGITRGKNDKIDSQRLCMYAARQADELKATPPLDPVFMQLKDLMTARTRLVNQLHSIKTYLKELHSGPETNMLKIIEQSHKQAIEGIKKSIHKIEEHIAEIIANNMAIKKNYDLLLTVPGIGHFTAVYLICCTNNFAAKHTGKQLASYAGVVPFDHTSGTSIKGKNRVHKMANKDLKKMLHLCALTAIKCYPEFTNYFNRKKAEGKNGMSVLNAIRNKLVLRVIAVVNNQTPYVDYAKQAA

SEQ ID NO: 295156 - protein, 347 aa, unidentified
MKIIGCDFHPGFQQIAMLEQESGQRVRRKLEHASGEAERFYRGLREQGGEVLVGVEASGNLRWFERLMQELGFELRIGDAAKIRASEVRRQKTDRRDAERLLELLEQNKFPAIWVASEAERDLRQLLQHRHKLVQMRTRIKNQLQHVAMNQGLQKKRQLWTKQGQQWLRELCLPRWTERRREDLLVLLTGLEAAIAELTRAVEEAAQQDARARRLMTHPGVGPITALAFVLVIGEVKRFPCSRQLCSYLGLIPCEDSSGERRRLGSISKQGNTLLRTLLVEAGQSAAQCDPELRRSYQRLCHKKRYTGIGKVMVARKLAVRLYWMWKTEQPYPSARMQNGPSHPVSA

SEQ ID NO: 295157 - protein, 417 aa, unidentified
MNSPPETTVIDRYIGVDIHKHYVMVGGQNRHQEWILRPRQVQVSRFRDWAEKNFRKSDAVVIEATGSVWDIYDIIAPHVGEILVANARSIRQIAEAKVKTDKKDIHRMLTQLISGTVPEVWVPPVPVRELRSLISFRWRLTKQITMSKNRLHSVVQRFNLDPPEGGLLTEKNSGWWEEQEFSDLTGFEVEHDLEIVETLEAQKEALDQKLAELSNSEPWASDMVFLMQIPGMGLIFSMVVLSAIGDITRFSHAKELVGYAGLSAGVHISGETNRSKPITKEGRKELRWAMVEAAWRAKESDPYWKAQFKRLEKRMPKNKAIVSIARRMLVSIWHILTKRETYLHFDEEDIAYKMLIWAWAMDKKSRQGMTPQQFAKYGLLRLGIGQDMQRIVRGGAPRRIAPTEEILALKPELAPPR

SEQ ID NO: 295158 - protein, 423 aa, unidentified
MAREQLMTAGAMLVAIDIAKARNEVLIEAPGHDRRRRLTVPNTRDEHDRFVELLRTAGRPVIVALEATGNYHRPLAWRLLDAGFEVRLVSSVALARTREAIHNGWDKNDPKDAQVILHMLRTGLTQRYHDALFHGMNDLQELSKTHEAISKAKTEVLHRLLTHYLPLYFPEVDRFRHNSRSEWFFAFLSRFPTPSSITALEKEAFIAEAWDVVGRKVAKARLLADIYDTAASSIALPIPPDAEAIAMFRLVIAEVLGLIRTRDRIEGRAQALLGRNPDYQRLLQIPGIGPIHALTILAEAGDLRRFGHHRQFLKFCGLDLATYQSGKYRGQTRLSKFGNARLRRAMWLAAQVAIRQKENSFRDKFERYVAKDRRNADLNRKALSAVAAKMARVVHAVIKGGRDYRPFIEVAVPSGRTPFRLGP

SEQ ID NO: 295159 - protein, 349 aa, unidentified
MRFYNQQHRFYCGVDLHARTLSLCILDDKGTIVLQKTIAANPGAFLQAVAPFRDGLAVACECMFAWYWLADLCEHEKIPFVLGHALYMKAIHGGKAKTDKIDAHKIAVLLRGGMLPQAYVYPKGMRETRDLLRRRTFLVRRRAEALVHLANTNSQYNQPPFAKKLAYAANRAELDIVERFTDPSVQKNVAVDLALIDAYDNQIADLELYLSRTAKVDDPQAFHRLRSVPGIGKVLALVLLYEIHDIRRFPEVGQFLSYARLVRCSHESAGKKQGTGGNKIGNAHLKWAFSEAACLLLRESEQAKKWLARREKKHGKARALGALAARLGRAVYHLLRKREVFDRKRFFAS

SEQ ID NO: 295160 - protein, 332 aa, unidentified
MSVYVGIDVHRKRSQVAVINEGGEVLANRNVPNGVKPVLSVIGGLPAGTPTAYEAAFGWGWLLERLEDYGFEPHMVHPLQCKAIASARLKNDKVDAATLAQLLRADLLPEAWIAPLEVRQLRALLRHRAQLVRLRTLLRNRAHAVLADHGHGRPAGCWSGPGRQWLASLQLPAVSREVIDDALALMDALQQPIDRLDQEVRQRAKADPRVKVLTQLPGVGMFTALVLLAEIGDITRFGSARKLASWAGLTPTVRGSDRTVHHGHISKQGPTWVRWVACEAAQTAKRHPDFAPGYEATARRRGKKIATTAVARKLITRAYHLLTEAASDGAPG

SEQ ID NO: 295161 - protein, 364 aa, unidentified
MQYRTNNELSSLEETRRQFNGGTGVIKLGIDVHQDFYVVVEQVGGSNPKPPQRFQKDAFLHWAAKLQEKSGAEMHAVYEACGFGFGLQRKLSALGIECEVVCPQKLDEQNRRIKTDGLDAKALCLKLDRFVQGNRAALALVRVPTEEEEQLRSIHRQREQLVKARKRLEAQGRSLMVNHGMEPVKNWWKPRTFLGLRVPEWMRELLSNSQPILVALQQRIGALTLQLQSAATPNQPRGLGALSSVLIDREIGDWRRFNNRRQVASYTGLCPGEYSSGNTRVQSCVTKHGNPRLRAALVELAWRLVRFQPKYKPIVKWRAILAKGALATGAARKKAIVAVARQLAVDLWRIRTGRVCAETLGLIN

SEQ ID NO: 295162 - protein, 340 aa, unidentified
MKLYTGFDLHSSNSYLGIIDEHGKRTFNRKLPNDPAVIVDTLRPFRNDITDIAVESTYNWYWLVDLLMAEGYRVHLANPSAIQKYTGLKYSDDRHDAFWLAEMMRLGILPEGYIYPKEDRPIRDLLRKRSHLVRLRTSLIISLQNIVSRNNGIKLKVGDVKALKTDRVAPLLADNDDLALAGKVSKETIDFLTHKIKAIEHVLEGKVKLREPYDRLLGVPGIGKILALTIMLETGPISRFDKVGNFVSYCRKVSSKWVSNDKSKGKGNKKSGNKYLAWAFSEAAEFARRLHDESRAYYNRKMQRTNFMTAHNALAHKLARAAYYIMRDHVPFLQEKLFTS

SEQ ID NO: 295163 - protein, 409 aa, unidentified
MEVIFTYCAGLDVHKKTVMACRVTPDPTGQQVDGLMELQEFGTMTVDLLALSDWLAAAGITHVAMESTGEYWKPLYNILEGDFTVFLVNAAHVKQVPGRKTDKADARWLAKLMRYGLLQASFIPPIEQRDLRDLTRYRTKLVQERSREVNRVQGVLERANIKLAAVATDIMGVSARAILAALVEGRADPATMAELAKRRMRSKIPLLEQALTGLVRDHHRQLLAMQLAHIDFLDEQIEALSAEIMRRLAALRGDEPPSVPPGPTGEAGNGATPESASVPMTFARAVTLLDTIPGVNQRGGELLVAEWGIDMGRFGTAARLAAWSGVAPGNDESAGKQRSGKTRQGNQALRTGLTRGPHEGNLPVRLVSASGCPSGEETGDHRGGPLDRGQCFPYALPPRTLSGVRGQLL

SEQ ID NO: 295164 - protein, 347 aa, unidentified
MALTIVETPITGGVDTHADVHVAAALDPVGGLPGVAEFPVTPAGYARLLSWLGGFGTVCLAGIEGTGSYGAGLARHLATAGIRVVEAGRSGRQDRRRPGKSDPLDAVSAARAAQSGRARGAPKGRDGSVEAIRALMADGRSARAERTQTSGQARSLIVTGPEDLRTRFARRTVAALVAETASLRPRPGSTVGYATRIALRELGRRAQFPGGQLERLDELIVPLVTARAPGLLALYGVGPDTAALLLIAAGDHPARLRSEAARAHLCAAAPIPASPGKRTRHRHGPGGDRQANHALWRIVITRMSSHPPTRAYVKRRTAEGLPETEIIRCLKRYVAREIYPRLRAAAD

SEQ ID NO: 295165 - protein, 434 aa, unidentified
MPKEVPIEQEIVAYVGLDWADQQHVICWQAADSAAVQSAVVQQRPEELQAWVAELRQRFPQGLVAIALEQSRGAVIAALMHFDFLRLYPINPKSLARYREAFASSGAKDDPDDAALLLELLVKHRDRLTPWVPDDALSRELALRVEHRRQLVNLQTKLIQQLRSHLKVYFPQALDWVGELDSLQACDFLQRWPTLAAVQKARPSQLEKFYHQHHCRRPQLIQQRLEQIRQAQPLTQDSAIVPAYSQMVLALVAQLRVLIPTLQQWQQQISQLFAQHPDAALFASFPTAGPVFAPRLQAAFGSRRDRFGSAAEVLQFSGVAPVTKRSGKSRQVQRRWARPKFLHQSFVEFTGLSIPHCCWARALYQQLRARGHRHWAAIRVVAYKWIRILFRCWQDRVPYDEQKYLKSLERRNPTLWAAIQQLPAQPSRKEVGRL

SEQ ID NO: 295166 - protein, 403 aa, unidentified
MNNVAGIDVSKGKSMVSVLRPFGEVVAKPFSIGHTGSELKELADYLKSLDGETRVVMEHTGRYYEPVARFLHDEGVFVSAVNPKLIKDYGNNTLRKVKTDKADSRKIARYGIDNWAELRQHTPMDTIRMQLKTLNRQQSLYTKTKTMMKNNLIALLDQTYPGVNALFDSPVREDGSQKWVDFATTFWHVDCVRNMSLTAFAERYRKWCKRHGYNFSQSKAVEVHAGAQDLIAMLPRDALTKTMVRQAIDALNAISASMERLKAEMQALAAQLPEYPVVMAMHGVGDSLGPQLMAELGDVTRFTHRNAITAFAGVDPGADQSGTHEAKSTRVSKSGAPELRRALFLVMDCLLKTQPQDDPVYRFMDKKRAEGKPYLVYMTAGANKFLRIYYGRVKEYLASLEGN

SEQ ID NO: 295167 - protein, 496 aa, unidentified
MSAFLRRSGQNPHRWATKGMKSKKELLAKKKHIKRKSAKAKHNRVLGIHNPHAAGADIGATEIYIAVPPDRLEMNVRCFGTFTQDLRAIVQWLREYKVTSVAMESTGVYWIPLYELLEQEGFEIYLVNARHVKNVPGRKSDVQDCQWLQYLHSVGLLRGSYRPAQDICAMRAISRYRDNLLHFGAQHLQHMQAALDQMNLRLHHVIADLSGLTGMAIIEAILAGERDPRQLAKLRDPRIKASQETIAKALEGNWRVEHLFVLGQALQSWKQVQQQLGQCDQKLGELSSQLEGKIDLANSPLPPSAKYCGREPRSKNQPNGPWREELYRHFGVDLTEVPGLSLGVVLTLFVELGADLSAFPTPRHFAAWMGLCPDNAITGGKVIRRGTRRNRQRIRLALRLAATSLHHNKTQLGECFRRLRARLGAPKAITAMAHKLARIIWHLVTHQVGYDESIFAEREEQLLRRKQRQLRNLAHSLGFTLVPNPRPAATSNAEVS

SEQ ID NO: 295168 - protein, 411 aa, unidentified
MTKEDFIYVGIDLHKETHTAVMIDCYNQKLGEITFANRPADFPKLVTKVKKCNTDGKEVVYGLENAYGYGRALAVWLIDKGYVVKDVNTAISHRQAKHRGAMYRKSDSDDAEAIALATLNMLDKLPDACPNDAYWSLGQLVHRRDNIMKQRTRLVNQLHEQLHIAYPSYKQFFNDISRPTALYFWEHYPSRKYLKGKSVEDLRAELVPVSHNKCSTKTCEKILDAVASDKVKNNAYQDARDMVTLSIVSDLQHYDSQLAEVDKMLEQMYEMLGCTLTTIPGVNVITAVKILAEIGDIKRFSNANKLAQFAGIAPLHLSSSGKGKDVATKQGNRRLQATIYFLAIQMVQISSKGTPRHPAFRAYYEKRKSEGKTSQQALICISRRLISIIYGMLKNGTEYRMPVAENTGENM

SEQ ID NO: 295169 - protein, 287 aa, unidentified
MYIGIDVHKENWHIAAQVDGEEVFHGSMASEYHSLRRFLDRFKECRIKVTYEAGPFGFWLHDKLMVDGIETIVVPPSLIPMESGNRVKTDKRDSRKLARLLESNMLKKVYVLSEEDRADRELVRTRRQLLEHRGDVRRQIKSKLLFYGIKSPFSNKRESWPKRYVEWLRELTFEHAVLKVPFESLIDLYEYLSSQVMKISKQVVALSRSDKYSHKIKLLRSVLGIGILIGMELLVELADMERFKTAEEIASYMGLPPSEYSSGQHVRQRRITRCGNKRARTCLVESS

SEQ ID NO: 295170 - protein, 315 aa, unidentified
MQTPVDIGADISKDYVMVSCATGSFPSLRLANRRAALSAWLKRLPAGTRIGMEATGTYHELLATLAHRLGLVVYVLNAKHVHHYAQATAQRGKTDRVDAELIARYVAKEHSHLHIWHPASPAQRQLQRLMRRRGKLTRARAALRSTLQGVPSLRTDVRVLLKQFDALIAKLDTQARALVKASVEREQAFQRLDAIPSVGSAVGIGLLAALERWSLPRADSFVAFIGLDPRPDDSGKRSGRRRLSKDGDPELRRLLHTAAMSASRTRVWAPVYQRALARGLSRIQALVILARHIARTAWSVYTHKTQFDPARVHSS

SEQ ID NO: 295171 - protein, 384 aa, unidentified
MNKHNILFIGLDTHKVSTEVAYIEDDRGALPIHHGKIPTTKTAIKKLVRHFESKYPKATLHFAYEAGPCGYWIYRFITSLGHCCYVIAPSLIPKKPGDKVKTDKRDALRLAKLLKTEELTPIYVPEPEDESIRDLSRARETAMEDLNDARFQLKAMLLRNNINYKGTANWSKKHLRWLSELILPHPAQQIVLQEYLQTVSERIKRLARLVNELQHQVQNWRYYPVVKALQAMRGVRLLVAAGIIAELGDLTRFDHPRKLMSYLGLVPGEHSSGDNRRLGPITKCGNTRARRLLIEGAHSYRYAANISTELQKRQESLPKEIIDIAWKAQLRLCRRYQQLMHKGKHYNLVITAIAREMIAYIWAIAREVVLSQVNPKLRISRVPA

SEQ ID NO: 295172 - protein, 429 aa, unidentified
MTSISSTTSPAVRVAIDIAKLTHQVLLELPSGKRRVMRVANTKTEIDRFVETLRALELPCEIAFEPTGDYHRPLAYVLGQVGLHLCLVSSIAVARTREALYNAWDKNDPKDAQVILHLLKNGTTQRYLDPVVTGHQDLQEMANTYQQVSLRKVRLQHSLITHHLPLYFPEAERYLHSSRAEWFTELLLFTPCPAAVRQYTKAAFVAAACEQIAGRKVDKARWLADFYETACHSVGLPVAATSETIRMFRVVLEEYRALCQLRKRLEAEITTQLAPQPDFVRLQTIPGVGPILAMTILAEARDLRRFGCVRQFLKYCGFDLCTEQSGQFRGTTHLSKRGNARLRYAFWMAGTVAIRMQQNSFRRKFEDYIRPDPKSADRRRKGYTAVAAKMARVAYAVVTTGTDYRRFPEATRPGGRIPSSGAVEAHATS

SEQ ID NO: 295173 - protein, 352 aa, unidentified
MVIIGIDTHTRTHTAGAIDEQGRALATLEVGADPRELERLVAWIGDFGGQRRVAVEGAKGFGLPLTRRLLARGEEVVDVPTHLTAVGRRSSRSRGKDDPSDAITIARIALREPGLPRLQESHLAADLKLLVDARDQLVAEGTRVRNRLHAFLLALAPGYRTETGALSNRGGLRTAQRLVRAGQAADPIRARLALAGIRRLKLIETEAGDLEAEIRAAVAATGANRLLAVCGVGPIVAAKILGETHDVGRFSSAAAFAAHAGVAPLPASSGTISRHRLNRGGNRQLNRALFTIAMVQARWDPQGSAYLARKRAEGKTPPEARRCLMRHLAAVVYRSMVADAATAQHDPQMGAA

SEQ ID NO: 295174 - protein, 356 aa, unidentified
MGEIKRTDFSNQDFHIGIDVHKKNWLITIRNNQMELRTFSMNPSPEELHQHMQRYYPGGRYISAYEAGFCGFWIHRKLQELGFKSIVIHAADIPSTNKERSTKTDKVDSRKIARELEKKSLNSIYVPNEFHQQLRSLCRLRHRAVQSQTRVKNRIKSHLYFYGTVIPSHQEMPHWSGRFINWLKSQKFSYYSAKDYLLFCIEELTQHRHRIAEIIRALRRHIKEQGQSEQIDLLRSVPGVGPIIATSFYTEVMDINRFRTFDHLASYVGLVPSVHSSGDKSIEQGLTKRRNSYLRYLIVEAAWVAIRKDPALLLAFNQLTRRMKKQDAIIRIAKKLLRRIHHVWKNQTPYVTAVVK

SEQ ID NO: 295175 - protein, 425 aa, unidentified
MNVDSIDEPRFAAYVAIDWGDSKHVWSLQPADSDRRERGEIEHSPEAVAAWAAMLSARFGGQPVALAVEQSRGPLVFMLGKYEQLHVYPIHPRAAAQFRAALFPSGAKDDPSDAELLLDLLAHHRARLRRLKPDTEQTRLVQHLVEGRRKLVNERTRQTNRLTAQLKLYFPQMLDWFDAVDSPLVGALLKRWPTLEALQKARPDTVRSFFTAHNSRSQELIERRLDQIRSAIPAVRDKALIEAAQAMTKVLVELIATLREGIASFGCQIAQAVAAHPDFAIFNSFPGAGPALAPRLLAAFGSQRERYQSAADLQTFSGIAPVTERSGKSQWVHVRWACPRFLRQTFHEWAAHSIGFCDWARAYYQQQRGRGKDHHATVRALAFKWIRIAFRCWKDALPYDDARYMQSLRRRGSPLTAALAKPQLP

SEQ ID NO: 295176 - protein, 358 aa, unidentified
MRIIGCDLHARQQTLAMLDSTTGEIVNLTLTHEGDNVREFYSNLPRPVRVGIEATGSMQWFLNLMEELGIECQVGHPANIRAAEPRKQKHDRRDADLILKLLVEKRFPSIWLPSKELLDLRGLLLHRHQWVRMRTRVQNALQAIALANGLRRGPSLWSHAGQDKLASLSLAPHTAHRRSELQALYAKFDMEIEKLNQRVEEQAWERPTALRLMTHPGVGPITALATDVFLGDPTRFVDGKALASYVGIIPREYSSGGRQRLGGLTKQGNPLLRFLWCEAAIHAVRKDPDLQRFYLRKLFQKGLGKARVAAARKLGIRLWILLRDQIDYNEFCRRGQMRQKNGGTCAGMPARVIAQNSR

SEQ ID NO: 295177 - protein, 432 aa, unidentified
MLPARDGEALDRWLPPGGGDGRRGRPIEAWGKGSETANGRPRVLARRRPSGHIEQKVTLVIAGIDTHKDTLAVAVVDDAGRLIAGGDIPNTELGFVQLVDMFDTHHVLRVGIEGSGNFGRAVAVHLVLRWLPDWPVAVVEVPTLMTSRERRGQLGKGKTDPVDALAIARITARERQLPPVRLTVGPAADLRALLDYREDLVRERGGLVNRAHSELGGLRPGYQQQIPILTTRARVRAALELISHDTSVRATLCRRRLERVITIDTETAELKRQITGLVAAADTTLTDLYGVGPLIAARFIAEVVDIHRYPNRNAFAAANGTAPLPASSGRTVRHRFNPGGNRQLNRSLYTIAITQIRGDTEGRVYYERKRAAGKTKREALRCLKRRLSDIVFTTMRHDAANAAARTNQPPPPAWPILAKVGAVDANEARLTA

SEQ ID NO: 295178 - protein, 459 aa, unidentified
MKLIPNDSYEVEEIDGDEAEQILHCAAAVDVAKASGMVCVRRPHPSIEGRRTSRVWEVDSTTSSILALGADLVALGVERVVLESTSDYWRPFFYLLEASGLTVWLVNARDVKQVTGRPKTDKLDAVWLAKLNERGMLRPSFVPPREIRALRDYTRLRTELVEERSRHKQRLEKLLEDALIKLSSVASDLLGVSAREMIEALIAGERDPAVLADLARGKLNAKRAALIEALNGRFDDHHADLAQLLLDQIDACTDKVDRLTARIEQLVGALGDPSPPDGDRTVPANDVPVEAGPGARQLTTVERLDEIPGIAERAAQIIIAEIGLDMSRFPTPEHLVSWAKLSPQTMQSGPTTKVGKTGKGNRYLKGVLGEVATAAAKTDTFLGARYRRLVRRRGKQRALVAVARSILVIVWHLLNDPDARYVDLGADYYTRRLDPDRKTRDLVRQLQALGHTVELTPAA

SEQ ID NO: 295179 - protein, 344 aa, unidentified
MVTIGIDAHKRSHTVVAVDERGRRLAETTTGSCSDDHLRLVRWAWKLDEKRLWAVEDCRHLSRRLERDLLAAGERVVRVPPKLMANVRAGARSFGKSDPIDALAVARAALREPDLPVAKLDGAEREVRLLVDHRADLVGERTRMISRLRWHLHELDPGSEPALRTLTHLRNLDRLAQRLAGLEGPVARIARELVARCRALTSEINQLEEEISTLVTQLAPALLAICGCGALTAAKILGETAGIERFKSPDAYARHNGTAPLPVWSSNRARHRLSRNGNRQLNAALHRIALTQARLHPDAQALIARRRANGDGGLEALRVLKRRLSDVVYRALRADTKIELRLVA

SEQ ID NO: 295180 - protein, 369 aa, unidentified
MPQKKTQRKVVIKQNVGVDISKDDFKVSFYHLDSTGQKFIKGSRTFKNTLAGFTSFLKWIEKKRIAELAVRITVEATGVYHENLTHFLDDNDYHVSVILANQSKSYAKSLNLKTKTDKVDAKMLGQMGIERDLLKWQPASAKMFVLKQLTRDRVTLLNEKTALSNKLHALNNSFNPNKKVIKRLKERLKLTKKQIKEVEKEIKQTIQTDEVLKQKVDNICKVKGLGIITVATVIAETNGFTLFTSRGQLISYAGYDVVEKESGTSVKGQARISKKGNKHIRRALHFPAITSVKYEPMFNQLFKRVLLSSGIKMKGYVAVQRKLLTLIYTLYKTDIPYDPNYLNKKIEREKDKIQNCRQDTNPAYSGCLL

SEQ ID NO: 295181 - protein, 372 aa, unidentified
MASIIYVGMDVHTTNFTFCCYTADSDRGFAVAQTEPDYRQVIKYMERVQKQRGEECKFVCGYEAGCLGYSLYHQLTRCGVDCVILAPSTMHQEKGKRIKTDRRDAENIARCLAFSLYSPVYVSTTEDDAVKEYIRMRDDIKADLKRVKQQIIAFTTRHGFAFDGKSYWTQKHLKWLETLVFEHPLYKETLQEYLILYYMLDEKVAVYDTRIEEMSHLEHYEENVQKLCCFRGVAAHTALSLLVEVGDFQRFRSAKHFAAYLGRVPGEHSSSDKQIRTSITKAGNTHLRRLLVEAAQSYNRGAIGKKSAALKARQGGNPAEVIAYADKANERMQRKYYRIAFKSRHNIAKTAIARELACFVWGMMTGNISNAA

SEQ ID NO: 295182 - protein, 312 aa, unidentified
MAQMVKTAGIDVSKLWLDVSIWPTREEIRVSNDDAGLTLLIGWLGEHEVARIGLEASGGYERQALDTLQAAGFEVARLNPLRVRRFAQAKGRLAKNDRVDARTVAQFTAVMVEEVPPQRRRDLDELTELLTYRRQLKRWCTDCTNQLEHLRDSVLRKAVTRQRVNFERDLAKIDAKLADLIAEHDDWAALARRLRTVPGVGPVVSASLVGLLPELGTLSRRGIASLVGLAPYDDDSGKRRGERHIKGGRKTVRDALYMAALSATKHNPRIAPFAERLAGKEAKVILTACMRKLLVMLNAMVRDGTDWRAEAA

SEQ ID NO: 295183 - protein, 342 aa, unidentified
MELKTIGIDLAKAVMQVHGVDERGKVACKKQLRRDQMLAFFANLKPCLVGMEACASAHYWARKLEAMGHTVKLMAPQFVKPYVKTNKNDAADAEAICEAVSRPNMRFVPGKNGEQQAVLSLHRARQGFVKARTAQANQIRGLLAEYGIVIPQGIRNIPKRLPVIMDDGESDLPGVFRQLLQRLGDHLKELDRQVGELELQIQLWHRECAASRTLAGIPGIGPITASALVATIGNAKAFDNGRQLAAWLGLVPRQHSSGGKSTLLGISKRGDSYLRTLLVHGARAMVRIAERKASAGNGWIGRLVGRRNPNIAAVALANKNARIVWALLAHDRQYDAEFRAAQ

SEQ ID NO: 295184 - protein, 428 aa, unidentified
MSGRDYNRQAFKRQRISKRTLIVGVDVGKAFNAVGFMNKDGNVLGSCAKLYNSREGFEKFVEMTEGLKARHRFRDVLIGMEPTGHYWRKLAYFAKEHGYEVRFVRTTALKHHRELDESSSAKSDRRDAITIANITREGKYIDTVIEDGVLRQLRTLSKARERLLRYSVSAKNSLHAALDDYFPELHEIFWSMGSRSLWVILEQCPFPQDVALMRASTLQEMIARSSRKKAGSAQKAKALCAAAQKSIGVKEIGSADRYRLRMCLEEVKRTVLTLRDMDRQLKSMVKDIPSAIYLMSIPGIGSLSAAVFLGELGDPAHFHNARQIVKYAGYDPQESDSGSWVGRRFISKKGRWLLREYLFFMSMRVVVLSKYFQEYYLRKLETKNRVGQQPRRKEILCAVAIKLIKVIFALLRDKRTFEDVAPVTLAAA

SEQ ID NO: 295185 - protein, 360 aa, unidentified
MNATTVAVDLAKSVFQLAVADEHWRIVQTHRLTRTQFERWFVNRDIALVIMESCGSAHHWARWLNSLGIEVRLLPAQYVRAYVKRNKTDAADAAALLEAARASDMRPVRIKSVEQQALQGLHRIRSLWMGTRTSRINALRGFLREFGIAIPVGARTGLEVISRVLADPGTAVPALSRGTMALLVDEIRLLEARIGQLERELSDLARLSPACSTLLSIPGIGLLTATAMVAATSGDVSHFKDARHFASWFGLTPKEYSSGGSHYLGHISKRGDRYLRMLLTHGARSVLRAAAVAHGKGREVHGVRSWALEVQGRSNHNKAACALANKLARICYATLRDKERFDEAQSLNKKLGHQAFAMPA

SEQ ID NO: 295186 - protein, 439 aa, unidentified
MTTSSLPVLDPTAAAIDVGSEQLHVSVAGGRPKVFGTTTGQLHELRDWLKTQGVRSVAMEVTGIYWLCPYEVLEQAGLQVVVVNGKYVKNLPGRKTDMSDCQWQATLHAHGLLKPGFVPPAHIRRLQDYLRVRTDHITMAGSHEQHMQKALDRMNLKIHDVISDLTGLSGLKMVDAIVKGERNPVALLALCDPQVQKNKAGQLRAALEGTWKEEHLFALRQAYELWQFYQQKIAECDQAIAKVLQEISGPEDPAKPAPPATKRGGVNAPQIGGLHSLLWRLCGHKDLTTLPGVADYVLLQLLAEVGTDLGKNWQTEKHFTAWLGLAPGSRQSGKRRGNQKRGRNRAGRLFCVIARSVGRSVDKALGGFYRRLKGRRGGLVANLALARKLAELFWRLMVHGFSYVEQGLNKYEEKVAQTEQRLLQKLAGKYNMVLQPKAA

SEQ ID NO: 295187 - protein, 320 aa, unidentified
MATWIGIDISKDTADIGWFEESVKRHFKVSNDPEGFRKTIDSVPEDSRFVMEATGTYYLNFALFLAENGKHVSVVNPLRIKNYMRADLQRYKDDKSDSLSIAKFGSEKKPEPWTPVSEDAVRMQQLAGLIDLYGKQIVQQSNQIHAVTRVKYASKDVLGLLKRSMKQLQAGKTEAEQEFIALVRKSHGRELDIIKSIPGIGESTAARLITSVGDFGKFKSSRQVISYLGLSPTRKQSGTSLNSRGPISRMGGCRMRSFLYLCGISAMKYNGDCRAMWKRMKAAGKPGKVIIVAIANKLVRQAFAMVRSNSTYIKNYAICP

SEQ ID NO: 295188 - protein, 322 aa, unidentified
MQVGERGFAALLAWARSLDRERVWALEDCRHVSGVLERFLIARGERVVRVSTRLMAGTRRASRERGKSDQIDATSVARAALAAGIPTLPTAALDGPELDLRLLVDHRERLVRMRTALNNTLQWNLHDLWPELKLPGSSLFYAKWSARIARRLARAEQTMRVRIARDQLRRLRELTQTINALETEIGELVGAIAPQLLDQPGVGALTAAKLVGEVAGAGRFASDAKLARAAGIAPIPASSGRTQRHRLDRGGNRQINAAIHRIAITRARCDQRTKHYIERKKAEGKTTRDAIRCLKRHIIREIWQLLRAPTQTRITPSLLLTS

SEQ ID NO: 295189 - protein, 391 aa, unidentified
MVCVGIDVAKDKHDCCILDSDGTIRADCITIPNNMDGFKQLLQTIRDCTKRSDKIKVGLEATGHYSYNILGFLLDNDLAVYVMNPLHTNLYRKSLSLRKTKTDRVDARTIATMLLSDVDLKSYTDTAYHNEELKSLTRYRFDKVRERAKLKQSVSRLVTILFPELEKLVPSLHIASVYALLSEYPGAKQISEIHLTKLTNLLVTASKGRYGKDKAIQIRDAARTSIGSVMPAKSLELKHTIKLIQELTSEIDEIEVSIQKIMDELNPPILSIPGVGIQSAAMILAEIGDFSNFESPDKVLAYAGCSPSTYQSGKLTNCYAHMEKRGSRYLRYALYNATKYVCYWNPVFAEYLAKKRAEGKHYNVALSHATKKLVRLIYALQKSGKAYLTAA

SEQ ID NO: 295190 - protein, 414 aa, unidentified
MKEGFILNLTLFVGIDVSKASNHVYAMNLNRDKLLSTNIPNTQDGAAIIESKLCDLLVKHSLSKIVVVLESTGVYSAHLATYLSNSKFLSIYDSKVFIINPKISKNYRRSFSDMDKTDPKDAFVLADIARVGRTDGLTPFKGAQRLALERLTRHRLHIAELLSTEKAYALNNVFLKFSEFESLFADNFGKTAVDLLLEYHTTDDIIQSSLEDLTAFLIKSSRNRFADSEAIAAKIKAAARASYRLDKLSYDPINLSLASSINVISCYETEIKEIDKAIVRQVAGFNQNHYDVLRSIPGIGKVFAAGILAEIADINQFESDDALAKYAGITWRKTQSGKFEADDTQMTKTGNKYLRYFLIQAANMARFHIPEYRDYYQKKFDEVTIHQHKRALALTARKLIRLIYGLLSTNRLYQ

SEQ ID NO: 295191 - protein, 340 aa, unidentified
MSIITVGIDLAKNVFAVHGVDDNGKPALVKPKVARDKLLELVANLPPCLIGMEACSGAHHWARQFRVYGHTVKLMAPKFVTPYRLSGKRGKTDAADAAAICEAVTRPHMRFVPVKEEHQQIILCLHRTRNGFVEERTAVYNRLRGLISEFGIVLPQKVINLRRQIGEHLEDLPGYANLCVGDLLAHADVLDERIAEYDRAIALAAREDARSKRLMELPGIGPTTASALLASIGGGHDFANGRQVAAWIGLTPGQYSSGGVARLGRITKAGDHYLRSLLVMGARAILSGLGEKQDRFSRWARSLVERRGYWRAVVAIAAKNARLAWAVLKFGEDFRLHVGT

SEQ ID NO: 295192 - protein, 448 aa, unidentified
MAPRQKLVCKNSAPFINLDTSGIDIGATELYVAVPPDRSNTPIRCFGTFTDDLLSLAQWLKTCGVRSVAMESTGVYWIPVFQILEAQGFEVCLVNARHVKNVPGRKTDVSDCQWLQYLHSVGLLRGSFRPPQQVCAVRSLGRHRDSLTQMASVHVQHMQKALTQMNLQLHHVVSDITGVTGLNILDAILAGERNPQTLAKLRNPRIRASKETVAKSLVGDFRPEHLFTLDQSLQAFRHYQGLIAACDQKMKTLLQDFDSQVNPIDNPLPPSTKGRLKTKEAPSATLRTELYRITGVDLTEIPGIQATTAHTLIAEIGTDMSKFPSAKHFASWLGLCPDNRVSGGKILSVKTRAVSNRAAGALRIAAQGLYRNESALGGFFRRMRAKQGAPKAITSTAHKLALVIYHMLKDKTSYDHTRFAHHEQQHKRRMEVRLKHQAKAMGFALVPA

SEQ ID NO: 295193 - protein, 349 aa, unidentified
MKGRERVVTITTLGVDLGKNSCSLAGLDATGAVVLRRRLSRGKLVEFLGRLPPCVVGMEACCGAHHLGRAFGAQGHEVRLMSPEYVQPYVKAQKNDDRDAEAIAEAATRPTMRFVALKSEVQLDQQTLHRAGSRLVNGRTRLINQLRAILLERGITVAKGRHVLGRALGALLGDEGSGLSPRMKMLLDEMRREWAELDARIAALDREFVETARVSAPARRLATIPGIGALNATALTAAVGEAEDFATGRDLAAWLGLVPRQMTTGGKARLGSITKRGNVYLRTLLIHGARAALPGLSRSETGLGAWLRGLLDRSHPNVVVVALAAKLARIAWAVLRSGADYKGHAGASA

SEQ ID NO: 295194 - protein, 370 aa, unidentified
MGWLPPSPDGIAMCQSVIVGDHVAERMAMKYTMIGVDLAKNVFQLHGASLTGEVRFRRKLSRGQFLRFMGSQPACIVVMEACGSAHHWAREMAALGHEVKLIAPQYVRPFVKRQKNDAADAEAIVIAARQPEMRFVEPKTPDQQARAILFRARERIVHQRTELVNALRAMLYEYGHVVPVGIGHIKRLEAALNDVANNLPDLVREEGLDLLAQIGEMTAKIDSKTQKLASLAKQTDVARRLQTMPGIGPMTAVAVEAFAPAMESFKSGRDFAAWLGLVPRQFSSGGKERLGKVSKAGQADIRRLLIIGAMARVNWASRKEASADPWMMRMLGRKPRMLVAIALANKMARMIWAMLMRQEDYRNPTLTTAA

SEQ ID NO: 295195 - protein, 348 aa, unidentified
MRFYDQSHEFTCGVDLHGRTMYVCVLDREGSVVFHRNLPCDGAVLVAALAPFRPGLVVGCECVFSWYWLADLCEEAGIDFVLGHALGMRLIHGTKTKSDRLDSEKIARLLRSGHFPLAHVYPRRLRATRDLLRRRLFFVRRRSELLAHLQMSQTQYNLERSPARLDRARNRTGLAERFPEGSCRTSVSADCSMIEVLDGLITSLERELVRTTKLDDLASFHRLRSVPGIGEILAMTILYEIPDFNRFDTVQQFASYSRLVAPRGESSGKLGGARGRKQGNVHLKWAFSEAAVCLLRANPRAQKLLQRLTRRFGRAKALSVLAHKIGRAVFYMQKKSLPFDAERFYREA

SEQ ID NO: 295196 - protein, 347 aa, unidentified
MDHIGMDTGMMSSHICEVTEAGDVVERQIRTERRRLQEVFGSRPKARILIEASTESEWIACCLEEVGHEVIVADPNYAPMYAQRSRRIKTDRRDARALAEACRLGAYRPAHRTSRTQRDVRAVVGIRELLVRTRTRWIVHIRTLLRRDGLRLAPGRAELFAARVNDVPLSPQVAAQIAPALALLAPLNAQIAELDSQVSNGARADERTRRLMTVPGVGPLTAVVFVATIDQVTRFRNAHQLESYLGLVPREWSSSETQRKGSITKAGNTRMRWLLVEAAWCILRRKKKPETALLRDWADRIALRRGSHVAAVALARRLAGILYAMWRDQTEYAANQIGPRSRPKQVV

SEQ ID NO: 295197 - protein, 347 aa, unidentified
MRKIAYLAMDVHARNIVMGDMNGAGNFLGNRNFGTCEDNIIDALKTVKAKKKLLVMEAGPLANWVARTAAPFVTEVFISDPRENALIYNSSVKKDKIDTQKLCRLLRLNEFKAVYRPENDQRAIFKAAVQHYNDLRDQLKAIKQKTKAMFRQWGVIDVFGDSVYSTSGRDKFLEQVQRRPILLQLKRLYALMDFTAQMKQDAKKSMKSLGRHYPEIKEFKKIPGIGNAGAHTFDAYIQTPHRFAKTNRLWKYCRIGVTDRSSDGKPLGFKRLDKAGIGELKAVSYRAFISAMKSDNEVKRFYLKSLQTTHNHTHARLNTQRKILAVMLGIWKKGQPYRAELFLDPCI

SEQ ID NO: 295198 - protein, 318 aa, unidentified
MSAAHGYWGIDVAKDTLELAEFESSEQGQVPNDSAGIAALLNRMTDAPPQLIVLEATGGYEQEVVWALGTAGWPVVVVNPRQVREFARATGQLAKTDRLDAKVLARFAATVRPEPRPLPDAAALELEAYLTRRRQLRDMLTMEQQRLALVRPREVRQSLRKHITYLQRELRSTESDLSQLIKSSPLWREADDLLQSVPGIGPTTAQTLIAFLPELGTLGRRAIAKLVGVAPLNQESGRFRGARRTWGGRAPVRRTLYMAALVGTRWNPVLREFYRRLTAAGKAKKVALTACMRKLLTILNVILKTKRPWQPTMASTSA

SEQ ID NO: 295199 - protein, 348 aa, unidentified
MALTIVETRAITGGVDTHADVHVAAALDPVGGLLGVREFPATAVGYGRLLSWLGGFGSVALVGIEGTGSYGAGLARHITAAGVRVVEVDRSDRQDRRRQGKSDPLDAVSAARAAQSGRARGASKGRDGAVEAIRALMVAKRSAAGDRTQTINQARALILTGPDDLRARFTGHTTAALVAGLASLRPRPGSTVGYATRIALRELGRRAEFLDAQLERLDELIGPLVAARAPGLLALFGIGPHTAALLLIAAGDHPERLRSEAAWAHLCGTAPIPASSGKTVRRRLNPGGDRQANHALWRIVFTRLGSDPATRAYAGRRTAEGKSKKEIIRCLKRYVAREVYPHLRTTAG

SEQ ID NO: 295200 - protein, 381 aa, unidentified
MTTLASRNTQDNTTAGTLFVAFELSEKTWKLGFTTGHGQQPRERTVTARHQEHVLNEIAQAKRRLGLPETAPVVSCYEAGREGFWLHRFLQAQGLTNYVVDSSAIEVNRRRRRAKSDGLDVRKLLSMLIRYEQGERQVWQVVKVPAVEAEDQRHLHRDLETLKQERASTTTRIKGLLSSQGLRVTSLTKLPEQLEALRLWDGSPVPPGLRRRVLRVYAHHTFLSEQIAAVEAERRAQLQASTDASLDKVRQLMLLKGIGINGAWLLVMEFFGWRAFKNRREVGGLAGFTPTPYQSGASAREQGISKSGNRHVRWMTTELAWSWLRFQPDSTLSIWFRERFGGGGKRLRRIGIVAVARKLLIALWRFLETGLIPEGAVLKEA

SEQ ID NO: 295201 - protein, 277 aa, unidentified
MSHDSTGAAGIDVAKDKLDLAIHGQTMRLTVANDAAGWQRLTRALRAARVGRVGMEASGGYERGVAARLRREGFAVRLLQPLQTKAFARLRLRRAKNDTVDAALIAACTALLDAPETTHDARLLACADQLTFIEQAEEDIARLKTRLEHVAEPRLRRFFLRDIARLTARVRAELKRLAASLSQSDALARRLELVQGVPGIGLRTALAIVVRLPELGRVSREEAAALAGLAPFDNDSGKHHGARRIAGGRARLRRSLYAAPCPPRSAGTPRSRPSMNA

SEQ ID NO: 295202 - protein, 428 aa, unidentified
MSNQEIIRRRRYCQIVKEITGSDQYLVVGIDVGKDKHHAFMGSATGKSLFRKLIFENNIAGFSRFLETAEAIKVQNGLSKVVYGLEPTGNYHKPLASHLIRCDCNVVLVSGVAVKRNRELLDGRWDKHDTKCAANIADLISRRRCLYYDSPSPGIIELRSLLSLRRRLKKEEHSLRMRIRNNLLAQYFPELDCFYNACESESLAIVKWCLNPDKIAGMDFESFFQMVTRTRRGTAQQLRLRKIHQQAIESVGCPMASAATFEAQLLVEKLKQVRRQLKETETAIKDVALEFAEYNYLLTIPGFGPYVSARVLASIGDPFRFENRKQLIKLAGYDLCADRSGKKSDKAIPVISKKGNGELRYALYQAAKVASARVDLFRTYITRLIRGRERERGIKTKMRVKLAAKMLIIAWTLMKEREVFDPAHLNIE

SEQ ID NO: 295203 - protein, 385 aa, unidentified
MGIETFIPRDYDVFGGLDVDKRSISVTFTDHQGSLKSMRMPYSVDHLVNHVRKHYGDKKVAFAYEAGPTGYGLYDGLVAQQYPCLIASPSMIPKAPGQRVKTNRLDSLGLAENLRGGQLKSIHVPTTLYRELRHLTQLRDALVSEVVAMKQRIKSLLLMEGLEFPPALPGSQWSFLVKAKLRKLPCSSVVRFKLDQLLDNLEFGEKQVLKTTREIRRFCQNDPELSQCIEYLKSVPGIGWIVASQMMARIGDWRQIKNIRELPAFLGLVPTESSTGERTTRGSITHSGDPRLRSKLIQASWSAIRQDGELLKFFRTVAKKHPRHLGPRVAIVAVAHKLCVRAAVVLMKQRPYEVREKVQSAPLTQEETVPRGTTRRQAVPGEQTS

SEQ ID NO: 295204 - protein, 322 aa, unidentified
MIIIGVDISKKKFHSCKFDGKKFGKVTETNNSKTSIKSFLKKNKEADRIIMEATGTYYLKLAITAKEFGFSVIVENPYKIKQYIEFQTGRANTDPIAAKLISKYGYENDLREFELIDEERITIKMLLTNIENLKKQKRSLNNINESFDQIPINYSKAIVKYNKKILKYLNGKIKDLKSKLEKYLTTKFSELYELATSIKGVGMYTTAVIIYYFKDFSNFENAKQAVAFSGLDPKIHQSGTSVNKRSHITKKGNKLIRKALYLASLSASTSNRQCINLKERLLKVGKKKRVIQVAIAHKLLRQLFGVIKSKKKYQSNYLKKWS

SEQ ID NO: 295205 - protein, 430 aa, unidentified
MKSNTQNAKIEAITEKTLVLGIDVGSETHYARAFDYRGVEYSKKPFKFSNTEAGFVTFKAWVLDIKEKHGKDKVIPGMEPTGHYWFNLGKFLQDNEMKPVLVNPHHVKKSKELDDNHPTKNDRKDPKVIAGLVREGRYMIPYLPDGVYADLRTASNIRFQLQAELTRIQNRISRWFNIYFPEYKTVYGKPDAKSGILILKEAPLPEDILTLGIDGVNQIWRDAKLRAVGKARAKTLIEAAEHSIGSKEGTMSARMEIRMLLEDYESRNIRLQEVMGLIEGLVNQIPMAEKLLEIKGVGIRTVSGFLAEVGDISRFNNPKELQKLAGLALVENSSGKHKGKTTISRRGRKRLRYLLFEVAMSLVAKNPEFRELHNYYTTRRLNPLKKMQSLMAIAAKLLRVFYAILTKGVGYDPKKMVNDIRRPAAYAQAA

SEQ ID NO: 295206 - protein, 347 aa, unidentified
MRFYTKQHQFYCGIDLHARTMYVCILNHDGEIVVHRNMPTSPEALLKTIAPYREQIVIAVECIFTWYWLADLCAQEGIPFVLGHALSMKAIHGGKAKNDKIDAQKIAVLLRGGMLPQAYVYPAKMRATRDLLRRRMHLMRKRAELLTHVQQTNCQYNLPEIGKKIAYKANRAGVAERFPDPAVQKSIEVDLALIDYYDQLLQDLELAIVTTAKQHDANTLYLLQTVPGIGKILSLVLLYEMHDIARFPRVQDFVSYCRLVKCAKESAGKRYGTSGTKIGNAYLKWAFSEAAVLFLRNNPAGQKYLARLEKKHGKGKALTVLAHKLARAVYYMLKRGVVFERDTFLQS

SEQ ID NO: 295207 - protein, 412 aa, unidentified
MQVIIERCAGLDVHQETVVACVLAGTPGQRPTKEIRTFRTMTRDLEALRDWLKAAGVTHVGMESTGVYWRPVYAVLEGHFELIVGNARHIRNVPGRKTDVKDSEWIADLVRHGLIAKSFVPPKPLREMRELLRYRRKLVESQAAERNRLLKLLETANIKLASVASDVFGVSGRAMLKALILGTASSEEMAALAKGRLRHKHADLVLALDGRIEDYHRFLLTLQLRRLDAAEQDITALDKRIDEKLEPYRTQHALLMQIPGVDWLVAAVLIAEIGIDMSQFLSVFHLAAWAGVCPGSYESAGKQKSGRARKGNVHLRTILVGAAISASRTKGSYLRDKFHRLKARRGALRAALAIAHKILVAAYHMLAKGVPYKDLGEAYLDEIGQTRTLANLKRRIERLGYHVILEPQAAAA

SEQ ID NO: 295208 - protein, 371 aa, unidentified
MDELIKIHVGLDVHKDSITVAQALPGRDDARLVGKVAHDIPKLLKVLAKLGSPEQLHLVYEAGPTGFGLQRALRGRGYACEVIAPSKTPRKAGNRIKTDTRDAIELARYSRSGELSAIWIPDPADEAIRDLVRAREDAVQARTQARHQLSAFLLRHSKVYAGKTKWCGVHDRWLAAVSFESSPSQTAFTEYWQAAKSVDARVERLSKALLGAIDGWRFEPVVGALATMRGIAAVTSIALVAEIGDFERFGSARQLMGYLGLVPSEQSSGDKTSRGSITKTGNGHARKLLTESAWNYRFAARISKDIQARQDGASEAVRAIAWKAQLRLTRRFAALNARGVQKNKVCVAVARELAGFVWAVGRQAQRESSLN

SEQ ID NO: 295209 - protein, 337 aa, unidentified
MTIIRIGLDTAKHVFQVHGVDENEQPVLRRQLRRGEIARFFGKLPVTRIGLEACGASHHWARVLRALGHAVVLMPPQYIKPYVKRGKNDAIDAAAICEAMSRPGMRFVAIKSAEQQAALMLLGARDLLIKQRTMLINAIRGHAAEFGVVAAKGPVKLSELLQRAHGAEAGVPALAREILKVMSRQLAALEAELKGLEARLMEWHKVDPVSQCLASQPGIGPIGAVSFSLKVTDPQGFRSGRHFAAWLGITPKEVSTGGRHRPGRISRQGDETLRKLLVLGATARIRFAKPGSASPWLLNLLARKPKKLAAVALANKMARILWAMMVSGETYRHPKEA

SEQ ID NO: 295210 - protein, 370 aa, unidentified
MKKDTLFVGLDTDKKHIDVAVAEPLPRGEVRYWGRTANTPASVERMVKKLGHGGRELVACYEAGPCGYGLYRQLTGKRGVRCLVVAPSMTPQRPGDRVKTNRRDALKLARLLRAEELTEVWVPDAAHEAMRDLVRARASVVSALTRCRQHISSFLLRQGIAYAGKPWTNKHRAWLGTLKFEHAAHRLLLAELLLALDQAQARRDRLTDHIRELVPTWPLAWLAEALQALRGYDLINAAVMVAELGDPRRFDKPRQLMGFVGLNVSEASSGETVRRGRLTKTGNKRARKALIEAAWTYTRPAATTSKPAAARLPAAVQQIADKARHRLSRRYRHLLRRGKLKQVAIAAVARESLGFIWAIAHAAAPLPAQS

SEQ ID NO: 295211 - protein, 362 aa, unidentified
MSESTTIIAFDQHAQSVMAAVLGPRDAEPALHALTSDLPTLGRFVRGVLEHGPVQCCYEAGPCGFALQRFLTAHDVPCEVIAPTLIPRRPGDRIKTDRRDARQLAVLYRAGALTPIHIPSEQEEAIRDLLRCREAMNADLLRARHRLKKFLLRHDRRYTHTKCAWGPRHTAWLRSLQWPLPALEQTFGAYLRAVEETATRLAILDETVRTYFACELFAEPVRRLRCFRGISDLGALTIAAELGDARRFPTASRVMGFVGLVPSEHSSGTRRGRGAITKTGNAHLRRILLEAAWHYRHPPQVGVKLRARQRGAAPEVLSRAWAAQHRLSRTYRRLTGRGRPPQIAVTAVARELVGFVWATLAS

SEQ ID NO: 295212 - protein, 474 aa, unidentified
MGKGSGNGTTRGDRKRNARRERLRGLLPRDGAVIGIDLAEDKQAGAVIDHDVRVLARKTVNVKAFRLGPVLDWAVAHARAKGFDRVAVACEPTGARWMQVQRLCRERGLPLVCIQPLVSHIAREQQDYTTHKTDESDCVMIARLAVELHCYVPEELDETWGYLRQLGRRREQLITAETASMHRIREFLSVAWPTVLETCAEPLKSLTWLTAVQLVTQQCGGQPARLAAMGWQAFTAAVRAAVPDWGGKRAWRPIAVRVFDALTDTEGVVAWSRRGLLRRVADELADLQRIRAQLRAAEADMAAALDELGLSRLGEIPALSAVGAAAILAETGDLHRYDSSSSVVKHAGMSPSDNASGAFLGDAHITRRGRPGLRLAVWRAVWPMLQFNPVMAAKYQALTQAADAAEQQATATAPQASAATAAARARRAKARVACAASLLRWLYSMVVHGTSWDAAAAARPTCLPAARSSQAEAA

SEQ ID NO: 295213 - protein, 358 aa, unidentified
MKIVGCDLHARQQSIAMLDSETGELTEKVIRHEGNAVREFYSSIKGRVMVGIEATGAMQWFLEVLEELGIEYRVGDPAKIRAAETRKQKHDRRDALLILDLLERDRFPAIWMPTSEQRDLRSLLRDRDQWVKMRARLQHTLQAMALNHALRKGPSLWSGRGQEALRKLPLPRYTSQRRNELMSLYAQLQRRMQELDKQVEAQAQQRSQARRLMTHPGVGPVTALATDVFLGDPSRFTTANQVASYIGMIPSEHSSGKRQRLGKMSKQGNSLLRYLWTEAGMHASRKDPELKRFYRRKLMQKGMGKARIAAARKLGIRLWIMMRDEIDYEEFCRRAEHCGRRGKAHAGMPDFNSGPALQ

SEQ ID NO: 295214 - protein, 485 aa, unidentified
MKTKQQEGAQEPKKANSSATQGKWHDMNRKQRREMMRKIQSEDLSLEVIHPDAAGIDIGNESHYVAVPPSRDSQPVRRFGCTTAELKAMAAWLKQCNIRTVAMQSTSVYWIAVYDILEQADLEVFLVNARDTKNLPGRKSDVQESQWLMKLHTYGLLRNSFRPSQEIRTMRTYWRQRNDLVRAAARHIHRIQKSLTQMNIQLANVLSDVSGLTGQTIIKAILGGERDPYKLAAFRHPRVKASEEQIARSLEGNWQQDLLFVLKQEQDGYEFCQRQMTECDQQLSHYLEQREDRSQAAPLPEEKRQQRLKKKKGNKPQFDLREGLFRMTGTDLTQIDCVDVMTATTIISEAGWDMSKWETEHHFVSWLRLCPDNRISGEKIIGKGRLPTNNRVTTALKIAASNLRVSDTYLGAQFRRLRTKLGAPIAIKAMAAKLARLVYRILRHGMKYVDQGAAFYDAQHRQLQIKHLKWKAAKLGFKVIEVPAA

SEQ ID NO: 295215 - protein, 399 aa, unidentified
MPSMRSNGDRIKRFRDLKATLRTQRDRLLVGIDVAKAEDVAQIRLAHTRILDKTVPIPNTTAGFGTFWRRLARHQRATGVTEIVVALEPTGTYHQALAQFLDAQGADVVLVDNHVAALHRRLLDRTWDKSDPKDAHNLCDLLEQGRVLFCALPDEPVASLRRLVRLLRRARVELGACKARWQNTLRPALGPAGEPLPAPVITALPAPLRAFLPTAERHAAPGRPRALSPGVAAEMADLATRCTAVRGRIATLEAALVATTTPLPATAWLRSIPGLGPTLTAIVLAELGDIAWFTKFSQLRKLAGLDIIRVQSGQWAGTARISRCGRPLLRWALYQAALGACRTPAWRVKRAALLTKRQGDPHAFFKTTVELAAKLLRVIWGVWRSGRPYTAGRAGVPGT

SEQ ID NO: 295216 - protein, 459 aa, unidentified
MLVNSVIGIDPDAKGFICCLVKNRESKVFKKAYSVNKSGLDTFIKWVKDEKDVIVAIEGTNGQSYPIEKTLKDKNIDFYSLKPAEVDHFRKAVMGQNKNNKNDAEATARYALALENQGKLDKHKRLWEPDIELRMLTRGHTEKTKEITREKSRLWKYLKLASADLYLTLSGNNPDSEVSVNLLTNKGILTLLAQKSDIYSWKSSSKDDIRKAMGDRNYQGYSKLIDEIIKISRNFTPVPTGVILTIKHSASTILLFQQQKKDIIKSLKQLTSDNKEITSLCKHKGIATLTAAKIIAEIIDIRRFYNNNKLASYAGLGRKEHSTGENKNMVPSYLFNHRLKNAFMTAAKNFVIFNPDSHLSGYYRNLIKHRGMSFTEAIKRVARALVRIFFRELSVLIEVEKETGESNMASGSDRSDKFHISNIKLSPDYNHNTENIEIINMMNKEKKNLLNISSWKEIL

SEQ ID NO: 295217 - protein, 410 aa, unidentified
MELLHRRCCGLDVHKETVVACLRLVSDSKVTTEVRTFRTTTVELLRLSEWLAANDCTHVAMEATGVYWKPVWHILDDGEFELVLANAAHVKNVPGRKTDVNDAMWLDELLAHGLIRASFVPDTQTQEMRNLLRTRKQLVREQSSHVLRVQKTLEDANIKLDSVLTDLMGKSGRAMIEALITGETNPAKLASLADRRVKASPEEFREALRGRVTKHHRFLLRLHLNQIDALGAATVTIDAQVEANLEPFRTAVDLITSIPGIKNLGAHVIVSEIGIDMSRFPSDAHLISWAGICPRNDESAGKRRSNRLRKGAPWLKTTLVQCAWAAVKKKNSYLQAQFYRIKARRGPKKAIMAVAASILTAIYHMLKDGTTYQDLGCNHFDRRSTEQQKNRLVKRLAELGYAVEITPIAA

SEQ ID NO: 295218 - protein, 330 aa, unidentified
MFVGMDVHRNRTQVCVLDRKGNEVRNRNVVNDRQSLRKELAGLRRGTPVAFEAAYGTGWIAELLGDLGFEPHLAHPSGCRAIADAKLKNDRVDARTLANLLRTGYLAEAWLAPKEVREQRLLLRERARLVRIRTTAKNRIRAQIADEGVGAPNHGLWTKQGAAWLDTVVLSPMHRWVVTDCQVLIDVLETRISLLEAEIRRQARPDKRIDALMAIPGIGILSAMTLVSEIGDITRFATARKLCAWAGIIPSMRNSDRSLHHGHITRAGPAAVRHVLGEAAQGAIRKEPYHSDFLATKRRRGTGIALIRVSRKLLTEAFYVLSALDEEHHN

SEQ ID NO: 295219 - protein, 455 aa, unidentified
MSRSKAAKLGDMPMVVPGAAAIDIGSTMHMAAVNPDADDRPVRAFNTFTGDLHDMARWFKACGVTSVAMESTGVYWIPAFEVLEEHGFHVILVNARYAKNVPGRKTDVNDASWLQRLHSYGLLRGSFRPKAGVATLRAYMRQRERLIEYSASHIQHMQKALMEMNVQLHHVVSDITGATGMRGIRAIADGERNPATLAQMRDVRCHVSTETICSALTGNWRDEHVFALCQSLALFDFYQLKIVECDRKLEIALRDLEGGDGYDIARLPKIRTRTKQVNAPDFEVRSARYRVLGVDLTQIHGIGPSLALKLVGECGTDLAAWPSSKHFTSWLCLAPGNKISGGKLLSSKTRRSSSRAAALLRLAATTIGRTDTALGAFYRRLSARAGKAKAVTATARKLAVLFYNALRHGMAYSDPGAAQYEERYRSRVIGNLQRRAKAFGFALQELPSEPETAVS

SEQ ID NO: 295220 - protein, 421 aa, unidentified
MKMVRNKVCGADIHKKFLVATILSREGSQISKRFGMKLDDILKFKEWVLENNCEQVAVESTGVYWVPIYTVLEDKIEVIVANPYQIKHTPGRKTDLRDSEWIAELCLKGMIEPSRIFLKEERELRTLTRARENLVNNISQLKNRIHQALESSCIKLSSVLSDIFGKSGRYILDCLLEGKNVEEILDGIKLKVIRKKEAELREAIKNSLDPAQILVIRINLELMEEFQIKIKTLDTEIMSRIERMRVDVEIAMSIPGIAFTSASSILAEIGNYRDFANGNKLAAWCGLVPSIYGSAEKIIMGSITKQGSKHVRRMLVQVAHAISRTKNSRLRSFFLRIKAKKGTKVAIVALARKVLCILHHLLVNREMYEESGNLKPKSLKFDRASSPIQITEQDMIDTLVKAGYIIKKIDKGGGNSTPLSR

SEQ ID NO: 295221 - protein, 311 aa, unidentified
MAQTVIGVDVAKDWIDVQPLGGKGERIAMEAAALRRFAEAAAREGAKVVFEATGGYDRPLVAALAAAGVTHARVNPAQSRQFAHAIGVGAKTDRVDARVLAEMGARLELPPALPLPPARRDLQALATRRRQLVGMRKQELTRAQQTEDAIAKASIARVIAFFDGEIAALEDRIAATVAADPALAEPARRLRTAPGVGPVIAVGLLVELPELGHLDRRAIAALVGLAPIADDTGYRRGRRAIGGGRPIPRSLLYIAALHASRREPGFAAFRARMQAKGLTVKQALVATARKLLTVLNAMLKSGTDFIPKVAA

SEQ ID NO: 295222 - protein, 355 aa, unidentified
MIIIGVDYHPEFQQIALLDKDTGEFQEKRLSHPEEAEQFYRALGAAGEKVRVGMEASGHARWFERLLAELQLELWIGDAAEIQSKRARKQKTDGQDAQLILKLMLKDEFRQIWVPSWENRDLRQLLWHRHRMVQTRTRIMNQLQAVAINEGLRCKKRLWRGGGRQQLESFRLAPWASRRRHDLLDLLDRLNPTIAGLNQAIEQEAEKRPEARRLMTHPGVGALTALAFVLIIGNAERFRCGKQVAAYLGLVPLEKSSGNRRRLGHITKQGNSLLRFLLVEAAQVTVRSLPEWRSQYFHLLMRRGRKTAKVAMARRLAIRLFWMWREGGDYEQQRSSVRTQDSPEQAMVCSRTPSN

SEQ ID NO: 295223 - protein, 430 aa, unidentified
MWYAGIDWADDHHDAVVIDEQGQRVASCRVSHTPEGLGQLMAFLQGTVASAATLQELACLIETTHGLLITALLDAGLAVYPVNPKTVDRRRKPSGAKTDAIDAYLLAKTGRSDLADLRRLAPDSPLVQELRALTRDQDGLIQSQTRLVNQLTACLKAYYPVALDLFTKLQQPLTLAFLQAYPTVEAAQQAAIEEFTQLLGQHHHPTPDVTAQAVWARLHEPQLQADAITIRTQSRLMLALVSQLGPLLEQIKQYDTEITRLFLHHPDSVIFGSLPRAGKRLAPRLLAGWGDDRERYLSAASVQALAGTSPVAYQSGNYVKAHRRYACVKPFRNTLYQFAWQTTFQEPWAATYYRRKRQEGKTHSMAVRALGNSWVRIIQAMWRHQRPLRGGNLPGCPADPRRPSRLKRHAWRCVTGAAVHGRGSPAHENP

SEQ ID NO: 295224 - protein, 401 aa, unidentified
MNAVGIDVSKGKSMVCVMRPFGEVVLEPFEVLHTAQSLNDLAGKLKALDGETRVVMEATGNYHKPVAFVLHDAGLFVSVVNPVLIHDYDNNSLRRVKTDRKDAVKIANYTLDKWTRLRQYLPEDDTRLALKNCYRQYQQAVAVRTMLKNNLISSLDLTFPDANKLFSSPAKSNGCEKWVDFIGDFWHSECVSSLSSDAFAKKYLKWCQKHGYNFTRSKSDTIYACAVNAASLPKSPTSKLLIQKQVAQLKAVSQSVAAFQQEMLRLSQQLPEFDTVMEMYGVGPSLGPQLMAEIGDVRRFSSKKSLIAFAGIEPQPNDSGKIVGNDSGISKVGSAVLRRTLFLIMTVILKTQPQDEPVFQFMNKKRSEGKPYKVYMMASANKFLRIYYARVKAVMDSKHSK

SEQ ID NO: 295225 - protein, 381 aa, unidentified
MSQTVAAPIPAAVDHERTLAIEVSNKSWVIAAQVPGLPHTKAKRTIDPEAEALLAAIAAYRARAAATGRSIERVIAVYEAGWSGFWLMRHGVEVYVVQPSSVPVDRRIRRAKSDGIDSELLLRTLLAWLRGEPRVCSMVPVPDEADEDARRCVRERSELISERIGLTNRIGAILATLGVSDYNPLLRNRGRRLAELRTALGEPLPANAHAKLKRLLARLELVLTQIAELERERDAVVETEASDGASKMIQQLTALRGIGVQSATVLVREAFVRRFANGKALGSYAGLASSPYSSGGIDREQGIGKAGNRRVRTVMVELAWLWTRYQPGAAQVCWFRERVASTGRRVRKIMVVALARKLLIALWRFVIDGVLPEGAVLKPAA

SEQ ID NO: 295226 - protein, 344 aa, unidentified
MEVAIGVDPSKSSLAVAAVDPLGRVVGTGEFSNDPRGHRALLRWARERGPDRVIGIECSLSFGATLSRLLLQSGEDVREVPTTLTHRQRRRRASQGKSDLVDSVAIARIVASGEVLPSAHRLEVLADLRALVEYRDQLVRARTQVANRTHADLVNVLPGYERRVPNLRAKAHRATARSLLKGHRSVRVELVRKRLDELSRLEGEIVAMDRRIQATVRSTGTSLTSIPGVGPFIAAKILGEVGDPSRVRSKPAFAVLSGTAPLSASSGQIQRHRLNRGGNRQLNWALHYIALVQCRIMPEAQAYMVRQREAGKSHKEAMRCLKRHLSNVVYRHLVADARRAELAA

SEQ ID NO: 295227 - protein, 363 aa, unidentified
MFTERTSVGLDVHARSVAAAAIDSVTGELVQTKLTPSYEHIKSWIQDLPGPVAVTYEAGPTGFGLHRALTAAGIRCAVAAPSKLQKPSGDRVKTDAKDAIHLARLLRLDEITPVAIPSVDQEAARDLVRAREDCRGDLMRARHRVSKLLLRHGIVYYGGQAWTGKHDLWLRHEALPQLTSKATRLAFDSDYETVLAVKVRRDRLDAAIGEMAADSEFTPLVHRLGCLRGVSTLTGFALAVEIGNWDRFTGNSIGSFVGLVPSEYSSGSSRVQGSITKAGNTHVRRLLVEAAWHHRARYVVGKTMRDRWELAPAAARARGDEGNRRLHQRWAKFVDRRKKNTIANVAIARELAGWCWSLAVMEE

SEQ ID NO: 295228 - protein, 346 aa, unidentified
MGKSITDLSSVTTVGLDLAKHVFQVHGVDVSARVAVAKAIRRNKLLEFFASLPPCLVGLEACGSAHHWARELVKLGHDARMMPPAYVKPYIRRQKNDASDAAAICEAVTRPSMRFVGVRSLKNQAALMRHKTREMLVSQRTQLLNGLRGHLTEVGVIAPQGPRYARELAGLIEACDERISVEVCEALAELVHQLHRLDEAIARLDRTIVKMAQKDETARRLMSIPGFGPITASAMAATIQDVSSFAGPREFAAFLGLTPRQNSSGGKPKLGRISKMGNRYLRKLLVVGAHAVLFHRKPHTDPLRMWAKKLIEKKPFKLVAVALANKMARIAFAILRGKTYYREIPA

SEQ ID NO: 295229 - protein, 354 aa, unidentified
MITIGVDAHKSMHVALAVDEAGREVGDWQGPNSESGWQHLAAWASALGESRQWGIEGAWSNGRGLAQHLVGGGEIVYEINARWTAMRRRSAHKPGKTDELDASAIALFVRQETQALPRVLLEEDDTAILELLTFQRESALAEASRLRNQIHALLLQGDPEDEEQLPARNCKAGLDALRNYAPAVDDTIRRERARAVRRLAERLTLAWDQEEQLAEEIRQAAKAGFTPLTKLCGINLLTAGRLAAILGPGNRFTSDAQLAAYAGVAPLEASSAGHTRHRLNRGGNRRLNHVLYFIVLTQAHHLPEAKAYLDRRVAEGKSRREAHRALKRFVIRAIWKLWQECQERRKTTICEVAA

SEQ ID NO: 295230 - protein, 363 aa, unidentified
MEEERRRYVGIDLGKREYTMAIIKKDGKMSIHQGKTSIQGRGALYRRLERNDKVALEAGNLAFIMAKEIQERVGCEVRVLNASKLPFIWAAPTKTDKEDSMKLAHLVEERRDEKLPIVPLPSKQELERRKLLAQYRREMNGRTKLINLLHALFVHQGHTTVVRSNLATDVKRIQAIELLGGQEREEAEWLLRHLALYEQRLQELKVKIHQEAKTDEDMKRLQRIAGVGPIVAFGYVAHVGDGSRFNKGAQVSNYLGFVPRLDYSGTIRRQGHITKHGNGYVRGLLVQAAWSLVRSRQGGALKERFVYATGFQGKSRKKTIVSIGRRLAEIMYSVLKNKIEYEPRPWSGPMDRTAMLAEKALCA

SEQ ID NO: 295231 - protein, 316 aa, unidentified
MSAPQLFVGVDVAKAQLDIALRPTGERWAVANDDAGIATLVARLQAVQPTLIVCEATGGYQRAVVAALAATGLPVAVVNPRQARDFAKATGQLAKTDALDARALAHFAEAVRPTPRPLPDAQADELRALLARRRQLVAMRTAEQNRLGNAPPRLQADIQAHITWLNTRLTALDDDLDTTLRASPVWREREELLRSVPGIGPVCARTLLLDLPELGTLSRQRLAALVGVAPLNRDSGTLRGSRAIWGGRAPVRATLYMSTLVAVRYNPVLKAFYDRLRAAGKAAKVALTACMRKLLTILNAMVKHHTPWQLQEVSVD

SEQ ID NO: 295232 - protein, 356 aa, unidentified
MEAIYHIGLDQHKKFSQVAVTDWNGAVKENSRVVNTVEAIKKFFQEIPRTAVITMEATGDWYWLYDLLEEIGFKVKLAHPRKVRLIAEAAVKTDKIDCVTLAQLERTNFLPESYVPSKEVRELRELMRHRCSLVGLKTSLKNKVHALLAKRGIRHEFLTDIFGKAGRAFLGDVELPAIYKLKLDTYLTLIDQLQLEAKALEKIIKVKAVKEDKYAQILLTVPGISYISALFLSAEIADIKRFKNYKKICSYAGLASSTDQSADKMRHGHIIKESNKYIRTVLVEAVHKAIKQDPHLAHKYNRIANRRGPNKAKIAIARKMLVSIYFMLTESKPYRIRDIEGNKSKNYMKLNLEKPA

SEQ ID NO: 295233 - protein, 429 aa, unidentified
MDNSASPALPIAAWVGLDGADQSHAVCLQAGGSSPLERCELPHTPEALQLWVAELRRRFPQGQVAIALEQSRGSLFYALMTYDFLVLYPIPPKALADYRKALYPSGSKDDPADAQLLLEFLRKHRERFRPWVADDVPTREIALLVEHRRQLVDDRTALTNRLQTLLKGYFPQALEWAGDLTAPLAGDFLRQFPRLEEVQKASRLKVRKVYRAHTRRTPEQLEQLLDQIRTARPLTTDPAVIESSALMALAQVDQLRALAAGLERLEEKLKQLFAAHPDHAIFTSFPGAGPALAPRLLAAWGTDRQRYAAAQDMECLSGAAPVTDQSGKKCWVHWRLACPKFLRQTFHEFAGQSILWSPWARAYYQQMRQRGLDHHPAVRSLAFKWIRIIYRCWKDHTLYDETRYQKALERRGSPLAAALRQLSTQEART

SEQ ID NO: 295234 - protein, 338 aa, unidentified
MKNYFIGIDFAKAKFDAVVLQRGNLNREGVHATFENSQKGYGLFLRWVGHYATKEADDILFCGEHTGVYSKQISDLLAKDGFCIWLESPLQIKRSQGIKRGKSDKQDAHDIAEYAARHEDKARPHKAPSPEMEALELYLSEYRMWKEMLHKLDCARKTHGKAGAGNPYFNSENTLDDNERKRIKERIKAIKEQMEKIAQKVPEMAVTYKILTSMKGIGPINAIALIIVTCNFTRFDYNARRLCSYYGVAPFGHTSGSSINGKPHVSHFADSYLKSIISEAALCAMNYCPAIIAYARRLKQKGKHPSIILNNCKNKMLHILVAMVKHKTKYGEALPLAV

SEQ ID NO: 295235 - protein, 416 aa, unidentified
MARSKSRIDRSVNDHEMIVGIDVAKHQHVARILFPDGSESQPFGFPNHRRGFETFLAWLFSQREKAHCDSLLVGLESTGHYWEPLAFFLEPIPEIRLVQVSPKHVKKTKEVYDNSPGKTDRKDAGVIAMLIQMGRFQRLVLPRGPYAELRGYARLRERKMVELGVQRNLLHSLVDWVFPEYGSLFPKLEGKTSLTILKHYTTPEQILHAGLQSLSQVLHQASHGRLSATFSQRLIEAASSTIGLQEGIEAAAFAIRNIVASVERIQEEIATIEKELTKVLAQIPYVPQLLSIPGVGKISLALLLGEAGDFRRYHKAEELIKLAGLNLFEISSGTHRGRRHISKRGRPLLRKCLFFAALRTVKTGGAFRAVYVRLTQVNRMQKTKALVAISRKLLMLLFALVRDDVAYQPREKLRAA

SEQ ID NO: 295236 - protein, 339 aa, unidentified
MERQYVGIDLHRRSSTIYRMSEDGDLLGCVRIPSQPFELAEAMAEAGEAPEVVLESTYGWYWAADLLQELGCNVHLAHALGNNWGNRRVKNDERDARDLAAMLRLGRLAEGWIAPPETRELRELVRYRFSLVGHRTSAKAQIHGVMAKNGVLPVVAEMWGPSGSAQLDSLELPFAYNLRIESLRDLLELYDREIAMLDRHIHHQLKNDPGYRAITKLPGVGKVIAAIFVAEIGDIGRFDSPKKLCSWAGLTPKHRESDTVVHRGAITKQGSPLVRWAAIEAVGNYRARGGEKLRADFLRLAERRGKYKARVAVARKLLTLVYYGLRDGEVRCLEAPKAA

SEQ ID NO: 295237 - protein, 368 aa, unidentified
MSKLAKVESFFKNVNLTCDDEVFVGVDVHKKSYHVALYLNDMPAIDFGMISEPQQLNKKLQPMAQSIKNISYETGPTGYELVRYLRENHLPADVVATSRIPRSSVGDDKTDKLDSIKLAQYAAKGLLRPVTIPTRKQEADRQLYRMRHRQALGFAKVKVQIKSFLLMHGIKEPDGLGNWTIAGVGVLRDMRLLDTLRLSLDELLSDYDYFGNRVKVLSKVLADNLDKGVLGHRMELLKTHPSVGPVVSCQFATELYHYKDFSSTRQLYKYLGLSPRISQSGERSSSGSINKAANGRLRNNLIQASWNWVRTDIEAKKCFWRICENCGGIKQKAIVAMARKMSGHLWAMLMNDQPYDENKAKCRHNNKR

SEQ ID NO: 295238 - protein, 378 aa, unidentified
MDVIYPRCAGLDVHAETIVACALWEEDGHIQKDIQTFSTFSKGLGDLLEWLEDHGVTHVAMESTGVYWKPVFAFLEGYVDLTLANPQRIKNVPGRKTDVSDAEWIAKLLRHGLIEKSFVPPAPIRELRDFTRLRKKWVGQLSSEKNRIQKVLESSNVKLGSVLSDLFGVSGRNILARLLEKGYVDKDELDQCLRGRLKKKKQAVYDSLLGTLTEHELRLLRLLWKHVEELEQLIEEVDQHIDRLLEPYREEVELLMTMPGVKKQTAAVIIAEMGTDMSVFETPERAASWTGLSPGNHESAGKRKSTRTTKGNPHLRSALCEAAWSAARSKTHPLSRKFWSLAARCGKKKALIATARRMLVIIFCMISRKESFRQPQLI

SEQ ID NO: 295239 - protein, 413 aa, unidentified
MDAIVERCAGLDVHLDTVVACVSYGKLDIKPKKEVKTFSTTTKGLLELLDFINQKECTHVAMESTGIYWKPVWNILESGAFDLIVANAKKIKNVPGRKTDVKDAEWIASLLRCGLIEKSFVPPERIRDLRDLTRLRKELLGEVNRNKNRIHKVLQDANIKISSVLSDVFGETGKSILNQIIGNQCITEEFIYSLYEGRGKSKLKSTPMEMYEALNGKIRGHHVILLGMHNSNIVFLEKQINELEKEIDILLQKERDSLELLETIPGISKISASSIIAEIGTSMDVFKTEKHISSWAGLCPKNNESAGKKKRSGIKSGNNWLRSMLCECAWSATKKKDSRFKNKYWSMVPRMGRKKALIAIANMMLRLIYHLLKTKSTYKELEIQYFIDKDKRREDRIIKELKSKGYLVEKDSL

SEQ ID NO: 295240 - protein, 359 aa, unidentified
MNAQQAVGWDIHRKFSQLSLLQRNEDGEIRVVKRMRLEHVDRPAMRAELAKLPPGTPVAMEGAFGWPWIADLLDELGLDPHLGHPPAIKVLAKNEAKADRVDADRLGRFWLRGIFPESYLSTPDVRQLRERLRFRQTLVRLRGGMKNRVQAILHRQGILHDFSDLFGKGGRAFLKTLALPEACRLALDGWLEQIDLLQEQLAQLEAWMTQHLEEDQITRLLKTIPGIGLILAHVIQAEIGQLTERFPSRRHLTSYAGLAPLADDSADRHGRRHIAAACNHTLRWALIEAAGIVLRSKNCPANLRHLHNRLTHGGRANKQQAKVAVARELCELVYVIWKKGEPYREPISPARQQRYQRPA

SEQ ID NO: 295241 - protein, 451 aa, unidentified
MALLDRTVRIVLTSLLNVWWNSQWLLYLTLKGVLTIKVVYQTCCGIDVHKSFLVATIIKTTSGVDPSYQKKRFSTFNNSILQFKNWLIENQCRDVCMESTGKYWVPVFNLLEDEMNVTIANPKWVKAVKGNKDDTKDSKWIGDLFRLGLVQGSYIPCKPIRILREFTRYRYKLTSCRTSEKNRYQNALTVCNVALDSVVSDIFGKSATSVIDYLIEQSGNSINHEEIASRLLRSLKKKSDSVIESIEGYQMTDPPKYRMRLVRAHLDYITSTINDIDTMLDSLIAPYENAVQLLCTIPGVDRNSAITVISEIGTDMTPFSNSKRLCCWAGLTPGNNESAGKKKSVRITRAGVYLKPALVQVAHAAVKSDKSPYYKQKYERIMKRRGKKRAIIAIDRMILTAIYQMLSTGEAWNPTDLYKTDMPEPLKEKQKEKAIKQAKKLLIREGILSES

SEQ ID NO: 295242 - protein, 322 aa, unidentified
MSVSVLGIDIAKQKFDAALLVDGKTKHKTCKNSAEGFETLMLWLEKQGIKKVHACMEATGSYGEDLAIYLHEAGHIVSIVNPARIKGFAQSELIRTKTDKIDAALIARFCLAMKPGAWIPPSPEIRSLRALVRRVDSLIDMRSQEKNRLSTAHESVISLIKEHIAYLDQEIEKIRRQIADLIEQNPHLKRRKELLDSIPGIGKATIPHILAELDDLEKFTHVRQMVAFIGLAPKETLSGSSIKGKPRLCKIGHARLRKALYMPALVSIQCNPVMIAFYNRLKEKGKNGKVIVCAIMRKLVHVIFGVLKSGKKYDPNYKPASA

SEQ ID NO: 295243 - protein, 471 aa, unidentified
MVKRNQSSIGIDLSDKTANFCAFDAEHGVVAEGRIALTVPKLAELWRLHGPVDVIVIEAGTPANWVRELFEGLGARVITADPRKLQAVTANVRKCDERDARMLARLGLADEELLSPTYVRAPEHRRAMALLKIRDHQVRVRTSVILEVRSQVKLVGGRMPPCDAAHFHEHQESLPDDLRDILDPLFDTLRALDLTIQTLDEKIKAEGLKFPIVQRLAKIDGIGPITALAFVALIGDPARFSRTRDVGAYLGLVPRRDQSGGSDPARRITKAGSSFLRRLLGQCAHNVCRAKGKDTKMRRWALGHLERLGKTGKRKVIIAVARRLAVLMLSLWKSGQDWIPLHRVPADNADDAPNPVVLDECALILAQQGVFKNAPSAATRTHACTGDTVPTKSANGSKGRSGASSASADAPTRASRTQRVADASSATRPATPSAPATPACAGDPASPAATARARPRNARGRDAATGVSAFT

SEQ ID NO: 295244 - protein, 428 aa, unidentified
MSYRIAGIDVHKKMIVVVIADVMSEGADYNCERRKFGATPAELQILAEWLTQQEVQEAVMESTAQYWKPVWGALERYWTPECKKRGGAGPMSGTLHLAQAKSNRGPKGRKNDFADAQRLVKRLAAQELVLSFVPPPEQRLWRTVTRKKYQLTRQVVQVKNQLEAFLEETHIKLSSLISDLLGVSGRRILKALAEGETDPARLANLADQRLRATTAQLRDALGACTDLNAVYRRLLQMTLEQLRLLEEQIEQLEKECAGLLRAQRDAVERLAEVPGLGVDSAQQIIAEVGADAANFESAKDFSSWVGVCPGEEETAGESRSSRSPKGNRNLRRLLNQAAQCAVRVKGSIFELVFRRLLPRLGWKAAIWAIAHRLGRLVWKLLHDGVRYIEKGPAVSEKSKKARTARMIKELRAIGYHVQILNPETGVAR

SEQ ID NO: 295245 - protein, 325 aa, unidentified
MQGWATSIVSRAEGLLGCYIGIDVSKATLDVASLPDGESWTVTNDDRGLAELTPRLVALAPALVVLEATGGFELLAALTLAKAGLPLAVVNPRQVRDFAKAMGQLAKTDALDAGILADFAQRVRPEPRPLPDEAAQLLESLLTRRRQLVDMLTAEKNRLGFARGPVKRDISRHIRWLEKRLADVDGDLQDAVASSPLYQAKADLLRSVPGVGQVTTLTLLATLPELGQLSRHQIAALVGVAPMNRDSGTMRGKRMVWGGRAPVRAVLYMAALAGIKHNPAIASFYARLRAAGKPFKVAATACMRKLLTILNAMVHHNRPWDPQLT

SEQ ID NO: 295246 - protein, 338 aa, unidentified
MYYTGIDLHKKTSFLTTIDKDGKIVFRANLGNKEEFILDYFTKLDDETRIVIESTASWYWLYDMLAGNGFNVVISNPLKTKAIGSAKIKNDKVDSHMLAQLLRTNLIATVHVSSLETRKLKELMKHRNRLVRDVTRNKNRINMILMKNNIQPPVSDLFGKKGIRFITEAPLPEYHREQVDTYFLIYNQLKEQVDALTKRIRAIVDDNPMAQLLMTIPGIGYITAMYIIAEIEDISRFPSYRNLASYAGLVPSLHASGEKERRGKITKQGSRYLRTALIEAAQAITRTKKTKLNVFFRKRIVRAGYQSAIVATAHKILQYVYYVLKNQIPYSEEYPVSA

SEQ ID NO: 295247 - protein, 368 aa, unidentified
MIVRIITYERSTLVNSEKYIGLDVHQATIVVAVMDSTGKLVMESILETKAATILQFFAGLRGTLSVTFEEGTWSAWLYDLLHSRVDKLVVCNPRKNALLKDGNKSDRIDARKLAELLRGNQLKPVYHGETGVRMLRELSRSYLTIVKDLSRVMNRLKAVYRSWAIPCAGRDVYYRRHRAQWLAKIREAGVRRRAERLYEQLDRLQHLRQQARRELLAESRKHTITAKLRQIPYLGPIRVALAVALIQTPHRFRTKRQLWAYSGLALETRTSAEYRFVEGQVRRSKKLLSIRGLNKDHNHDLKGLFKGAATMASVRPGPFQDFYQAALAKGIKPTMARLTLARKIAAITLTLWKKGENFDAEKLKSQAA

SEQ ID NO: 295248 - protein, 321 aa, unidentified
MTYVGIDVSKVTFVVAYSSVKTNKTRTFKNTVNGVHEFVQTISASEHNCVLEATGNYSALLVYLLSEAGITISLENPLKIKNFARVMLTVTKTDEIDARLIALYGEKMQPAPYKLRSDAILVLKQKRTVLRQLKKQLVATRNLKGSMEVLPFFDPKCKKTIEKTITFLEKQIKEMEEELASLAQGEYKKQMDLLTSIKGTGVTLAAALIVATGRFSYFDNAKQLTRYLGLSPTYQQSGTSVNVKGHINRNGDSSLRSQLYVAAFSSLRCNTECKACFDRLRSNGKPGKVVVIAVANKLVRQAFAVVTQGKPYVDGFKSEKP

SEQ ID NO: 295249 - protein, 386 aa, unidentified
MHHATTLAVPEETCIRGDCATLFVSLELSRSTWVATSLAPGSRKMSKHTLVGGDGRKLLDLLARLKTRAEQRIAAPVKVVTIHEVGLDGFWIHRLLEANRVESHVVDPASIAVPRRHRRAKTDAIDGETLLRTLMAWQRGEPRVCAMTVPPSPSEEDRRRVSRERATLLRERIQHTNRIRGLLFGQGITNYNPLHKNRRECLEELRTGDGRSLPAHLKAEVLREIDRLELVLRQISEVEAERDEMLRPAKASSPAALLMRLKGIGAEFAAVLYLEGLFRHFQNRRQLAAYAGLAPSSWKSGSIDHEQGISKAGNPRLRTTMVELAWMWVRYQPDSALSGWFRQRVGSERGRTRRISIVALARKLLIALSRYVTHGEIPAGAVVKAV

SEQ ID NO: 295250 - protein, 338 aa, unidentified
MQTYAGIDLHSSNNYIGVIDAKDKRLYSKRHDNNLKQVIKALQPFEKNLQGIAIESTYNWYWLVDGLKEHGFNVHLANPAAIQTYSGLKHTDDKWDSFWLAHMLRLGILPQGYIYPKQHRSIRDLLRRRLMFVRQRTSQILSLQSMITRNRGLNYTGAEIKRFRDEFIDVLFTDRHLNFTAKRNIETIRFLDRIVSEIEAEVNSQIKIKKEFRMLLTTPGVGNILGMTIMLEVGQINRFAKVGHYSSYCRCVESKKISNGKKKGANNKKNGNRYLAWAYVEAANHAMRTCPKAQKFFQRKMSKSKRVLAVKALANKLTKATYYIMRDRVAFDSTKLFG

SEQ ID NO: 295251 - protein, 479 aa, unidentified
MARHRKNRNEPVAAPAQPKGFRKVNPNAAGIDCGSDEHYVAVPDDRDPQPVRRFGAFTADLIALAAWLQACRVDTVAIESTGVYWIALYEILEARGIHVQVVDPRRLAQVPGRKTDVLDCQWIQQLHMFGLLAGAFRPANEIVVLRSYMRQREMLVAYAGQHIQHMQKALEQMNLKLTEVISDISGATGTRIIDAILAGERDPKKLAALRDQRCHNDEETIALALEGNWRAEHLFALKQAVQLFRYYHAKLGELDEQIESHLKTFADKSAGVPLPPRTVKRSPHANQPRFDVRQYVVQLSGVDLTTLDGFKSGYAALDLISEIGTDMSAWPTEKHFASWLGLCPGIKKTGGRRLSGRRPKKAVRAANILRLAAYPLLNAQCALGAFLRRLRAKLGAPKAITATAHKLARIVYRMLKYGKAYSDVGVEYYERRYRERLLKSLQRRAAEMGFDLTPLPTTELELVGTNMTVTATELPSPGQ

SEQ ID NO: 295252 - protein, 341 aa, unidentified
MKNTTTITIDLAKEVFQVAVFSKFGKQIINKAVSSAKLQQLVIQHPEASVYMEACGSAHYWGRRFTQLGYQVHLIPPHLVAKYRTGNKSDKNDAVTIYEASKNPAIYYVSMRTLEQQDLATQHKLRSGYIKQRTQLGNRIRGFAMEYGVKFPRGINRLRQLIPSALEDAENELTTVARACLNHLYQQLLSLNEIIEETTDTLVNHAKQIDACVRLEKIPGVGWLVGSMLYARLGNGNAFRRGRDASASLGLVPCHSGSGGKNRLGKISKRGDKYLRCLLVHGARSTLHRVHNKEDGLSQWVRNQLATKHANNTAVALANKIVRMAWSILRTGNDYKVPVAQ

SEQ ID NO: 295253 - protein, 338 aa, unidentified
MTIVMGLDQHRAQITAEWIDTSTGEVSRQRVAPAHRAGVRRFAERFRGRELEVALEATTGWRFVVEELGAVGARVHLAEPAETAARRGTKKRAKSDRADARHLRELLMVGRLPESWIPPAHLLDLRARVRLRHTLVDQRREWQQRMQAVLYHHGAPPRSWLLGAESRAWLTGLALPATAREQLTVALAMIDALDAQLAPLDHELRAYARRQAGCRALMRHYGIGPLTAVTILAELGDPRRFSSSREAVRYAGIDITVHQSDARRAPGRLSRQGPSALRWALFEAAQCARRPGSPDHHYYLQTAARLGGNRACLAVSRKLLKRSYHTLRELGEEALAPA

SEQ ID NO: 295254 - protein, 359 aa, unidentified
MQRKELSFSGQKIFIGIDVHKDSWRVAIAPEMGVVKGYSGHPSAKELLDFLKKHYPDGEYHAVYESGFSGFSTYYALQEVGIDCIVIHAADVPTTQYEETMKTDKVDAVKLVKSLKAGLLTGIYIHRRDDIDARAVVRLRKTIQKQLGGYKSRVKHLLHSNGVAFPERFSKPGTHWSKAFINWLKQEVSLLSSTRASLDLLIVQVESIRNTLLSATRKVRELSRNERYSHDYELLTSIPGIGISVAMSLLTEIGDFKRFRNEREFASYLGLVPTSHSSGGKVSHGEKTFRGNKKLGPQIVEASWISIYRDRGLGCAYISYKKRMEPQEAIVRVARKLSNIIFSVLKTSKKYEPYQWNDK

SEQ ID NO: 295255 - protein, 312 aa, unidentified
MNTQTVYVGIDVSKENLDLAVNPREHIRRFHNTATGIGKTIDHIRETGSTLVVMEATGGLEIPLAAALGEAGIPTAIVNPRQVRDYARSTGKLAKTDAIDAQMLADFAATVHPEPRPLAEPQARELKDILARRQQLNEMITAEKNRLQRARGVLLDHIRAHIDWMEKEMSDMDLALRRFIEESPMWREKDILLKSVPGVGPVLSFTLLAELPELGKLNRKQIAALVGVAPFNRDSGKMRGKRSVWGGRASVRAALYMGAMVATRFNPVIKRFYQRLIAAGKAKKAAKKPALKTKDTKNPSPKAKAPAISRKK

SEQ ID NO: 295256 - protein, 347 aa, unidentified
MYPFYLGIDLHLKRTFMVLMNANGEVIDRQRVSNDDIPRYLQEQVPKETYAVLEATRNWPFMYDLLHEHVQQVDLVHAKAVRTIANAAVKTDQIDASTLAHLARLNYIPKAYAAPKETRDLRQLLRHREWMVNQRSKAKNRIHAVLAGYNLVSPVTDLFGVAGRKYLDEVMEKELRPAARMVVCDHLAIIDHLNERIRCLEKGITLNEAQTQVMKLLMSMPGVGKLIAQTILAEIGDIERFNSPKALCSWAGLTPKVHSSDAVVQHGHITKEGSRYLRTAMVRAATVACRVSPKWYMVHEHLASHCGGRAARVAVARRLLTVIYFMWKRDQPYQENYGQNQSEALGA

SEQ ID NO: 295257 - protein, 363 aa, unidentified
MGSLALERSDVIVGVDTHKDQHVAVAIDGLGGLVGEPLFIDATNDGYAELLAWALALGPVHVFAVEGCGSYGIGLARFLRRHGHPPVEVTRPPRAGERRLSGKSDSIDAEHAARSVLAGNGIVTPKPADGQVEAIRLMKIARDTAVKSHTTAIITLKAVLVTAGQDLRDSLEPLSDFKLLTACAELDGAGDLADPDTAMRHTLLALAHRWFDLHAEIKIHSKALKALTTAAAPQMVEAFGVGLDIAAQMLITAGDNNDRVRNEAAFAKICGVCPIPAGSGKTNGRHRLNRGGNRQANAALYRAVIVRMRWHEPTIAYVARRTAEGLTKKDIIRCLKRYLARELYQLLPEPSAASAPTKLRAAA

SEQ ID NO: 295258 - protein, 402 aa, unidentified
MVNPQKRYVGLDVHKHYVMVGAVNRSQEMVLPPRKVSLAEFEGWAKKHLRSTDEVVLEATTNAWYLHDLLEPLVARVVVCHPPQVKLIAAALVKTDKKDTMTLAKLLAVGMIPPVWVPPVYVRELRALINHRQRLIAQQTRTKNRLRSLLQRHHLVPPDGDLFSEVQRTWWNKLKLNPSEKLRARQDLIILDQLLPLIAEVETEIGWLSLTEPWAEQTPYLLQLLGIGLITAMTILSAIGEIERFPTAKKLVGYAGLGTRIHSSGQTHRTGGITKQGRKELRAVLVEAAWIAVRYDHPWREQFDRLADRLGRQKAIVAIARKLLVIIWHVLTTQMADRRAEPQQVARYFITWGRQLRVKTLLGIKASEFARQQLDRLELGQELERVPYGSVTYCLPPSTTAT

SEQ ID NO: 295259 - protein, 370 aa, unidentified
MSATRMPCGYVNVKWVGLDVAKDAIAVSVLDGSSEATPRLEKIAHDEVSIRRVVSRLGEPARLRACYEAGPTGYELYRLLMSMGVGCEVVAPSLVPVARGDKVKTDRRDARRLVRLYRAGELVTVRVPTREEEGCRDLCRLRGSAMVDRRRARQRLGSFLLRRHLVYRDGTPWTLKHRRWLRSLAFDDTSAQATFAHLLASVEERELRVVAIEADLAGFFERGLFVDEVARLAAYRGIAPLSALGLACEVCDWRRFPAPARFMGFVGLVPCEYSTGASTSRYGITKSGNAHVRNILVEAAWAYQYPPRVSPELHRRHEGLPPEVVARAWAAQIRLCGRFRRLAARKERRTVVATAVARELAGFVWAEMTA

SEQ ID NO: 295260 - protein, 459 aa, unidentified
MPRKAVQWATWDVTLAAVLEVIPMRRKAYAATPVNGVDAARLTRGPAQEPVVVGVDVGKRQLFAVCRWADGAFERPWKAHNPADLPALVALLRRLGTQRPLVVAMESSGTYGDALRQALADANIPVHRVGTKAAHDYAEVFDGVPSQHDGKDAAVVAELAALGKAVPWPYQPADDWEQELAYWVDWVVAQRRGLAMWQGRLEGLLARHWPEATRVLKLSSATLLRVLAHYGSPQALAADPQAARRLARWGGRLLGPAKAQRLVEAAHASQGVRAGAWERRRLQDFAEQALQARRQAARGQRRLRQLAHGHAVLEAQGRVVGVPTACVLWACTGDPRRYYAAAAYRKAMGLNLVERSSGEYQGALHLSKRGSARARQWLYFAALRLVQRAGVRDWWQAKKASDPEAAKRLLVALMRKLALALYQVGVRQQEFDVQRLFAPSAGRPRLSAAVSCAGVGGVE

SEQ ID NO: 295261 - protein, 406 aa, unidentified
MEGPIITVDVSKGSCHYQPFIENGHPMRKPKQLSATIDGFQKLGQTIKDLEAKTEREDIPVIFEATGVYHRPLQKYLDDHRIRYYIISPLLSATYRKTDLHSNKTDALDCAHIAKAYYCEKELRQYQAQPQEYKRLYQLSRIYESELVHLRKRKVSLRSMLDIIYPRIDKTFKGNQNLYDPIPMEILKRYPHPSLLLSHREDTIVKTVGHRTGHLKGYTERIVHKIYEKAKECYSGCDIDDIEVVKLPSLIENVQEQKKKCNSLLKEMIEIARTCPYFAPIVSIVGIGENLAARIIAELGDVNRFDNRAAIVAYAGLNPKIQQSGDIDGLHLKISKKGNKHLRCLLYLGAQCNYRLRKEDPLYEFTKKKRQQTQCPLSSKAAYTASAHKLLVIIYSLCKNGTRYHS

SEQ ID NO: 295262 - protein, 342 aa, unidentified
MNLTTIGIDLAKNVFQVHGANEKGKSVLKKQLKRAQMLPFFVNLTPCRIGMEACGSAHYWARKLQTLGHTVQLIAPQYVKPFVKRNKNDAADAEAICEAMMRPNMPAVPIKNASQQAILSVHRARQGFVKARTAQANQIRGLLTEYGIVIAQGIGHIAKRVPEILEDGENDLPGSFRLLIGRLADHLKELDRQVGELEAQIQLWHRDNSASKKLAKIPGVGPITASAMAASIGDARNFKNGRQLAAWLGIVPRQYSTGGKSTLLGISKRGDTYLRTLLIHGARAVIRVSERKPNADPWLKNLLARRHKNVAAVALANKNVRTIWALLAHDRDYEPGYTRAAA

SEQ ID NO: 295263 - protein, 314 aa, unidentified
MTTTLCFVGIDVSKFRLDVATRPESECISVRNDEAGVRELIQRLTGVRPHLVVLEATGGLETLVVSRLAAAAIPVVVANPRQIRDFARATGQLAKTDALDAEIIARFAESVRPMARPVKDKALRELEALVLRRTQLSGMLTAERNRRTTASEAVVRSLDANVRWLKRNLRDIDQVIAKLVRGSPLWRAQDDLLQSVPGVGPVLSVTLLTGLPELGLLNRKQIAALVGIAPLNKDSGLFRGTRSVWGGRAHVRSVLYMATLAGVRFNPVLRAFYYQRLRAGGKKPKVALTACMRKFFMILNAMMRSSTAWSTPPA

SEQ ID NO: 295264 - protein, 342 aa, unidentified
MNYKLISIDLAKNVFQVALLDQQNNLVSNKKITRNKLLHTLRQYQPTLVVMEACYSSNHWGRAIQKLGHTVKLIPARLVKAFLIGNKNDANDALAIAEAAQRPKIHFVGVKTIEQQDIQSLQRIRELLVKQRTANANQLRGLLAEYGVVTGKTKANLMSAVPLALEDAENELSAVARSFVQRLYLRQKQLEEEIKTITAQMVSCASQHEDYQLLSGIPGVGPIVASSIMGSINSVGEFKNGRQLSAWLGLTPSQYSSGDKNHLGKITKRGNQTLRKLLIQGAQAVINHCDKKDDPLSQWLQELKKRAHHCKVVVAFANKLARIIWAVLTKRAPYNVELACAR

SEQ ID NO: 295265 - protein, 399 aa, unidentified
MMYQQFCGIDVSKDSFDITLLNSNGEIKLQDKLLMNRDGFNTLLKYLSSYSKENLLVAMEATGIYHLPLLSFLLENSFKSVVINPILIKSFIGSTTLRKTKNDKKDATSIALFSLKSYQSLHLATTDAIENIKPLIRERETLSKEIARLKTEIKAILTQLFPELSKNTNIFTRSILNLLLKAPSRKAIRNLKKQRIQKILDDTSGNKVRISADEILSLAKNSIAISDKYLEKVLTSKIRRLIYIQDELSFLDTELQNSLEDTDINNDIEILQSIPGIGSVTSKNFMIEVSSVEKFKSVKQLCAFIGIDPSVKQSGTSINYRGKISKRGNANLRRTIWQMAIGVIRSCDKFNTYFSKKREEGKKFKQAVIAVANKLLRTIFVLLKNKTKFDENLASGVSK

SEQ ID NO: 295266 - protein, 367 aa, unidentified
MIKTIVHHEGAAAVTVAGHNVGFSSSVIKLGLDIHSRLYVVVAQYDHALPKAARRFAPQEFVPWVESLLRAGHTVHVVYEACGFGFGLYRQLLAASAHCYVIAPRKLDEQRTGVKTDLRDAATLCQRLSRYVDGNTQELAVIRVPSEEEERARHTSRQREQLVHHRQKMEAQGRGLLVSHSLPAPAHWWKNQTWSRLQKHLPAWILPHLEIYRPVLLELQQQIAALTTQLEAAAPAKIPAGMGKLTTVVVSREICDWQRFQNRRTISSYTGLCPGEYSSGCKRMPGSVTKRGNPRLRAALVECAWRMVRFQPQYPPVKKRLALLGKGARATGAARKRAIVAVARHLAVDLWRLHTGRCTAAQLGLIS

SEQ ID NO: 295267 - protein, 416 aa, unidentified
MKKHNNSGKKSEPTSKQAEWRCPVQRDRKEVLAELVGKLKEKLDRKKVAARSAGEEHQRGELRPNLDRLTVGVDLGDQGSHYCILGLEGETLAEGQLRTTQEDFAAFFQGLNAARVVVEVGTHSAWEQEVIRGCGQEVLVANPRLMDGSKRRKRKNDRIDANKLARLGRVDPESLYPIQHRSREVRQDLVMLRARDALVAARTEIINTTRGLVKSMGTRLPKCSSRSFADKGKEEIAVEMREALLPLVRLAATLSADIKEYDKKIEELGREKYGHTALLRQVKGVGPIPALAYVLTLENPQRFVKSRDVGPYLGLVPKQEDWGESQPQLGISKAGDTMVRKLLVGSAQYILGPFGPDTDLRRYGLRLCERGGKNAKKRAAVAVARKLAVLLHRLWVSGEVDEPLHPAKSVPIAAAA

SEQ ID NO: 295268 - protein, 352 aa, unidentified
MQRFIGLDAHGQSCTLCVMGPSGKRLGHHVVETNGKALVERIRSIAGERHVCLEEGTQSEWLYEILQPHAQRIVVTQPLRRAGNKSDEIDGWALADVLRRDAVERSVFKSPQTFTTLRQAARGYVAVQQDLVRAKCRLNALYRSRGVAPSSEIYDEPERERWVRKLPPSYRPLAELLSEQLDGLTHAHQTAQAWLLEEAQRTAVTHRLATAPGIGPIRAALLVAIVVTPARFRTTRQFWSYSGLAIVTRSSSDYVRENGRWVRKPVAQSRGLNRNRQPLLKTIFKGAATTVIRQMPSHPLHQDYQRMITEAGIKPNLAKLTLARRIAATTLAMWKHQEDYDPSKPRRAPPPQ

SEQ ID NO: 295269 - protein, 322 aa, unidentified
MSMSNQRCAGIDVSKSTLDIAISNIAQSFTVPNEDGGFNQILKELKRNETQLILMEATGGLESGVAGYLQSEGLDVVVINPRQARDFARAMGYLAKTDQIDARVLLQMAKVINQHPEREKYIRPLPDAHRQLLAAMVVRRRQLTIMLTAERNRLHPSHPQNHESIRLIISVLKSEMARMEAEMSAYISKNFSELSALLSAVKGVGAATVAVLLAEVPELGTLSRREISALIGVAPVNRDSGTMRGRRTVFGGRASVRTALYMSALVGTRHNPVIKEFYTRLVAAGKPKKVALTACIRKLLTILNAMLKNNEAWDPLYHQHAS

SEQ ID NO: 295270 - protein, 389 aa, unidentified
MRFAGIDIASETHVLAMVAADGAVELKATSFTEDDMGYQKALALLGTPGEVLIAMEATGHYWKNLFAVLAAAGHAIALLNPLRTHRFAGVDLERTKTDAIDALTIARFAAQKRPAATPLPDALTEELRELVHLRERLLQDFGDRVRQLHRLVDLGFPEFTRYVRTLESELASAILRDYPTAAAFRGVSVRRLAALRYDGRHHVGLDLARTLVEAARRSVGQHHSATYRLQIRYACDDLDVLRRRLRDLDRDIDGKLREHEVGRLLTTINGIGTNTAACLIAELGDPAHFRSASALAAYVGTIPALKQSGKRQFARGAITPIGNARLRAALWMPTLSAVRCNPWLSAHYQRLRARGKLPKVALVACMHKLLLAIYSVAKHRRAFTPMVTP

SEQ ID NO: 295271 - protein, 339 aa, unidentified
MNKVSTVGLDIAKKVFQVHGVDAAGVVKVRRSLRRSQVVTWFAKLAPCLIGLEACATSHYWGRELRKLGHEVRLIPPAYAKAYVRRNKNDAADAAAICEAVSRPGMRFVAIKTEAQQAIGGVHKVRALLLKQRIMLINHLRGLMAEFGLVVATGPQHVGELLAILADPEEGGVAEPLRGALLGMTEVLRGLERRIEAIDRQVVAWGRSNTTYRHLITIPGYGPILASAVAALVIDPTTFRSGRDFSASLGLVPRQEGTGGKVKLGPISKRGNGYLRRLLVNGAMSVLGSKRARQDPWIAKLLASKPRKLAAVAVANKLARIGWAVMMRQEDFRTQPAAA

SEQ ID NO: 295272 - protein, 387 aa, unidentified
MPQPNDLSRSLVALDQNSTIIAVVELSQSSWLVGGVVPGIERQPCKKLDPSPERLLAMLHRWRDEAVRAGRTITRIALAFEAGRDGFWLARWLEARGVEAHVIHPSSVAVSREHRRAKTDRLDSELLKRGFLGWLRGERGHCSMARVPTIAEEDAKRPNRERECLVGERTRIVNRIKSTLARLGIRNFKPTLRKAAERLGTLHTPEGSALPPNVSAELQRDIARLGFVISQIKEIEEARQERLEQEPETGPHAMVRHLARVVGVGIETADMLVNEVLSRPMRDRKAVARYAGLTGSPDESGAKRREQGLARAGNARVRRGMIQLAWRFLRFQKESALARWYQARTADSRAGTRKTMIVALARKLLIALWRFVTTGETLDGVILRPAG

SEQ ID NO: 295273 - protein, 426 aa, unidentified
MNEVDSIRIKEFRQLKKEVRGSKDYLIVGIDVAKDKHNAFFGTATGKALFKRLVFENTIEGFNRLLIQAEALKVQYGLKKTVFGLEPTGNYHKPLGEFLIKCAHMVVLMSGVAVKRNRELLDGRWDKHDTKDAANVADLISQGKCLFYEYPSMALRDLRNLLSLKKRLKKQEHGLRVRIRNHVLAQYFPEMDSYYGQSESDSLEIVKWCLNPSVIAGLEYEQFLQLVAPQKRGIWQQNRLKAIWKKAVDSIGCDAGESLEFEAKAMVEALEHIRETIRATEAKIKEICLEFPEYSYLLTIPGFGPDISSKVLGAIGNPFRFNSGKQVLKMAGMDLSANRSGKNSDSAIPVITKKGKADLRYALYQAALIASIRDRHFIVYYTNKLRGREKEKGIKTKMRVKLAAKMLIIAWTLMKKKEVFYTPQAY

SEQ ID NO: 295274 - protein, 428 aa, unidentified
MSYRIAGIDVHKKMLAVVVSDVEIESEYQFERRMFSSNPEQLRSLAAWLVEQKAEEIVMESTAQYWKPVWETLERYWKPLCEKREGTRRRSGTLHLAQALSNRGRRGRKRDFVDAERLVKRLVARELTLSFVPDAEQRLWRTVTRKKYQLRRDVVRLHNQLEALLEEAHIKLSSLVSDLLGVSARRMLKALADGETNPAALAALAHERLRATPEQLCDALGACTELKPVYRRLLKMTLEQLQILEQQIGQLDHELATLLHPHQDAVERLAEVPGFAVDSAQQIIAEVGPTAATFPSEKCLSSWVGACPGEEESAGVNYSHRSPKGNRHMRRLLNQTANAAVKAKGSIFEIIYRRCVPRLGHNQAIGVIAHRQCRLIWLILHQGTRYEERGPAVTKRSRYQRTWRMIRQLRNLGYRIELPNPQASQAQA

SEQ ID NO: 295275 - protein, 418 aa, unidentified
MEFAALVGWDWADKEHQVSTREAGQELVVRKVVAGGANAIHEWATGTLKEYGGKPIAVCIEGSRGAVMHALMCYPHIVLFPVNPKSASSLREALFPSGKKDDPIDADVLLLLVDKHREKLRPFEPEDAVTRKLALLSEQRKKITNDITRSTNRLKANLKGYYPQALELIGDLDTQLACDFLATWPTLQRLKRSRPATIASFYRRHNSRSAELINERLGVIRVSVALTDDEALVEGGEIKTLSSVMVLRGQLEARRYLDDQIQKIYESHAEHNLIDSFPGAGPVMGARLIGLLGSNRERIISAEQLQLLTGIAPVTRASGGRHGTKSVHRRLQRSKYLHQTIVEWASYSIPHSEWARACYDQLRARGKGRYSALRILGYKWLRILFRCWSTSTPYSEQHHIAELQRRGSPLAADFQIQT

SEQ ID NO: 295276 - protein, 411 aa, unidentified
MARVVFAGIDVSALKCDLVCLDEQGQQLAPVKSFPNSLEGASAMVEVLDGLAHKFNIQQLHIGLEATSIYSVHLRQFLLDSPKLKPYSTKVYEINPVMVASFKKAFGTKRPKTDALDAYVIAERVRFGHLTPCSRETIVTEPLCQLTRLRLHLVEMVTAEQNRALNLLFLKFSNYHQDKPFSQTFGKASLAVLQEFTPDELIEMPLEELAEFIQSHGNNKLASPENMAKALKQAARRAYRLNPKMLAACEVALSLTLQNIDHLKRQLKQLDKVICRELEAIPQTLTSVKGLGPISAAGIIAEIGDIKRFKDQAALAQYAGLTWTRYQSGDFDAEERRLTKSGNRYLRYYLVQAANSLRVHNEEYKAYYQSKYHEVTKHQHKRALVLTARKLVRLVFALLSKGQIYKGTVMK

SEQ ID NO: 295277 - protein, 338 aa, unidentified
MKLFFVGVDISKKNLDICVRDAKTIIQECTFPNSQKPLLKSIKSLINRLNCNLNEVLFCGEYTGMYIYPLVQSCKILGLDLWIEDPTQIKYSFGVQHGKNDKVDASRISEYAFRYQDKAKMFALNDDDLNSLKLLLSERDLLLVDKIKYSAQLSDQENYMSGKDFKDKSKRIKQMVVEFNRLLNEIDLKIESIFEHNEKLSSQRDLLCSVDGVGKRIAYEMIALTYGFKRFQNHKQFCCYAGLAPFQYTSGSSIYSKKKVSQRANKKIKSLLHLAAISVIRYDGEMRSYYLRKKDEGKNGMLILNAIRAKIVARIFAVVTRNERFYKDYLNPSFNIAG

SEQ ID NO: 295278 - protein, 318 aa, unidentified
MSAAENSKVSVGIDVSKNKLDIAVHESGAVWSSNNDSRDCPALAIKLKQLQATSIVLEATGGCETLVTAILAAAGLPVIVVNPRQVRDFAKATGQLAKTDRLDCCVLAHFAAAINPPVRPVKTEETQHLEALLGRRRQIVEMLTAEKNRLASNHDRAVSKDLQAHIAWLERRLKSSDDELQRVLKNSPAWRERDQLLRSVPGVGPVLALTLLAQLPELGQLNRREIAKLVGVAPFNWDSGLWRGSRHIWGGRAEVRSTLFMATLSAIRFNPTIKPFYQRLIRAGKAPKVAIVACMRKLLTILNVMLKTQTSWRTVHSS

SEQ ID NO: 295279 - protein, 364 aa, unidentified
MKKIAYVGIDYHLNSLSLAVVVKGKNAPVDMVRLKNDDKLIRKYMSKLSEKFEIKACYEASSNGYSFQRKMAAWGYPCEVIAPSLIPRKPGDHRKNDFRDARDLAQNYAHGTLSIVHPPTEEEEAVRSLVRCRFAFKEAAKRVKQQINSFLLAQDQHWNRSKWTSQHRKWLWEMRMPNTYLQQVLDEHLAHLDYLETRLAHLDDQIEQVATSPVYAPSVKKLAAMKGIKTLTAMLLIAEITDFRRFHPRALMAFLGLIPSEDSSGDKRKDGAITRAGNKRCRSALIESVQHYARSPHMSAQMKSDLSQLDAHSAGVAVKCLKRLHKRFWALTLKGKLRPVAITAIARELVGFIWAMMQPQPAIA

SEQ ID NO: 295280 - protein, 342 aa, unidentified
MKSATTIGIDLAKNSFSVYGVDDKGKTVLSRTLTRAGVVRFFANLPSCLVGMEACASSDYWARTIESLGHEVRRIHPQYVKAYLLGAKNDTNDAAAICEAVQRPNMRFVPHKSPEQIDIQCIHRTRQGYIKSRTALVNQARGLLAEYGIIIRQGISAIRNQLPLIIADEENALSGLMRRNIASLYESICFFDSQILEQDKLLKTVAKENEACQQLMQVPGIGIMTATILLTVAGVASNFKNGREFAAFLGLVPRQNATGGKTRLLSISKRGDCYIRTLFIHGARSAITRILAGQTPKYRPNPWVIELIARRGRNKACVAMANKTARIAWSMLAQGTEYRHAA

SEQ ID NO: 295281 - protein, 359 aa, unidentified
MQTQSNKIDFTGQHIYAGIDVHLKSWKVTILTERLPFKTFSQDPRPELLYQYLTRNFPNGTYHSAYEAGFCGYWIHNKLSELGIDSIVVNPADIPTTDKEKVQKADKRDSQKIAKALRNGDLKGFHVLSSKTLEGRCLIRTRATIVRDMTRNKNRIKSFLQFHGIELPQNFKELTHHCSTRFMTWLKSLEIKEPSAKMSIDLFIGEAEHLRAMILGATKSIRELSEKEPYSNQVGLLRGIPGIGPLTAMIILAELETINRFGNFDKLCSFIGLIPSTHSSGEKENIGEMTHRGNSFLRCALVESARIAARMDPALNISYHNYCKRMEPNKAIIRIARKLLNRIRFVLKNNQPYVCAVVK

SEQ ID NO: 295282 - protein, 350 aa, unidentified
MKLFVGLDVSLEKTAICVISEHGKIVKEAQVASEPKALSCWICDQDGAIAAVGLEAGPLSQWLHRGLSDAGRPVVLMETRQVKGALKAMPIKTDRRDAEGIARLLHLGWFRPVHCKSVSAQEVRAVLSPRKAVQQGFITLEMSLRGLLRNFGLKVGTISRGRFEQRIRELAAGNPMLEAATEPMLRARSALRRELAGLERNVRQLSQEDPVCRRLMSMPGIGAVVALTYRSAVDDPARFTSSKKVGPWVGLTPSRNQSGERDISGGITKAGDVNLRRALCQAATVMMYEEGQKTVRGTVFPTIGGRASWLRTWAAKLARRRGAKRAMVGLAHRIAVILHRMWKDDTLPRT

SEQ ID NO: 295283 - protein, 329 aa, unidentified
MKQRLIAGVDVSKATLDVFIKPSEFALTIKNSTVGFKQLLAELNRLLTSGMEILVVMEHTGQYSFRFETFLQQKGIGFCKLPALEIKRSMGMARGKNDQVDAERIAEYGWLRKDILTADHNPDKEIQQLKCLISLRSKLVKDRSGFISRLKEMKSSGTCMLNDLLFTTQQKVIEQLTKHILKIEQAIKILIKSNEEIKTTSDLLQSIKGVGCIIAAYMIGCTDNFRKFKNPRKFLCFAGLAPFKHESGTSIKGKARISHLANKTAKTLLDRAACCAIQFDQELKAYYQRRVAEGKSKRSCINIIRAKIVLRIFAVVKRQTPFVEMRVAA

SEQ ID NO: 295284 - protein, 346 aa, unidentified
MLYAGLDLSRKRLDFHLLDADGATVDLGASPPDADGLRGLSQRLECHGAPIRAAIESMNGARFVHDRLELAGWQVEIADAQKVKGLAPLACKTDRIDAWVLAELARRDLVPAIWLPDPRVRAERERARWRLHLVRHRSSLKQRVHAVLLTHGKPCPVSDLFGVRGRQLLARLGLPEPWQGTIEASLRLIDELDREIGECERELRRLGADHPYVPLLLTVPGISWVLAYTIAAEIGDINRFPIPRKLAGYSGLCPRVYQSGERDLRGPLSKQGPRYLRWALVEAATHACTHPVYRERYQQTKARIGKQRGAKVAQIDLARRLSEAIWHMLSRGERFAPKGATDPLAA

SEQ ID NO: 295285 - protein, 344 aa, unidentified
MQHYVGLDLSVKETSVCIIDKAGKVIREVRVATEPVAIFAVLTEEPLAIERIGLEAGPLSQWLYSALAEAGLPVICVETRHMKAALSAQINKSDRNDARGIAQMMRVGLYRPVHVKTLASQKRRMLLTSRQLLQAKALDIENDLRGTLRNFGLKVGMVGTVKFEARIRELVADHPDLAAIVEPLLIARRVLREQLGVLHRQLLEIVRHDEVCCRLMTTPGVGPVVALTFRATVDVPSRFTSSKAVGAAFGLTPRRQQSGEIDRMGGISKCGDALMRETLFEAALVLMTHSRKWSWLKAWGMKIARHRGMKRAIVAVARRLAVIMHRMWVDGTEFRWTREEAAAT

SEQ ID NO: 295286 - protein, 440 aa, unidentified
METTARPEMVLAIDFSLDRLDVALRGPAPPWIWGHRAYANNWTGYQQLKQDLLAELQRVNPVQFTAVGESTGPYWWHAFYQFSHDAELAPFDPQLALLNPAHVKGYRKALAEQDKTDPDDARLIEHYYRSVGIEHPYQFADRYLRLRTFSRAYARVLHTLAAEKAYFVSVLYLWGSEYQRCAVRPFSDLLGVTSQFILDEYADIQQLSAIPEAELAALLEQHSHHTLRQPQETAQKLHQVAQHSYPLPAPLGQALHQVLHLTLELMRVLSDNQNAYRQLLEAELALLPEAQRALAFKGLGPVLVAGCLTEIQDTTRFTTGTKFDRRTQTDRPRTYRDGQAAVAKLAGLWWPKQDSGHAQGIQPHLARERNPYLRFWLVQAAYTLQRYQPEYQQFYWQKYREAHDHHHRRALILTARKATRLIFALLHKGRLACLEEGTLT

SEQ ID NO: 295287 - protein, 411 aa, unidentified
MDVFCGIDWAEDHHDIALADGDGKLLARRRISDDAAGLAALLDLLAEHGDSPEDPVPVAIETPRGLLVACLRATGRKVYPLNPMSVARYRDRHSVAGRKSDHGDAFVMANVLRTDMHAHRPLPADSELAQAVAVLARAQQDAVWDRTTAHNKLRSHLREYFPGFLAAFAGARDGIMRPEARVILAAAPDPASAAKLTLARLRALLKKAGRQRGIDAEAQRLREAFRREQMRQLPLVEQAMGKQSIALLRQLDAACASADELEQAATESFNQHPDAGIITSFPGIGALTGARVLAEIGDDRSRFQDARGLKAYAGSAPVTRSSGKSRSVLHRRVKNNRLAAAGYTWAFAALTASPGARAHYDRRRDRGDRHGAAQRNLFSRLLGCLHHCLVTGQHYDEATAFPNRPATKAAA

SEQ ID NO: 295288 - protein, 347 aa, unidentified
MRPKLLMENDYILRQCVGIDVSKETLVVTMCMFSFAEEAHYSDVKTFKNNKTGFNQLVKWSRKEAYTDKPLRYVMEATGVYHEELANHLVKIGCTVIIMMPNKAREFAIWEGMISKNDTIDSRALALVGCVKRSMRPWQPSKEIYHELRAMTRFAQDTKKLRLALKNHLEALEHSHQAEKSVVKHYEAMVSYLDKRLKMNLKNMKEKVASDEALNKKVENIITAPSLGFTSVITVIAETNGFALIQNRKQLTSYAGFDVKDNQSGNVEGTSRISKKGNSRIRAILYMPAVQVQLRSKHLKEAYDRIVLKHPDKKMIAVTAMERRLLLLIYALWKSDKPYDEDHNKKK

SEQ ID NO: 295289 - protein, 338 aa, unidentified
MTSIAPSQVSIPAAVVGVVVGVDTHQDEHCAAVLDHRGAHLATCTIAATPTGYAQLSSWATRFGPVTAWGVEGTGSYGAGLARHLTGAGHTVLEVNRADRQARHQHGKSDPLDAVQAARAVLAGTTAGIPKTSDGAVEMIRNIKRVKDSATKAKTAAINQLHAAVVTAPDQLRQQLRALTGARLLRACARLRPGPVTDPTAATKYALRILARRAQELQAECDDADRHLDILTDQAAPTLRAAYGVGPDSAAELLVAAGDNPDRLASEASFAALCGVAPVPASSGKTNGRFRLSRGGNRHANAALYRVVLCRLRYDPETRAYWTGAPRKACPRRRSSAT

SEQ ID NO: 295290 - protein, 338 aa, unidentified
MAYYVGLDVSLKTTAICVVDRDQNIVWQGSADTHPEMILNALDRWIGSIVRIGLETGSSSPWLARNLPVIVMDARRAAAALKARPVKTDRADARALAEMLQSGWYTEVFVKSEESHRMKALLSARDQLVRNKRTFFGQIRGMLRPFGIRLPARQGTRKFDEAARAACRHDDLLYACVNALLEALGAIEAQIAALDKRVRAMVQTSKACWYLTSVPCVGPITALAFAAAIEDPGRFRRSRDVGAYLGLTPRRWQSGEKDIVGVISKQGDAMARHCLYEAANCLLTTWGGRSALKSWGLRLVKRVGAKKARVAVARKLACLLLGLWKAESHYDEDQVRTA

SEQ ID NO: 295291 - protein, 416 aa, unidentified
MNAVGIDVSSRKSTVAVLRPLGEVVCLPFDVTHDIAGLASLVEKLKALDGETRVVMEHTGRYYEAVEKALHEAGLFVCAVNPLLIKEYGANSLRRVKTDKADAVKIARYALDNWADLRDFTPMDAIRYDLKTLNRQFQLASKQRTASANNLIALLEQSFPGIRKCFDSPVRSDGTQKWVDFAHSFWHVDCVRKQPFPAFCERYRKWCKLHAYFFKLRNAEKVYALAKSAIVLTPKSKVVKVLVQEAANQLISISRSVEVYRAEMDRLAAMLPEYPVVMAMYGVGKSYGPQLMAEIGDVRRFERKQALVAFAGIDPMPNQSGDKNVRSNKSSKRGSPYLRKTLFNVIRTYLQCAPQDEPVFQFLNRKRAEGKPFYVYMLAAANKFLRRYYAKLRDYFASLDTLQSVDPIPATLKASL

SEQ ID NO: 295292 - protein, 360 aa, unidentified
MTKLQKNREKIDFKNQTINIGLDVHKKNWSVSIYLNDAFVRTFHQESKGATLLQFLNNNYPNGTYKACYEAGFCGFSIQRELSKLGIACSVVNAADIPQTNKGMLSKTDASDSRRIGEAFAKNLLRPIYIPKPDIEADRNLIRYRKHVQESLKIKKSKIKSCLFTIGIKLPPEHDKPYWTNNFITWLKNLNDLDTGNKLMLNLLVEDTLILRQRLFTTNKEIRLLSQSEKYKPTYELLSSAPGIGLITAMTMITEIGDISRFESFTKFNSFIGLCPSEFSSGENVYKGKMTTRGNKTIRPLIIEAAWIAKRIDPALTLKFEELLKTKTVKRAIVIIARKLLSRLFTVWKTKIEYEKGVIK

SEQ ID NO: 295293 - protein, 402 aa, unidentified
MNAVGIDVSKSKSMVAIMRPFGEIVSTPFEIKHTASDIRSLVELINSVEGESRIVMEHTGRYYEVLAHQLSEANLFVSAINPKLIKDFDNDSLRKVKSDKADSVKIARYALDKWHNLKQYNVMDELRNQLKTMNRQFGFYMKHKTAMKNNLIGILDQTYPGVNTYFDSPARSDGSQKWVDFASTYWHVDCVRKMSLNAFIDHYQNWCKRKKYNFSQSKAEEIYGKAKELVPVLPKDAITKLIIKQAVDQLNSASTTVESLRTLMNETASKLPEYPVVMAMKGVGTSLGPQLMAEIGDVSRFTHKSAITAFAGVDPGVNESGTYEQKSVPTSKRGSADLRKTLFQVMDVLIKTHPQDDPVYQFLDKKRAQGKPYYVYMTAGANKFLRIYYGRVKEYLSSLPES

SEQ ID NO: 295294 - protein, 438 aa, unidentified
MSNKVIFNLDDLFISVGIDVGADFSWMSIALPNQQFVGKPYKILHNSIDSLTTAVSKIKEAEELYSLESRIFLESTGIYHYPLFCYLRDKGFNCSVINPIITKNSTNINIRKVHNDRFDSKKAALVGLKPDLKVSLMPSDLALNCRNLCREYYDLMDNRSAYVNKLQGELRMAFPQYLGIFSKVTINTSLTLLETYTSPSAFLKADKQEIIDIIKSTARFGLTYAQNKYNAIIQAATDANQFGYIIDSNIKRIRLYISFIRKYDEEINSILESLHELVDANEDSDFVKQIHLIETFKGAGFLSAVSIMGEIGDFSAFSKPKQLFAYFGLDPAVKQSGKFEGTKVQMSKRGSAIARRVIHTLTLQSISISRNREAKNPVLREYYLKKCDSKPKLVAMGAVSHKVCNMIFAILRDNKPFKIIAPQEHIKQYNSAKCDIAA

SEQ ID NO: 295295 - protein, 401 aa, unidentified
MDATVSGNQKEGFALFYVGIDIAKLNHFAAVLNSEGEVLIKPFQFSNDNDGFCKLLFSLSTFDKSNLVIGLESTAHYSDNLVEFLVARHFQVCLINPIQTSSMRKNNIRKTKTDKVDTLVIAKTLMLQPFRFCTQEDIDCMHLKNLGRFRQKLVKERTRLKIQLTAYLDRVFPELQYFFKSGLHQKAIYAVLKEAPSPELIASMHLTHLAHLLEVSSHGHFHKEHAKQLRILAQKSVGSSDSALSLQVTQSIEQIELLDRQLKEVESKMNDIVQSLDSVIMTIPGIGSINGGMILGEIGDIHRFAKPKQLLAFAGLDPTVCQSGNFKAHHTRMSKRGSRVLRYALINAAHNVVKNNTTLKAYYDTKIAEGRSHYSALGHCAGKLVRIIHKMLTANVAFNLA

SEQ ID NO: 295296 - protein, 326 aa, unidentified
MEHELHYIGIDTAKEKLDVDVLRPDGRHRTKKFANTTKGHDELVSWLKGHKIDHAHICIEATGTYMEPVAECLYDAGYIVSVINPALGKAFAQSEGLRNKTDTVDARMLAEFCRQKRPAAWEAPHPLERALRALVVRHQALTDMHTQELNRTETAREVQRPSIDAHLLWLEAELKRLEKQIKDLTDDDPDMKHRRKLLESIPGIGEKTSAVLLAYIGLKDRFAHARQFAAFAGLTPRRYESGSSVRGASRMSKAGHVSLRRALYMPAMVATSKTEWGRAFRDRLAANGKKGKVILGAMMRKLAQVAYGVLKLGVPFDASRHNPVAA

SEQ ID NO: 295297 - protein, 325 aa, unidentified
MIDGVLGIDVSKNTIDVSMSAGCNKVRARSFANSTDGWRHLLAWLITQKIQLVHACLESTGRYSLGIASALYEAGHVVSIVNPAQIRDFARTKLGRNKTDGVDASHIREYCELFKPKPWAPASEAHRRLGELQTIRAGIIAGLTEWKNRKNSGMIDAVAQSLADVTISHFTSQLGAVDEAITLTIDNDPVLRRKRDLLLSISGVGETLAGVVLAELPGPDVLRSSAEVVAYAGLNPRLHQSGTSIDRMTRISKIGNAVLRAALYMPAMSAMRYNPAIAALVARLKSRGRLKPKQIVVAAMRKLLVLCFGVLKTGKPFDPAIAMGC

SEQ ID NO: 295298 - protein, 451 aa, unidentified
MTTMKPQVIDDQEHERVHERVAAVDVAKDTGMVCTRTPHPSRPGARRSTVWTVKARMGAVRALGGQLKHDGIEIVTLESTSDYWRIWFFVLEACGLAVQLVHAAQAKNLPGRPKTDKLDAQWLARLTEMGLLRASFVPPRAIRDLRDYTRARTRLVQERTRCWQRLEKLLEAALVKVSSVVSKLTTVSAQDMIKAMIAGQRDPHQLAALARGSMKAKHDDLVEALNGMFDDHHGELAQLLLDHIAFLDGRIAQLGTRATELAAALPAAWGADADGTTGPGTGTGPDAPVLNAVARLAGIPGISEDLARAIIAETGLDMTRFPTAAHLVSWSGLCPSARQSGPRARAGKKGQGDTWLRGSLGQAAIGAARTATFLGERYARIARRRGKAKAQVAVARSILVIIWHLLADPAARYTDLGYGYYQARTDVDRKLRNHIRQIQALGFAVTLTRAA

SEQ ID NO: 295299 - protein, 361 aa, unidentified
MIVLGCDPHKNSHTIVAIDSSRNVVGKITITNTFTDFKKLLNWSNKFGSERIWGIENSQHYAKHLAQSLLEENEQVYEITPKLTAQLRGRSLKSDKSDIKDALAVAKAVIQEKGNLHNVPSSKTEYARFKEITRFRDSLIKKRTDFVNQLHKALYSLDPEYKTITKSLCTQKGLKLIENVYMEGEKYNNPMQIILKEEIKILLEMIRTLEKNIKSLEKQIVSMVKEIKSPLSSIDGVGKIILPVLLGEIGNIKNYNSSAQLASRSGISPIENSSAKNNYKRVNSGGNRRLNTAVHRVALYQIRKNELASAYYLKKQSEGKTKREALRCLKRRLVDIIFSVMKNNKPYQPPEPKKNLAKLAA

SEQ ID NO: 295300 - protein, 312 aa, unidentified
MAILSFCGIDVSKDRLDVVVLPEGRFCSVSNDAAGWAELVARLHPLTVSAIGLEPSGGYERGIIRALLAAGLSVRRINPNKLRQFARARGVLAKNDRLDARLIAEYVAIMPTRVVQRDDAVERLAEIVTMRRQLCDEHVAVENQAAHLEDAMLRRLSKRRLTRLEADIRLLDKRLAEMVATNAAFARLYDLLTSMPGVGAVLAFTLIALLPELGKLSRKQIAALVGLAPYDFDSGKLRGHRSIYGGRMPVRNVLYMAALSASRYNPALKAFSNRLAGADKKSKVIIVAVMRKMITTLNAMLRDNAAWQLKPA

SEQ ID NO: 295301 - protein, 332 aa, unidentified
MRYFLGLDVAKDSFAAALLDDAGQVVATATFANNLEGFSELLAWLPVPVQTIGVCEPTGVYNQHLKQTLATALESLHEINSQTLKQYAFSQVRTKTDQADALAIADAARTLFLSRPEKLAKSRVSWNAERENLALWLAEYDRLRKAITTLRLQIGDLDHHAASEARIVQKRRQQELKRLLAQQDQVKRQVELVYQKLDDTQARLIDSIPGIGPLSTAATLVVVRDIARFRSADALKAYLGIYPRRNQSGPRERRSHLAHHGNKLMRHVLWNAAKAAVKVKHEGNPFRRLFDRLRAKGRTYSHAIGAVCRKLVQVIYGVLKSKTAFHYSASTA

SEQ ID NO: 295302 - protein, 371 aa, unidentified
MKSILSVGMDVHKNSFSLCAYDGYTGEIVSESTFASDVKLVIKFIETLKSRHENDVEIKCGYEAGCLGYSLYKSLTARGVDCVILAPTTMQVSAKNKMVKNDRMDALNIAKNLASGSYKAVYVPDEEAVEIKEYIRMIHDFKKELQRVKQEICAFVLRHGYQYDGKSKWTIRYMNWIRELEMSEIQRETLNEYIAEMENLNDKIDRFMNRINEIYQSERYHEKVSKLRCFKGIETFAAMTIQVETADFERFPNAKAYASYTGLTTGEHSSGDKNNRIGITKQGNTVIRKTLVECAQALAKGNVYAKKSQRLKSRQKGMDVNIIVYADKATERLKKKYQKLIERNVPRNKAIVAIARELACFIWGMETGNIH

SEQ ID NO: 295303 - protein, 420 aa, unidentified
MTTKQLTPPQAALVAIDIAKNRHEILIEPGPAMRRRRLSVLNNRAEHDRLVAALRDLGKPVIVGFEPTGNYHRVLAHRLIVAGFEVRLISSMALARTREALHNGWDKNDPKDAQVILHMLRVGATTVYSDPGYGRLNDLQELSKTHDMVSRAKTELWHRLLTHYLPLYFPEAERFQGNSRSDWFLALLEQFPTPASITALSKEEFIEAAWDLAGRKVSKARLLADIYETARSSTALPVRPDSPAIAMFRMVLAEGRSLLRQRDQIEAQAELLLVGDPDSERLRQLPGIGPIIALTILAEAGNLRRFGHHRQFLKFCGFDLATHQSGTFRGQTKLSKFGNARLRRSFWLAAQVAIRQRDNSFREHYGRYVAKDPENKHLRRKALTAVAAKMARVAHAIVRSGADYRPFFEQPVPSGRTSLC

SEQ ID NO: 295304 - protein, 367 aa, unidentified
MTSKEYYIGLDVHKEYVQMAVFAEKGEEPIYERRLNNDNRLLVKETTAFARKGKTTVAYEAGCLGYVIHRAMESAGIYSYVLPADKVAKKRDSRIKTDKRDARLIGRELRSGSIRPISVPDCADEAARDLLRCREDANEDLRRCKQRLTKFLLRHGYIFTEGETNWTVKHWRWMDMIEFPQEHQRTVYEEYRSQIKTNEDRLTRLEKQITETAESARYKAKVGILRAFKGIDYIIALSVICEIGDFKRFVNAKSFMSYLGFVPSENSSGGKRSQGGITKAGNGHLRRLLVEAAWHYTKGVRPGKRLEQRRQGCSAYAIEIADRALHRLNKKFIRLIFKNGKHKNVAVTAVARELAGFIWAVQTSNVA

SEQ ID NO: 295305 - protein, 458 aa, unidentified
MAKAGQEDEPEETLARVAAIDVAKDSGMVCTRLPHESRAGRKVQKVWEVLARYDDILALADHLRCHGVQRVVVESTSDYWRIWFYLLEAAGLTVWLVNARDVKNVPGRPKTDKLDAVWLCKLNERGMLRPSFVPAAPIRDLRQLTRLRAKLGQDAARHQNRIEKILEDALLKISSVLSDMSGVSGRRILDALVAGQSDPARLADLAHPRVRAGKAELRAALTGRFRPVHAVEIGMLLQVIDLLEAKVAELDEKIAAMVAALPGAAPVCGRCALVGGEHAPTCPDAAVLLPDLAGRLDEITGVGLSCAQVIIAELGTDVTAQFPTAGHAAAWAKLVPLTHQSGRVSRTGPTGKGNRWLRGALGTAAMAAAKSKGTFLGERYQRIRRRRGKQKALVAISRTILEIAYRLIADPTLRFHDLGAEHYDTLNPEKRTRSKIRELQRLNPGMKVTLTPIDDLTT

SEQ ID NO: 295306 - protein, 392 aa, unidentified
MRTIALDLGVRKIVLCEVRDGEVVHRKTARSLHELDDFLGADTPPARVAFEACREAWHVHDRLIALGHEPFLIDTTRVRQIGVGQHGRKNDRLDAEALARALAQGRVPRAHVLSPARRQLRAELSARNALVMTRAQYVTTVRGLARSEGVMLPTCATETFVARVRAASLSPAMTAIVAPVLVVLDLIGAQLAEVETRLETLARTEPVIALLATVPGVGLIVASTFVSALDEAGRFRDGHSVASYLGLAPSENTTGMAGRRLGSITKQGNPWARAALVQASHTILRVAPAEDALRLWGEAVIARRGKMIGVVALARRLAGVLWAMWRDDRPYDSARLAARSAEGLREDAYATLSQADRLAAIADAEKKIYARTTPRRPRRALARKTTEVTRPG

SEQ ID NO: 295307 - protein, 345 aa, unidentified
MSLMFFLGVDVSKKTLSVVLTDHKDKTLWSNKSIPNDEVGFKKLVETVIKNTSKKAGKEEYSIAAGMESTGVYGERLAYYLNGNSHNGRIVTYVLNPAAVRAFGTSVMAPNKNDSADAQLIASYLSMAVTKEQISPWKAPSPEGRALRELSRRREELTELHASECNRLEKLECMQEPPEAIVRNVRELISYLEDSIHNLEKEIEEHIDDDPCMREDIELLRSIPGIGDVTSVPLQGESDGLNNFQSVKGLVSFVGIAPSEHTSGTSVFKKSKISRRGNSRIRHHLYMATLVAARVNPVIKEYYERLLNRGKGKKLALVACMRKMLHIIWGVMKNRKRFDPCYSLK

SEQ ID NO: 295308 - protein, 345 aa, unidentified
MLADKLDYVIGVDSHRDRHAFAVLAATGAVEAEYVFPANSGGYAEALAAAEAHAPGRRVWAIEGTGCYGAGLGRFLSSRGERVFEVERPKRSNSRARLKSDPLDAIRAARAGLAGDQLAYPRAAGQRESLRALLTTRAGAVAAKQAALCQLRSLIVSSPEPLRAQLRPLTRTALLRRCARLRPRLGNERADTLLALRCCARRALAAEQESLELERAITTRVSQLAPKLLDEPGVGPICAAQLLISWSHPQRLRSEAAFARLAGAAPIPASSGQTTRHRLDRGGDRQLNRALHTIILARSKHHPPTIAYIHHRTTNGKNKREAIRCLKRYLARHLYRLLETTPTPT

SEQ ID NO: 295309 - protein, 421 aa, unidentified
MEQPTTIIAGVDTHTGIHTLALLDMNGRVLSTNTFGADPDGYGHLIAMLGDPARCAGIGVEGTNSFGAALARRLQAAGFPVYEVLRPKRGVRRKDGKSDPIDAIAAARSVLAGDGTSLPKSSDGWVEALRHLNAERSQPVTAMTTPANSTGGLPAAAPEPIREKYRGLRTETRMNRLASCRPSGGLVAHSVLTALKGAAKAWRALKEQADPLEERMRSILDTNARPLLDIYRAGTITAATIAIVAGDNPERIRDEAAFAKLCGACPIPASSGKTNRHRLNRAGNRQGNMALHRIAIVRLGYHQPTRDYVAKKTREGKSKLEIIRCLKRHIAREAYKALIAIRNGGAGRQTPQERGALLRRLRTSHGITQQQIGEALAVPSSRISEIERGTRDLPELEQRATQWIHSITTPTTRHSQPLDDE

SEQ ID NO: 295310 - protein, 350 aa, unidentified
MQYVGIDWAYRRAAWCAKQADGTISGEGFVPADEDGLARLVLELGSEARACIEMMSGAVWVRDRLAGAGWQVEVADARKVKNVAPLACKTDRVDARVLAELCRRELVPALWIPSLEERAMRERLKRRLHLVRLRTSAKNRVFGLLTQWGLRISRDRLRQPDAMELLEARGVPEVWRRSVAEALAVIELLDERIAPLDDELAPLARADPRVCLLSTIPGIGPLLGLTIAAEIGDVARFPSARKLIGYSGLAPRVKQSGERSRSGELSKAGSRTLRFAAVEAAQGAWRETNPWHRLYSDVKTRTGKANPAKSAVARKVLIACWHVLSLQEPFKPSRPQPDPVPASSLCFLAA

SEQ ID NO: 295311 - protein, 356 aa, unidentified
MSTYYIGADVHSNYTELAIEKRGKIVARYSVPTSIPAIVNVLDSIQGKKHLAVEEGPMSGWLYRNLNKKLDNFISSDPRRNKLIASDGDKDDKIDAGKLASLLRGGFLRTIHHSDDDSRAELKHWVSLYHDRVRDAVRGTNKIRARCRMHGVTISRSTLRDPASRFNGLMKTNHNALANQLKMLWIGYDATTKQVRVAKRQLSTLSKKYDIIKQWSLLPGIGLIRATTIFAYLDTPWRFKKKNKLWKYCGVGLQRATSGTDKKGKPKPARLKLPWAVNRILKNAVLGAALSAINQKSNVFRDYYERMVQDGIVPSNARHAVARKLLTVMWGMWKSNSRFDEKLVCDELNRPTVSVI

SEQ ID NO: 295312 - protein, 356 aa, unidentified
MQTQVTKKIDFKGKDLYIGLDVHKKSWSVTILVEGMEHRTFTQPPDPLALYTYLQKMFPGGTYYSAYEAGFCGYGIHRALNDLGIKNIVINAADIPTSQKDQIHKLDPVDSRKIARALEKGLLRAIHIFDRDREELRSLNRTRFYLMRDLRRSKNRIKSFLQYYGIPIPPEYDNNQWTLKYIAWLKQIQMKTSSGQDAFSNLISSYEYHREQILALSRQIRIRMREYDNELYNLLKTVSGIGPLTSSALITELGDINRFPHINHLSSFVGLVPRVKQSGETSYNAGMTFRCNEYLRTLLIESSWQAIRLDPALMQYYQQHITNNKGQKVIIKVARKLLNRIRYVMKNRQPYVTGVA

SEQ ID NO: 295313 - protein, 406 aa, unidentified
MELTAFHKRVIGLDIHQAQITACAIIEEADGTMRIEQRQFGGFKRNRRALAEWAAALFPDRVVMESTGIYWKSPYAALEAAGIRALVVNARHVKNVPRRKTDVGDAQWLATLARAGLLRGSFIPPAMMRELRLIARQRQKLVGLLSSEKNRLHKVLTDGGIRLGVVVSDLHGQSARAMVKAIIADRPPQEILELASKRLKASREELFDALQGELTASHCFVLGELMRHIEEIEVRIARFDARLLEGLAGERNALALLQTLPGVNLIGAAMLLVEIGGDMAAFGSADRLASWAGICPGNNESAGKRKSGRIRKGNLYVRRLLCEFAHAASRTTSVFKSKCQALIVRRGHKRAIVALAHKILRTIFFMLKRGEHYRDSATDYEALSVQRNAPRWIKALTKFGFIPTVV

SEQ ID NO: 295314 - protein, 345 aa, unidentified
MKHFAGLDVSVKETSICIVDETGKICREMKVVSHPDDLAEVLTDASWNFVRIGLEAGPLSQWLFSGLAEAGLPAICIETRHAKAFLKAQVNKTDRNDARGIAQMMRVNLFRPVHVKTLASQKRRVLLTARKLLQEKAIAIENDIRGLLRNFGLKVGIVGAGKFEERIRHLAGDMPELCDIMDALLMARQKLREQFTVLHERLLSIARNDAVCRRLMTVPGVGPVVALAFAATIDIPARFRSSKAVGPSLGLTPRLHQSGEDSRVGRVSLCGDPMMRTLLYEAAQVLLTVVKKWSWLKAWAMNVARRRGRQRATVALARRLAVVMHRIWSDGSEFRWTREEVGSVM

SEQ ID NO: 295315 - protein, 370 aa, unidentified
MHQSSTLYIGMDVHKDSIAVAYVTQQHGAEVTYLGTIGTRQGDIDQLIRKMQSKAKYLVFVYEAGPCGYWLYRYLTKKGHDCWVVAPSLIPKKAGDRIKTDRRDAVQLARLARSGDLTVVYVPKVEDEAIRDLTRARADTISDLKDAKFRLKAFLLRHDIRYTGRATWSPAHLRWLSEVVCPTPAQHIVFQEYVRAVHEHTERLQRLEQELQDHVKAWRLHPVVEALQALRGVQFTVAVTMVAELGDLTRFNNPRELMKFLGLIPSEYSSGERRQQGAITNAGNTHARRALVEGAWAYRYPAKVSRHLQLRLEQQPKMIQDISWKAQVRLCKRYRRLMARGKHANVVTVAIARELVGFMWAIAQQVPVAA

SEQ ID NO: 295316 - protein, 322 aa, unidentified
MDKPVTPDRYVGIDVGKDRIEVHIRPDAIAFGCDTDANGLEHLLTRLKPLTPKVIALEATGGYEAIIVATLSNAGLPVAIVNPRQTRQFAGALGRLAKTDKIDAGVIAHIAEMAKLEGKPPADAQRSELRALLARRSQLVEMAKAERQRAARADNTLTRRSCRTMIRQLEAEIARIERAIGKLVDESPLFQAREALLKTIPGVGKVVARTFIAELPELGSVDRHQIAALVGVAPINQDSGKWRGRRITKGGRPQVRSPLFVACLSAIRHNKPLRAFYRRLVDGGKVKKLAIVAVMSKLVVIANAMMKSGKPWSDPATPAAPA

SEQ ID NO: 295317 - protein, 343 aa, unidentified
MTKLYGGIDLHANNSVIVLIDEQEQVVFETRTFNDLSNILFHLRSFHARIQGLVVESTYNWYWLVDGLMEAGYSVHLANTAAIHQYEGLKHTNDHSDARWLAQLLRLGILPTGYIYPKEDRAIRDLLRKRSQLVRQKTSNLLSIHNLVTRNTGTSLTGNHIKTLTAEAIRDVLPTPDLALAATSTLAVMRCAAEQIAAIEHAIKARVSLRPTFRQLLTVAGIGQTLALTIMLEAGEMHRFPTVGQWASYCRCVNSTKLSNGKRKGQGNTKNGNKYLAWAFIEAANFAVRYYPDIQRFYQRKKAKTQGVVAIKAVAHKLARACYYVLRDQVPFDIKKAFVTQPA

SEQ ID NO: 295318 - protein, 368 aa, unidentified
MVVVVEMSKASWLVSSVVPGVERQPLKKLEPDATALLRLIERWRNEAVRVGRPISRIALAYEAGRDGFWLARWLIARGIEAHVIHSASVAVSRERKRAKTDRLDAAMLMRVFLGWLRGERGHCGMVAIPTMEEEDARRPNRERESLVKERSRIINRMKSALARLGIRGFKPHLRKAPERLAGLRTAEGTGLPANIIEEFRRDMARLALVREQISSIEKTRAERLERAPDTGPHAMVRLLARVIGIGIETADMLVREILSRKLRDRRALARYAGLTGSPDESGLKSREKGLAKAGNARVRRGLIQLAWRFLMFQKDSALARWYRTRTEGPSGARKTTMIVALARKLLIALWRLVTTGEVPDGVELRTAA

SEQ ID NO: 295319 - protein, 351 aa, unidentified
MEAAYDGPQIVGMDLHRRRSVLVRMTGDGRRLGTVRITNGAAELRREITRAGQRPKVVLEATYGWYWAADALAAAGAEVHLAHPLGVKAFSYRRVKNDEKDAADLADLLRMGRLPEAWIAPPEIRELRELTRYRVKVVRLRASCKDQVHAVLAKLGIPVTCSDLFGTWGNTWLGGLPLPQPYAGKVTSLRNLITQLTGEITLLDTVIADLLDDHDGYHVIQALPGIGPVLAAVIVAEIGDITRFSHPARLCSWAGLTPRHRQSDTKVSRGHITKQGSPVLRWALVEAIQRLPAETPVRAVKDRIIARRGKQARNIAKVAAARYLLTCIFYAMRDGHVRSLATRATAQQATA

SEQ ID NO: 295320 - protein, 343 aa, unidentified
MPIAIIGIDLGKYSCSVAALDGGGAVVLRRRVSRAKLAEFVGRLPACLVAMEACCGAHHLGRAFEAQGHAVRLMSPEYVQPYVKAQKNDDRDAEAIAEAATRPTMRFVAMKEEAQLDMQTLHRARSRLVNSRTRLINQLRAILLERGVTVAKGRRALAVALEPLLDGAEIGLSPRVRILLSDMRREWAELDARIATLDREFVETARRSAPARRLSTIPGIGALNATAMVAAVGEAEGFAHGRDLAAWLGLTPRQMTTGGKPRLGGITKRGNVYLRTMLIHGARAALPGLSRSDTPLGAWLRALMARAHVNVAVVALAAKLARIAWAVLRGGGDYDRRAGATAA

SEQ ID NO: 295321 - protein, 320 aa, unidentified
MQSVCGIDVSKDRLDVMVLPEQQCFSVRNDAVGWAELVERLHGLSISAIGLEASGGYEGGAMRALLAAGMPARQVNPFKLRQFARASGVLAKNDPLDARMIASFVAIMPTQPAQPRAPAIERLTEMLAVRRQLNAEKVAAENASRLLEDPMLQRLSRRRIARLAADIDMLDRHLAEIVGADAALAHRYQLLTSMPGVGPVLAYTLIALLPELGRMSRKQVAALVGVAPYAFESGKFKGRRCIWGGRAPVRNVLYMGAMSASNWNPVLKAFHDRLKAAGKLPKVVIVAIMRKMITALNAMVRDDVVWADHLSGRHSVPTAR

SEQ ID NO: 295322 - protein, 432 aa, unidentified
MPPLLRAEPLNLQKPSMQENLQHSSVDVFVGVDVGKGHHHAVALDRNGKRLYNKALPNDEAKLRALIAELKTHGQLLFVVDQPSTIGALPVAVARAEGVLVAYLPGLAMRRIADLHAGEAKTDARDAAIIAEAARSMPHTLRSLRLADEQLAELTMLCGFDDDLAAQITQTSNRIRGLLTQIHPALERVLGPRLDHPAVLDLLERYPSPAMLAATSEKTLTNRLTKLAPRMGKSLAAEIVQALSEQAVVVPGTQAATIVMPRLARQLADLRKQRDEVASEVECLVHVHPLWPVLTSLPGVGVRTAARLLTEVAHKAFASAAHLAAYAGLAPVTRRSGSSIRGEHPSRRGNKVLKRALFLSAFAALRDPVSRDYYARKVQQGKRHNQASSLSPDVAATCYSPCCAMAPSINRHPPLMLDESHRGTPPPSGPKK

SEQ ID NO: 295323 - protein, 421 aa, unidentified
MQVLYERCAGIDVHKDQVTVAVRTPGRGPGGRDTRVRKFGAFYGVLRDMTRWLAAQGVTHVAMEATGVYTMPVYHALLEPGSFEQVLVCNAAHVKNVPGRKTDAVDASWLAELLECGLLRGSFIPPEDIKAVRDVVRYRRKIVQERGSETQRLGGVLQDAGIKLDSVASSIDTVSGLAMIRALIDGERRGEVLAELARGRMRSKIGDLSQALEGRFDDHHALMCQLHLDHIAHLNEMIAKLDAQVETMMVPFGRQRDLLTTIPGIGLVAAAAIISEIGASPGEFFATAAHLASWAGLCPGNHESAGKRKHGKPRKGSQHLQPLLVECAWSAVRTSGRLKARYHRLVLRFGGYRNPAAKKRAIVAIAHTLAVIIWHVLTTGTAYTDLGPDFYATRSDPAKETQRLIAKLEALGHKVTLAPAA

SEQ ID NO: 295324 - protein, 331 aa, unidentified
MKFNWFVGIDVSKNTLDITVLKSNEKVLFKQIENNVKQLKAFLKELKSEGVLLSESLICMEHTGIYCTPVIEVAEKMSLNLWLENATQIKLSIGMQRGKNDKVDSERIAEYAFRNQDKALLRQPEREAMTKLKELNLARTRLMQMSKSLQTISKEKDYYKSKNTFSANFKLTLKAMKEDLKKVENEIKETIQSDQRLKELFCIIQSVKGIGPVVTLNMILTTNEFKDITDPKKYACYAGVAPFEHSSGTSVRKRTHVSRKANMRIKSILHMAALVAIQSNKEITEFYERKIKQGKAKMNVINAVRNKLIHRVFACVRDNRKYEYIYTNALA

SEQ ID NO: 295325 - protein, 446 aa, unidentified
MNDRSGLSRGDRNRNARLARLRQLLPLDHAIVGIDLADDKQAAVVTDHDSRVIARRRVNARAWELGELLDWAVVKASAAGFASVTVACEPTGHRWRVLDQLAAGRGLALVCVQPLLVYRAREGEDLTRDKSDPKDAVLIARLASELRCYEPERADAVWARLRHLGARRRQLTTDATAQVNQIRDLLECAWPAVLGASGSPFRSVTWCAALAVVLDRCAGDLGRVARLGPARFEGAVRRELPRWGGVRPCLRIVRALYAALRDPAGVMVHRPGALERAHLALGDWRDTRARLADAEARMAEVLDDLGLTALVTTIAGLTPAGAAAILAETGDPARFASPRSLVKHAGLCPRDNASGEHQGKTSISGRGRSALRLAAWRAVWAAMPNNPVMAARFTYLTTRQDNRLARQQARTACAAALLRWIHVVVTRRVTWDPAIAAGGTSLQHAA

SEQ ID NO: 295326 - protein, 382 aa, unidentified
MSSKSYDYFVGLDVSQRMTSICVIDTDGKKFCEGKCNTRPEDIRGWLTNRVDAHKAMKIGLEAGNMSSWLYSGLVKSGFDVVCMETFQAHRFLATYRNKTDKNDARGLAQLVRMGGEDFLRVVSIRSQASQETRVLLAMRDHLVSQKVGLENHIAGVLKPFGVIVERGNVTADTFYKRTLEGLAEAERNGVHVRPYVLPSLNLYMEAVEKIAPLTEKIHAIANSIEMVKRFMDIPGIGPVTALSFYAAVDNPQRFQKSSDVAAYFGLTPRQFQSGETNFMGGISRRGDPATRRVLVIAATVLLSGSQEWNSLKAWGVRLAKRIGFSKARIAVARKLAMIMHKIWLNNDRFRPKKLSPQERVKLKQELIVVASKSGRVASAPV

SEQ ID NO: 295327 - protein, 320 aa, unidentified
MQTPSVALNVGADVGKDDVAMACADKSFAARKIHNQRAALHAFLKDLPAGSRIGMEATGIYHELLAELAHQRGLVVYLLNPKDTRHYAKAMGLRGKTDRVDAELIARMIAHEHEKLHPWIPPTAEQRQIDRLIKRRAKVSSIRAALTKSFKGVNGFAVELKALRERLDQLLAHLDAKVKTLIEASTDRKQDYARLRKIGGVGPVVASSVLNTLERVPFKRADAFVAFTGLDPRPDESGHHCGRRRLSKRGPSELRRLLYLAAMAAAKTKTWKPLYQRYRARGLSTTAALVVLARRIARTAWSMYTHKTAFDPERITKVLT

SEQ ID NO: 295328 - protein, 418 aa, unidentified
MKSSKTKKVTKINDKTLIATLDIGKNVHYGYFRAPNGNDVKPFAFYNSKNSYHEFWNKLCQFKDTEGLEEIVIGFESTGPYAEPLCHFLRKKPVKLVQVNPVHTKRVKELTGNSPNKTDKKDPRVIADVICLGHALTLIVPEGPAAELRRLSQARERAITDRTAMINQLQHLIFVIFPEFLKVLNISTKTARYFIKHYPTPEKIYALGLDTVGQIVKQVSRGKLGQDRAKQLHEAAGNSVGITEGKASIVFEIEHLVARVEAEDQFIDRLEQQMRTYLQQVPYSQYILTIRGLGEVTVAGLIGEVADFNKFDTISEVMKLAGLDLYEISSGKHKGQRRISKRGRPLIRKLLFFAAINAVKSKGIMHKKYHQMLERGMLKMKALVAISRKLLAIIFAIVRDQTKYVENYSNSNHYKLAA

SEQ ID NO: 295329 - protein, 361 aa, unidentified
MNVIHYIGLDVHKKTISYCIKTGDGQIVREGKLQATRATLRGWAEGLREPWCGAMEATLFSAWIYDTLKPHAEKLVMGHPARMKAITAGKKKSDTIDARTIADLLRCDLLPTCYVLAPEMRNLRRLLRYRNMVVQQSVRMQNKMAGLLMESGTAFVKDKLHGKKYFSALMKSLEEVPESVKDLLRMSRGSMEMFELTQKQIVTRLLSEQALQQRVERLLSIRGVGPITALTWALEVSDPHRFSSIGDAVSYCGLTAAFRSSAGKQQRGPISKQRNAWLQTVLIEAAKLAPRWNPQLAALHARQLELGHPNRATLQIARKLVAYLLAVDKSGQPFQVLTPPPTLENATKTKRRKRASIAKAA

SEQ ID NO: 295330 - protein, 433 aa, unidentified
MKVLYERVAGIDVHKDMIKVAIRSPGEKPWTRKTEILEFRTFYGVLQQMARELRKRGVTHVVMEASGVYTEPVFYALAEQDFTEVAVINPAHAKALKGHKTDARDCARLAELFECGLLRGSYIPAPELKEVRDLTRYRMKTVQARTSEIQRLAKALESAGIKLGSVASSITGTSATAMIEALIDGERRGCVLADLARGRMRAAGKLADLSMALTGRFTEHHALLCRLHRDRIAGFDVAVAGLDERIAGKVTRWQREADLLTSVPGFGDVVAQAWLAEIGPAPHLYFATCEKLASWVTLCPGNNISARKRKHGRTGDAGTYIKPMLVQAAWSAIRVRGRLQARYNRLVRRFGGDKNPGAKKKAIIAIAHTLLKIAYQVLKSGTPYQDLGADFYTRRESPEQKQAWLERQLQKLHPGCTVTVTITPPEAALLPGA

SEQ ID NO: 295331 - protein, 338 aa, unidentified
MAIVTVGIDLAKNVFAVHGVDEVGKPALVRPEVPRTKLLELIANLAPCLIGIEACSGAHQWARDFARFGHTVRLMAPKFVAPYRMSGKRGKNDAADAAAIAEAVTRPNMRFVPVKSIEQQSRLFVHRARQGYVEQRTALINRIRGLLSELGIVLPLKAATVRREAHKHLEDLPGWCNTVVGDALSELTRLDERISQYDKYIAQAAKEDVQSVQLMRLSGVGPTTASAIVATVGKGHDFANGRQFCAWLGLVPGQYSSGGKQRLGHITKAGDNYLRTLLILGARSVLNAARNKTDPLSRWAIEVQQRRGYWRAVVAIAAKNARMCWAMLQCGEAFKLPA

SEQ ID NO: 295332 - protein, 340 aa, unidentified
MSEITTIGLDLAKHVFQVHGIDAQSTTVLRKRLRRGQVLAFFSRIPRCVVGLEACATGHYWARELRALGHEVRLMPAQYVKAYIKRNKHDAADAEAICEAVGRPTMRFVPVKTAEQQATALLHRGREQLVRQRTMLVNALRAHLAEFGIVAARGLRNVGQLIAIVRDDADTRLPDVAREVLQVLASQLEQIEAAVAALERQLLTWHKTNPVSQRLASIPGIGPIIATAIATTVADANEFRSGREFAAWLGLVPRQNSTGGKIRLGGITKRGNRYLRRLLINGASANLLRSKATKADPWVIGLRRRRPPLVVAVALANKTARIAWAVMLREKEYQPRAMAA

SEQ ID NO: 295333 - protein, 421 aa, unidentified
MKPQAPEAFAAFIGLDWADAKHDVCLQAAGAERREFLILEHRPEAIDAWVQTLRTRFHGQPVAVCLELNKGPIVSALRQYDFLVLFPVNPFTLAKYREAFTPSRAKDDPTDAELQVELLLKHRDRLTPLAPQSPTMRALAQLVEHRRRLVGDKVRLTNRLTSALKNYFPHVLQWFAEKDTALFCDFLSRWPTLKAAQLARRTTLETFFRAHHVRAADVIDSRIQAIKSALALTTDEGVITPNVLLVHALVAQLRVTLQAIADFDKAIAPLAQGHPDFPLFDALPGAGAVFAPRLLVAFGEQRERFTSAADLQKYAGIAPVTERSGKKSWVHWRLQCPTFLRQTFVEWAAESTRHSFWAQVYYQQQRDNGKAHQAAVRALAFTWLRILYRCWQDRTPYNESVYLNALNRRGSSLMQNLAKES

SEQ ID NO: 295334 - protein, 359 aa, unidentified
MKIIGCDLHARQQTLAMLDTTTGEVVKATLKHEGNSVREFYCNLPRPVRVGIEATGSMQWFVNLMEELGIECLVGHPAEIRAAEPRKQKHDRRDAELLLSLLVEDRFPAIWLPTKELLDLRALLRHRHQWVCLRVKIQNALQAIALANGLRRGPSLWTQAGQHAIASLLLAPHAAYRRSELQAMYVKFEAEIENLNQRVEQQARERPGARLLMTHPGVGPITALATEVFLGDPARFADSKELASYAGMIPREHSSGGRQRLGGLSKQGNPLLRFLWSEAAIHAARRDPELKHFYRRKLIQKGLGKARAAVARKLGIRMWIMLRDQIEYNEFCRRGQMQQKRGDACAGMPAARYGARVTG

SEQ ID NO: 295335 - protein, 459 aa, unidentified
MNRRERREMIRKMQSEDLSLEVVHPHAAGIDIGNESHYVAVPPTRDPQPVRRFGCTTAELKTMAEWLKQCAIRTVAMQSTGVYWIAVFDILEEAGLEVYLVNARETKNLPGRKSDVQESQWLMKLHTYGLLRNSFRPSRQIRMLRTYWRQRQDLVRSGGRHIQRMQKVLTQMNIQLANVISDISGTTGQTIIKAILAGERDPHELAAYRNARIEASEEEIAQSLEGNWQDDLLFVLGQEQSAYEFCQKQMMECDRQLSHCLAQLEDRSQGATMPQETRKNRLRSKKGNKPQFDLRAELFRRSGTDLTQIDGVDVMTAMTIVSEVGWDMTKWKTENNFVSWLKLCPDNKISGDKVIGKGRMPTNNRATSALRMAASNLRLSGTYLGAQFRRLRSRLGAPVATKAMAAKLARLIYRMLHYGMRYVDQGAEFYEAQYRKQQVSYLKRKALKLGLQVIEVVAA

SEQ ID NO: 295336 - protein, 343 aa, unidentified
MKVTTIGFDLAKNIFQVHGVDERGHVVVRKQLRREQVAGFFANLPACLVGMEACGSAHHWARKLQEFGHCVRLISPQFVKPYVKSNKNDAADAEAICEAVARPNMRFVPIKTMEQQAVLSVHRVRQGLVKARTAQANQIRGLLTEFGLVLPQGITNVMHRVPQLIDAATDLPASMRQLIARLLENMKMLDQQVNELEAQIKAWHQGSELSRKLERIPGIGALAASALVASIADARSFKNGRQLAAWLGLVPKQDSSGGKPKLLGMSKRGDTYLRTLLIHGARSAIVAAQRKGKPNVWLSGLLARRHPNVAAVALANKNARTIWALLAHEREFRPDYMPRLATM

SEQ ID NO: 295337 - protein, 460 aa, unidentified
MRSPSSRASSQGQSSPPAGSLGIVHPHAAGIDIGSEKHYVAVSADRDPEPVRCFGCLTPDLQAMAQWLKACAVTTVALESTGVYWIPVMQVLEENGLEVYLVDARQAKNLPGRKTDVKDCQWLQELHAHGMRTRAFRPADAICVLRSYWRHRKDLVEMAAMQIQLMQKSLEQMNLQLHKVLSDITGVTGLKILRAIVAGQRDPVVLAQMRHPLVHSSEETIAKALTGDWRAEHLFTLRQALELYDIYQQKIQDCDREIEAYMKTLGSRGDPQDLPQSPAARRRKNQTHFDLRTRLYEVTGVDLTSLPGLDAMTAQTVLSECGLDLSRFATEKHYSSWLGLCPNHQITGGKIRRRRTRKVRHRAAQALRLAAQSLHKSKTALGAYYRRMRGRLGPAKAITATAHKLAILVYRMLKYGMEYVEQGQQAYEKQYQQRTRQLLLKRAKQMGYALVDLASGEVVS

SEQ ID NO: 295338 - protein, 331 aa, unidentified
MQKMSTMQTSGKTIFKGQLTIGLDLGDRSSAYCVLDEAGEIILEQKLPTTPEAMKQTLGKMRRSRIAMETGTHSPWVSRLLKALGHEVIVAHAQNVRLITKSRRKDDRLDVRTLTRLARIDPELLSPVQHRSAQAQLHLTEIRARAGLVSARTALVHAARGLVKSYGERLRKCGTQQFRRETMSGLSAGLREALEPLLREVESLNERIQEYDRRIEKMAKEAYPETALLKQGKGVGDLIAVTYMLTIEDSHRFRKSRDVGCFLGLQPGRRNSGESEPQMHISKEGDEYLRTLLVQGAHYILGPFGEDSDLRRWGQKLAERGGKNAKKRAHP

SEQ ID NO: 295339 - protein, 413 aa, unidentified
MDVLHPRCCGLDVHKSSISACILLREAGRVQKHQRRFGAMTQELQELAEWLRQFGVTQVAMESSGVYWKPVWNILEGQFTVVLANAQHIKNVPGRKTDQKDAEWIAQLLQYGLLRASYIPCEIIRDLRDLTRMRACLSQEASRISSRIQKVLEDANVKLASVATNVLGKSGRAMLEDIITGEDDPEHLASLALGHLRVKIPQLRLALEGKIRSHHRFLLRRLLDQVQFVEHEIALLDERLEDIGGQRPELAQAVERWDTIPGVDRVAAWALLAEIGDNMAQFPTAEHLASWAALCPGNHESAGKRLRGATRQGSPWLCRMACQCAWAAARTKNTYLTSQFRRLAARRGKKRAIIAVAHTLIVIGYHLHKNQSNYEDLGGNYFDRIHSDGLKRYLVKRLEQLGHKVTLEPIEAA

SEQ ID NO: 295340 - protein, 407 aa, unidentified
MLFVGNDWSVDHHDVCLMNETGEWLAAQRLGEGPEGMGQFHEMVSEWVDDPSQVVVGVETDRGLWIETLVAAGYQVYAINPRSVARYRERHSVSGAKSDRADAKLLADLVRTDRHNHRRVADDSDEVGAITVLARAHQNLIGERTRHANVLRSGLREYYPQALETFDKLADRDTLAVLAQAPIPAAGARLSIAQIRSMLKKAGRQRYLDSRAAHIQTGLRSVGLTASDPLTSAQAATTRATVAILVELNRQITQLETALAEHFEQHPDADIYLSLPGLGVVLGARVLGEFGDDPDRYADVKSRRNYAGTSPLTIASGKHRTVTARHIRNNRLHDTIGRWAFSSLTASPGCRQFYDQRRTKGDTHSQALRTLGNRLVGILHGCLRTRTHYNEQTAWSHRQPNPQTNAA

SEQ ID NO: 295341 - protein, 341 aa, unidentified
MAEVSTIGLDVAKQVFHVHGADASGATVFSRRITRQKLIPFFASQPRCTVAMEACAGSHHWGRELMKLGHEVRLIAPAYVKPFVKRQKNDAADAAAICEAAQRPTMRFVPVKSEQQQASAAVFRARDLFVRQRTQFINALRGLVAEHGWVVPKGLFHARALMAQIEDPSCPLPHGARDAFLAMIASIKALDEHIVLLDREIAQRAKQDPAARRLMTIPGIGPITATAILALAPPPESFRRGRDFAAWLGLTPLQRSTGGKQKLGAISKMGDRTLRRLLIIGASAVVLHAARRGAPQGSWLERMMARKPRMLVTVALANKTARIVWAVLASGEDYRAPVVAA

SEQ ID NO: 295342 - protein, 408 aa, unidentified
MVVQAVPVTSSTVVVAVDVGKTEFAFSVTDSARTLLLKPRTGCPMTGPSLVRMVADIVAVLRPGAVVKVGIEAAGHYHRPLLDAAWPDGWEVLELNPAHVTEQRRVLGKRTIKTDVIDLQAMTELLLAGRGQPVRDRSLVLAELTAWSAHRTSRVQVRTATKNQLLGHLDRTFPGLTLALPDVLATKLGRLVAAEFADPARLAALGSTRFVRFGATRGLQIRRPVADRLVQAARDALPTADASVARMVLAADLALLGDLDAQIEHATDQLTRLLPESPFAPLLTVPGWAAVRAGNYGGALGDPARFDHHRQVYRTAGLNPIQYESAGKRRDSVISREGSVELRRALIDLGLGLWLNDPAAKAYGSHLRARGKKGLVIGCAMAHRANRIAFALVRDQAAYDSSRWTRED

SEQ ID NO: 295343 - protein, 351 aa, unidentified
MEMVGGLDLHRSQITFRTVDLRTGEVQRGKIHPGARDAFRDWLGGFEPGTDAHFALEGTTGWRFAVEEIQRMGFTAHLADPAELSERRGPKRRAKTDHADCELMVNLVLEGRLPESSIPPAHILELRALVRLRKTLVDQRIEWQQRLQAQLFHQGVVPGLRLCRPEDRRRLTGMEMSPAGRQTMGTGLVMLDDFDAQLVPLSAQLVSLAKSQPGCRALEHELYGVGWLTAVAVVAELGDCRRFHSADQAVRSSGLDVTVHESNGKRPGGHLARQGPQVLRWALFEAAQCAARKASPDHAYYVRVRDHIDHNRACLSVARKICRRACRILKDLGDAAMAPPEPPARRDPKAA

SEQ ID NO: 295344 - protein, 409 aa, unidentified
MLKIVYPNCCGIDVHKTFVVAVIAITNNQGITEYHRKHFSTFTNRLTQLRDWLEYYSCFDVCMESTGKYWIPVFNILEEQTNVCLAHPKYVKAIRGKKTDKKDAQWIADLFKHDLVASSFIPPLKIRQLRDLFRYRMKLTQLQVGEKNRYQNCLTWSNLQIASVVSDVFGKSAQAIIKSILDNPQDKPNIEQLVHKRMKNKVQDLEIAMEGALTPEQAEKIRVIKAHYDALAICKEDLEQMIRELGQDYQHQVKLIQTVPGFKEDLSALRIISEIGCDMTVFDSAAKLCSWAGLVPANNESAGKKFSTRISKGGKYLKPFLVQVANAVVKSDKHPELRNKYLKLKKRRGHRKAISAICRRLLVSVYQVLRKQEDYNPVLQGLTEIRNPDKTMSVQDAVRFAQQHGFNVA

SEQ ID NO: 295345 - protein, 430 aa, unidentified
MGLIVSAPLPPKQDEQAMSYEWFVGIDWGSQQHQVCVIDLNRRVVGERVVDHDGSSLAQLATWLLALSQGQPHRVSVAIEVPRGAIVEGLIERGFHVFAINPKQLDRFRDRHSVAGAKDDRRDAFVLADSLRTDQPSFRRLRLDEPRLLMLRELSRAEEMLLEEFRRTANRLREQLHRFYPQMLHLSSAADEAWLWDLIALAPTPSHAALVTDEQVRHVLTSHRIRRVTAQEVMVCLQAPALPAAPGVLEAAQAHCAFLLPCLRVLAEQLRSCAQQVEAVLTALAEEPDEAGGPSDMAIVQSLPGVGRKITAWLFAEAAQALGERNYQVLRTQGGVAPVTKQSGKRRQVVMRRGCNPRLRHALYHMARVAAQRDGHFGGVYEALRAKGQRHGQALRNIGDRLLRLLIAMLRDRTCYDATRNRREPVALMG

SEQ ID NO: 295346 - protein, 373 aa, unidentified
MQYSIVYVGMDVHKDSFSLCCYTNEKEKAEYSQRVLGHYSKVINYLEAMRFHYGKDVSFICGYEAGCLGYTLYHQLTEHNVQCVILAPTTMLVSRGKKKVKTDKRDAALIARCLAHHDYSAVHIPSAKDEEVKEFIRMRDDHKIAQKKVKQQILSFCLRHNYRYPGGTRYWTQAHMKWLRDLKPEGLYREILAEYLVTYNSLTDKLERLDKRIEELAAAEEYRDKVHKLSCFHGMRAHSALSIITETGDFNRFATAQQYASYLGLVPGENSSGEEQIRIGITKAGNRHLRMLLVEGAQCFGRGEIGYKSKALKARQQGNPAEIIAYADKANERLRRRYYRMILTQGKRTNVVKTAIARELACFIWGMMTDNIA

SEQ ID NO: 295347 - protein, 366 aa, unidentified
MATYCGVDFHARQQLVKWCKSEDGEIHEAELKHESIDEVLEFYAQFSGEVIVGFETSGYSSWFEAMLEELGHQVWIGHATEIRRRARSRQKTDRRDAELILDLLIKDEFPRIHRVSAASREVLRQLRYRHRLVQMRTRSYNSLQAIALGAGVSLKAKLRTRKGKERLLGLSLTTAHDRQREEWLALIAQLNGYIERVETELESAAETDERVQLVRTHPGVGLLTGLALVHTLSPVSRFANSRKVAAYVGLEPREYSSGERQQFGGISKAGSRLLRLLLVEAGHKAINKDAQLKQLYYRVMHRREKAKAKVAVARHLLVRTYIMLREQIDYAEFVRRGVAVQSARVSYRPQVPGKVIERLASEQQLS

SEQ ID NO: 295348 - protein, 350 aa, unidentified
MPSETTIHVAIELSVSSWLVATRPPGAEKSRLHHIEGGDTTALLALIAELRTRASTKLGKPAEVVCCFEAGRDGFWLHRALTMHGVAAYVLEPTSILVNRRARRAKTDRLDAEGMLRVLAAWLAGDRQVCSMVRVPTPEEEDAKRPHREREHLVQERLRIENRIEALLFTQGIRKRPSLRSWERDLAKLRTGDGRALPSLLRVELDRLRRRLVLALELIREVEAERAEALAVTAEDEMTQKIAALQRIRGIGTNFAAVLVREVLYHSFANRRQLASYVGIAPIPYQSGGMDRDRSISRAGNPRARRSSSSPGCGCATSQAARSPRGFVSASARYRGARGGSPSWQWRGSC

SEQ ID NO: 295349 - protein, 365 aa, unidentified
MPTTNFPHFADFVNEDFYVGIDVHKKSWTVTIRTLGLEVGHFTQPPSAEALASYLTKTFPGGSYHSVYEAGFCGTTIHEHLSKLGIQNIIVNPGDIPITDKQKKTKTDLHDSRFLADCLEKKSLKAIYILPREQQELRSLFRLRVSKSRDLTRAINKLKGFLIYFGVKLPEPWNHAYLSKKALGWLNNLELATQAGSLALQEYLQDVLYRRERLVAITRQLRSQVQLYYPSQYEYLLSIPGIGMITAIALLAEIGDFNRFKDPDQYCSFLGLMPWECSSGEKSRTKGIQPRCNHYLRSVIIEASWSAIRKAPRLLQYYRKHAIKNSKHAIVKVARKLALIARSVIVNQQYYDPTWPQGPSIPIPS

SEQ ID NO: 295350 - protein, 352 aa, unidentified
MNQITTVGVELAKDVIVVCAADPAGRTVFFKQFGFQGFASWAANLPPCTIAMEACSSAHYWARTLSSLGHHAKLLAPDLVKPFRKSQAAKNDRNDAQAILITALQPDMRFVSVKSVEQQSILACHRMREGWKIERTALINRVRGLRAEFGIWLGRSPQNLARSLPRLIQDEQLPARVQGLLVQAQGHLQQLEALMEQGERDICEHARHSEAAQRLCALNGIGPITASALVVSVGDARDFRNGRQMAAWTGLVPKQSSSGGKDRLGKITKRGDTYLRGLLTQGARSALNAALTRAPDKRSRLEHWIVALRHRVGYHKSLVAIANKHARICWAMLARHESYAPQAGRHHTATAA

SEQ ID NO: 295351 - protein, 324 aa, unidentified
MSNAIIGVDVSKLDLSISLLIDKIYHQTKIDNNQEGFKIFSKWLKKHRITKVTACMEATGNYGTFFANFLYKNNHEVSVVNPLCISAFAKSKLSRHKTDKIDSMIIAEYASKNDLSLYVPKNSDLQELQNLYRCLQNLKEQYKQSQNYLENKDHLSSTICSSYKRLSQNITKEIDKIELEIDKLLIHNHELKQKADNIQTIPGIGKLTAVAILAESPDFAYFSNARELAAYAGLTPKHKISGTSVRGKSRISKIGSSRLRKALYFPAIVAKNHNPLFKEFSQKLGSKGKPTKIIIVAIMRKLLHIVFGVVKHNTSFNPRFGLDC

SEQ ID NO: 295352 - protein, 417 aa, unidentified
MKAWKEITHYAGFDWARDHHAVVIVDAQGQIVADFEFEHSLEGWQRFVEKTAAWPHLAVAIETNQGAAVDQLLQREYTVYPVNPVASASYRKRKAPSGTKTDHVDGWGLADALRVDGQGWKPLQPIDPLIQQLRLLCRDEVALIEQRTALVNQLQQALVEYYPVALQAFEDWTLPSAWDFLLQFPTPKALVEAGKRRWEKFLHTHKLWRPETAEARLALFAQADRFQGSDPVTRAKSQLALSLAKLLRTLQQQLDEYRKAIEALFKSHPDHDLFGSLPGAGKTLAPRLMAAIGTEPDRYGNANVLQCLAGTAPVSYQSGQISKTKVRWACDKFLRHSVHLWADCFRKGSAWGQTYYKNKRDQGMSHACALRCLGQRLLKIVFKMISDKTPYDAELHARNQLKHGSWVLTLMNEKSAS

SEQ ID NO: 295353 - protein, 337 aa, unidentified
MKYSGIDLHSNNSVVVVIDEEDRVVAQKRLPNDLAKIVAMLMPWRDELVGVVVESTFNWYWLVDGLQAAGFEVQLANTVAIKKYEGLKHSGDEADAQYLAHLLRLGILPTGAILPAEQRAVRDLARKRMQLVRSRTTHVLAVENITARQYGARISSNQVKRLSAEAIDQMPLPEDVALAIKANVAVIKTLSAQIDLLEKRLQEKVGAQAEYALLTSVPGIGRVLATTILLETGPIERFATAGNFASYARCVDSVRTSNGKKKGEGNTKNGNKYLAWAFVEAAHFALRFCAEAKRFYERKKARTNNVVAIKALAHKLARACFHILKERKAFDVTRCFA

SEQ ID NO: 295354 - protein, 373 aa, unidentified
MDVHKESYSLCTYLILSGEFIGETKMDAKPSLIKQYLSEMEKLLEDKGYDEIEFQTCYEAGCLGFSLYKELVKLGINCKIVAPTTLHKSADSNVKKNDRRDAKMLARNLAYGTCSFVHIPDEIDQETREYIRMRMAHKREIKRIKNMINSFCLRNGHKYEGNYWTDKHISWLKHLELNDFLKSILVEYVDTYDILMTKLDRIEGKIEEISLSERYKESVDKVSCLKGLTRQGALTIISEIGDFSRFNTTNELCSYLGLVPGEHSSDGKGPSLGITKLGNTVVRNQLVESAKSITLGIKWIKSKRLKQRQKGMPLDIISYADKASKRLFDKYHSLISRGVHCNKAVTAIARELACFVWGMMTNNILERKVGTAN

SEQ ID NO: 295355 - protein, 418 aa, unidentified
MSFKIIKNNCCGLDVHKTWIFACIGITDSNNRTEYKQARFSSFTKGLNELCDWLAKYNCNDVCMESTGKYWIPVFNILEQRSLWVTLSHPKYTKPMKGNKTDRKDAKWICDLYMCGMVKPSFIPPADIRELRDLVRYRFKLTCMITGEKNRAQNCLTVSNLKLDDVFSDVFGKSSRSITEQILQHPGETFDVAPFVNSRCKTPIVEIQAAIDGAISKEQAVKLRQCLDHIDELNKHISEVEQEILRLSDKYEVALNLIRTVPGFDKNPLTAIQVLSEIGGDMSVFPTAKHLVSWAGCCPRNDQSNQKIKSTRISRAGSYFKPVLVQVANALIKSKKHPEFAARYRRIKARRGHKKAIIAICRMILTAIWHILTDLKPYTSEGFLESRPVNEAKVLTTSQALNLLKQRGYIIKDDVSVS

SEQ ID NO: 295356 - protein, 374 aa, unidentified
MSNSITYVAMDTHKKGHNVALHYPGQEEIVRFTVKNTAREITKMTRKIIKQAPGEVEFCYEAGVCGFVLKRRIEAHGCKCAVIAPSLIPCKPGDRIKTDRRDALKLLTMFKAGLLTEVHAPDKQQEAARELTRCRQSAHENLKRVRHQLLKFLTRHGYLYSEGSHWTLKHLKWLRSLEFEEALLADVFDNYFTQMQHCLQRLDSLDKQVKKLAKSKPYNKVVGLLCCFHGIDTLSAVTIITEIFDFGRFSSPSELMSYLGLTCSEFSSGEKQKRGPITRAGNKRVRRILVEAAWHYRHPCNVSKALRKRRNGQPQWAIDIADRAGQRFRKRYRHLTNCGKMSCKVTVAIARELAGFIWSVFKEYQARKSVKQAA

SEQ ID NO: 295357 - protein, 352 aa, unidentified
MPMLEGQVDAVIGVDTHRDRHAAALLDPNGGVRATLQVPSDRSGHTRLLQLAQVQASGRRVWALEGTGCYGAGLTRFLVDQGEWVVEIDRPKRPRGRHGAKSDVLDAVRAGREALARDHLTSPRQRGHREALRVLHSTRAGIVAAGADARRQLKALIVTAPEPLRDSLRGRPWRRQVRACLGLVAAPGDPVEHRATVRALALTAQRVLAARQDAKQLEAELRQLVTVVAPALLAQPGIGPIGAAQVLISWSHPGRFRSEAAFAMLAGAAPVEASSGQVMRHRLNRGGDRQLNRALHTIVMLRQVHHGPTRAYTSRRIAQGKSQREIRRCLKRTVARQLYRLLERTATNQASS

SEQ ID NO: 295358 - protein, 326 aa, unidentified
MDTLTLGIDVSKKRLEVALLGGPQRQRGTFDNQKSGFAKLVRWLKKHKAKQAHICLESTGNYWLEVAFHLHQAGCQVSVVNPRRIKKHGEAIMQRHKSDRVDAQLIADFAAKHAPPAWEPPPPAWWQLRGLVRHRQALVRDRTREVNRAQAGSLEPAVAQMIEQHLTFLKQQIDALDKQIAQHIDHHPDLKQNHDLLTSIPGVGDITAATFQAEVPDVHRFDQASDLATYAGLTPAGRQSGSSLNRPPKLLKVGNRRLRTAFFMPALSAHRRNPITAALRQRLLERGKKKMTVVVAVMRKLLHLCYGVLKTGQPFDPNWCQSAKIA

SEQ ID NO: 295359 - protein, 317 aa, unidentified
METTSLYVGIDVAQGHLDIAVRPSGEQWRIAHDPDGITALVERLTSLAPALVVLEATGGLEILLAGELLDAALPVAVVNPRQVRDFARATGKLAKTDILDAQVLAHFAEGTKPQPRPLPNAQTQELKSLVTRRRQLVEMTTAEKNRLRRATPRLRPQIQEHIDWLRRQSQGVDKDLGELIRSSPAWRAKEKLLDSVPGVGPVLCTTLLAQLPELGALSRRQVCALVGVAPFNRDSGTLRGRRTVWGGRSQVRAVLYMGTLVASQHNPVIKAFYQRLCSAGKAKKVALTACMRKLLTILNSMLKHGNTWNPELFQQNP

SEQ ID NO: 295360 - protein, 397 aa, unidentified
MYIVGIDIAKRKHEAAVIDGEGTVIIKPFSFTNNCSGYNRLLAMLAKAKLPLDEVSFAMEATGHYWLALFTRLQKEGFRVQVINPVQTNSIRSFYIRQAKTDPRDALLIAEVIRFGHFSESTLHPENIYELRELCRGRHAIVAMQADVKRKVVALLDQVFPEYETAFTNLFGDTSMAILQTCPTPKELSEMPLEELCHLIEVPSHKRFRMAKAQELQALARNSFGFAMAGDVFSTMIRLYAKHLVFLKQQVQEMDRKIAEIMDTLDTLITTITGIGPTLGAYILSEIGDISRFSSAAKLAAYAGIDPTMRQSGEYNGVRNRMSKRGSPYLRHAIWLAASSAVLHDPALKLYFQKKRDEGKPYMASVGHACRKMVSIIYAVMRDNKAYTPCIPNEISA

SEQ ID NO: 295361 - protein, 371 aa, unidentified
MKHLSTFIGMDVHKNSIEIAIAEHGREGEVRRYGKIDNTLSALDKVVRKLVSAGRQLHFVYEAGPCGYPIYRHLTAKGFDCQVVAPSRTPTPSGNRIKNDRRDARMLARLHRAGELTSVYVPKAEDEAMRDLTRAREDAKSDQRKCKQRLLAILLRNGYRYSGRSPWSQVHMRWLADIRMPHRSQQVVLQEYIDALNDCSQRVERLTGQIAQLVSEWRMLPVVNALQSLRGVSLIVAVTTVAEIGDLARFENPEQLMSYLGLVPSEYSTGEKVKRGSITKAGNGHVRRVLLEAAWSYRFPARVSRALLKRQQGQDKRVLAISWKAQTRLCSRYRRMWAKGKPTQVVVTAIARELCGFIWAIAREIEVPTAA

SEQ ID NO: 295362 - protein, 412 aa, unidentified
MAMEALVERCAGLDVHQASVVCCVLVGPPGCRPRKLLRTFGTTTHELGKLRAWLAEHGVTHVGMESTGVYWKPVYAALEGSFDLTVGNAHHIKNVPGRKTDVKDAEWIARLVRHGLIGKSFVPPPPIRDLRELVRFRRALVEARTAERNRLLGLLEGAGVKLAGVASDVFGVSGTAMLKALAEGAAEPAAMADLARGRMRRKLEALAAALDGQVREHHRFLIAVQLRRLEAIARDLGELDARIEAQLEPFRAQHRLLMQIPGVDRVVAAGIIAEVGVDMGVFATAQRLAAWAGVAPGNHESAGRRKGAATRKGNVFLKATLFAAASAAVKTKGSYYRDKYHRLRARRGPVRALVAVAHKLLIAAFHMLRTGSPFRELGEDFLDRVSRKRSTTKLVRRLAALGYDVLLVPKAA

SEQ ID NO: 295363 - protein, 369 aa, unidentified
MEKTVYVGLDVHADTIAVALADEGRGGEMRFYGTIVNSADTVLRLTKTLSRDGKIPTFCYEAGPCGYGLHRHLTRLGFECAVVAPALIPRKAGDRIKTDRRDAEMLARLWRAGELTPIWTPDEEQEAMRDLIRTRKQTVDALKVAKQQLLSFLLRHGLRYRNGSYWTKRHRRWLAELRKFPYPHQQIAFEELKRAIDQIEARIATLDQTIETAIKSWRFAPVVDALRALRGINTTIAATVVAEIGDITRFENPRQLMAWLGLVPSEHSSGSTIRRGRLTKTGNALARTMLVEAGWSYRHPPKEGHPYLKRSAHLPQQIKDIGWKAQTRLCKRYRHLSRAGKPQPRVIAAIARELAGFVWDIARKTPLPT

SEQ ID NO: 295364 - protein, 418 aa, unidentified
MNMNAAGIDVSSRKSTVAVLRPFGEVVKLPFDVCHRAEDLTALAEQLKSIEGETRVVMEHTGRYYEGIAKVLHEAGLYVSAVNPLLIKEYGNNSLRKVKTDKADAMKIAKYALDNWVELRDYTPMDTIRYDLKTLNRQFQLASKQKTATANNLIALQEQSFPGIRKLFDSPVRSDGTQKWVDFTHDFWHVDCVRSGSQNAFTERYRKWCKRNRYQFSMEKAAAVYALAKSAVVLVQKTAVTKTLVQEAANQLTAISRSVETYRTEMNKLASQLPEYPVVMEMYGVGESFGPQLMAEIGDVRRFERKQSLVAFAGIDPAPNDSGDYCSRSNKTTKRGSPYLRKTLFNIMTVHLQHAPADEPVFQFLDKKRAEGKPYYVYMTAAGNKFLRRYYGKIMAYFSTLEALPPVDMDSTGLQHAE

SEQ ID NO: 295365 - protein, 388 aa, unidentified
MHPTDRTRNQDLARSQGDHSTLYVSLELSRSSWLVTSLSPNSDKMSKYSIAAGDAPKLLALLARLRGRAEQLVGGSLNVVVIQEAGLDGFWVHRSLEANDIESHVVDPASVAVSRRRRRAKTDMIDGETLLRTLLAWKRGEPRVCEMVVPPTPEQEDSRRLSRERANLLRERIQHVNRIKGLLASQGITGYDPLHKDRRTRLDGLMTGDGRPLPGRLKAALRRELARIELLLQQIADVEAERDVSIEADVDGRPSPVALLARLKAIGPQIGAVLYHEGLYRNFANRRDVAAYAGLVPTPWRSGSIDREQGISKAGNPRLRHIMIELAWLWLRHQPGSALSGWFRARVGNERGRIRRITIVALARKLLIALWRYVTQGEVPEGAVLKAA

SEQ ID NO: 295366 - protein, 417 aa, unidentified
MLKIVFPICCGIDVHKTFLVATIASTDRSSVTTYQTKRFSTFTKDLENLSKWLLDNQCADVCMESTGKYWIPVYNVLELTCEVILAHPKYVKSLRGKKTDRKDSVWIADLFKHGLVKASFIPEKAIRDLREVMRYRTKLVSMKSSEKNRYQNALTVSNVQLASVVSDTFGKSAQALINQLLQQPKDTSFDVLPFLHGSLKKKAEQISESLNGSIDDIQAQKIRSCTSHMAELDSHIEDLQVAADLIASPFTAALRIIESVPGIGHLSALTILSEIGTDMSKFLSAKHLCSWAGLTPCNDQSAGKKKSTRISRAGCYIKPILVQCALAAIKDKSFPYYGQRYQVLKHRRGHKKAIISIARMMLSVIYTLLSRGELFSKELYEESLKNPMVILSPEEQLQRLAKKFGYVVVKVHEPVPV

SEQ ID NO: 295367 - protein, 401 aa, unidentified
MKEFNAEEVRVETASALETVRRAQAFVRYPAYIGLDVHKESIVVAVARVGRDAPESREEIANKPKTVAKLVERLNREFGGEVLLFCYEAGPCGYVLYRQLLELGHDCQVVAPSLIPRKPGERIKTDRRDASKLSRFLRSGDLTAVWVPDEEQEAMRDLTRARNDMKGQERKARQQLNAYVLRHGHAWPSNKTRWTQTHYNWLESLKFPHDWQQVVLQEYIDAVKTASQRVADITAQMERVLPQWSLSPVVDSLVALRGIDKLAAMVLLAELGDISRFDSPKQLMAFLGLVPSEHTSGGRRRQGAITKTGNSHARRMLVESAWSYRFPARQTAHLKRKAKNASDEAKVIAWRAQKRLCGRYRTLLQAGKNTKQTTVAIARELAGFIWDIACHEMPKVQQVAR

SEQ ID NO: 295368 - protein, 401 aa, unidentified
MHAVIGIDVSKATSQVAVAVDGKVVQNFKITHDVFGFNQLNSVIMQFNTFPDIVFEATGVYSRRLKTFLEAHNYPYTYLNPLTAKKQLDQLRPNKNDLNDAKHLAETQFILKRAKSYVQNPIYIKLQDMSRFYQQLNHDIVSAKNRLHRLLQLTFPEIETLFSTTDSQQYWEIVSLIPHATMAKHSRQTLSDTIQSSVSRQIGVARLTRLVDKLVALGSLSAPAVAVASYNVTEVRYYAQRLIALSQSKANVLATMVDQAKDLPEYDIYQSIPGFSDKTVVSLIAELGDLHRFATSNKLNAFVGIDLRFNDSGDYKSSGFITKRGNTIARKVLFKAISNIASTATYGHQNHINDWYQKKKQSSMSKGTKKIAIGAMSRLLRTMHYLVLNNQLYDYDTASKR

SEQ ID NO: 295369 - protein, 341 aa, unidentified
MNVKTIGIDLVKEVFQVHGIDEHGKRLFNKRLKRAKMLSFFANIPPCLIGMEACASAHFWAGKLMSMGHNVKLMAPQFVKPYVKTNKHDAADAEAICEAVTRPNMRFVPIKTPEQQAVLALHRSRQSFIKQRAAQANQIRGLLAEFGIVVPRGIQQLQLQLPEILEDADNALPSLFRVQLSLLQHHMAYLFDVVATLDKQIEQCYRQNALCQRISKIPGIGPITATALIATIGNASNFENSRQLAAWLGLVPRQHSSGGKQVLLGISKRGDIYLRTLLIHGARAVLQSVTRKQDAVSGWASRLLARRNNNIASVALANKNARIVWALLAKDKEYCAPVMNV

SEQ ID NO: 295370 - protein, 430 aa, unidentified
MKSNTQNAKIEAITEKTLVLGIDVGSETHYARAFDYRGIEYSKKPFKFSNTEAGFATFKEWILDLKERHEKDKVVPGMEPTGHYWFNLGKFLQDNEMKPVLVNPHHVKKTKELDDNNPTKNDRKDPKVIAGLVREGRYMIPYLPDGIDADLRTASNIRFQLQAELTRIQNRISRWFNIYFPEYKTVYGKPDAKSGMLILKAAPLPEDILTLGIDGVNQIWRDAKLRAVGRARAKTLIEAAEHSVGSKEGAMSARMEIRMLLEDYESRNTRLQEVMVLIEELVRKIPMAEKLLEIKGVGIRTVSGFLAEVGDISRFNNPKELQKLAGLALVENSSGKHKGETTISRRGRKRLRYLLFEVAMSLVSKNQEFRELHNYYTTRRLNPLKKMQSLMAIAAKLIRVFYAMLTKGVDYDPKKMVSDIKRPAVYLQAA

SEQ ID NO: 295371 - protein, 286 aa, unidentified
MDHYAGIDVSLECSSVCVVDASGKIVREAKVASEPAALIAWFGSLGLGLERIGLEAGPLSQWLFAAMRQAGLALELLETRHVRKAFEAMPVKSDRNDARGIAQLMRLRWFRPVYCKSMGAQETRSLLTARKLVQSKLRDVENSVRGILRGFGLKVDKTTELEFAARIQELVAGHPHLELIAKALLAVHAVLRNEFKAFEKQARKMARSDTPTRLLMSTPAVGPIVSLTYASAIDDPARFRSSKQVGAHFGLTPGKYHPARPTIPAGSARSATARCAPRSMRLPTSC

SEQ ID NO: 295372 - protein, 433 aa, unidentified
MLEAEDEPLFADRAAGIDIAKAGIEVTIRVPSDTRRGGRQQETRAFRTTRKDLLALADWLRCWQVTKVGMESTGDYWKPVYFLLEREGLDCVLYHAAQVKALPGRPKTDKLDSVWLAKITERGSLPGSFVPPAEIRRLRTHTRYRRHLTQARTAEKQRVEKLLEDAHLKLSSVISDIHGVSGRAMLEAIAAGERNPKTLAQLARGTMRGKIRQLEEALDCAFVTEEHAAILTMMLAAIDYHTARTEELTAKIEVLCEPYLHQIEQLDAVPGTGAVTAQDVIAEIGTDMTVFPTAAHLVSWAKWCPQVAQSGGRRKGANASGRGNRYIGAALGEAAISAGRTQSFPGMKYRRLVKRMPKRKALVATGNSLLTIYHALLSDPQAAYTDLGADYYERRANIRRQARNHVRGLERLGYKVTIEPIDPATGEIEAATS

SEQ ID NO: 295373 - protein, 338 aa, unidentified
MGTYAGIDLHSSNNYIGIMDQDHKRLFGRRLPNSLDKILLVLEPFKADLKGVVVESTYNWYWLVDGLQEHGHRVHLANPSAIKQYEGIKHTDDKWDSFWLAHMKHLNILPEGYIYPKEQRTVRDLLRRRLFFVSHRTANILSLQSTITRNLGIKMSSNEIKKLDLDDACDLFDCSNLVFMAQNNISTIKHLAKIIKGIEKQVRPQVELRKEFVMLTTIPGIGLILGLTIMLEVGDIGRFFKVGNYASYCRCVDSKRVSNGKKKGENNKKNGNKYLAWAYVEAAHFAKRYIPKAQRFYQQKMAKSNGAVATKALANKLARASYFIMRDQVAFDEDMLFR

SEQ ID NO: 295374 - protein, 342 aa, unidentified
MTVIGIDAHKRSHTCVAVNDGGAKVAEKTVASTSAGHAQALRWALTRFGTDLSWGVEDLRSMTGLLERELLAAGQKVVRVPPHLMARNRGSARAWGKSDSLDALAVARAVLREPNLAAAFHDPISWELRLLVDRREDLVGQRVAVTNRLIGRLHQLSPDRPTPAHLERTKSQLALAEYLREQPGLLAELARQELADIGHFGRGISALTEDIVGRVRELDSTLLQLQGCAELTAAKLISETANMDRFRNEAAFARYVGVAPVPQSSGTAVGRVRASRSGNRQCNTAIHRIAIVQLRLKGPVREYYSRRRNEGDTAHTAIRCLKRRLCRIVYNRLRADYQHRNL

SEQ ID NO: 295375 - protein, 389 aa, unidentified
MIYVGIDVAAEKHACCILTESGKVLKQFTFSNDMPGFEKFHKALLTPSETKIGLESTGVYGNNLAEFLRRNGYETHIFNPLLVKKSIQATTLRKTKTDKSDAKHIAQYTKEHSQPNPKISYHTSELKSLSRGRFSLVRERSKVKTQAKGLLVQLFPEFSQAFSDVFGAAASAVLRQLPSARMISQCPVGVLTDLLRTASHGRLGKVKAELLIDLAEHSVGIQSMALELQMQMLLQQIDLFTLQINRYEAAIKSEMETIQSPITTIPGIGCVLGAAILSEIGDIHRFTAPAKLQAYAGVDPSVGESGTSVSTPGRMVKHGSHYLRWALCQAARCVSLYDPIFAAYMKAKRDEGKHYCVACSHVAKKLTRVIYSILKNNTAYSLTYSQIGA

SEQ ID NO: 295376 - protein, 277 aa, unidentified
MLFTHFVGVDVSKDTLDFAVVVSNKVLFHQQVSNDKKGITQFLKELRKQTKVNLVDCLFCLEFTGIYNNPLLNALYQKASIWVERAAHIRDSLGLCRGKTDKLDAKRIALFAYKNREDARLWAPPRQVISQLDRLTAQRARLMKAIKLLKTPLTNTEGFISKEDRNANQQACSHSLKALKADLKATDKSIAAVIESDPELKHLFERVTSIKGISQTTAVEVIITTNEFKSITDPKKYACYAGVVPFEHSSGQRKGKPKVSQMANKKAATAWSNPYST

SEQ ID NO: 295377 - protein, 356 aa, unidentified
MNEGSCVGLDVHARSVVAGVLDAASGELRSQRVPAGNEATVAWLKTLPAPVRVVYEAGPTGYGLARACAGAGISCVVAAPSRIPPAADRVKTDRRDAERLARLLRLGEITPVRVPGPDEEAARDLVRAREDARSDLMRARHRLSKLLLRHGAVYDATAWTRAHDQWLRKQRFQGGPLAIVFDECYSRMIDAKTRRDTLDKAIAELAATHPYVDVVERLVCLRGVSTLTAFALTVELGDWNRFRPESLGPFLGLTPSENSSGQRRRQGAITKAGNTHARRLLIEAAWHQRSAPRWSITLERRREGKPLAVRAQAEASARRLHARWEALEARGKPRLIVVVAIARELTGHCWALATMN

SEQ ID NO: 295378 - protein, 403 aa, unidentified
MNSVGIDISKGRSTIAVMRPFGEVVISPFEVRHTGSELSKLAKQLKSLDGETRVVMEATGNYHAPVAKLLHDAGLYVSVVNAKLVHDYGNNELRRVKTDRKDAVKLANYGLDRWLTLPRYIPEEDTRLLLKNCYRQYRQYSKVQTVLKNNLISLLDTVFPNANRLFSSPIRGDGSEKWVDFVAEFWHCRCVSEKSERAFTSKYLRWCRKHGYNFREAKAHTIYAEASGHIGVMPKSETTKLLVEQAVAQLRATSTALAALKHEMQSLASQLPEYPVVMDLFGVGPTLGPQLIAEIGDVRRFYSKKALVAYAGLDAPPNDSGDVTGRHKSMSKIGASSLRRTLFLVMSVYLQTAPLDEPVYQFMDRKRAEGKPYRVYMMASANKFLRIYYATVKAYLESLEHTA

SEQ ID NO: 295379 - protein, 375 aa, unidentified
MKKVRFLGLDVHAETIAVSVAESDGEVRSLGIIANRQESIRKLVKKLGPAEQLQACYEAGPTGYVLYWQLTALGVKCDVVAPSLVPIKAGDRVKTDRRDAIKLARSYRAGDLTPVWVPDEEHEALRDLVRAREAAKQDQLRARHRLSKFLLRHGRRAPSGVKMWSQRYLDWINKQVHFEQPAQEYTLSDYWHEVEHVAGRIRRLEQAIEEAVKLAPARMQEVIQALQALRGIAQISAVTIVAELGEISRFTRPRQLMGYSGAVSSEHSSGKRIEHGPITKTGNSHLRRIVIEAAWSYRHRPSQGWALRQRQKELSEEVKEIAWKAQHRLHQRYRKLLAAGKNKQKVITAIGRELLGFIWAIGTQVEQNNKQSQAA

SEQ ID NO: 295380 - protein, 398 aa, unidentified
MNHITKLLEKVNTESFKDIQTRNYPAYVGMDTHKDTIVVSIAIPGRTKPKHLGTIANDPKKIAILVKNISKKHNDEVVLFCYEAGPCGYILYHQITSLGHDCMVVAPSLIPQKSSKRVKTDRIDAQKLARYLRDGSLTSVWIPNTEQEAMRDLVRIRVDFKIQETKAKQQINGFILRNGHIWPKGKSRWSKSFYTWLEELKFKHPWQQVVLQEYFDALSDCRDKLKRLCTYIEQVRLTWSQSVIIDSMRALRGIDTLAAMTILAEIGDFTRFEHPKKLMSYLGLTPSEYSSSTKRRQGAITKAGNSSARRMLVECAWSYRYPARKTKHIKHKEKDASVHAKEVAWKAQTRLCTRYQKLVQSGKNKNQIIVAIARELVGFMWEIVVVETHKLKQTQLLK

SEQ ID NO: 295381 - protein, 351 aa, unidentified
MSHKKAATVAHTIGIDTGKNTLHLIGLDDQGAIVLREKIARGRIAARLANVPRCLIGIEAGMATHYVARELGALGHDVKQVPPAYSKPFRQGHKNDFRDAHAIAEAVQRPSTRCVPVKTDDQLDLQALHRVRSRLVGQRTAVINQIRGFLLEHGIAVRQGLRFLRQQLPDILAKRSDVLSPRMIRIMEDLSGDWRRLDERIEHITKEIEVLAGTDVNCGQLMTVPGIGPIVASATVAAIGNGAAFARGRDFAAWLGLVPKQMSTGDRTILGRITKRGNRYLRMLFVQGARAILLRPKSWVKHSFGPWLTTAARRLHRNILTIALANKLARIALSVLIQGRSYETRIVPAAA

SEQ ID NO: 295382 - protein, 405 aa, unidentified
MGKVFVGHDWAEAHHDVFVEDGNGRRLGGARLPEGVEGVARFHALVADHVEDPADVVVATETDRGLFVGAMVAAGYTVLAVNPLSTSRYRERLSTSGAKSDPGDARVLAELARLDGHNHRPVAGDSELVESIKVLARAHQGLIWTRQRQLNQLRSILREFYPAALDAFPELNHSDALAVLAVAPTPLLGRQLSTSKIAAALRRGGRQRRVEQRAGEIQAALRTDQLAAPDLVSESMGSVTRALVAVAAELTTQIAGLELELADRFEQHPAAKVIRSLPGLGMTLGARVLGEFGDDPNRYADPKCRKNYAGTSPITRASGKSHVVLARYARNKRLADACQMWAFAAITTSPGARAFYDQHRAAGDTHHRALRALANRLVGILHGCLRHDTLYDEHTAWAHRTAAAA

SEQ ID NO: 295383 - protein, 353 aa, unidentified
MITIGVDAHKRVHVALAVDEAGQELSQWRGPNSPAGWLSLTQWAASLGSPRQWGIEGSWGYGRGLAQQLVAAGETVYEVNARWTAQGRRRVRKPGKTDRLDARAVALFVRQETSTLPRVLPEDETALLDLLTTEREGAIGESTRLRNQIHALLMQIDPEYHMRLPTLQSKAGLAALETYAFPGRDRLQQERAAAVRRLAKRLRLAVTQAEELAQQIKDLAGKGFSPLTKICGVNLITAGTLAGILGPGHRFATDAQLAAYAGVAPLEASSAGLVRHRLNRGGNRRLNAVLYRIVLTQAHHLPAAKAYIERRLSEGKTRREAHRALRRFVIRAIWRLWQECQPAQMAASAQRAA

SEQ ID NO: 295384 - protein, 458 aa, unidentified
MEVVLAKLRKNKKAHGLVAAPVMEPNAAGVDIGATEIYIAVPPDRDTQPVRRFAAFTEDLKAAADWLERCRIETVAMESTGVYWIPLFQILETRGMKVCLVNARHVKNVPGRKTDVSDCQWLQYLHAVGLLRASFRPSGQVCAVRSLMRYRESLVGMAAVHLQHMQKALDQMNLQLHHVISDLSGTTGMAILDAILCGERNPLKLAQLRDPRIKASPETIAKSLVGDYRREHLFTLRQSVTAYRSYQQLLACCDVEIEQMLGEFPDGAGPDTPVLADPKDRHRPRRNEMKFDLRGHLYRIFGVDLTEVPGLNALTAHTLLTEVGPDLSAFPNVGAFASWMGLCPDNRISGGKVLSSHTRKVNNRAARALRMAAQSLFRSQSWMGQYYRRMRAKLGAPKAITASAHKLARIVFHMLTNRHAYDETVFAQQEIQNQHRLQQRLMQQAKKHGFQLIPIAQN

SEQ ID NO: 295385 - protein, 433 aa, unidentified
MGNYAGVDWASEKHDVLVAGAAGERLLSATFAHDEQGLRSLCRALVRLEVELVAIERPDGLLVERLLDAGLRILPLHPNQVAATRDRFRVSGGKSDRFDAFVLCELARTDHHRFRVLEPDSDQTKALRALTRAREDLVGTRTALSNQLRAELARFWPGPLGLFTDLHSRISLAFLERYPSPADARGLGAARLQGFLVREHYTGRQKPAQLLAKLRRAPEARIGELELATRRQLVLSLAATLKALNGQIKQLERQIATAIREHPDGQIFLSLFRKPNSVICAAELLAEIGDCRARYPTRDTLAADAGQAAVAIESGKRKAACFRWACNKRLRGAICTLADTTRHHNPGRRTSTPAPAASTTTPARSAPSDAPGAASYGAAGKTGCRMTPPATAPCNSTSRSPSRPRRGPSLTTPPPSACTPAPSPPPPTPESKR

SEQ ID NO: 295386 - protein, 370 aa, unidentified
MDEGIKFFVGLDVHKDSIVMAVAEAGREPARAVGSIANDIAKLRKLLARYGQPGEVHVVYEAGPTGYGLQRELARRGYQCQVIAPSLIPRRAGDRVKTDGRDCRRLAELSRAGELRAVWIPDPADEAIRDLARAREDAVNARTQARHQLKSFLLRHEVRYPHRSSWTKTFYRWLGKLSFAGVGAQTAFTEYWQAVTAADERVARLTTALRGAISGWRFEAVVQALQALRGIDAISAIGLVAEIGDINRFAHPRQLMAYLGLVPSEYSSGERIMRGSITKTGNAHARRLLTEAAWNYRFKPRIGYAAQRRAEDLPQAIRDVAWKAQLRLSTRFARLKGRGIHVNKVCVAIARELAGFVWAIASTQVRLTQA

SEQ ID NO: 295387 - protein, 352 aa, unidentified
MLIIGCDFHPGFQQVAIFDNRTGEIQEKRLQHRAEAEEFYRSLAGREARVGMEACGHYPWFERLLGELSIELWLGDAAKVRASVVRKQKTDRRDAEHLLRLLMENRFPRIWVPSLEVRDVRQLLVHRHKQVQARTRTKNQLQAMALSQGVQKKRKLWTKAGRQELEQLPLLPYAAERRKRLLQSLDGLEAEIDELDRQVAEEARQRPEAVRLMTHPGVGPVTALAMVLTLGPAERFGSAKQVGSYFGLIPSEESSGGKQRLGKISKQGSSFLRFLLVEAGQTAARLDPQLKRFYKRLAMRKNRSVAKVAVARKLATRLYLMLREDWTYAQLCQAVMQVSPSHSVVEQNKPTP

SEQ ID NO: 295388 - protein, 340 aa, unidentified
MWHIGIDLHRQSVVVGAVQDSGEVRPVRRFACSEVESIVSFFTELRPFRAVIEATGTYRWLYSVLSPLGTVLLAHPLRLRAMLQRRSKTDRLDAMLLANLLRINQIPLAHIPDESYQRLRDLTRHRSRLVHAQVEGKNLLRWLLARHNVTAPYKYPFGPRGLYWFSRLDLGGADNQVRDELLERHAHYERQLKLIDARLETMRDEFPECQALLELHGIGTFTALVLIAEWGDVTRFRTAKQAAAYTGLTARVEQSGTHCHHGHITKQGSPWMRWVLIEAAMKIVGHDVALANFYTRIRKRASAKIARVAVARKLAEICWKRLRRWQADHQAAAKEVAMPV

SEQ ID NO: 295389 - protein, 420 aa, unidentified
MKAYNVDDFAALIGIDWADKKHDICEHPKNTKQYHYTVIKHKPEALHKWAMELKLRYPDQKIAIVCELKKGPLIYALAKYDHFVLFTVNPSAVANYRKAFTPSGAKNDPTDAFIQVEMIKLHIDKLSVIVPESTSMRALAQLVEYRRSLVQDSVDLSNKITATLKNYYPQALEWFKEKDTFIFCDFISKWPSLSAVKKARKQTLLDFFNRHNSHYETVNNARLLSIKEAVPLTEDEGVIAPNQLLMEVLIAQFKVLLMGIEQLDKAIKQLYKKQQDKAIFDSLPGAGPQLAPRLLVAFGHSRERYTDASQMQKYAGIAPVIESSGKKTWTHWRYSCPTFLRQTFVEWAGFSIRYSFWAKAYYEQQKSKGKPHNSIIRSLAFKWIRIIFSCWKTSTPYDESKYLEALKRRGSPLLKFAITS

SEQ ID NO: 295390 - protein, 410 aa, unidentified
MDVIVERVAALDVHKASVTGCVRVPDGAGGREPHLSEFQTTVRGLLGLRDWLAAHRVTQVVMEATGVYWQPVWHLLEDDFELMLVNARHVKQVPGRKTDMSDAAWLCQLAEAGLLRANFVPPKPIRELRQLTRYRKTQIAERQREAQRLHKALEDTNVKLDCVASDLLGASGRAMLNALVAGTTDPDALADLAKGRLRQKIPQLREALEGRFNDLHALLIGAILAHLDFLDEQIDALSDAIEQRIAPFEAAVELLRSIPGVQRRTAEVIIAEIGPDMSVFPSARHLASWAGLCPGNDRSAGKQRSGRTRKGSRWLNAALKDAAMAAMRTKNSYLRALYERQRSRIGHGKAIGAVKHSIIVAAWHMLTTGELYHDLGRDYYRRRDPERTTTRLVAQLERLGHTVTLQEAAA

SEQ ID NO: 295391 - protein, 391 aa, unidentified
MIYVGIDVAKDKHDCFITNSDGEVLFKAFTITNNLDGFNELHQKIASVMDDVTKVKVGLEATGHYSYNLLGYLIDKGLPTYVINPLHTNLYRKSLSLRQTKTDKVDARTIASMLMSDVNLKSYSDISYHNEELKSLTRYRFDKVKERAKLKTSVSRLVCILFPELEKLVPTLHITSVYALLSEFPGAKHIATAHLTRLTNLLSEASKGRYGKDTAITFRDAARASIGSNMPAKSLELKHTIKLIQELDSEIDEIEKEIKIIMDEINSPILSIPGINYRMGAMIIAEIGDFNRFDSPDKILAYAGFSPSTYQSGQLDGAYAHMEKRGSRYLRYALYNATKYVCHWDPTFAAYLAKKRAEGKHYNVAISHAVKKLVRVIYHLEKTKQQYIKAA

SEQ ID NO: 295392 - protein, 341 aa, unidentified
MNITTIGLDLAKSVSHVVCCNQAGKIVRKKMLRRTQILHFFSELSPCLVGVESCASAHYWAREIAKYGHQVKQIAPQHVKAYVRGNKTDFNDALAIAEAVVRPEMRFVRTKTQTQQDIQAIHVMRKKCERDRTANCNEIRGLLNEYGIIVPVGINHVYKSLPELFDRQVENGLSELFKELLERHYQKLVELDEHLDWYTKKIKQLSQHEACRRLQSIPGVGPIIASALYQHIGNGSEFKNGRAVSASLGLVPKQHSSGGKHNLQGISKRGDSYLRTLLIHGARAVMRVSKHKETPLSQWIKRIEQTRGRNKAAVALANKLARIAWALLAQGGDYQPELTTA

SEQ ID NO: 295393 - protein, 314 aa, unidentified
MEVMFDRVAGLDVGKDSVTVCVRTPGPRGGRRSETRTFKTMFGSLRVMRDWLVEAGVSIAAMESTSTYWKPPFYCLEEVMVVWLLNAAHMKAVPGRKSDVRDAEWIAQLLEHGLLAPSFVPPPEIRRLRMLTRYRVQLMGDRRRDLVRLELMLEDASIKLSSVASSLKTVSARAILTAMINGESDPVRLADMAKGKMRRKIPDLAQALTGHFDANHARLARSMLRRLDLVEQAMAELDQVIVEACQPWARQIELLQTIPGVGEKVAQVIIAETGGDMSRFPTAAHLAAWAGLAPAMNESAGRQSPAGKRHRTNG

SEQ ID NO: 295394 - protein, 316 aa, unidentified
MAKPVSKITLGIDVAKDQHIICNWTTEAITTLPNQPREIKRWLSTLPVPVRIAIEPTSHYHLLLVEEALALGHQVYLINPRQLVYYRQAVNLRHKTDPQDAWLLARFLEHEAEQLRPFQPQDRRAQQLWALLKRRATLVQCRQRVQQSFRHTNMTIKGLLSSHNQLLLRLDRRIQHLIRELGWWPDYQRCLSIPGIGPANAAAMVAAYHRGAFSGSDAFVAYLGMDVRMRDSGHFKGKRKLTKQGPSELRRLLYCASKAACCYHRFADYRQQLLDKGMSKIAARVALARKLARIAFTLMARQESFIQKENAYCTGP

SEQ ID NO: 295395 - protein, 330 aa, unidentified
MLYAGLDLSRKRLDFHLLDEEGATVEVGASPPDADGLRGLTERLDRHGAPIRAAIESMNGARFVHDRLELQGWQVEIADAQKVKGLAPLACKTDRIDAWVLAELARRDLVPAIWLPDPLVRAERERARWRLHLVRHRSSLKQRVHAVLLTHGKPCPVSDLFGVRGRQLLAQLALPEPWQGTIEASLRLIDEREREIDDCERELRRLGANHRYLPLLLTVPGISWVLAYTIAAELGDINRFPTPRKLAGYSGLCPRVYQSGERDLRGPLSKQGPRYLRSALVEAATHACTHHAYRDRYQKTKARIGKQRGAKAARISFIARSESAFGIDCY

SEQ ID NO: 295396 - protein, 413 aa, unidentified
MDPPAWCLVADLSTGRGGRPRAPPARRRDLIGAWPTSPVAVLSAVRLVRAAPARAYHTPRKERHGHHATAGAGVTVGVDSHKDVHVAAAIDQIGRILATTQVATTLRGYAQLERWACELGRVERFGIEGTGSYAAGLARWLTSRGRQVVEVNRPNRHKRRRRGKSDPVDAEAAARAALAGDDTATPKAATGAVEMLRALRVARRSAVKARSQAANQLDSLVVTAPDQLRAQLRQLPAARLVEVAAALRPGELNSPLAAVKLALRELARRHQALSAEIDRLDAHIGKLTSTTAPELLARRGVGAQVATALLVAAGDNPTRLASEAAFAALCGASPIEASSGKTVRHRLNRGGDRQANNALWTIVVTRMAYDERTRRYVERRTTEGKSKKEIIRCLKRYVAREVYRDVRATALST

SEQ ID NO: 295397 - protein, 320 aa, unidentified
MNAEIFVGVDVCKAWLDVAQVSSPLKDAPGELTSRVSNDEAGRAVLVKQLQRLAPTLVVLEATGGFEAAMASELCAAGVAVAVVNPKKVRDFARSIGVLAKTDRLDAQVLAKFAQATRPQVYALPDETQQEIIELVDRRAQLVSMRAQEKNRLATVKHVARTSVRHHIEWLDKRIKEIDKDLDGRLKDSTIYQPKYELLDSVPGIGRVTISMLLGRLPELGSLDRKRLAALVGVAPFADDSGRRRGQRYIQGGRADVRSTLYMAVFTARRCNGPIKALYDRLKAAGKAYKVAMTACMRKLLIILNAILKSGQPWRQIESA

SEQ ID NO: 295398 - protein, 457 aa, unidentified
MAYSTNAPPSAKQGRLITTPTSQVVINALYPSAIGVDVHHDLLVCAYQHLDIEKAEISTELHEFRCTSPRSFVDFAQWCYERTPNVILMESTGVLWRAPYESLEDVGFESEQLALVNARDIKAMVGRKTDKQDAIRLAEYARLGKFRKSFVPPRDIRDQRLIARDFRKCKSDESRHRNRVQKTFNALGLRLSAIFSNFTGKAATTILDAWCDGVDNLKEIVETKGSRLKAGTDAILDMLCKAIPEKVMSHLRKQREHLTYLQKRTDDVMATLREAQQPYQESIDLLTTIPGIKETAARLIFAEIGDDLSSFPDAEHFASWIGVCPGNNESAGHAHRSGTPKGNKYLRTVLIECAQAIGLMRKGVLFQRFQAFAIKKGRLRGVMTMAHLLARIIFSILKSRTPYREVSSTTLRDVNVKKVTAAMTTAIRTAGLTLRDGLLVVEKTGEILVDVEDCARA

SEQ ID NO: 295399 - protein, 320 aa, unidentified
MQKIALGLDISKLTIDAYFNGQKDFIRVMNNKSGIEKLIERIKNYQQQSKEIHACCEYTGVYYLPLASSLHDSGIKISVINPLSIKLYGEYRLRRTKTDKQDAKLIADYCEKENPPLWKPLSEKRNTLKVLNRRIEQLNVLLNMESNRKDVSDSVIKSGIGRIINAIKEEIESCKTAIQNLIDSDEELSHNQNLLQTISGVGKTTAAWLLSVLVDIDKFENSKKLISYLGLSPVIKDSGTSVRQAKISKMGDKKVRKALYYPARAVCLRSKLWRPWFEQKIKQGKHPKQIYVLMMCKIVKYAYAVIKTGQPFDEMRHKQA

SEQ ID NO: 295400 - protein, 416 aa, unidentified
MEAFMQTLIERGCGLDVHQATVVACLLIVRKDGKVQKQIRTFGTTTRELVGLREWLLSEGCTQVAMESTGVYWKPIYAILEGALEIVVANAQHIKKVPGRKTDVKDAEWIADLLCHGLLRSSFVPPKPIRELRDLMRYRRKLVESQAAERNRLLKVLETANIKLANVATDVFGMSGRLMLRALIAGKATPQEMSELAKGLLRKKIPELELALEGKLEQHHRFLLELQLQRLEAAEKDLAVLEQRIRQMLEPYAAQLALLDEIPGVDWTLAAVIIAELGVDMSVFGNVSQLASWAGVCPGNNESAGKRKSSRIPSGNVYLKSGLVEAANAAARAKGTYLRDKFFRLKARRGYKRAVVAIAHKILVAIDHMLSQQVSYNDWGDLYLDKLNKHHLTRNLVHRLERLGYTVTLTLEQKAA

SEQ ID NO: 295401 - protein, 311 aa, unidentified
MIDTIGIDISKDALDAFWVSEKKHRQFTNNKSGLRSLICWVEQAGTPLIVFEATGVYHRLLETSLAARNIPFAQVNPRQARRFAEGVGILAKTDRVDASMLAKMGALLDLEPGKPKSEILHDLKEMLTGKRALIKDRTAAEARLATATQQVLKQQLSRRIRQISKDLEQIDDVLETMIAADPVLHQKAEILTSIPGIGKATAFALIIEMPELGTLNGKQAAALAGLAPMSRQSGKWKGHERIQGGRSSLRKAIYMPAIVATRFNPDMKAKYAQLISNGKCKKQAFTAVMRKLVVLANALIRDGRKWNEFAA

SEQ ID NO: 295402 - protein, 436 aa, unidentified
MARTVALDVHKRFAEIAVHEDGGLRRLGRIETSQLRVFADSLGPEDHVVLESTSMTWAIAELLSEHAGRVTVSNPMRTRAIASAKVKTDKIDAKVLAQLGAADFLPEVWAPDQATRALRRRIAHRSSLVRQRTRLRNQVHAVLARNLIEAPFSDVFGQGGRRWLGEVALPEHEREQVDSNLRLHDALNVEIELVEGQLAEQALARPDVRRLMTIPGVGAITALALVAVVGDITRFPTPRHLVGYLGLDPRVRQSGEKKARHGHISREGQAHARGLLVEAAHTAIRTPGPLRAFHARLAARRGKQIALCATARKLTVLTWHLLTKDEDYRYGAVTITQRKLRALQQKSGDTGPKISLAGEAKRKILERRYLEEAERNYQNYVAFKARRNSGAGATNGDTTAMAVRAAHDARQAPQSPDACSSRSGSPAPADILAPRP

SEQ ID NO: 295403 - protein, 386 aa, unidentified
MIIIGVDPHKRMHVAGAIDPATNHRVAALQVEASLAGYRRLLKWADTFGERRWAVENAHGLGRHLAQWLLARGEAVEDVPSTATARVRELSRGGRRKNDVIDAAAAASVAALHGDANPVLPEDLTTVLGLLDERRTNVTTQRTRLVNQVHAVFRDLLPGGAPQNLTAATASRLLAGIRPVGPVEAARKQLARDLVSEIRDADQRLKLLTAQIAETVAATGSHLSEVDGVGPIVSGRLLARTHKMSRFPTAAAFASYAGVAPVEVSSADRVRHRLPRGGDRQLSHALHIAAVNQIRMPSSAGRAYYDTKIAAGKTEKEARRCLKRRLADHIWRLMIRDERDDAAGPGGQQGTTVQSSAAGSTPNTSSSDKSLPEPATPDSTTSQTAA

SEQ ID NO: 295404 - protein, 368 aa, unidentified
MKTGIVRQSIGIDCAKDEFVAAFCCSKELRGSDCKQTRAFKNNKQGFARFMAWQNKLREEEIALPMVMEATGVYHEQLACALFDGGCRVHVVLPNKAKAFARSINLRSVDDGSSARTLALMGMERQLDAWEKPQEVYIRMKHLTREREDIQQALASAKNQLHAEKAGAFSNPYTIKRLKGRIGFLERQVKEVETDLHALIRREKELEERIARVCTAPGIGWLTMTIILAETNGFHMVRNQRQLTKYAGLDVEKHDSGTSVHKPGRLSKKGNRHIRKALYMPALSRIRSEAKSKEFFKRLVSKHGVKMKAVAAVQRKTLVLAYTPLEEQHTLRSAAPGACYGQRKRAAPGGCPERAGLKPLSENTVHQN

SEQ ID NO: 295405 - protein, 386 aa, unidentified
MEYIAFDAHKHYTLASVAQPDGRLVREQRLAHERGAFQQFLARCEPGSPVALETVGNWYWIVDEIEGAGCVPKLVHARKAKLMMGQINKTDKLDARGLNTLQRNGTLPTVWIPLGELRDQRELPRTRMTLVRQRTQLKNRLHATLAKYALHDLEVTDLFGVRGRQLLRQRCELLPPHTAYATRELLEQVESLDRQVTGFEPRIKSVFKPTLPIQLLTTVPGVGLTLAVVIALEIGDVTRFPTAEKLASYAGCTCRVHASGDKLRYGRLRPDVNRYLKWAFIEAANAICPMRRRHPHRHTSRLYERIARRKGHPKAIGAVARHLAEATFWLLSKQEAYREPQASTVSSTGDKRDLAMSSRSSSFDCDIPWNNHHAAPTAKIWLRRTD

SEQ ID NO: 295406 - protein, 316 aa, unidentified
MEREVFVGIDVAKAHLDVALDDEAECKRYTNDDAGISKLVEYLKSRQVALVVLEATGGYQRQALSELLAAGLPGVAVNPRQVRDFAKALGKLEKTDEVDAKVLARFAASIRPASRPVVDDATQEFQALLARRRQLMEMLVAEKNRLHQHATKPVRRSIEAHIEWLRKQVGDTDKDLEERLRDSPAWNPRVELLESVPGVGRITSMTLLSELPELGTLNRKQIAKLSGLAPLNRDSGTRRGQRSIWGGRATVRTALYMATLVATRYNPTIKAFYERLLSRGKAKKVALIAAMRKLLTILNAKLRDHARASNTTPLPT

SEQ ID NO: 295407 - protein, 391 aa, unidentified
MTILVGIDVAKDKHDCFIMNSEGEVLANPFTILNNKEGFDFLYEKIQSVSSSDKIKVGLEATGHYSYNIIGFLLNKGLATFILNPLHTNLYRKSLSLRKTKTDKIDSKTIAMMLLSDVSLKSYSDISYHNEDLKSLTRYRFSKVEERAKLKTSLSRLAQILFPELEKLVPTLHMTSIYQLLEEFPSASAIASAHLTRLTNLLSKASKGHYNRETAIKIRDAAKNSIGSNMPAKSLELKHTIKLIRALTIDIDEIEAEISKMMDKIASPITTIPGIGRNMGAMIISEIGDFSRFSSPDKILAYAGFSPSTYQSGKVDNCYAHMEKRGSRYLRYALFHAAKLVCHWDKTFADYLAKKRAEGKHYYVAISHAVKKLVRVIFHLEKTKQAFLKAS

SEQ ID NO: 295408 - protein, 341 aa, unidentified
MEEDIIIGVDLAKNVFQLHGARRDGQVVFRKKLSRPQFAKFCAEHPRSLFAMEACATAHYWARELMSLGHEVRLIPPIYVKPFVKRHKNDAADAEAITEAALRPNMSFVVPKSAETQALTMMMRTRDQLLEQRTATVNALRGHLAEFGLIAPVGLKNVERLRELVDVHPDLPELVVTMAKMHFNRIDQLSEEVDTLTGRIKSHCADSPEARRLQTMPGIGPIAAMVIEAFAPDMKCFEKGRDFAAWLGLVPKQHSTGGKTRLGQTSKMGQKDIRRALIIGAMSCIAAAARRSKRCHPWLQDKLDRKPKMVAAVALANKMARQIWAMITREQGYQSSQEVAA

SEQ ID NO: 295409 - protein, 408 aa, unidentified
MEVVYRCCCGIDVHKKIIVACLNQGGEQSLREFGTTTSEIKSLATWLTESGCEMIAMESTGVFWKPLYNLFELMDLDAIVVNAAHMKALPGRKTDVKDAEWIADLLRHGLLKASYIPSREQRELREITRYRKSLTEERCRETNRLQKILEGANIKLDSVVKDINGKSARKLLEKIIEDDVPTSEEEISKMIHGRMRSKLGQLVTAIEGITTPLQRKLLAQVIDHIDDLNRRIADLDKLVQDYMDEYEAAITALCDIPGIARRSAEVILAEIGLDMSRFPSAAHLCSWAGVCPGNCQSAGRRKHGKTTKGNKPLKTILTQCAKSARSVKGSYFSAQYQRIAARRGKNRATLAVAHSMLIAIYHMLRNNVPFRDLGSDYYDSFNRDRKIHGYLKRLKALGWEPDALPGSA

SEQ ID NO: 295410 - protein, 341 aa, unidentified
MNNNTTICIDLAKEVFQVAVFNQAGKAKLNKEVTAKKMCLIIAQYPDAAIYMEACGSAHHWARHFTASGHKVGLIPPHIAAKYRVGNKNDKNDAMSIYEASRSQQLHCVQIRTLEQQDIATLHKFREGYKKERNQIANRLRGFGREYGVNFAVGISKLLKQVPITLEDAENEMTVVARRIIFRLLEQLRHVIMLMAEVTDEIKTIAKQIDACQRLVQLPGVAWLGASMMYAKFGSAECFRRGRDASASIGLVPAHSGSGGKVTIGGITKRGDTYLRTLIINGARSLVIHVKEKTDGLSCWIRQLLSTKGFNKTIVAVANKLVRMATAMLKSGLEYRQPVAQ

SEQ ID NO: 295411 - protein, 428 aa, unidentified
MDEVNRNRLEEFRQLRQEIRHSGEYLIVGVDIAKDRHHAFFGTATGKTLLRRLVFSNDYEGFRKLLDQGETLRVRHGLKKVVYGMEPTANYHKPLGEYLITQGRRVVLVSGVTVKQNRESLDGRWDKHDVKDSANVADLISQGKCLYYEYASAKLRGLRGLLSLKRRLKKQEHGYRVRIRNHLIAQYFPEMDRDYERLGAEGLSIVRWCFPPSQMTELDVDPFIERVASRRVGMEKRRRLEGVWERAGVSIGCEGVPGVEHEAKVMVEGLRQIREIVKETEDKIQELCEQFPEYKYLLTIPGFGPDVSSKVLGAIGEPDRFQNGKQVLKLAGLDLSADRSGKDSAKAVPEISKRGKADLRYALYQAALIASTKNPDFMRYYASKLEGRQKEKRIQTKMWVKLSAKMLVIAWTLMKKKEAFDPAYLTAE

SEQ ID NO: 295412 - protein, 338 aa, unidentified
MNIVFLGIDLAKNVFQLCGLNQAGKPVYTKRTGRKELLQTLANIPACLIGIEASTGAFYWQREFEKLGHKVKVISPQYVKPFVRGQKNDGNDAQAIAVALRQPTMQFVPPKSPEQQDILALHRARQRIVNHRTATVCQIKGLLLDRGIPIGSAVSRARRAIPLILEDAENGLSSRMRRTIAELYDLFNDLGRRIHFFDKEIETVFRQSEACQRIAKVKGIGPKRATAVVAAIGKGTEFKNGRHFAAWLGLVPRQHSSGDRQVLMNMTKKGDKHLRTLFIHGARAVVRVATNNNNGHMNQWVNQLKERCGFNKTTVAVANKNARIIWSMLRNETGYQVV

SEQ ID NO: 295413 - protein, 365 aa, unidentified
MNDIKIGIDAGKEKIVCAYRSNGVGEVRVVTLANRKEALKPWIEKLQEDGIVQVCYEASSVGYEMYRWLTGWGAECEVIAPSLIPKKAGNHVKTDTRDAKELLSLHEAGLLTPIHIPTPSEEALRDLVRSRGDMNKVLTMQKHRLNQFMQRHGRVYGGKSHWTIAHFKWLSEQRFTEPASERTAAFYRRWVDEGRAELERVEAAIREIAPHHPKTYALAQRLMSFHGIDQMSGISLASELLDLRRFSKAAELMAFTGLTGREYSSASVVRRGSITKTGNARVRHVLIQAAWKYARKPSESKRLREHWKTQPASVNRVAQKARDRLHKRFCHLLAKGKVKQKAVTAVARELAGFLWAAGQLAETAA

SEQ ID NO: 295414 - protein, 347 aa, unidentified
MIWIGIDAHKRVHQAVALSVDGVLGQRVIANTAVGWTELIHWASSWPERLWAVEGSGSLGRGVAQFLARRDERVYEVNPRWTAQRRRGLRRPGKTDALDAQAVARLLREEGESLPLVQAEEVAVASLQLWSRLRDDLVLDMSRLRNRLHALLLLCDPEYRHVIRSLRSRRGIQAARTYAAPGSGELDRVRERAVRQVADQIALLMDQELELRANIEAGVRENFAPLLGIDGVQVIVAAGLIAELGMPRPGFGVPQIAVLAGVAPIEASSAGEVRHRLSRRGNRKLNMLLYLIALAQERAYAPAQAYMARRQQEGRTKREARRALKRHLVRRIWHQWRACWPRAQRPI

SEQ ID NO: 295415 - protein, 340 aa, unidentified
MRELYAGCDLHGNNNLVGIIDGEGKRVFKKNLLNNLPLIRDALKPFQRELVGIVVESTYNWYWLVDGLMGEGYRVHLANPSAIQQYVGLKHADDKHDAFWLAEMLRLGILPEGYIYPKGERPLRDLLRKRGHLVRLRTSLVISLQNILSRNQGVSMIVNDVKRLKEDRISPLLEGNEDLAMAGRVSKEAIDFLTRQIRKIEGVVEKKVALKEGYRYLLTLPGVGKILALTIMLETGPIFRFEQVGDYVSYCRKVPSQWMSNGKRKGAGNKKNGNKYLAWAYSEAADYSRRFYPEPRAYYNRKMQKTNSVVAHSALAHKLARAGYYVMRDQVPFRPEKLFG

SEQ ID NO: 295416 - protein, 313 aa, unidentified
MSNSLPQTIGIDISKATLDCYVHPIGIERQFPNTTKGHKTLIAWAGQWEVERIAYEATGIYHRALEVALGHMPCVKLNPERARRFAQATGTLAKTDRIDARLLARMAATLQPPVRSARSPQQNQLAELVNARDGLVRDRTALKNREKNLTVTLLKRQCSQRLEQIARHIAALDAEIAAVIAADEKLVRRHHILTSIAGLGTLTANQIIATMPELGSLDNKQAASLAGLAPVARQSGQWKGKSFIRGGRANVRQALYMPALVAARFNPNLKAKYQQLIAAGKPAKIAITAIMRKLIVTANALLRADRLWTTACA

SEQ ID NO: 295417 - protein, 310 aa, unidentified
MQDILECCCGLDIHKESIVACLLKGPVNNQPTSEIRVFSTLLSDLDSLKAWLVEENCMHVAMESTGIYWVPVYETLETAFDGHMSLIVANARHMKNVPGKKTDMKDAEWIATLLRAGLLNGSFIPEKDIREARDLTRYRKSVISNITSQKNRIEKFLQSCGFRLSSFISDIFGASGSAIIKHLYTHGSITIKDLDSCLKAQTRNRINEIMQAINGRLDKHQMQFLKMMFSHLESLKAHLSEVESQINSFIRKYEHQIELIDGLPGIDKIAASTILAEIGTDMSKFKTAEHICSWAGLSPGNNESAGKKNE

SEQ ID NO: 295418 - protein, 477 aa, unidentified
MRKPAEIVDADHELVIERVCAIDVAKASGMVCTRLPQGAAAGRRVSRVWEVAATTRAVTELADHLVAVGIEQVTVESTSDYWRIWFYLLEARGLDVQLVNARDVKNLPGRPKTDKLDAVWLAKLTEKGLLRPSFVPPVEIRVLRDYTRLRVDLTRERTRHWQRLEKLLEDALIKVSSVASKLDTRSVRDMLEALIAGERDPRRLAELARGRMKTKRAALVEALSGRFDGHHAEIARMLLDQIDGLSAAIDQLTTRAELLLQTLLAARAGDQPAGGAVPAPSSGDPRQAPTEARTEAPTEASVPANGPLAHRGGNGLSASQRLDEIAGIGPLAAQVVIAEIGLEMSRFPTAGHLVSWAKLCPRTIQSGATRRGGAAGKGNPYLKGVLGEAAAAAAKTNTFLGERYRRLVKRRGKLKALVAVARSILVIVWHLLSDPTARFYDLDPDYHTHRIDTTRKIQNHISGLTALGFRVTLEPAA

SEQ ID NO: 295419 - protein, 344 aa, unidentified
MEHYAGIDVSLESSSVCVVDASGRIVREAKIASEPAALIAWFREIGLAMARIGLEAGPLSQWLYAAMREAGLAVELLETRHVRDAFKAMPVKTDRKDARGIAQLMRLGWFRPVHCKSLPAQETRALLTARKLVQSKHHDTEMSLRGILRGFGLKVGKTSQRTFASRVHELVAGHPTLLLVAEALLAARAVLGEQLSKLEKRVRSLARHDRRVRRLMSAPGVGAVVALTFVAAIDDPARFRSSKAVGAHFGLTPKKYQSGETDMTGRISKIGDAGVRTMLYEAANVIMTKPVKGSLLKSWAMRLALRAGMRKAKVALARKLAVVLHRMLADDTEFVADKAATAAV

SEQ ID NO: 295420 - protein, 413 aa, unidentified
MRRVIGMDIHRTFAEVVVWEDGRLRPAGRVDMTRAGLEGFGRNLTHEDEVVVEATGNALAVVRVLTPYVARVIVANPLQVKAIAHARIKTDKIDAGVLASLRAADFLPEVWLPDVETERMRRLVARRNQVVRHRTRVKNEVHAILHAHLVPPCPHADLFGRLGRLWLDGQPLPDDERAAIARHLRELDRLGEDLDVLDTDVAQAAIDDPAIKRLLTITGVNLIVAAGLVAAIGDVRRFADPQNLVSYVGLNPRVRQSGLGLAQHGRISKHGRAHARAMLVEAAWAAAKAPGPLRAFFLRIRARRGHQVAAVAVARKLAVLCWHLLTKDADYQWARPALVANKLRAMELQAGAPAKKGNKRGAAYAYNVKQLRDREIDLARHAEHAYERFVQHWQPRRRTGRTGRTGAANEERR

SEQ ID NO: 295421 - protein, 339 aa, unidentified
MKLYVGDDLHANNNYIALVDGKGKRVEQKKLPNDLFVILDFLKPYQKDIVAIAVESTFNWYWVVDGLMDSDYKVHLANPSAMQQYSGLKHVDDKHDAFWLGQMLRLGILPEGYIYPKEDRPIRDLLRKRRHLVKLRTSLMVSLQNIISRNCGVSFRANEIKRLKEDRVSPLLESNQDLALAGQTSKEMIDQLTRQIQKIEGTVVQRVQLRETYRYLPTLPGVGKILGLTIMLETGPIGRFADVGNYASYCRKVPSRWTSNEKTKGKGNQKNGNKYLAWAFSEAAEFARRFDGQARAYYTRKMRKTNSMVAHSALAHKLARAAYYLMKDQVPFVPEKLFS

SEQ ID NO: 295422 - protein, 366 aa, unidentified
MTTRRRSTSCTSTDPPVPGEVVLGVDTHGEVHVAAVISPLGKVLATESFPATAAGYRRLLVWARKRGTVRRAGVEGTGTFGAGLSRYLLAQQVEAYEVNRPDRSARRLPGKSDPLDAQAAARALLSGRAWARAKSGDGPVHSARILKLAKDSAVKARTQAINQLKAVLVIADPALRERLSSLGNRELFRTCARLGPGDGEDGEDAVAQATHMTLRMLTEHIEQLTGQIDELNRRPTRFVERHAPRLLVPVGIGPDSAVTLLITMGDNPERLNTEASFAALCGVSPIEYSSGRRSTRRLNYGGDRQANAALHRIVFTRLRHDPRTQAYYERRTQEGKTRREIVRCLKRYAAREVFNLVRPISRTPAL

SEQ ID NO: 295423 - protein, 373 aa, unidentified
MLLVLLRPPQSKVVLPILFVESEQLISAVCKNEPEFARSDYKRTLLALIRQHGEYRMEAVAVKSCFVGIDVSKKVLDICILPSKSRFQVENNGDFEELCQQLTAISPTLIVMEATGGYEDRCYRALNAAGFRVSREPAINLYHHRKSTGKRAKTDKIDAEVIAHYAQCYCDSIRVQEPHSDTQECLRQLVNRRAELVSMQASEKNRFNAPAVLTEIKFSCQWVTEILQAEIQRIEGLIQAAIEQQSELKAKQEQLQTVSGIGQITANGLLAWLPELGQASHGQIAALVGVAPYHQESGQWQGKRRISGGRTPLRCLLYMATLTAIRKNPKLNEFYNHLIQRGKAKKVAIVACMHKLLRILNAMLRKQEDFQVT

SEQ ID NO: 295424 - protein, 361 aa, unidentified
MQFTTLIAFDQHAATTVAAVLAPNQRTPALQSMTSDTATIVRFVERLRRQRAVRCCYEAGPCGFELQRALTARAVPCDVIAPALIPRRTGDRVKTDRRDAAQLAILYRAGALTPIHIPTDQEEAARDLLRCREDIRADLLRARHRLSKFLLRHGRRFSGTKKAWSKAHDAWLRAHTWPIPALDQTHAAYLRTVDEAVARLRSVEADLRTLLELEPLRPRIQRLRCFRGIDDLTALTIAAELGDPRRFASAPRTMAFVGLVPSEHSSGMKQARGAITKTGNAHLRRVLVEAAWHYRHRPFVGAALQRRQQGAPAAIVAQAWTAQQRLHRRYHRLAGRGKPSQHVITAVARELTGFVWAALIQ

SEQ ID NO: 295425 - protein, 348 aa, unidentified
MTVTIVETRAITGGVDTHADVHVAAALDPIGGLLGVQEFPATAAGYASLLGWLGGFGPVCLVGIEGTGSYGAGLSRHVTAAGIRVVEVDRSDRQDRRRQGKSDPLDAVSAARAAQSGRARGAPKGRDGAVEAIRALMVAKRSAAAERTQTINRARALVLTGPEDLRARFTGHTVAALVAELASLRPRPGSTVGYATRIALRELGRRAEFLGAQLERLDELIVPLVTAHAPGLLALYGIGPNTAALLLIAAGDHPGRLRSEAAWAHLCAAAPVPASSGKTIRHRLNRGGDRQANHALWRIVFTRMGSHPATRAYVERRTAEGKSKKEIIRCLKRYVAREVYPHLRASAG

SEQ ID NO: 295426 - protein, 441 aa, unidentified
MSELLKSTPAEPEWVAFAAIDWANQKHFWQLLPAGSQRYEEGELDNTPEAIEVWAANLQRRFGGRPIAVCLEQSRGPLVYTLTKYPHLVLFPVHPTTAAHYRETFSPSGAKSDPHDAASLLDLWVRHRESLRPLQPDTQETRLLHFLVEQRRQLVDEKTRHSNRLTAALKLYFPQILHWFDDLNSSLVADLLQRWPTLEELQHAHPGTLRKFFHAHNCRSEERIQERIEGIYQATPATKDASVVEAAAMSTRAAMALMATLRSNIAVLELRIADLVAAHPDRNVFTSLPGAGEILVPRLIAAFGTHRDRYQNAYEMQCYSGIAPVTEASGNSEWVHFRYACPKFLRQTFHEFAEISMRYSIWAKAYYDHMRNDQNAEHHVAVRSLAFKWIRIIYRCWKDGKPYDEEAYMETLRRRGSPLVEALALATSTEWKTIAGFQKLS

SEQ ID NO: 295427 - protein, 326 aa, unidentified
MERTAEGGLWVGIDVSKDRLDVALHEGGATVEAFAVPRDAAGLEALTARLGPLQPRLVALEATGGFESIAAAGLAGAGLPVVVVNPAQVRSFAQALGRRAKTDPIDAAVIAHFAAATQPELRPLPDEQTRLLADLVGRRRQIVQMMVAEGQRKRRLTEPRLQRSIERLLAALQKELSELDGEIDDQIRGTPVWREKEALLCSVPGIGKRIARTLLAELPELGQLDRRRIASLAGLAPWTRQSGQWRGQSRIGGGRAVVRSAVYIGAMVAARRNPVLKVQRESLRAAGKPPRVALIAIARKLLTILNAILQSSTPWRTTTSAKEQTA

SEQ ID NO: 295428 - protein, 410 aa, unidentified
MTDKNIAQSEPVLVAIDISKARHEVLIAVPGKKRRRRLTVLNQLDDFNRLIATLSDYNRPVRVAFEATGNYHRALAYHLAAAGFEMKLVSSVALARTREALHNSWDKNDPKDAQVILHMMEIGNEQFYHDPLMRGTNDIQELSKTHDIVSKSKTELWHRILTHYLPLYFPEADRFHRSSRSDWFFAFLERYPSPHLISAMGKEDFIADAWTVVGRRVSKERLLADIYETAKTSVGLPVDADSDALRMFRLVLAEGRGLIAQRNEIENRSIALLKDDTDYQLLTSIPGIGPINALTILAEAGDLRHFGHHRQFLKFCGMDLATIQSGTFRGQTKLSKYGNARMRRTLWMAGQVAILQRANSFRDKFERYIAKDRQNTHLRRKAYTAIAAKMARTVHGIIKHGEPYRPFFEG

SEQ ID NO: 295429 - protein, 326 aa, unidentified
MLYAGMDVHKKFCQIIVCTKEGEVIRKGKVKTNEKEIREFFCGLKNVKVAMEASANYSYIVDALAKEGYEILVAHPLKTRAIAEAKIKSDKIDAKILADLARGNLLPTSWIPPKEIRELRDLIRQRIFLVKQRTKLKNKIHAELIKRGIECRGNIFTKAGKEWLHSLKIPAIETYLSIMEKLEEEIKKMDKRLKEEEKKFKETELLKSIPGVSTFSALVILAEIGDVNRFPDEKKIFSYAGLVPTVHKSGDKVYYGRITKQGSKYLRWILVECARIHVRKCDSKITEFYRKLKRKGKHENVAIIGAARKLLQTIYYMLKKGESFQG

SEQ ID NO: 295430 - protein, 352 aa, unidentified
MTIMSEHVEVVYGVDSHRDTCHIAVVNATGGVVEDFEITTDAAGYDRAVELAGAGPQRRVWAVEGCGSYAAGLVRVLQAAGERIVEVERPKRHRNNTPAKSDRLDAIRAAREVLSRDHTELASPRLSAHHDRLSVLVMARRAAVDAAGDATRQLHAAILVAPDELRDRFRALSTSRKIKLAANLRPDNYRDPVCADTARALRSIAHRIQTNQHETYELTTHIRTIVNQWRPDLLDNRGVGPIVAAVVLCAWAHPNRFRSDAAFKMFAGTAPITASSGLTHRHRLNPAGDRQLNRHIDTIVLCRLRTDPATRAYRNRKRAEGKTNREIRRCLRSYITRQLFRQLQHPPTPTTG

SEQ ID NO: 295431 - protein, 415 aa, unidentified
MDYAGKNLKPAQSRHLKGQVMKNCNVKVSGSNKGSKTQEKRMANYPAYIGLDVHSKTITVAVATWGREEPESRGTIANTPKRVAKLIKDLSTEFGGEVLLFCYEAGPCGYGLYRQIMNSGHECQVVAPSRIPSRPGDRIKTDPRDARKLARYLRSADLKPVWVPDVEQEAMRDLVRAREDFKYQEKQARQQLNSFLLRNDHVWPSNKQRWTEAHFKWIESLEFRHDWSYIVVQEYLDAVKAATQRVADIMAQIEMLLPQWSLSPVVDSLMALRGVNKLGAIIILAELGDISRFDSPTQLMSYIGLVPMVHSSGEKTCRGRITRTGNSHVRSLLTQSSWTYRFAARKSKHMKKKEANASEEAKAIGWKAQKRLCGRYRYLMNRGKNAKVTVIAIARELIGFIWDIVCHEMPKLQRA

SEQ ID NO: 295432 - protein, 430 aa, unidentified
MKSNTQNAKIEAITEKTLVLGIDVGSEMHYARAFDYRGIEYSKKPFKFSNTEAGFVTFKEWILGLKERHEKDKVIPGMEPTGHYWFNLGKFLQDNEMKPVLVNPHHVKKSKELDDNNPTKNDRKDPKVIAGLVREGRYMIPYLPDGVYADLRTASNIRFQLQAELTRIQNRISRWFNIYFPEYKTVYGKPDAKSGMLILKAAPLPEDILTLGIDGVNQIWRDAKLRAVGKARAKTLIEAAEHSVGSKEGAVSARMEIRMLLEDYESRNTRLQEVMVLIEELVRKIPMAEKLLEIKGVGIRTVSGFLAEVGDISRFNNPKELQKLAGLALVENSSGKHKGETTISRRGRKRLRYLLFEVAMSLVSKNPEFRELHNYYTTRRLNPLKKMQSLMAIAAKLIRVFYAMLTKGVDYDPKKMVSDIKRPAVYLQAA

SEQ ID NO: 295433 - protein, 351 aa, unidentified
MVVVGADVHKQTHTFVAVDEAGRRLGEKVVKAISDGHAEAVMWARERFGADVIWGIEDCRNMSARLERDLLSAGQKVVRVPTKLMTQVRASARTRGKSDPIDALAVARAVLREPDLPVACHDEVSRELKLLVDRREVLLAQRTSAINRLRWWVHELDPTKGPKPRSLDRAKPREALRVWLDTVVSVAAELARDELADITRLSEQIDALAERIGARVRDVAPTLLAIRGCGELTAAKIVGETAGVTRFKSEAAFARHAGVAPIPVWSGNTEGRVRLSRSGNRQLNTALHRIAITQIRLNGSPGQAYYRTRIAAKDTTAGSRRCLKRHLSRVVFRALHIDDQIRNQSPQTAAA

SEQ ID NO: 295434 - protein, 420 aa, unidentified
MKKHSKSCRQSEPTTKRAKSRGPVQRDAKEVMAEVLEKLTGRGVLDTRVESGRARKGRRENTVGPNLDRLTVGVDLGDRWSQYCVLGLKGETLAEGQLRTTQEDVREFFQALTAARVVIEVGTHSAWVQDVITEWGHEVLVANPRLMEGSKRRKRKSDRIDANKLARLGRVDPQSLYPIRHRSREVRQDLVVLRARDALVSVRTELINTTRGLVKSMGTRLPRCSSPSFAQKVKDAIPVEVREALLPLVQLVETVNDGIERYDQKIEELGREKYGHTTLLRQVKGVGPITSLAYVLTLEDPQRFSSSREVGPYLGLVPKQEDSGDSQPQLGISKTGDRMLRRLLVGSSQYMLGAFGPDTDLRRYGVRLCERGGKNAKKRAVVAVARKLAVLLHHLWVTGDVYEPLHHTGAETRTAQAAAA

SEQ ID NO: 295435 - protein, 330 aa, unidentified
MNYSHFVGLDVGKKSFDASLVSLDQELSHHTFPNTPEGIEELLHWIKQHGVEVETALFCAENTGSYVIDLCLSSYQYHFPLALECPLTIKKSIGLQRGKNDRIDARRIAQYASLHYRKLRLYELPDKDLVRLRNWLVIRDNLVKQKVSSLKLLELTRETSRLADLMVPMTFLENQICQIKEKISYVEEEMEKIITENITLSTNYQLLTSIKGIGPVNAIVLLCVTDNFQRFSAPRKFACYSGVAPFEYSSGTSIRGKTKTSHLANREVKVYLTRAAITAIAWDPQIKAYYKRKIAEGKHKASVINAVRAKIIARCFAVIKRKTPFVTLSA

SEQ ID NO: 295436 - protein, 326 aa, unidentified
MTNAARENQPDYVGVDMAKARFQWAVHGAEAIQDATNDATGFEAVLVDLRQRRVGLIVIEATGGLEHALATVLLQHGLPVAVVNPRAAREFARSMGHLAKTDALDARALAHYAHTLAHKAKRDAVVLTPTPAHVQALQAMVLRKRQLLEMRTAEINRRGGAMRVLRKSIDAVIQTLNQQLATLDKDIDAHLKEHFEELNERLDRIKGVGPNTCASLMAFLPELGHIPSARAAKLVGVAPLNNDSGTSRGRRSIWGGRSIVRCALYMATLSAVHHNTVIAAFYERLLAAGKPKKVAQVACMHKLLRILNAMARTGKAWDPTRHGFPA

SEQ ID NO: 295437 - protein, 350 aa, unidentified
MNETGLYWIGLDVADRTFDAAVARSGDRASASAFKGLPAQTFERTPEGVEAFVAWLQTLVPGSAPLPARAVMEATGNYSIKLAAMLSNACPELRPAIVNPEWTCAFRNSLGLRNKTDRMDARALAFYGRERQPEPYEPLSPEQARLREMSRCRDGLIRSRTAHENQLAQTPGCPLVRSTLKAVIARLQKAIERIEQAMRDLIQTHPSLQSDYELLTGIPGVGFVTAAVVLAELGDLRRFGKARQVTAFAGITPRQNQSGNHTAPGRMSKKGNGRVRQALYLSAMSAITYNPALAATYRRLVADGKKPMVALGAVMRKLLVLMWAIVNSGQPFHAGGKPRGNFNRQIQKTP

SEQ ID NO: 295438 - protein, 421 aa, unidentified
MSTPTCPIFAAQVGLDWADAKHDFCLQPGGDGNREFGRFSHQPDQIDAWARGLKERFGGTIAVALELSKGPIVYALQKYDFIVLFPVDPSLLAKYRVAFKPSRAKDDPTDAELALELMLRYPTHCQPLHPQSVAMRTLSYLVQQRRMLVDDRKRIVNRLCYALKQYFPQTLEWFEHRDTPLFCDFLTRWPTLQQVKRARAATLEAFFHDHNVRREPLVARRVEGIKSAIPLTEDVAVIQSFHLLALTLVDQLRVLLQAIARFDEEIALVAPKLPDYQLFSTLPGSGPTLAPRLLSAFGEQRERFQNAGQLQRYSGVAPVTQRSGKKSWVHWRWQCPTFIRQTFVEWAAQTINKSFWAGAFYQQQRAKGSPHQVAVRALAFKWIRILYRCWVTHTPYDESRYLKALQLRGSPLLAGLSTKTA

SEQ ID NO: 295439 - protein, 342 aa, unidentified
MSFYCGIDLGARESQICVIDKRVKKVLEEKVPNKLEHIKQLLTPYRAELEIVVESTFNWYWLVDGLQAAGFKVVLAHTLGLHMITAAKVKTDRRDAFALAKLLLAGMIPRAYIYPAETRPVRDLLRRRGWLVQVRAGEYGSLRRLLLRQGILSRQQQEIKQAEEADLEKWFTHELVRLHASQELERISLYSQQIETLEKTILEQAKKEWAFEQLQQLPGIGPIIALTIYYEMGELERFATAKDFSSYCRVVPGVAQSGQMTRRGRGSKQGNPYLKWALSQAAVHAVRCYPGVRRYYQRQLQRHPGRARQMVVYNIIAHKLAQAIYHMLKERSEYREELLFGR

SEQ ID NO: 295440 - protein, 403 aa, unidentified
MSINGAPVMTATVVAVDVGKNRAALSVTDAGRRCLLGPVDFAMTAPALAAVLGRVCAVLPAAAVKVGIEAAGHYHRPLLVAAVWPVGWQLLELSPARVAEQRRVQGRRRVKTDAIDLEAITELVLAGHGVPVAARAAAVTELTGWAAHRRRRVQTRTATKNQLLAQLDRCFPGLTLALPDVLGTQVGRLVAAEFADPRRLAALGVTRFVRFAAHRGLRVRRSAADRLVAAAHNALPSPEAGVARQVLADDLMLLADLDAQILAAEAHMARLLPDTPFQPLTTVPGWGTVRAGNYGAAVGDPHRWPAARQLYRASGLSPAQYESVGRRRDGTISREGSVPLRRALIDLGIGLWHADPAARRYGQALRARGKKGAVIGCAMAHRANKIAYALVRDQTGYDPARWA

SEQ ID NO: 295441 - protein, 328 aa, unidentified
MAHFVGLDVSVRETSVCVVDAAGKVVLEQKVPTEPADLIALLTSLGQTYGRIGIEAGPLSQWLVNALAAADLSVICVETRHMKALLTAQQINKTDRNDARGIAQMMRVGLFKPVHVKTLVAQEQRMLLTSRKLLQRKLLDVECDLRGTLGNFGLKVGVVSGGRYEARVRELVASFPRLAAIAEPLLNVRRVMRQQFAILHKMLLDTVRGDPICRRLMTAPGVGAVVALTYRATVDQPQRFVHSRAVGAHVGLTPKRYQSGETDYDGRVSKTGDALLRTMLYEAAHSLLIHSGKWSWLKAWGVRVAQRCKFAINSDPLRVGNRVQSRPH

SEQ ID NO: 295442 - protein, 438 aa, unidentified
MKVMHERVAGIDVHKKMIKVAVRSPGEKPWTRKTEIFTFRTFYGVLRAMAAELRRRGVTHVAMEASGIYTEPVYYALGEEDFTEVLVVNPAHAKALKGHKTDARDCARLAELLECGLLQGSYIPAAELKEVRDLTRYRSKTVQARTSEIQRLGKALESAGIKLGSVASSITGTSSTAMIEALIDGERRGTVMADLAIGHMRTAGKLADLSMALEGRFTDHHALMCRLHRDRIAGLDAAVAGLDARTAAKTAPWQREINLLKTIPGVGDTVAWTWIAEIGPAPHRWFGTPEKLASWAALAPGNYISAGKRKHGRTGDAGTYIKPMLVQAAWTAIRARGRLQARYNRLVRRMGGPKNPAAKKKAIVAIAHTLLKIAYTILKTGTGYQEPGEDFYTRRETPGHRQAWLESQIGKLHPGCTVTITISPPQDPAPQAASTPGT

SEQ ID NO: 295443 - protein, 400 aa, unidentified
MQRIDDQVCWRAAAHEHDTSLFVALELSRSVWLVAVNAPGSDKISKYRIRAGDNEGLLKLLSRLKAEAERRCGGPTKIVSIHEAGLDGFWVHRLLEANGMESHVVDAASIAVERRSRRVKTDRIDVERLLRTLMGWARGERRICSMVRPPSPMEEDERRLTREREILISERTRHVNRTKSLLATQGVFDFEPIHKDRRTRLEQLQCWDGQPLPPRLKIELIRELDRLELVMSQLAELEAERDRALRARQVPARNVDQEPSPAPPSVGEAGRLLLRLRAIGPEIASVLSLEAFYRSFGNRREVAAHAGLAPSPWRSGGIDVEQGISKAGNARLRKTMIQLAWLWLRHQPDSALSHWFRERVGDRRGKIRRITIVAVARKLLVALWRYVTQGIVPEGAGLKA

SEQ ID NO: 295444 - protein, 397 aa, unidentified
MYIVWIDIAKRKHEAAVIDGEGAVIIKPFSFTNNCSGYNRLLAMLTKAKLPLDEVSFAMEATGHYWLALFTRLQKEGFRVQVINPVQTNSIRSFYIRQAKTDPRDALLIAEVIRFGHFSESTLHPENIYELRELCRGRHAIVSMQADVKRKVVALLDQVFPEYETAFTNMFSDTSMAILQTCPTPKELSEMPFEELCHLIEVSSHKRFRMAKARELQELARNSFGFAMAGDVFSTMIRLYAKHLDFLKQQVREMDRKIAEIMETLDTPITTITGIGPTLGAYILSEIGDISRFSSAAKLAAYAGIDPTMRQSGEYNGVRNRMSKRGSPYLRHAIWLAASSAVLHDPALKLYFQKKRDEGKPYMASVGHACRKMVSIIYAVMRDNKAYTPCIPNEISA

SEQ ID NO: 295445 - protein, 412 aa, unidentified
MQTLVERGCGLDVHQATVVACLLQVRQDGRVQKQMRTFGSTTRELVSLREWLRTEGCTHVAMESTGVYWKPVYAILEGAFEIVVANAQQVKKVPGRKTDVKDAEWIADLLCHGLLRSSFVPPKPIRELRDLTRYRRKLVESQAAERNRLLKLLESANIKLSSVATDVFGVSGRLMLKALVEGKASLAEMAELAKGKLRNKIPQLQLALEGKLEEHHRFLLQLQQDRLDAAERDLSTLEQRIRQKLEPYAAQLSLLQEIPGVDWTLAAVIIAELGIDMTVFQCVSQLASWAGVCPGNNESAGKRKSTRIPKGNVYLKTALVEAANAAARAKGTYLRDKFYRLKARRGYKRAAVAIAHKILVSIYHMFSQQVSYNDLGDLYLDKLNKNHLTRNLVHRLERLGYSVTLAPQQIAA

SEQ ID NO: 295446 - protein, 425 aa, unidentified
MNISNTDLTSYAALIGIDWADKKHDVCLQIAGSPERELSVLPHKVAAIDAWACGLRERFGGRPIAVCLELSQGPIVSALLNYDFFVIFPVQPKALANYRRTFTTSGAKDDPTDAEFAVDFLTKHPEAFHPLRRERVEIRTLQRLVQDRRDFVHDTTRVTNRLTYALKAYFPQVLDWFGDKNTLVFCDFLTRWPTLRAAQAETDDTLAAFFRDHHLRYRLIIAARIRDIRAQRPLTEDDGIVEPNLLTVANLVAQLRPLITAVAAYDRRIAKLCAQVADYHLFDCLPGAGPTLAPRLLAAFGENRERFAGAAAVQKYVGIAPVTERSGKKHWVHWRWACPKFIRQTFVEWAGESVTRSFWARAFYDRQRHKGASRNAALRALAFKWIRILYRCWVDRVPYDESAYLSSLQRRRSPLIQFIAAEAVA

SEQ ID NO: 295447 - protein, 344 aa, unidentified
MGEVSTIGLDIAKSVFQVHGVDDAGAVTIRKRISRSKMLEFFVELPPCLVGIEACPSAHYWGRELQGLGHIVKLMPPSYVKAYLKRSKNDANDAAAICEAVTRPSMRFVPIKTKEQQTALMLHRTRQLLVRQRTMLSNALRGHLAELGIVSAKGRNGTGELLQIIADDADHRVPPAVRGILDVLARQYSALGTEIGSIDKSILVLHRSCEASRRLAEIPGIGPIVATALVAEIGDWKTFSSGRSLAAWIGLVPKQHTSGGKDRLGSITKQGNRYLRWLLVVGAMAVIRSAKMHGTKNRPWLARLMERRPTKVAAVALANKIARMAWAIMVHGERYKEPKLLLAA

SEQ ID NO: 295448 - protein, 370 aa, unidentified
MKKTDKYVGLDVHQDTTVIAVADGGRVGEVRSYGTIPSDLQALAKVLGKLGGEGVRLHVVYEAGPTGFVIYRRLKQMEIDCIVVAPSKTPQPKGVRQKTDRRDALQLARLHRAGELTGINVPDEVDESIRDLTRARADAVHDLTRAKQRLKALLLRQGYRYPGKANWSDAHQRYLRKLTLPLPALRSVLEEQILAVDQATERVKRLDELIEAQVPQWRHYPAVQAVMCLRGFRLNAATVIVAELGDVRRFAHPKNVMAFLGLVPKEETTANTRRLGSITKAGNAQARWCLIEAIQKALTPPKVSSHLSLRQNGQPAAYKELAWKIQVRLHKRGWHLLQRGVMKAKVNVALARELAGFIWDLLRQVPAPEA

SEQ ID NO: 295449 - protein, 394 aa, unidentified
MFFVGIDIGKLSHMFCILDASNNEVIVKPVSFKNDKLGFDFLMNQLKSYPKDHLLIGMEDTGHYHFTLLKFLLDSGFSVALINPVTTDLTRKIQLSSTKDDDLDTLTICDVLASNQRRKSYRISKIDSFDLYEQKRLTREHHDLKEQLNVYTNKLQKCIDIVFPEFNSLFRSKYGSIYMNVLKTFGSADSIAHADIRNIRKCFEANRKGRRISLTPEALKEAARNSIGFPSKAEVIELRHLIDIIELINVQISEVDKKIEEFSVQNNSPILTIPGISHFSGTSILAELGDLRNFSKVSQVIKFAGVSPSKYKSSQYEAQHTAITKKGSRYLRKTLYQVILPVIRYNPVFNAFYRHKLSQGKGHRCAQGHCVRKLLRIIYHLVTTDQSFDPKLLR

SEQ ID NO: 295450 - protein, 344 aa, unidentified
MIYIGMDISSKSFVVHGIDEKKRVLITGEIAPTRVGLKGMIRGLGTQKKLVIFEAGNQLKWIAKTLKDMEGVEIHVVHPNEIKWINQSSGKTDKIDARKLAHLGRGDMLPRKVHIVEGKIRDLRELLSARQRLQSKRVALINSIRGQMKQEGHSLPAKFFQSKHWREKLKGIKTGEVQKLIIESFMDSIGGLLIAEKKLTEKIGTIKDKGIELLESIPSLGRLSSRVIISALDDVGRFDSKKCVAKYGALTPRIYQSGGITHLGRVNRDGRQEVRRVLLQCAHVIVRMRSYGARPLREFFERIMKRRGKKIAIVAVARKLLTIAYGVLKSKTAYDPLRLTGVTA

SEQ ID NO: 295451 - protein, 348 aa, unidentified
MLANELDYVLGVDTHRDEHVMAVVTAPAGAVIAGAAAPANARGYRELLRIAERHAPGRRAWAIEGTGSYGAGFARYLAGRGETVLELSRTPRAERRLQGKDDELDAVRTARAALASQTLALPRAGERREALRLLLVARRSAVDVRRGALSQLRAVIVTAPEPLREQLRALPTGALVDRCSRLRRTTTTADELATRLVLRSLARRVQAATIEAAELEQEVVAAVRALAPALLDEPGVGPIVAAQLVVAWSHRGRLRSEACFARLAGVAPVPASSGQTTRHRLSRGGDRQLNRALHTIVLHRRQHDATTRDYIAKRIAEGKSRREATRLLKRYLARHLYRLLENQEPLMA

SEQ ID NO: 295452 - protein, 309 aa, unidentified
METEVGCDISMDWIDVCVLEPPRHFRVANKPKPVERLARELPPGSRIGMEATGTMHQLLADTMCAAGHTVYELNPRWVHRYAGGVGARGKSDRGDAMVIARYVHAEGAHLHPYRSPTPQQREIRTLLHRRAQVMKLKTASRQSLGDQANEVVQKFMQLVKDIDRRIATLLGADPQWKGLAAKLRRIPGVGPLVAAHLVEALARRPFEAVAAFIAYTGMDPRPNDSGRKKGIRRLTHHGDAHLRAALFMGAMAACKVARWRALYEHNRHKGLPSTAAFIVVARKLARVAFCLFKTGQDYDPERIGGVAPT

SEQ ID NO: 295453 - protein, 401 aa, unidentified
MVSDFMKGRYNLMKIFVGIDIAKLNHFAAAISSDGEILIEPFKFTNDADGFQLLVSKLESFDKNSIIIGLESTAHYGDNLVRYLVAEFYQGCVLNPIKTCQMRKNNVRKTKTDKVDTFVIAKTLMMQDDLRFITFFDLDMMDLKALGRFRQKTIKQRTRLKIQLTTYVDQVFPEIQYFFKSGLHQHAVYALLKEAPSPKEIASMHMTHLANLLKVNSHGHFTKEQAKELRVLAQKSVGANDSAISIQITQTIQQIELLDSQLEKIEAEMTDIMRFNDSVIMTIPGIGYINGGMILGEIGDIHRFSNPNKLLAFAGLDPSVYQSGNFQAKTTRMSKRGSRVLRYALVNAAWNVVRNNATFEAYYNAKRAEGRSHYNALGHCAGKLVRVIWKMPTDEVDFNLE

SEQ ID NO: 295454 - protein, 386 aa, unidentified
MPQPKDDLSRSLVALDQHSSLIAVVELSLSTWLVGGMVPGIERDPLKKLVPDEDGLLKLLHRWRDEAVKAGHQINRMVVAFEAGRDGFWLARWLRSRGIEAYVIHPTSVAVSREHRRAKTDRLDIALLKRSLLGWLRGEKKHCSMAAIPTLEEEGAKRPNREREQLVGKRTGIVNRMKAALVRLGIRGFNPKLRKAPQQLATLRTPEGGTIPPNTLAELQREMAHLSFINEHIKQIEAARLIQLKQAPQHGSNAKVVQLGRINGIGIETADMLANEVFSRDLRDQRAVARYAGLTGSPDESGRRRREKGLAKAGNARVRRGMIQLAWRFLFHQRNSALTQWYRQSVAAGKKRTTVIVALARKLLIALWRFVTIGDVPQGVILRTAS

SEQ ID NO: 295455 - protein, 317 aa, unidentified
MIENSIICAGIDIGKRKLGVAVCGAKAPLQVDNTSAGHEKLISWLQRHKVDRVGVEATGGYEQGIVRALRREGFPVVVFQPIQVRAYARFRLKLAKNDRIDASLIAACVASVDDIRAAPDPRFEAFAAAQTLIDQLTDDLVLYKTRRETAHDEPSRAFWEREIAGRKAQARSALKTLRAEMRAHADIATKLDLITSVEGIAEKSAVAILIRMPEIGTLSREQVTALAGLAPYDDDSGRRAGSRHIQGGRTRLRSSLYAAALPAAFFWNPQLITFYKRLRANGKTHKMALVACARKLLIFINTVLARATPWQPKSVTT

SEQ ID NO: 295456 - protein, 337 aa, unidentified
MMIVGCDFHPSFQQVAVLDTESGELQAHKLMHATGEAEQFYRRLIAPSLIGMESVGNSQWFVQLIEQLGHEIWIGDAAQIRASYMRKQKTDKRDAAHILKLLAEGRFPRIWVPDAEMRDQRQLLIHRHKLVQIRTRVKNELQHLMMNRGVQKKHKLWSVPGRAELEQLPLQHWAGRRREDLLCLLKMLDQQIEHMDQAVSVAAQQNDQVRLLMTQPGVGPVTALAFVLTIGDVKRFARSKQVASYLGLIPSESSSGGKQRMGAISKQGNRLLRVLLVEAANSAVRFDPEFRKEYAHRCHQKHRAIAKVAAARKLAVRLYWMLRTQTPYPKVVTSRAA

SEQ ID NO: 295457 - protein, 415 aa, unidentified
MRVIRKRCLGLDLHKKQITAHLRVHRGSSQEPEGLDIRFGTMPDELEELREWIREQQITDVVMEATGVYWMHVYELLEGVTTPAVVNAAHVKKVPGRKTDQTDAEWLSELHAHGLLRLSFIPPKEIRELRALTRYRTKLVAIRTGAKNRTIKLVEMAGVKLSSVVSSSFGKTGRAILDALCCEVRPDAAKIATLAKGTLRKKVAELERAVRHPLTDQQRELLKMHLQAYDAVDAQVAETELKLDRLAQPYSAQIALLDPIPGINPLSAITLLAETGIDMTVYRDERHLTALAGLAPGNAISADKRRKVSVRAGNRYMKRILVQIAWAASRKKDSFLRLRFMRLQTRIGRNKAIVAVARQILVLVYHVLATGKPYHDRGTVFYDRYNKEKAIARHTKRLAQLGFLVHLTKKDEPAE

SEQ ID NO: 295458 - protein, 415 aa, unidentified
MFKIVYPICCGIDVHKTFVVATIAATDQKNITTYKTKRFSTFTKGLMAMALWLQDNQCADVCMESTGKYWIPVYNILEPSCRITLAHPKYVKAIRGKKTDKKDSVWIADLHKHGLVPGSFIPPADIRAIRDLMRYRSKLVSFKSSEKNRVQDSLTVSNIMLSSVVSDTFGKSSSAIIQHLLKHPGDRDFDFRPLLHGSMLKKQDDIALAIDGAIDEVQAGKIALCLNHIDSLKCYIARVEAMAMQLAAPYSGAMRIIESEPGIDQISALVVLSEIGADMSVFHSDKHLCSWAGVAPSNDQSAGKKKSVRISHAGAYLKPVLVQCAVAAIRDKSFPHYRARYEAIKLRRGHKRAIIAIARMMLTAIYHMLSNGELFNPVLYEQANCKPGFVASTEEHAVKLLQRLGYSIVKLPDCA

SEQ ID NO: 295459 - protein, 361 aa, unidentified
MNIYRTNVGLDVHARSVVAHAIDEQTGKVVRDRLCPDPAVILAWLTALAGPVRVVYEAGPTGFGLARFLLAADIDCVVAAPSKLIRPKGDRVKTDARDAEHLARLLRLDEVTAVTVPDVAVEAARDLLRAREDARGDLMRSRHRLSKLLLRQGIVYSGGNAWTGAHERWLRKQAFEHPALTATFDNDFDAVLTVTARRDSLDEKILVMAHTDPYRDIVARLGCLRGISTLTAMGLAVEIGDWTRFTGSTIGVYVGMVPSEDSSGDTRRQGSITKAGNGHVRRLLVESAWHHRRAYSNPGATMRARWQAAGPAARARGHAGNRRLHQRWVGFDERRKNTCIANVAIARELAGWCWSLATLEA

SEQ ID NO: 295460 - protein, 421 aa, unidentified
METENIDYAAWIGLDWGSQKHAICLKPADSETVERYTVEQKPEALHSWFMNLIARFGDRKLAIAIEQTRGAVIHFLLGLASVHIFTIHPKSLKSYRDAIHPSGAKDDPSDAKLLLQFLTLHQHRLKPWIPDKPEVRLLLRLVEFRRKMVGKRVRLTNELMQLLKEYFPAALDCAGDLDKVMACDFLSKWPTLEKLQKSQPETIRKFYQEHGSRSRSVIEGRLKQIRVALPLTTDAPVIEPSVALMQSIAPQLHSVIDAIGQFDQRIKEVFEKHPDAEIFRSFPGAGAALAPRLLAVMGSDRSRFGSSLEVAEYAGIAPVTERSGKKIWVHRRFACARFVKQSFHEFAAQSILFCDWARCYYDQKKKEGKSHHSAIRALAYRWIRIIYRCWKDRIPYEEGKYIKALRQRKPDWLQSSPLNES

SEQ ID NO: 295461 - protein, 429 aa, unidentified
MSYRIAGIDVHKKVLAVVVSNVEVESEFQFERRMFGGNPEQLRALAAWLLEQEAEEVVMESTAQYWKPVWETLERYWKPLREKREGARRRSGTLHLAQAQSNRGRRGRKRDFVDAERLVKRLVARELTLSFVPDAEQRLWRTVTRKKYQLRRDLVRLNNQLEALLEEAHIKLSSLVSDLLGVSARRMLKALADGETNPAALAALAHERLRATPEQLCDALGACTELKPVYRRLLKMTLEHLQILEQQIGQLDQELATLLHPHQDAVHRLAEVPGFGVDSAQQIIAEVGPAAATFPSEKCLSSWVGACPGEEESAGVNYSHRSPKGNRHMRRILNQAANAAIKVKGSIFEIIYCRCVPRLGHNQAIGVIAHRQCRLIWLILHQGTPYEERGPAVTKQSRYKRTWRMIRQLRSLGYRIEPPNPQPSQARAQ

SEQ ID NO: 295462 - protein, 312 aa, unidentified
MEAKFVGIDVSKATLDVDCLPVSTPRQFSNDGSGIAGLVEGLVGSGVERIVLEATGGYEVAVASALAAAGLPVVVVNPKRVRDFAKAQGIIAKTDRLDARVLALFAQQIAPPVHALPDAAQRDLAELLDRRHQLVVMRTQEQARMATVLPVARSDVKQHIAWLDQRIRKHEGALLKRLRANEIWDAKVTLLDTVPGIGPVNLFTLVGRLPELGTLNRQQIAALVGVAPFNDDSGKRRGQRYIRGGRADVRCALYMATLAAKLWNPVIAQMYDRLIAKGKPFKVAMTACMRKLLTILNAILKSKKPWEDRLAT

SEQ ID NO: 295463 - protein, 387 aa, unidentified
MAKQNDLSRCLVTLEQDATVIAVIEIGQSSWLVAGIVPGLEGNPLKKLNPDQDALLQLLHRWRKEAVQAGRTIKRIAVAYEAGRDGFWLARWLRAREIDAYVIHPSSVPVSREHRRAKTDRLDTELLKRAFLGWLRGEPKHCSMAAIPTLDDEDAKRPGRERQSLVGQRTRIINRLKANLARLGIRDFRPNLARASSQLEALRTPEGAAVPANTLAELRRDMDHLRFVKQQIKEIETTRAKRLAGAPNGQHHAMVRLLARVIGVGIESADMLVQEVFSRNIRDRKALARYAGLTGAPDESGKRRRERGLAKAGNARVRRGMIELAWGHLVHQKASALTAWYRKRTSDARGGTRKTMIVALARKLLIALWRLVTTGETPTGLLLRPAA

SEQ ID NO: 295464 - protein, 383 aa, unidentified
MKAVCGLDVHKDSVYLCILSEFGELIEKVFGVLTFQLEEMRDLMLHHHVVEVSMESTSVYWIPIWRVLSPHFKLNLANPYFIKQLPGRKSDVKDAQWIAECTMKELIRGSFVPPETIQQLRQYDRRIFDLNEEIVRKLSKLDAVLQRCNIRLSNYVSNVDSKSYKAVVRAISQGITDPEELVKLIHGRIIKHHGMDVITASLKGVVSLAEIDMISQLRDELDMAEAHKEKCQARMLEICEREFPEELKRLQTIPGIKERAATSLIAEIGTDMNKFETANHLASWSGLKPRNDESNKKIKSRSITHGNVYLRKTIIECAWAASRTKNCFFSRFSYHQTQVRKKNKMKVLVAVARKMLIAVWHVLHDNTIYIDFTTDRKTSQTRG

SEQ ID NO: 295465 - protein, 346 aa, unidentified
MKKRSAKGEVKVLGIDLAKQSFQLHGVDESGQTVLRKKLTRNKLSAFVANLPPCVIGLEACGGAHHWVRVFKEFGHTVKMMAPQFVKPYVKSNKNDSVDAEAICEAVQRPNMRFVPEKSIEQQDMQSLHRIRSQLVDRRTAQSNQIRGLLLEYGIIVPQGIHHVRNQLPLILEAADNGLSDLSREFLHELYEELVHLNERIDALEKKLLRLSAQNEDCQRLLTIPGVGLLSATALVAAVGDVSNFKNGRELAAWLGLVPRQHSTGGKATLMGISKRGDCYLRTLLIHGGRTVVRVAHRHQDRRSRWVSELEQRRGKNISAVAVANKNARIAWALLSKKTTYQATAA

SEQ ID NO: 295466 - protein, 420 aa, unidentified
MKSASNTPMTQLPETPPNDVTGGLDWSRDDHAVSVVDTRGREVLRHNVEHTAAGLAELIALLADAGCGEIAIERPDGPVVDALLAAEMTVVVISPNQVKNLRGRYGSAGNKDDRFDAFVLADTLRTDRARLRALVPDTAPTVALRRACRARRDLIAHRVGAANQLRAHLRAVFPGAVGLFADIDSPISLTFLTRFTTQNQADWLSPTRLGKWLSGVGYCGKVDPAVLHARLVAAPRGLTGAHADAHAAITRAFVGVLTSLLEQIKTLTAEIEAQLATHADAHIFTSLPRAGRVRAARLLAEIGDCRAKFPTPESLACLAGVAPSTRQSGKIRAVGFRWACDKQLRDAVCDFAGDSRRANPWAADLYTRARARGHDHPHAVRILARAWLTIIWHCWQDSVDYRPTTHGALQRLLHDQNPTA

SEQ ID NO: 295467 - protein, 316 aa, unidentified
MTQISRTAGIDTSKVKLDVAVHGGVKRWQVDNTLVGWRRLAAELTSAEVMRVGIEASGGYECGVVSCLRAKGFTVLVLQPIQVKAYARLHLRRAKNDKLDAVLIAACAATIDRPRIEPDERLTKLAQHLTFVEQIEEDIARFKVRLEHVGDPRLRRMVMADIARLKGRRSAELLRIVTALHAHDDLARRLDLVLSVPGLGERTALALIIRMPELGRVCREEAAALAGLAPFDDDSGKHKGERHIAGGRSRLRRSLFAAALPAAFRWNKALIDLYRRLTARGKAHNAALIACARKLLIYANTVVQRGTPWIERPLSV

SEQ ID NO: 295468 - protein, 321 aa, unidentified
MNKNTEIFGIDISKDVFDVFSLENGHHQFANNEKGFKQFIKKLSKESLVVMEATGYYHYCLAQYLYEKGYAVSVVNPLSVKRFIQMKLSKVKTDKSDAKSICEYARNNEVPLYTAKDKSQAECLQLLRLMDTYVKHRTAMKNKLDGEKVLGIPSKAVYRSLSRTVKHLNKELSLLEARLIDLVKEDQQEQLRLLKTIPGIGEKAAILLVVFTDGFSKFENSKQLCCYAGITPTIRQSGSSVRGRSRISKIGNKKLRNQLFLSSFTACQYNKACRELFERIVAQGKSKKLALLAVCNKLLKQAFAIAKSGMPYNENFVSKLV

SEQ ID NO: 295469 - protein, 464 aa, unidentified
MKKRFSSPPSKSNRKLTKAGSRAIAINSSGDLRQINQHAAGIDIGAERHYVAVPPAADPHPVREFSVFTKDLYAIADWLQSCEVTTVAMESTGVYWVPLFEVLEERGFAVKLVDARKVKNVSGRKSDVLDCQWLQQLESYGLLQAAYRPKDEIVVLRGYVRQREMLVKNASSHILHMQKALQQMNLRLDNVVSDITGQTGMRILKAILEGERDTGKLGQMRDRRCHASAEVIAQSLVGNYRQEHLFALKQAVELFEFYQEKILECESEMEKYLKGLSGKRDDEPPPLAGGEKRQRCSFNLREYAYKLLGVDLFRVPGLNSQTLLQIMSEVGVDLSGFASEKHFASWLSLSPNRRVSGGKVLSSKTKASKNRAAKAFRQAAVNIGRSESEIGAYYRRMQARKGPAAAITATAHKLARLYYNLVKQGREYEEGGARAYEEKQRERIVANLRKRAKGMGYELVAVAA

SEQ ID NO: 295470 - protein, 346 aa, unidentified
MMIIGCDFHPSWQQIAWLDTETGETGEQKLVHASGEAEAFYRQRAAPALIGVEATGNSQWFIELVEDLGHEVWIGDAAAIRASYVRKQKTDKRDAAHILKLVVEGRFPKLWTPDREQRDLRQLVVHRHKLVEIRSRVKNELQHLSLNKGMQRKARLWSAAGQKLLRELPLKPWAACRREDLLGLLAMLNEQVSKLDQAVQHAAEQHPQARLLMTQPGVGPNTALAYVLTIGDVTRFPRGKQVASYLGLIPREYSSGGRQMLGSISKQGNRLLRSLLVEAAQIAVRFDPEFRKEYLHRCHQKPKGVAKVAAARKLAVRLYWMLRTQKPYPEIVRIESSSRVPLVGAS

SEQ ID NO: 295471 - protein, 355 aa, unidentified
MDSKKYIGMDVHQASISIAVMDATGKVVVESIIETKATTIVEFIRGLKGTLWVAFEEGTSAAWLYDLLKPRVAKVIVCDPRKNALLNAGNKNDRVDARKLSHLLRAGLLTAVYHGENGIRTLRELGRSYLTVNKDLTRVMNRLKALYRSWAIPCAGEKVYSPRQRNAWLEKLSQVGVRRRAEQLYQQLDALVQIRREARRELLTESQRHPATPLLRQIPRLGPIRVALLIALIQTPHRFRTKRQLWAYCGLALQTRASGEYRFSSGELQHCKRLPALRGLNVNHNHDLKNLFKSAATHVSTSTDPLGDFYRSLLAKGMKPTMARLTLARKMAAIVLSIWKKGARFDPAELKRQAA

SEQ ID NO: 295472 - protein, 413 aa, unidentified
MDVVYPCCCGLDVHKASITACVLWAEGGGRARKEKRRFGTFTADLLELTDWLRTCGVTHVAMEATGVYWKPVWNILDGSVAEVLLMNAQHIKAVPGRKTDQKDSEWIADLLQHGLLRGSFVPPQPTRELRDLTRYRVSLAQECNRIANRIQKVLEDANLKLASVASDALGASGRAMLRAIIGGEDNAATLAEMAKGLLRHKIPALREALTGRVTAHHRFMLRELLDDLDHAEAKMMTVEQEIDRRLRPFQDDVARLCTIPGVDRVTAWGLLSEIGFNMDQFPSAAHLASWAGMCPGNAESAGKRLSGKTRKGSAFLRRHLCQAGWAVSTKKHSYLSALFRRVARHRGTKRATMAVGHAILVIAFHLLKRKTTYMDLGPDYFDRRNADAVRRSLVKRLQNLGHSVTLAPAPVFS

SEQ ID NO: 295473 - protein, 323 aa, unidentified
MDGNPADSVPCVGIDVAKDHLDVLFLPENRFHTFPNNPQGFQLLLEQLKTSPGCRVVVEATGGYERRWAKGLGEAGLAVVTVDPKRVRHFARSAGQLAKNDPIDARMIAWFGEVFADHTPGKPQDEDRQELDQLVTARQGLKGLQEKLQGWGEHEQPEIVQEVHRALLKALAPQLRRLEKAIVAKLENTAHFAHRAEIIRSVPGLADVATSGLIALLPELGRVDRQAATALLGAAPFDDDSGEHRGQRHIRGGRRKLRNLLYMPIMGAATQHNPVLKAYYRRLLARGKPPKVALVACMRKLIGILNTMLARNEKWDPTKHAIA

SEQ ID NO: 295474 - protein, 408 aa, unidentified
MQVLYPRCAGLDVHKDIVVARVRCVSEPLHDEVRSFATTTAALLELNEWLASHTVSHVAMEATGVYWKPVWHLLEEQFELVLANAQHIRNVPGRKTDVNDATWIADLLAHGLIRASFVPPAPIQELRDLTRTRKQLVREISQHSSRIQKILEDANLKLGSVLSDVLGQSGRAILEALIAGETDPEKLADLARGTARKKRTELIEALHGRVRQHHRGLLKVHLELVAALEQALAEIDATVGKTLAPIRNSARLLTTLPGVSDLTAQVMVAEIGVDMSRFPTAAHLISWTGLCPRSDESAGKRRSSRVRKGAPWLKTALVTAAWAAVRAKNTYLQTQFHRLRSRRGAKKAILAVAASMLTAAYHMLKNGMPYRDLGPEHFSSRDRSKAIQRLVRRLNDLGCEVHLTPQAA

SEQ ID NO: 295475 - protein, 396 aa, unidentified
MTTIGIDIGGRSHAVARCRDGAGRADREIVRVSQSRAGFAALDTWLERQTEPVTLGTMESSGHYWMPLASHLRARGLAMAVVNPLAAKYFAKSRLARTKSDPADARSLAEMAMRDTPPSRNPLEGAELRQAARFAMTLVEEQAKVCQRLIRLVDLGFPELGELFDDPTCRTAREVLRIAPTARAAVRRRTSTLANANAGPGHRRLGEAKAERLQAAAADSIAVPELDAEVAFEVGLLLDQYDLLERQITDADARVATLLDGETARRLRTIPGVGPSIAATLLAEIGDIGRFTDFDQLLAYAGVHPAERSSGTKGANPETAWHMSKAGNSHLRAAAYRLAVVGVQHNPVIAAHYARKRAAGKSKMNALGHCMRKALSIVWGVWRNGQDFDPNWGPEA

SEQ ID NO: 295476 - protein, 452 aa, unidentified
MQEHPPAFDEIRRNVAGIDIAGCADHYVCGPRRDDGQPDICHFGTNTSELRRMLAWLKERRVASVAMESTSVYWIPVADLLESEGIEVVLVDTREVRMVPGRKSDVKDCQWLQKLHSCGLLRGAFRPPEAITAVRTLLREKDNLTTARTQWVQQMQKSCDQMNIRIHHAVSDIDGKTGLAIIAAILKGQRDPAELAKLRDKRCKKTEPQIAEDLTGTWREEHLFNLEQAYKMLMFTDEQIARYDEKIAEMYQRIATTSGRQGPLSTPGGEPSSGKAARDRAGKADLQRILGFDMTVIPGIGYDTAAVIVSELGTDLSRFPTEKHLAAYIGLAPSLGKSAGKNVRQRRRYRNTSKAGRALRMAASTLHKSQTEIGAFFRSVARRSDRKTAVKATARRMAHMIYRGVRFGVAYLDKGAEAFDKRLRMRTLKTVKALVKRHSISALELQSALAAG

SEQ ID NO: 295477 - protein, 414 aa, unidentified
MGNRTKNAARVNEKVMIVAIDIGKEKNTAYCRNNNGYGSKPFEFSNTHEGFSLFWEKVSKTRMVFSADRIIVGFESTGCYGEPLVHYLLKKPVTLVQVNPMHTKRVKELADNSPNKTDRKDPQVIADIIQLGHYLSLVVPTGAAAELRQLTHFRESIMDDRIAMINQLQALVGKIFPEFLIVMKNIDTKSALYLLEKYPFPEDMVRYGVKRLSKKLRTISRGRLGNERAQELVAVARNSVGIKEGRQSIRKRIQYSVRTIRDYDTRIDGIEDEMKQYLDRIDCSRSLMSIKGIKHVTVAGIIGEVGNFADFHSSDALEKLAGLNLYEISSGKHKGQKRISKRGRSLLRKILYFASINVVKKGCIMHEYYQRLINRGKLKIKALIAVSRKLLRVMFALVRNKTVCIVDQQVKRAA

SEQ ID NO: 295478 - protein, 335 aa, unidentified
MSTVPVFVGLDYHDRSVQVCVLDREGRVLANRSVANDVKEIAQVVAAEGRRVFAAIEACNGSAELAEELIKLGWSVHLAHPGYVARIKQNPDNTDFADARLLADLERVGYLPKVWLAPHAIRELRRVVRYRQQLVDERRNGKLRIGALLREQRIRCTESCRPWTIAWLRWLQEEAELSEQSRWIVKQHLRRIRELSKAITEVERRLRGMTAEDSVVETLLKLKGVGLVTAVTIRAEIGRFDRFRTGKQIARFCGLSPRNASSGQKQADAGLIKAGNPQLRATLIQAAHRLKRLDPRWRALAQQMRDRGKAGSLIAAAIANRWIRSIFHVMQPLAA

SEQ ID NO: 295479 - protein, 337 aa, unidentified
MRKKVLVIGIDISQGSFHVCAKERADDGSIAIKGTHSFTNDNKGFIELLEWVSKRVRNNSSAHYIMEATGTYYENLAYFLHEKGQIVSVELANKLKYFAKSLNVKSKTDKIDSKTIAEIGIERELTEWKPMSIEFKEMRDLSREILSLKKEKARSQCQLHAMEHSHEKTTSVLKIKESQIAFYSKTIKDLEDELTKVVKKDPELKERIDKVTKIKGLGFITVVIILCETNGFGAFNNIRQVVSYAGLDVQLKESGNFKGKTRISKKGNARIRQGLYMPALSATMYNDKIKSLYERVNERNPGIKKKGVVAGMRKLLILMFVIWKKNTEYDQNYQWGK

SEQ ID NO: 295480 - protein, 422 aa, unidentified
MFKIIRSNCCGLDVHKTWIYACIGITDTHSRTDYYEDRFSSFPKDLRRLAAWLLEHGCEEVCMESSGKYWIPVFNALEKTCKVTLAHPKYTKPQKGNKTDRKDARWICDLFMCGMIKPSFIPPPAIRHLRELIRYRVKLTNILTSEKNRAHNCLTISSLKLDDVFSDIFGKSARAITEYILAHPGELFDVTPFIDRRCKTPIDVIQDAVDGAISPEQAVKLRECLNHIDELFAHRSNIEKEILELVKPFSSQLALIRTVPGLDKDPMTAITILSEIGGDMSVFPTAKNLVSWAGCCPRNDQSAKHVKSTRIASAGSYLKPILIQVANALIKSSKHPEFSERYRRIKSHRGHKKAMIALCKMLLTAIWNILSTGEVYNPSGYILQSPRPVDEKKFLTQKQALELLRLRGFTIVDDSPHQAAPA

SEQ ID NO: 295481 - protein, 326 aa, unidentified
MNYSYYLGIDISKNHLDLSLIDSSNFRQDYHCLNTAEAVSETLLQISSTHNKLLLCAEFTGMYGFNLIQAALSLKLSLWMENPAQIKYSSGIQRGKNDPVDAWRIACYSLRFCDRAQLMRVQHETIEQLAYLDSERTLLVADRGKYKAQLSDQQGYMPAHIWQEKAHRLQQLIQSFEQHITAIEQRMLSLIDDDEMLARQMELLQSIPGVGPRLGCYMVIATQGFCRFKNAKAICCHAGIAPFAHHSGDNTHTRARVSHYADKRLKMLLHLAALSVIQHPGELKTYYQRKCEEGKSKMSVINAVRSKLVHRMFAVVMRGEKYVPDY

SEQ ID NO: 295482 - protein, 355 aa, unidentified
MSSEKYIGLDVHQATISVAVMDSQGKVVMESILETKASTLLEFFGGLHGSLFVTFEEGTWAAWLYDLLKPHVTEVLVCNPRKIPLLKQGNKSDKIDARKLAERLRLHDLKPVYHGETGIRMLRELARSYLTVVKDVSRVMNRLKALYRSWAIPCAGRDVYYTRHRSQWLEKIPEAGTRRRAEQLYQQLDLLQHLRQQARRELLAESRKHAITAQLRKIPSLGPIRSALAVALIQTPHRFRSKRQLWTYSGLGLETRDSGEYHFVKGQPRRRKKQATIRGLNKDYNHDLKGLFKGAATRASVKPGPFQEFYQRSLAKGIKPTMVRLTLARKIAAITLTLWKKGEDFDINKLNSQAA

SEQ ID NO: 295483 - protein, 411 aa, unidentified
MNHPKMRYTYVGIDSHKDMHTAVFMDCFFEKLGEVSFRNLPSAYPEFLAEAEKLKQDATELLFGLEDASSFGRTLAVFLAENGLPAKHVNSFLVARERKTQNITQKTDSIDAECAARVLMSRLGELPDAEPQDKFWVLRNLVVARKQIVKNNTLLKMQLHSLLTQHYPNYREFFAYTTGKTALAFFEKYPSPNTLEKVTTEELSEFLLDESSDRFGAVKAELIMGSLESTAADFQEIRDEIVRSVIRQIRFGMKEIERLENIMAKYLDEFGCPLPSMAGLDVVSSCQILSCIGDVKRFPTPAKLARYAGIAPVTYASGKKDMQFANLRGNRELNSHFFRLAVRLTSPVGPNNKLLNMFIYDYFHKKQAEGKTKRQALKSVERRLVNIIWTMLTNNEEYVNPPVIDKPDVKE

SEQ ID NO: 295484 - protein, 407 aa, unidentified
MAAVMIGVDPHKGSHTAVAIGVAEEPLGELRVRSSASQADQLVAWAAAWPERTWAVEGAGGLGHLLAQQLVTAGERVLDVQPKLGARVRLLSTGATNKNDPNDARSVAVAALRSATRRAVTADDHATVLKVWSKRHRDLGRARNQVACRLHAVLCELVPGGISKEITAAKATAVLEQAEPSGAVEAARCELAAEFLEDLRRFDVQMRDTKKKLAVVVRAAGTTVTEIFGVGPVVAATVIGVVVDVSRFPGRDHFAAYNGTAPIEVSSGNRKIYRLSRRGNWRLNHAIHMAAVTQIRHRHSDGRACYDRKLAEGKTHKEALRSLKRRVSDAIFARLQADARRAAAAAAVEGPGGQPGNDSVASAAGLHPEHRLFGQATPGPESTLRPATVRRRPVAPKRISKNTPSTP

SEQ ID NO: 295485 - protein, 469 aa, unidentified
MSKNIKLPKHLQHININAAGIDIGSTSHFVAVPEDRCEESVREFKTFTPDLHELATWLKECKVDTVAMESTSVYWIPVYELLEEKGFKVLLVNAKHIKNVSGRKSDVSDCQWIQQLHTYGLLSGAFRPDEDICQLRSYVRQRDNLIQCAGSHIQHMQKALDQMNIRLHNVISDITGVTGQKIIRAIVEGERDPKELAKYRDKRCKNDIEIIEKSLIGNYKEEHIFALKQALELYDFYQAKITECDKVIEEFLKILTQSEDKEESEEKKIDFPKKKKSKNTPKFELQEYLYQLARVDCTAIDGIDSLSVLKIISEIGTDMSKWETEKHFGSWLGLSPETKISGGKVLSRGTRTKSSANRVATILRICANTLYNSATALGAFLRRQKARLGSPKAITATAYKLAKIIYYMLKYKMEYVDVGKDYYEKKYRERMIKNMKRKAQLFGYKLVEIPKISENPKNKDMKNQVVGRS

SEQ ID NO: 295486 - protein, 467 aa, unidentified
MARKVKNIKGKGHKDYPQSLKTIKPHSAGIDLGSREHWVAGPPSKDGKPNVERFGTTTPELLRLADWLKEQGVETVAMESTGVYWIPLFEILDNRQFEVVLANARQISHVPGRKTDMLDCQWLQLLHACGLLRGSFRPSDDICQLRSLIRERNTMVQQRSDWVRRMQKNLDQMNVCVHHAVSDITGVTGMSIIRAIANGERDPHVLARLRDSRCRKSEEQITNELTGNWRPEHLFNLCQALKMYDQFCTVIADYDSEILSYLEVIQPTDNNDKSAPPPDSKSKAMNLTKRGQEPLRQALYRLCGFDLTTIDGIGVDTASVLVSELGLDFTVFPNERHFVSYLKLAPNLSISAGKKVPKKFKASTCTRVATALRMSALTLRNSKTALGAFYRRVSRYKGASVAVFATARKLAQYVYRLVCYGQSYVDGGAQAYEARFNLRHVNLYTKILNDLGYKVQTLTKDEAIDTC

SEQ ID NO: 295487 - protein, 345 aa, unidentified
MGEVITIGLDIAKSVLQVHGVDENGAVVIRKRVSRAKMLEFFGSLKPCLVGIEACPAAHHWGRELQALGHSVRLMPPSYVKAYLKRSKNDANDAAAICEAVTRPTMRFVAIKSKDQQAALMLHRARQLLVRQRTMLSNAIRGHLAELGIVSAKGRQGTGTLLGIIADAGDRRVPPVARGVLDVLARQYHALGSELGSIDRNLLAWHRSSEASRRLEEIPGIGPVVATALIAEIGDGWKAFRSGRNLAAWIGLVPRQQSTGGKEKLGSITKQGNRYLRWLLVAGAMAVIRYAQKHGTLKRPWLGRLMARRPTKVAAVALANKIARMAWAIIVHGERYREPGVLAAA

SEQ ID NO: 295488 - protein, 411 aa, unidentified
MKTYLLKTSPLVETKARRTAGRKPAPEEPAPAVAPTPPAGPVLCIGLDVHNDSIAVSIAPSDSTEVRRYGILGGTHDDVLKLAKKLQAAHPGATLKFCYEAGPRGYPLCRFLRAQGHQCLIVCPSRVPRAPGDRVKTDRRDADQLARLLRAGELTGIHVPEPEDEAMRDFLRTRHQIVRAQHRARQQLKMFLLRHNIRYAGTTSWTPKHLRYLGTIKMPFASQQFALQELIATITEAAARLQRFEAQLEREAAAWRWEPVVRALMSLRGVRLLNAAILVAELGDLTRFTRPAELMSYLGLVPSERTTGADRQQGGITKMGNGHARRALVEAAHQYRVGPRLSRQLQARQEGLPQGVTDTAWEAQRRLHHRYKQLSTVGRKKAPVIITALARELSGFVWAIARQVRPHERPR

SEQ ID NO: 295489 - protein, 412 aa, unidentified
MKDLLEISCGLDVHKEKIVACILTGPLGKPTRSEIREFSTLIPDMIALRNWIVSKNCHHVAMESTGIYWMPIYEILEDAFSGDITLLVVNARHMKNVPGKKTDMRDSEWISTLLRAGLLNGSFIPEKRIREFRDLNRYRKSVIRDITSQKNRIEKFLQSSGFRLSSFISDIFGASGRNIILHLVEHGQIDKTALDSCLKTKTRNRIDEILMSVNGTLSEHQKAFLRILMTHYDSLKKHLAEIETSLEEDMAPFALQVEQLNSIYGISTTASCAIIAEIGIDMKPFKTAEHICSWAGLCPGNNESAGKRKSTSVTKGNPYIKSMLCEIAWVIAGKRNTYLSAWYWRIKQKKGAKKAIVALARKLLVIIYTMLKQGTLFDESCFETRRKHCEQKQLSRYIRELEKHGYTVEAQV

SEQ ID NO: 295490 - protein, 346 aa, unidentified
MNITQVGIDLAKRVFQVHGVDGRGKAVLRKQLKRSQMAEFFAQLSPCLIGMEACGGAHFWARKLANCGHTVKLIAPQFVKPYVKSNKNDAADAEAICEAVGRPNMRFVPIKNTEQQSLLGLHRARQGFVGQRTAQANQIRGLLAEFGLVIPVGIRCIEHKLPEYLQDAENGLSGASRALFARLLEHFRVLDRQVDELEREINAWHRQDAASRRLQAIPGIGPLTASALVASVGDAKTFRNGRQFAAWLGLVPKQNSSGGKTTLQGISKRGDTYLRTMLIHGARAVLFNLKRHPERADGWLARTAARRHPNIAAVALANKNARIVWALLAHGRNYDSGFCSMRPIAA

SEQ ID NO: 295491 - protein, 346 aa, unidentified
MYHHNVIALDLAKRVIQISKVTPPGEILFNKAVSPNKAKEIIANTKPCIVAMEGCGSFHYWGRFAQEHGHIVRGMPPKKVKPFVGKQKTDANDTIGITVAVRAPNMTFCQVMTIEQQNLQSIQSSRRFLDKSLTQIGNHIHALLYEYGIALNVGKKSLRQGMAEYLASDNETLPPIVKRLLSTLQIQWLETEKHHKAADKLLLQQVKESEPCKRLMALEGVAEIGAAVLFCSLGDGKGFKNGRQAAVYIGATPKQHSSGGKTIMVGIDKKGGDKKLRSVLYLGALSYISNLPGEPKTLKQRWLIDLVKRAGVKRTCIALVNKTIRTAWALLYSGESYQRLPLPTEA

SEQ ID NO: 295492 - protein, 346 aa, unidentified
MKQFTTIGLDLAKQVFQVHAAAADGAPIFSRKLRRAEVLRFFEKTPACLVGMEACGSAHYWAREIRALGHDVRLIPPIYVKPFVKRGKTDAADAEAISEAVTRKTMRFVPVKSADQQAAAVVLKTRALLVNQRTQVINALRGHLSEFGITATAGTARIAGLISIVRDKTEERLPKAARFALLEIADQIEALKTQIEKLEQVIVATVRRDDDARRLVTIPGVGAITAASMRALVPDPGGFKSGRHFAAWLGLTPKPHSSGGKERLGRISKMGNPVLRSLLVVGATAVLRHARGNPNASRWITALLARRPYKIVAVALANKMARIIWALLLRGGTYQDKGAGNHRATA

SEQ ID NO: 295493 - protein, 340 aa, unidentified
MTIVMGLDQHRAQITAEWVDTVTGEVCRSRVAPAHRESVRRFLARFEDHELEVALEATTGWRFVVEELQRVGASVHLAEPAETAARRGRKKRAKTDRADARLLRELVMVGRLPESWIAPDHILDLRARVRLRHTLIDERGEWQQRIHAVLYHHGCPHHHGIGLLTGTGREWLSSLELPATAREQVTVALQMIGAADAQLAPMDKELRAYARRQPGCKALMGLYGIGHLTAVTILAELGDARRFSSSREAVRYSGLDITVYQSDQRRAPGHLSRQGPPALRWALYEAAQSAHRTSSPDRDYYLQAAERLGGNRACLAVARKLLKRSYHTLRELGDGALQPA

SEQ ID NO: 295494 - protein, 403 aa, unidentified
MVFVGIDWAEAHHDICVVDDEGHVLAKRRVPDGLEGVGKLHALVAEHAEDPAQVVIGIETDRGLLVGSLVAAGYQVYAINPFASSRYRDRHATSGAKSDSGDARVLADLVRTDRHKHRPLAGDSHLAEVVQILARAHQGLVWTRQRQANQLRNALREFYPGALAAFDDLDAADAVAILERAPTPSQGRALSQAKIISALRQGGRERNLESKAAQIQAQLRLPQLEVPALLAQAYGHSVAATVAVIKQLNLQIAALEQELAASFEMHPDAEIYLSLPGLGVVLGARAMAEFGDDRTRFLNPKARKSYAGTAPITKASGTRKVVLARVARNRRLADACYQWAFSALTRSEGARHRYDVLRARGQTHHQALRALGNRLVGILHGCLTNRQIYSEHLAWSPHLEVAA

SEQ ID NO: 295495 - protein, 368 aa, unidentified
MDVHKETIAVAVAPSGAGEVRFVGEIANTPHAIEKLVKQLRKDGADLKFCYEAGPCGYGLHRQLSDFGWECQVVAPSLIPKKAGDRVKTDRRDSLSLARLHRAGELTAVWVPDGAQEALRDLTRAREDMKHLQRQAKQRLLAFLLRHGRSYDGKSNWTQAHYRWFEGVKFEQPVQQIVFQEYVDMVKAMDKRIDALDKQISTAASSSVFWETIQALMALRGVSLLTATTIVAEIGDLKRFVSAPQLMAYLGVVPSEHSSGGKKSRGGITKTGNGHVRRVLVEAAWTYRHPARKTAALQKRAQNAPEVVQEIAWNGQQRMCGRYKLLEGRGKLKVQVCTAIARELTGFIWAIGQTMAQPAAKKQGEKAC

SEQ ID NO: 295496 - protein, 358 aa, unidentified
MYKFMKKFFIGVDVSKDTVDVSFFDDDRMKSPEYLAQYSNSPKGFREMVKDLRMCCHGVSSGQWLFCCETTGRYDHPLCHWLVDHGMVVWRESALQIKWSSGIQRGKNDRVDSLRIAEYAWRHQDKMQKFVKPSESLSNLKAAFTHRRRLVEKRTATRCQLKSMSSEKGLSASLARMIVRDLSREIERLSASIATMDESIQKIIRSDSELDKNYRHIISVKGVGPITAVALIVCSGNFKAITSAKKMACYCGVASFRSQSGTSINRKASVSNLSNRQIKSLLSMAARSASRSNPVFAEYFNRTLSRGKPVALVYNNLRNKIITVVYKLIERDCDFDVDYMRMHSTGQRANEPAIREAV

SEQ ID NO: 295497 - protein, 408 aa, unidentified
MRVMHSNCAGLDVHSQSVVACARTTEGNRVAHEVKSFGTTSRELFELLHWLEEHGCTHAVMESTGVYWKPVWHVLEGSIELVLAQASEVKNLPGRKSDVSDAQWLSDLMAHGLVRASFVPPEPIQELRALTRTRKQLVREVGQHAQRVQKVLEDANVKLASVLSNVLGVSGRQVLRALIEGESDPKVLAAFVSSRVKAPRDRIVDALQGRVTPHHRFLLRLHLEQIEHLETVIAAVEGEAATALRPFRDSLERLTTIPGVSDVVARVIVAEIGLEMSRFPTAAHLISWAGLCPEMDETAGKRRSTRLRRGAPWLKSTLVQAAWGAVRTKDCYLRAQFFRLKARRGPGKAIVAVAASILKAAYFILRDGVPYRELGGDYFQRLDKPRIAKHLVRRLNELGFEVTIQPAA

SEQ ID NO: 295498 - protein, 411 aa, unidentified
MSLPIARYLAVDLHKHYLVVGGVNAQQEVVLPPQRIELRHWPAWAKANLRPNDSLVVEATTNTWEFYDQSVSFVERLLVADPRKVAWIAQTRVKTNPLDVMKLARLSAANLIPQVWVPPRAVRELRAFLTHRRQLVKTQTTLKNRLHSLLHSRHLVPPGGDPFLPSQRAWWDGLSLSPTEQLHVRHDLATLDQLAAQLAEVDAELHRLSCVAPWSNDVRYLLQLPGLGLLTAMTILAAIGDVTRFPSAKKLVGYSGLGAGVYDSGQTHRGGHITKEGRRELRSVLVEASWRTVESSDFWRAEFERLCRHMHQNKAIVAIARQLLVVIWHVWTAHTADRQANPDLVAFKLMTWSWKLNDEQRGGLTTRQFVRYQLMHLGLGHDLTHVVRGGAKRLIAPPDEVLALKPELQAA

SEQ ID NO: 295499 - protein, 387 aa, unidentified
MAQVNDLSRSLTAFDPISTLVVIVEMSKAKWLVSGAVPGVERQPLKKLEPDATALLRLIERWRNEAVRAGRPISRIALAYEAGRDGFWLARWLIARGIEAHVIHSASVAVSRERKRAKTDRLDAAMLMRVFLGWLRGERGHCGMVAIPTMEEEDARRPSRERECLVNERSRITNRMKSALTRLGVRGFKPHLRKAPERLAGLRTAEGTGLPANIIEELQRDMARLALLREQINAIEKTRAARLERAPDTGPHAMVRLLARVIGIGIETADMLVREILSRRLRDRRAVARYAGLTGSPDESGLKRREKGLAKAGNARVRRGLIQLAWRFLVFQKDSALARWYRTRTEGPSGARKTTMIVALARKLLIALWRLVTTGEVPDGVALRPAP

SEQ ID NO: 295500 - protein, 341 aa, unidentified
MEQATTIGLDIAKHVFQLHGADAAGHVLFRKRITRVKLLGFLAAQTRCVVAMEACAGAHYWAREIAKLGHHVRLIAPAYVKPFIKRQKNDAADAEAICEAAQRPSMRFVPVKTEEQQANGIVFRARDLLVRQRTQCVNALRGHLMEYGYVFPKGITHVEALVALVEDLQSSLPDSVRVILKLLVDTFTALEAQIAVLDAEINQRSKSDPTARRLMTIPGVGPIASTAITALVPAAEGFPAGRDFAAWLGLTPLQKSTGGKQKLGAVSKRGERTIRRLLIIGASAVVQQASRRGAPKGSWLAQMLARKPKMLVTVALANKMARVIWALLVKGGTYRAPAVAA

SEQ ID NO: 295501 - protein, 406 aa, unidentified
MPVYLGIDWSQAKHDAAFLNEAGTLVAQLTLSHRPEGFLQLDATRQQLGVEAPECLVGLETAHNLLVDFLWDRDYTQIYVLPPKMVQRSRERYRQSGARSDPSDAFVIADILRTDRNRLQPWSRDTLLTRRIRAKVSLIHHLTESSVRLSNRLQAVLARYYPLALHVFSEPTGQIGLYFLETYPTPQEAAELTLETFQDFGRRHRYTRRDALARSFGRLQAPYPEASPEISQIYRQEAVLLAGLLLELTQAKKAAMRGLRDLFRQHPDAAVFGSLPGAGDLLAPSLLAKFGDDRRRFASPASVQALAGTCPVTRSSGKRRTVNFRYACDQELRQVAVQWARCSLRESAWANAYFESVRPHCRTQSHAFRCLANRWLAIAWKLWQTGERYDDGYHLRQRALRSLPRI

SEQ ID NO: 295502 - protein, 408 aa, unidentified
MQVLHPRCAGLDVHKDTIVACVRCVSPPMHQEVRSFGTTTAQLLELAEWLGEHDCSHVAMEATGVYWKPVWHILEADFELVLANAAHIKNVPGRKTDVNDAMWIADLLAHGLIRSSFVPPQAIQQLRDLTRTRKQLVREVSQHSLRIQKVLEDANLKLGSVLSDVLGRSGRAMLDAIVAGQTDPARLAELAQGTARNKSAELREALRGRITEHHRTMLKLHLQVIDALQRTLAELDAAVGKALAPIQQRARLLTTMPGVSDLTASVLVAEIGVDMTRFPSAGHLVSWAGLCPRSDESAGKRRSTRVRKSGTWIKTTLVTAAWAAVRVKTSYLRAQFLRIKARRGAKKAILAVAASMLTAAFHMLRDGTEYNDLGSDHFDRHDKSKTIRRLLKRLHDLGCDVPELAHAM

SEQ ID NO: 295503 - protein, 384 aa, unidentified
MKVVCGLDVHKDSVFCCILCANGEKIQHKFGVLTEELVTLRDLMVSEGVEECAMESTSIYWIPIWRVLEGSVKLHLVNPYFIKQLPGKKSDVNDAEWIATCLSKELIASSFVPDDKIQRLRQYDRRIFDLNASISRNLVKLDQCIQRCNIRISNYISTTDSKGYRSIVKLISQGVTDAEVLVKELHGRTINRHGRETLVKALTGVVSETDIDIIKQLVEEIELQQRHKDEAQEKMTALCMEWFPQEVENLQTIPGVKERSSTSIIAEIGTDMTHFQTPKKLVSWVGLRPRNEESAGKIKARGITHGNRFVRKTMIECSWGAARMKDSFFAEFSYRQCIERRKNKMKVQVAIARKILVAVWYVLSQGTQYIKPTDHYTAAHMTAV

SEQ ID NO: 295504 - protein, 376 aa, unidentified
MYSPKPASHRCVRQIRRRAVRESYFIGLDIAKNIFQVFTADSNGREISNKKLKRNAMTQYFAQFPKATIGIEACGTAHHWARTLTALGHTVKLINPQRVKAFLGSRNKTDAADAKAICEALMHPGTTFIRSKSIEEQDIDHILSRRELLVRNRTQLINQTRALLCERGIVIPQGRHSFMKNLPQIISEKWDEFSGKFQAILTDNYADYQEFDEKIAKLDKMIQVEAATTESCKRLMKVSGIGPQTALALVAHVGDAKHFKNGRQMSAYLGLTTREHSYGGKQRLLGITKRGNTRLRTLLLLAARAAIRGIGLRGRGEDGQPRGLTPLDKWILSMVERIGLFKAAVALANKMCRMAWVLLTRGEEFNPITGLQTSHG

SEQ ID NO: 295505 - protein, 350 aa, unidentified
MTMLAELVDVVIGVDTHKHTHTAAVVVTATGASPEDLTVDTDPDGYGELVAMADRHSGLRAWAIEGTGGYGAGLARYLAERGEVVIEIDRPNRPARRGGAKSDPLDAVRVGRDALAREHLAQPRAAGERAALSVRLAARRSAVDASTVAQRQLHSLVVAAPETPRAKFRDQTTTAMITTAVRLGAHAGWDLETRAYAEVLRDLARRVRALQVEADSHERAILAVIRSWRPDLLDQQGVGPIVAAVVLCAWSHAGRCRNDAAFANLAGVAPIPASSGQTTRYRLNRCGDRQPNRALHVIVLSRLRYDPDTRAYAERRRAEGKTDREIKRCLKRYVARQLFRLLENPPAAAA

SEQ ID NO: 295506 - protein, 352 aa, unidentified
MNRYFGCDAHKRYSIFTSVDDTGNVGPYVRVENNRSLFRGYLEEIPPGSQIAVETVGNWYWMVDEMEKAGHIPLLTNAGKAKAMMGQINKTDKLDAKGLAILLRNGTLPSIWIPPGELRDQRELPRMRMTLVRIRTMIKNRIHATLSKYAIEIDEVSNVFGVAGRKLLAGRLWELPPQTRHSVEKQLQLLDDVEDQIKESEQQIKAVVQETPAMQLLMTLPGVGMILAVVIAMEVGDVARFSGPDRLASYAGTVPRVKASGGKIFLGRVRPDVNRYLKWAYVEAANTIVLFHKRWTGRHTVGLYMRLREKRGHAKAVVAVARHLAEATYWVLKKGEPYKEKGTERPVSSTRE

SEQ ID NO: 295507 - protein, 346 aa, unidentified
MTVQGVAKHYMMLQKYVVFIGIDVSRDWVDVSTKTVEELNYLGQFSNTEEGISSLLAILKGKYGSKTKQWIVCFENTGQYSQVLCQILEQFDIDYCMEHPLTIERSMGFRRGKTDKDCSQRIARYVYKHLEDIQLSQLPKDEINELKLLISRRRLLVKQKGALKVSMAERARAFKGSTVYLLLKAENEKLVHFIKQQFKSLDKMIVQLIKQNREMSKNYFLLLSIKGIGPVIAAYLLMTTKNFTCFSNARKLACYCGIAPFSKSSGKHKGKARVSKISNRQLNSLLGQGAMSAMKHDNQIRIYYERKLKEGKEKGCIVNAIKNKLLARAFAVIKRQSPYVPLANYI

SEQ ID NO: 295508 - protein, 412 aa, unidentified
MAYKVAGIDVHKKVLMVVVCQSSDPDKELERRRFGTTTKELRRLSAWLREQGVQEAVMESTAQYWKPVWYELEPHLRLNLAQAFSNRAPRGRKHDFADAARLVRRLVAGELILSFVPKPEQRLWRTLTRTKVQLTREQSRLQSQLEGLLEEMRIKLSCVLSDLLGVSGRRILRALAKGETDPQKLAALGDHHLRCTTEQLIEALTGNPQPIHLELLALYLDRYQMLVEQIEKLDQLIAQALKPHQEAVLRLALVPGFAADSAQQVIAEVGVEASTFPSAPQLAAWVGTCPGQEVSAEENHSSRSAKGNKYMRRILNQAAHAAVKKKGSHFQSVFRRLLPRLGSKGAVWAIAHRLCRVVWKVLHEKVAFVEQGSEPDPKRKRQRAQALLRSLRKLGYEVAITPVIPTAAEAST

SEQ ID NO: 295509 - protein, 310 aa, unidentified
MKDTIGIDISKATLDAHRLIDDEARQFANSPAGLRALRRWIGTKMPDLVIYESTGAYHAAIERSFGGVLPLVKVNPLQARRFAQARGTRAKTDAVDARVLAAMGAALDLAPDVPAGKNQHDLRELQIARMALIKERTRLLNRSKTQSLTVLKRQSKARLAQIKRQLGELEDALLDLARQCPKRARAFDILCSIPGLGRITAIAILVECPEIGTMTRKQITSLAGLAPMTRQSGQWRGKAFIQGGRKFLRDALYMPALVAARYNPDLRQKYQAMISDGKPAKVALTALMRKLIELANALVRQDREWTPKTA

SEQ ID NO: 295510 - protein, 328 aa, unidentified
MHVIACDVSKATLDAAWFDEDNQRWFERSSIANKKPGFRQLLNWAAKYCGCAVTEIQLVVEATGVYHGPLVDFAYANGLQIIVVNPGRAAENARSHNRLNKNDKLDARGLQCFGRELKEAYQYVPHSPEIQALRALLSRLRQLDVDQQREQNRLEKCPYIAQSSSLSASIRRQLKSLAKEKTRIQQDIDQLIREHEPLKHIRQLLRTIKGIGPISSQWLLPLLYREQFNSARQLAAFLGLTPIHKTSGTSIRKKPRLSGRGNGYIRARLYMPAVCAITNDPAMKAFYQTLIKRGKTPKQAITAVMRKLVHICYGVVKNDQPYRCQIST

SEQ ID NO: 295511 - protein, 395 aa, unidentified
MRVVYERCCGLDIHKASMTACALITEKGTTQEETRRFGTMTEDLRALARWLEQKGIRHVAMESTGVYWKPVWNILEPAGFELLLANAHEVKVVPGRKTDQKDSQWIADLYKHGLLRNSFVPPRPIRELRDLTRSRAILTQEHSSVCNRIQKILEDANIKLGSVASDVFGVSGRAMLRALMKGEKDPEVLADLSKRALRNKIPQLRRALDGQVTEHHRSLLTGHWNRMEFLERQIADFEKQIAERIKPTPEETALTMPNTAIEDAVPLSPREEAIQLWMEIPGVGWTAACSMVAELGVQMDQFPSAAHAASWAALCPGNNESAGKRLSGRTRKGNVWLRRTMCEAAWAASHTKDTYLAAQFRPITERRGSKRALMAVAHRILVTAYHTMNNRPHYQ

SEQ ID NO: 295512 - protein, 375 aa, unidentified
MKEKLRFLGLDVHAETITVAVAEADGEVRSLGTIANRVESIRKLMRKLGPVEQLRACYEAGPTGYVLYWQLAELGVKCEVIAPTLMPMKAGDRVKTDRRDAERLARSYRSGDLTAVWVPDEASEALRDLVRAREAAKQDQLRARHRLSKFLLRMGRRPAPGMRVWTTLYLAWVRQLRFEQSAQQATLVDYLHEVDHMTERVKRLEQAIAEAVELASPAVREVVKGLQALRGIAEISAVTIVAELGCMARFPGARQLMGYCGTVPSENSSGQRTRRGGITKTGNAHLRRIVVEAAWSYRHRPALGHRLRKRLETVPEPIQEIAWKAQVRLHRRYMKLAAAGKDPCKIATAVARELLGFVWAIGIKAERSVTEQIAA

SEQ ID NO: 295513 - protein, 378 aa, unidentified
MNASLTALHAQDTSGERDLYVSFELGDRQWKLTFADGRCAPKRYTVTAGDKQAVLQCIASLRSRLQLSPTAKVHSCYEAGRDGWWLHRWLLEQGIDNIVVDAASIEVNRRMRRAKTDRIDGDKLLAMLMRYHGGELRVWSVVRAPSPQEEDERWLHRELQRLGKERNAHSNRIRSLLVMHNLRVNGSIGARQWLNWWTQHGQELLPRLRALIERECQRLQLCDQQMRMLARQQCQEVLHGKQPKVAQLATMRGIGIPSAWLLVKEIFGWRQLSNRRQVGACLGMVPTPYDSGNSHVEQGVSKSGNTRARSLTVELAWSWLRLQPQSALTRWFNARFAHGSSRVRRIGIVALARKLAIALWRFLEHGVIPEGATLKPAP

SEQ ID NO: 295514 - protein, 434 aa, unidentified
MQDAEDEPLFAERVAGLDIAKAEVEVAIRVPSDTTAGRRQQETRTFATTRKELLALADWLRCWGVTKAGMEATGDYWKPVFFLLESQGFDCDLYNAAQVKALPGRPKTDRADSIWLAKITERGMISSSFVPPEPVRRLRTHTRYRRHLTQARTAEKQRVEKLLEDGHLKLSSVISDIHGASGRDMLNALAAGQRDPRALAQMARGTMRGKIRRLEEALECSFFTDQHAAVLAMMLTTIDHYTTQIGQLTVKIEALTEPYLHQIGQLDQIDGIGVICAQDIIAEIGTDMTVFPTASHLVSWARWSPQIKQSAGKRKGSNATGRGNPYLGAALGEGAASAGRTQSFLGARYRRLTRRMPKKKALVATGNSMLTIMHALLADPDACYQDLGADYYEQRMHTRRQARNHIKSLERLGYQVTIQATANDPDNQTLTAAG

SEQ ID NO: 295515 - protein, 360 aa, unidentified
MFERTYAGLDVHARSVMASAIDGGSGEIRTLRLVPQTDAVLAWVGTLPGPVAVAYEAGPTGFGLARALTEAGVRCVVVAPSKVERPFGDRVKTDRRDAERLARLLRIGELPAVRVPSPAEEAARDLVRAREDVRGDLMRARHRLSKLLLRQDLLWQGTAWTQEHESWLRSLTFDQLGVRLAFDEAFDAVLNTRARRGRLDGAIEQMAATEPFAPVVGRLRCLRGVSTLTAFGLTVEISDWHRFTGATIGSYLGLVPSEDSSGSRRMLGPITKTGNSHARRLLVEAAWHHRKPCRPSRELIRRRDGQPPAVRDRSERGNRRLHHRWKRLDARGKRPTITAVAVARELAGWCWSLAVMDAPS

SEQ ID NO: 295516 - protein, 363 aa, unidentified
MDVHTSNYTFCCYTVENDEAFAFVTAEASYKSVLKYLERIRSKCGETRFICGYEAGSLGYSLRRELSAHGVECIILAPSTMPKAPGQRVKTDKRDAENIARCLAYHQYKAVYVPNEEDDAVKEYIRMRNDVKVQLKSVKQQIIAFCTRHGLLYDGKSYWTQKHLKWIERLEFKNSLYKETLNEYLALYFALTEKIAVFDARIEEISQTERYQENVSRLVCLSGIGTNTAMSLISEVGDFNRFASAQRFSAYLGLVPGEHSSGDKTNRTAITKAGNSHLRRLLIEAAQCYSRGAIGKKSKLLMAKQEGAPREIVAYADKANERLKRKFYRIALRSKHNIAKTAVARELACFIWGMMTDHTSNAY

SEQ ID NO: 295517 - protein, 729 aa, unidentified
MKSLVFLFTEYDSRKENRVRTIVFGEVKWKVKRIENERKLQRKSKRGRRGELSREELLLISDDIGEIEYTFEELLEIFIEDCELRNLREHTIKYYRSELNAFVKLLKEQEIELRVSEWTGETIKRNVIMYMKEKGLKTVSINSRLRAMRAFFNFLEGRNLIKSNPMKDIKLLKDRKRIVETFDNQQIKALFKACDLRTFVGLRDYTIMMLLLETGVRVNELVSIKTTDIIWEQKVIRIRNTKGGFERFVPIQDKMINQLKKYIAVRGSIPVRSFSGDLIKKSPLGMIQGCQPHHSPYQGGLQMNCTQNYKIDQVTEQTLVVGIDIAKRTHYACFVDDRGRVLRKSFPIFQSKEGFQQLYKAIQGAMQAFGKSEVIVAVEPTGHYWLNLAYFLEEHGIPLVMVNPAHVCRSKELDDNLPTKHDAKDALVIARLAKDGRFLVPRLLHEIEADLRVGSTLKEKLRKEQTAVKNAIVRWTDRYFPEFWTVFRDLGKTALSVLEWTPLPADMAGRTVEELLEVYRQSEGMKCPQKAKIQALINTAKDSIGVTEGTAMARFEIAAFVRRYRQLEAEIAALDAELKALVQTTMEYQWLKTVDGLGDATIIDLLAEIGSFAHYRDPRQLVKLAGLTLKENSSGQRKGQKHISKRGRKRLRSVLFRAMIPLIRHNEAFRELHEYYTTRSVNPLTGKQSIVALCRKLLNVLFAICTKKQAFDAERMRRDVLSHVPHRAA

SEQ ID NO: 295518 - protein, 333 aa, unidentified
MNYIGLDIHKRNTQACVMNDKGKVLMNVRFPSNSKDINEFLDKIEPLGDASIVMEATGFCMYIYDIIEARGHEVKMAHPFKVKALTAGRAKTDKNDAEMLAELLRLNAIPESYIPPKELRELRELTRFRQSLVRSSACIKNQIHAVLAMRGIKAPPPLRSHFSKKHVKWLRSLDIVQLDDFLDIMALIDTKIAKADEDIERICHDDEDVQRLKTIPGIGDITATSFVAEIGDIERFASPEKLASYAGLTPIVRQSGEKKWTGPISKRGNATLRYLLIEAAYSHVNCSKESKLTQFFERKSQAKGSKKAIVATSRKMLEVIFYMLKRGEVYHAH

SEQ ID NO: 295519 - protein, 351 aa, unidentified
MEFHMSTEIQRWFVGIDLHKDTLTACLYCPSSGVVQYRKMACKCREQITEFFRSLPRPHAVAIETVGFYRWLWELLEPIVEKLVLADATAARALAGRRLKTDREDAFNVADLLAHDRLPVAYAPPAEVQELRDWSRRRNRLSRQHAGVLHWAKSLMNLNNRPGPKRLDSAGLIRYLKAQRGKLPERHQRLLWDCVEQLSLIERQIDAIERQLMRLLDLPRFRPAAEILATFPGVGLVTIATVLAEVGDFHRFTHRKAIARYAGLNPTVHASGGKNRTGHIAKAGPPDLRWIMQQAAWTAIRVEAHLKRMWLKISRSAGKKAAAVAVARKMLTWMCLAVRAGKPYQRPVQAT

SEQ ID NO: 295520 - protein, 351 aa, unidentified
MEHTTIAVDLAKSVFQVAVSHRAGRVDAERRLSRDRFLAYLAQQPPATVLLEACGSSHHWARQLEQFGHVVRLLPAHDVHRYVRRNKTDRTDAKALLEAARNEEIHPVPVKTVEHHAITSLHRLRSTWVATRTARLNTLRGLLREFGIFIPVGAQHVVPRVRELLGDPTGVLPVAVRSTLANACAEIDVLETNRRDVERQLAAIARQLPDVALLQTVPGVGLMTATALIAFVGDIGRFGSGRHFASFLGLTPKEDASASRRRLGAISKQGDVYLRMLLIHGARSVLWHAKSCAHPSGFQTWARCIEQRRGHNVAAVAVANKLARIVWAVWTQQRPFAANHRHAETTSVSSN

SEQ ID NO: 295521 - protein, 376 aa, unidentified
MPRYFGLDLHKRYVHGCEWQVDQQKGRHFRFPNTEAGWATFVQQLHADDEVALEVTGNAFAVHDLLSPYAGKVLLANPLELKRLGAGRHTDRGDAERLAKMLALGMVPAVWVPPPAVREVRYLLQYRDRLVRNRRRYLTQAKSVFQRHGFAIPRKVDPRQWLDRDEVNRLPQAERVILLSALRQLEAVDADLHAVEAEIARQVADQPGVQLLLTITGVGLITAATIWAYLGDPTRFRTAKQVTRYAGLDASVHQSGEQDHRGRISRNGSKLLRTALVEAAHAVARHDQGPLGAFFDRKQRQIGHHKAVVALARKLLIVAWRMLLTGQPYRAAKPTLVAQKQRRLVEVAQAVTDWDAVAEALWPDSLEDRHRRRRVA

SEQ ID NO: 295522 - protein, 400 aa, unidentified
MHKASVVACVMITVSDGTVHSEVKTFGTMTRDLLELGDWLKAQQLTHAAMESTGSYWKPVYNLLEGQIELLVVNAHHIKAVPGRKTDVKDAEWIADLLRHGLLRGSFIPAKPQRELRELVRHRSNLVGRRAQSVNELHRTLESTNLKLGNVVSDITGVSATEMLQAILAGQTQPEVLAEMARGRMQRKKELLHKALEGRVEEHHRLMLSQLLVDIANYDDQVNEVGALIAKRLEGQQELLDRLDQIPGVNRRVAEVIVAEVGTDVKRFQSAAKLASWAGICPGNNQSAGKRRSSHIRPGNRSLRAALVEAANAAGKKKDCYLATMYHRLAGKRGKKRALIAVARTILQSIYYMIQRGLAYQDLGADYYDRRDPEGLARRLARRIEKLGFAITLEPLAKVA

SEQ ID NO: 295523 - protein, 334 aa, unidentified
MLIVGIDMAQNKFDAGLWIDHQGQTLGQFTNDNDGYALMEQNIRQQFPEAETIKLIIEPTGGYEMGLILYALEQEWQVSLPNPKMVKDWAKGSGWRAKTDKQDAMMLAQYGVEKHPPCYQPLSASMQELNDLVSRQEELKKLLRSEQNRLKQYEQRPRQNGRVIKSLEKVVETLEEELAAIEEEAKHFIKQDPKLHLMRKRLLTVPGVGPVLVNHLLVLLTHWAVRTNNEGTTKQLVAFAGLDPQPFESGHSVYKRPTISKMGDKMVRNKLYMGALGGIRGKNVLADFYKRLVGRGKAKRLALVAAARKILVWSWAVFVNEVDFDATKATPKSF

SEQ ID NO: 295524 - protein, 355 aa, unidentified
MTGTKYIGMDVHKESISIAVRNAAGKIVMECVIETKASTILEFVDGLRGDVQVTFEEGSWSAWLYDLLKPHVTRLAVCDPRRNALLQQGNQNDRVDARKLAELLQNNQLRSVYHGDHGLRTLKELVRSYLTITRDLSRVMTRVKALYRGWAIPCTGKQVYASRHRAEWLGKISEAGVRRRAEFYYQQLDALRSLRQEVRRDLLAESRKHQVWKRLCQIPSIGPIRAAMLLGILQTPHRFRTKRQLWTYSGLGIEVHSSADHQVVEGQLQRKKKPVEIRGLNENCNHDLKNLFKGAAVVASIKPGPFEKFYAALLAKGMRPEMARLTLARKIATIVLIVWKRGVCFDAQHLKPQTA

SEQ ID NO: 295525 - protein, 397 aa, unidentified
MSGERKIDQEDHMQNAVYEKEMEMGIDPARHSMQIALVSPSKEYFNKTFPVSPSTAEIINSLIPKSTPIVVEGFATTGRLFFLELLEKGYSIGEMNPNLGKHARILKNEGHSDKSDAHAIAKAGIYFSNRLSVISLKQNEESLAVLVKTRQRMKKELVADMNRTHSLLSETYGAFYRNLKSKLHFCRGRTFLKSFPSLNRLLDNIDNVKVSETLEPETIERLSLEKAWVSETLLATLEWEIIFYLEKIEFYQHKLKDIEKQIANLLDTIDNGSLLQTVPGIGPVSAATIIAETRGIHRFQKESKFAAYCGLAPKLWQSGQMKTKNMKRKNYNRVLKGTFYNIAFTAVRVNKQAKKYYQKKINEGKHHRQALLCLARQYCRITYVMMKKNEAFRIINA

SEQ ID NO: 295526 - protein, 503 aa, unidentified
MTVRSVGIDLSLTGMHQAEAIDLEGNRCGHLKFRTTPEGLDSLMNLCFGDGSLPVIVLEPTGLAWLPIVLFLRARCPQAVLVRAKQQKAAALRRVLREHAKSDRIDALTLARLPWVDPEHMEPLAFFSPDMQRLDRLARRRDRLAAGVASRKTRISALLLGLFPGLWECFEDPWNPRARWIYRHRLNPFRLTRTSQERLNTIFARVTPLSSSAVIQRESTALLATARRLVAVYKPAHDVALATDLLFRTWQQEISTELDLLEAEEAQMARLEEEISALYRLLHPQDHLRTIPGVGPRIAPLLLAAIGDVGRFHSAKAFCQWTGVLPRSHQSSNTQRLGLGMGKAGPARVKRALYQAAQYARRWDPELAALYHRQMVDYGKTHKQAMGAVMSHLAARVYTVLKEQRPYQLRDFQGQPLTRTQAGQIVRECLRVPEEVRRLRRHRHRPTKKSIRQEAIQAEMGRWEDSTPHEAADTPQRGIPVPSHPKLENNIVCRSAQELAQVS

SEQ ID NO: 295527 - protein, 349 aa, unidentified
MKHYIGLDVSMKETSICIVNEKGTVVYEGKEKTDPSFLVNHIQKKNLMIDKIAMESGSLSYYLITEMKKLGLLVTCVDARQMSKVLSVKVNKTDRNDARGISEALRCGYYREVALKSQRNVETNTVLGSRRMLVQQKVSLKNGIRGFLKTYGISVSVKGKRSFIQKVREVLEGQPDYIQKSIEALLISFEKLDSAIIDLEKILKELAKEDEDVKLLITVPGVGILTALSFKVAIDDPSRFKDSRQVGAYLGMTPKQYSSGEMHRQGGISKCGNSVVRSLLVESGIVMLTRTKVWCKPKAWAFKLARKKGTKKASVALGRKLAVIMHRMLVTREKFHLGDQEERQEKKAA

SEQ ID NO: 295528 - protein, 321 aa, unidentified
MSTELFVGIDVSKDTLEVALWPQEERMSFAQTDDGLSLMVDFIQPFSPCLVVLEATGGLERAAVATLAARSLPVVVVNPKQVRDFAKSKGILAKTDKLDALGIAKFAQAIRPELRPLKTMEAQQLEAILSRRRQIVQMLTAEKNRLHSAPGWTKEDIRLHITWLEKRLEKIEKELGEMIRKSPVWRVKDELLRTFKGVGPVLSQSLLSDLPELGRLNRKKIAALVGVAPMNRDSGKFRGRRMVLGGRAEIRSVLYMATVAAIRSNPAIGAFHARLRNAGKAPKVAITACMRKLLTILNTMMKNQTPWRPLTQNMLDMQHSC

SEQ ID NO: 295529 - protein, 342 aa, unidentified
MTITTVGIDLAKAKNVFAVHCVDQNGKTVLVKPKVSRAALPELIASLPPCVIGMEACSGAHYWARVFRQYGHEPRLMAAKFVSPYRMAGKSGKNDAADAQAICEAVRRPHMRFVPVKDESQQAMQCLHRTRQGFIEEKTATYNRLRGLISEFGVIAPQSTDALRHIVSEQKNSLPLQVQQCVDDLLEHINRIEDNIAEYDRILSRMAKTDHRSQRLMELKGIGPTTACALVASIGNAHDFKNGRQLAAWLGLTPSQYSSGGKSKLGRITKAGDSYLRTLLVQGARSVLIGAEKRTDSFSRWVCTLVERRGYWRAVVAIAAKNARLCWASLHYGDDFRLYSAS

SEQ ID NO: 295530 - protein, 432 aa, unidentified
MVQVLIGVDPHKLSVTIEVVDDRERFLGSGRFTTEQAGYAAMRTYVKAWPDRVWAVEGANGAGRPLAQRLLEAGEQVVDVPAKLAARVRLFDTGHNRKTDALDAHSIAIVAVRTEGLRVLKIDGELEALRMLADRREALTRRRVQTVDRLQALLAELLPGQAKKDITPLQARAMLAGVRPRDVAGKTRRRIAAEELAELVAVDAKIKKSTAELKAKVLARDSRLMDLRGVGPVVAARILADVGDVTRFADRNRFASWTGTAPLDASSGEQNRHRLSRAGNRRMNHMIHIAAVTQLRLNTDGRAYYRQKRAAGKKPMEAMRCLKRRISDAIYRQLVADTQRLPDAGPGGHCGATQESSAVDLPPHIDTSDKPLPGPAHPTLPGTRTRANPHAGSAPRPAHRRAGAVKVERPTGRTTLTATSAGAHSKEPKTRP

SEQ ID NO: 295531 - protein, 364 aa, unidentified
MYDSTTTVTVGLDVHARSIRLAAVRADELLEERTLPHDEEAVERVLRRWPGVRCCYEAGPTGFGLYRHLIGRGIDCSVVAPGLVPQRPGDRVKTDSRDARKLARLLAGGLLEPIHVPSRELEAARDLVRAREDARLDRMRDRHRLSKFCLRHGRALPTSTWTVTRRNWLATQRFEFAAQQITFDSYLHTVDLVDARIEQLERAIRETAEQEPWCALVARRRCLRGVDTLTALALVTEIGDFDRFTTAEQFMAFVGLVPTEHSSGEKRRQGSITKVGNSHVRRLLVESAWHARRRPKVGYELARRQRGQDAAVIERAWRCQQRLYQRWQRMAGRGKPQQKIVVACARELAGFVWAIATQQPLRNT

SEQ ID NO: 295532 - protein, 479 aa, unidentified
MNSIVLTANVQPNLDVNYIGMDVHSDNVVVCVRRNTINSSGQLVGKTIKTKKVVIKNSQEPLVELLSKYADGQQHIMTAESTFNWYWLADIAEDHGWNFRLADPCTVSQANIKAANDETDAEYLADRLRTGSLKSTSVLPRQLRGVRDLMRHRLRVMQEVSDKKVRLSNLYHNHCAHPMHGKLLAALQDAYDEINIDAVLESGICNNGSELIIGDLLTGLREAETRLAKIEAAVYARIDEVDSYKAERMLLKTSMKGCGNVLSAIIVTEIGDISRFRTMGDFVSYCRLAPTSKLSNGKSKGQGNAKNGNAYLSWALTELATLMARFNEPIRRYLERKQEKTGLRVVAVRALAAKLARCVYQVLRKKESFDLGLAFGSKPTHGQMTAAAEAAQTPPEPALPPVPAVAGEHHCPAEESDAPIVVKEPVPVKSKRSTRKKAVSAASSEPAVAAEGRQTARKADRVKARCALTATPPSCAGTS

SEQ ID NO: 295533 - protein, 344 aa, unidentified
MNFIRFIGIDVSKKTLDVSIFQSGEVINKFPHIQVRNDKQGFKDLLRWTKEQGVKPKDALFGLEFTGYYSDELEQFLTKKQICYTMLPTTVVKHYQRGTHDKNDKIDSAKIADYLFRFNGTECIKLRVLPSKAMQELKSLKSERKFLVQHRVACENRLQVAKSKSEEKHLQKLIDLCKEEIEQVEKQIADVVTSDEEIYTTFRLLTSIPGIGFVNAVNTIANTQNFTAFETARQYAKYLAVAPSEHSSGTSVHWRRRPSPHADLQAKADLSMAALHVIELSAEMRQLYERKLGNRPKDKDVQKKALNAVKFKLIREMFAVAKQARIFELRGLDKAQTETHNTEK

SEQ ID NO: 295534 - protein, 343 aa, unidentified
MDYFAGLDVSVNNTSVCIVDGAGKVVREVKVASEPDALLQVLRYPAYCFKRIGLEAGPLSQWLFSALGEANLPVICVETRHMRAVLKAQINKTDRNDARGIAQMMRVGLYRPVHVKTLRSQKLRMLLTHRKLLQSKAIAIENDLRGTLRNFGLKVGIAGWTKFEARIEELVEDVPDLAVLVESLLVVRRVLREQIAVLHRRLLTIVRDDEVCRRLMTIPGVGPVVALTYRATVDVPARFRKSKSVGAVFGLTCSRDQSGERDRPGAISRCGDEMMRAMLYEAAQAMLLRSAKWSWLKAWAMQIARRRGMKRAIVALARRLAVIMHRMWVDGAEFRWTKEAAAA

SEQ ID NO: 295535 - protein, 331 aa, unidentified
MSVCVGLDIGSRTSIVGVRKDGRPAGQWDIAQTPAGRKAAVKKLLALKPKSIVMEATGIYYLDLALELHAADLPVSVINPKSFHNFAKLMLVNSKTDAIDAQLLSEYGERMTPRLWTPPSPVQLELRALGRHINRLVGHRTRAKNELHALQATSTTVSMLIEDQEEAIASLDNRIERFRKAGREMVAQCPTLTRQYKQLLAGPGIGEVSALAALAELTTLPQMLKSSQVARHAGLDVRQTQSGTSIDKPGRLGKSGNAYLRAAMYMPALTAVRCDPYAKAFYESLVSRGKKKMQAIAAVMRKYLTGIWACMRGDVPFDTVKLFSSEHLGKA

SEQ ID NO: 295536 - protein, 340 aa, unidentified
MNTTPPVVTTPVITPVSVGLDVSKDSLDICLLTTSKRHEKQFCNDASGHRQLLRWAHSLAKGDPCHFCLEATGPYSQSVALFLVDKEQKVSVINPVRIKYFGLAQNQGNKTDKADARLIALYCQMQSPPPWRLAAAEVRLLQEMVRRLHALSDLVAQEKNRAQVPGQGKAVLASSKRVVLALEKELLRLKQEVRAHVKAHQDLSHDSKLLQSVPGIGEITAWDILAEMPDVNEFESAQSVAAYAGLAPREQRSGSSVRKATQLSKRGNRRLRKAFYFPAVTGMQWNPLVKAHYERLREKGKPKMVALAACMRKLLMICYGVLRHQQPFDAQWVSQPARTD

SEQ ID NO: 295537 - protein, 424 aa, unidentified
MQNNIARKLAQIPAGHLIVGIDPHKSMYAVVVMDQQAKIYTKFKIGNSRPDFERLVEKVQGQVAQAGATGVIFGIEAGSHYWRNLAYFLDEQGLVFQMVNPFTLKRQREGDDLDRRKNDYRDATAAAELMRNGKYTETRLLQGKYAELRALHQAHRRQNKENSRIVNLGRGLLDGLFPEFCRVFKSPFGKTAAAVLLACPSPELVASQTVDQFIATVRDNYQGTRLALKKLLVLHQVACNSVGVKAGSEAVTTELQMLVVSHQVLALQMERVDRQLHDLIQEFEEFKYVSTITGLGTLTIAGMVAEIGPLEHYGNAKDLVKLAGTNPIQSESADKGREHTPMSKKGRAGLRSCLWRAAIGLMRGNDEFQAWAEQLKNRASNANPLHKREVLGAVMNKLLRVYFALVSKKQTYQPKEKVKQAVAA

SEQ ID NO: 295538 - protein, 350 aa, unidentified
MIIIGCDYHPGFQQIAFVDTETGDCGEQRLEHCEGAQKFYRDLATQGKKVRVGMEASGHARWFEQLLGGLNIELWMGDAAVIRAKRGRKSKTDRQDALHILNLLLTGDFPQIWVASWENRDLRQLLWHRHRMVQARTRVMNQLQAVALNEGLRCKKKLWREHGREQLEAFRLAPWASRRREDLLELLDRLNPTIAELTQAIEQEAEKCPQAQRLMTHPGVGALTALAFVLIIGKAERFQCGKQVGCYLGLVPLEDSSGDKRRLGHITKQGNSLLRFLLVEAAQVTSRTIPEWRSKYLHLTMRRGRKIAKVAMARKLAIRLFWRMRQGWNYQQVMKFGSHVGQPGYGPDVQ

SEQ ID NO: 295539 - protein, 341 aa, unidentified
MQTKKYFTGLDISADDFSASCITSPGNSVFSVQKFLNNFDGFNEFLSLLFKHNINQSEVIICMEATGVYSENLSYFLASKGFTLCIEAPHKIKNKTKNSPRKNDFIDAVSIAEYAFRYSDKLSFWKPKDEIIEQIQVLLSTREHLSVQMTANQNALKTLKYKYYQTPLANQIYEKTITKFKEHIKQIDQEINSLIDKDDSFKNKISLAKSVPGVGLLLAANLLVLTKGFTEHLNYKHTAAYTGICPYEQISGTSLYKPPRSRKCGPAKLRKLLYLAALSVRTHNQTFKKYFLRKVAEGKNKRLIINNIENKLLKIIFAVINSGVAYTYNYKSINSNILKTA

SEQ ID NO: 295540 - protein, 361 aa, unidentified
MDVIIERCAGLDVHKRTVAACVRSPGAGRTRRRSETKTFGTFEHELAELRSWLVAEGVTAVAMEATGVYWKPIWYALEADFDLLLVNATHVKKVPGRKTDVADAEWLARLLECGLLRGSFVPPEPIRDLRDLTRYRKRLIQDRGRESQRLEKVLEDAGIKLAAVATSTLGVSVRAMLDALIAGERNPEALAELAKGRLRGKLPQLRLALSPTRFRPHHALMLAEHLAHIDHLSASINRLDERIDEVIAPFADARDRLMTIPAVAKTAAEVIIAECGVDMARFPTAAHLASWAGMCPGNNESAGKHRSGHTSGVTPGWLGFSPSAAGRRATRKTPTWLPTSGTSPAAGVPSEPRSPLATPSW

SEQ ID NO: 295541 - protein, 318 aa, unidentified
MFIGIDVAKDELVVAVRPSGEVFAVDNTTKGVRSLVKRWSETPPTLIVLEATGGYEAVAASALATARLPVVVINPRQVRDFAKATGQLAKTDQIDAGVLAQFADMVRPPVRPLADDETRQLDALLSRRDQLLDMLMAEQHRLAQTPPRAKAVRQSLTQTIAFLEKQLARTDTDLGTCIAASPVWAARDALLQSVPGIGPVIARTLLGALPELGQLTRQEIGKLVGVVPLNRDSGQHRGKRQIGGGRAHVRRKLYMGALVAMRRNARIRQFYQRLVASGKAPKVALVACMHKLLTILNQIVRTATPWDATHHLAVLQPA

SEQ ID NO: 295542 - protein, 317 aa, unidentified
MSVCVGVDIGSRTSIAGVRKDGRPVGQWDIAQTPAGRKAAVKKLQALKPKTIVMEATGIYYLDLALELHAADLPVSVINPKSFHNFAKLMLVNSKTDAIDAQLLAEYGERMTPRLWTPPSPVQLELRALGRHINRLVGHRTRAKNELHALQATATTISILIEDQEEAIATLDTRIERFRKAGRELIAQCPTLTQQYKQLLAGPGIGEVTALAALAELTTLPELLKSSQVARHAGLDVRQTQSGTSIDKPGRLGKSGNAYLRAAMYMPALTAVRCDPYAEAFYESLIGRGKKKNASDRRCHAQIPDRYLGMHARGYAI

SEQ ID NO: 295543 - protein, 345 aa, unidentified
MNLSVVLGVDIAKLKFDVCLVKENQKVKHKVFANTTHGFRQLIAWLDSHQVGSLHICLEATGSYGEALALHLFDEGYQVSVVNPAAVKAFAASRLTRTKTDKVDAELIARFCLAQQPEAWQPPLPQVRRLQALVRRLESLIEMRVAEENRLSSGVAVDAVRHSLEDHIAYLVEQIKQTEQMIREHINNHPDLKEQSTLLDSIPGIGQTTAALLLAEIVNIKEYKSARQVAAYAGLVPRERRSGSSVRGRVQLSKIGNARLRKALYFPAMTALRCSSFFQQWASGMRERGKCKMSVIGAAMRKLIHLVYGVLKTGKPFDPNWAVRRWNNQNFTIKQTSAERSICWN

SEQ ID NO: 295544 - protein, 311 aa, unidentified
MNTTLCGIDISKDWLDAHIEPIGTASRFANDAAGIADLAAWCQTNDVELVVMEASGGYERLAFLLLWEMGQPCGMANARSVRSFAGAMGFLEKTDRIDAAVIARYGAVKRLKPTPPPSAAQQRLKALVARLSQVGGDLTIQKQRKSTADAETIASLDEVIALLARQSRRLEGEIATLIDDDPLWACLDRAFRSLKGVASRTVARLMAQLPEIGILSNKAIAKLAGLAPIANDSGKRSGRRPVRGGRAGPRGVLFLVASIVAKYDPHLAAFKQRLQAAGKEKMVIRIALARKLLVILNAKARDARNEFANAT

SEQ ID NO: 295545 - protein, 347 aa, unidentified
MTPSIVDEARPVTGGVDTHADAHVAAALDGIGGLLGVQEFAATPAGYGRLLGWLQGFGTVGLVGIEGTGSYGAGLARHIAAAGIRVVEVDRSDRQERRRRGKSDPLDAVSAARAALSGRASGSPRGRDGQVEAIRALMVAKRTARAQRTQTINQARALIITGPDDIRARFTGQAPARLVAQLAALRPRPGSMVRYHTLLALRELGRRAQFLEDQLAGLDELIVPLVTARAPGLLSLFGVGPDTAAMLLIAAGDNPGRLRSEAAWAHLCAAAPIPASSGKVSRHRLNRGGDRQANHALWRIVITRMGSHSRTRAYVARRSKEGLSKPEIIRCLKRYAARETYRYLRPR

SEQ ID NO: 295546 - protein, 333 aa, unidentified
MSKFKHFLGIDVSKEYFDAVVILDRNKEKSIHSQFVNDYKGIKSLCKWLKEQGSTFENTLVCLEHTGMYGKLIIKCLMIEKFSLWVEMSLKIIRSIGVQRGKNDKVDAQRIAFYAMKNVEEAVIFNAPRMEINKMRNLLSLREKLVATKASLLRNVKELKAFDLEVARLSEKLQKSTIKGIDLDLKNIEKQLDKTINDDENISRIFTLVTSVIGIGKVTALFLICFTNEFTMYTTPRQLACYAGVVPFEHTSGKSIRSKPKVHYVANKKLKKQLHMCALSAITSDPELKNYFNRKVEEGKNKMLIINNVRNKLVHRVCACIRENKMFEKRQVA

SEQ ID NO: 295547 - protein, 408 aa, unidentified
MNLYIGIDVSKNKLDYCALNSDQDILNQDEVINSQIGANTIKEVILRLARLTSFDNIVIGLEATSVYDIHPAMFFQLDEDLNQLPLSVTTLNPKYTYRFSQLFDDDKTDQNDALHIADYLRMEHYQTPVLRQEEYLALQRLTRERFHIVGQITDCKHHFLNNLFYKLNRAEAELPTSVFGSAMMEVLTNRYSLDEISETPLEVLAADLNNLSHGRFGNAEEIAKALKRAVRNSYRLDKVMEDSVDVVLGMYADEIKMLSKQLKLLDKSIERICVAIPEVKPLLSIPGIGKIYAAGIIAELGQINRFKNEAQIAGYAGLTWRRSQSGESERQTTPLTHNGNQYLRYYLVEAANMVRINEPVFANYYKKKYSEVPKYQHRRAIVLSARKLIRLVYTLTTKHQLYQSPKMV

SEQ ID NO: 295548 - protein, 347 aa, unidentified
MIIIGIDPHKHSHTAVAVDQREQPVGQRTVLAGPQATAGLLAWAGRWPERRWAVESARGLGYHLAQQLVGAGEQVSDVHAKLATRVRLLDRGHGRKTDQADARSVALVALRTPTLTLVGAEDDLPAVLRLLADRRDELNQERRRVTNRLHRLLRDLVAGGAPTPLTVEAASRLLRRTRPTTAADQQRKALARDLLADFRRLDRQLAANRTRCQELLAVRPSRLLEVFGISAVLAVKLIGHSGDITRFHSPDHYASYTGTAPVDTSSGANLRQRVNRGGNRALNTAIHLVARTQISRPGPGRAYYDRKLAQGKTPNQAFRALKRQIVKVIYRALLADHHTRHPQPATG

SEQ ID NO: 295549 - protein, 425 aa, unidentified
MSASDSLASPVEVSDFAYVVGVDIGSQQAVYCVCQPDKSQVVKPTEVANSRAGEDALDHRLRQLAVPPQRMLIGLEATGRYSENLYQFLQEQGYRLCLLHPRQTHQFAQQRGLRAKTDRLDATTIARLLLSGEARPGYVPDELISTYRELERLHSQLTDDSARYQNEIQALLVVLFPEFVQVFADPCRPTALGVLKRYPGAQAILDAGVEALTSTRRELAPRHYGRPTAQELVRLASQSVATPLASSGRALSLKVLCDQLEHTLTNLAQIAHELDQLLDRDHGASGLKSTPEFGRKTVAVLRAELGDVTRFQRVDQVVAYVGLDLQVRQSGKWKGQVKLSKRGSGRVRQVLYMAALRSLALPASAFGAYYRRLVARGLKARDALTAVMRKMLIVAYHLLRSNETYDPTKVCAVAGPPPHTPSSGS

SEQ ID NO: 295550 - protein, 447 aa, unidentified
MELIYTRCAGIDVHKKIVVVCCITVDAQGKKHVEIRTFATTTKGLLELSDWLTSLQITHVAMESTGEFWKPVYNILEGNFELLVVNARHIKNVPGRKTDVKDAEWIAELLRHGLLRGSFIPPQEQRDLRDLTRQRTNIVQDRATVVNRLQKVLEWANLKLSSVATDITGVSARSILEAIIENKVAPTTLAELAKGRLRNKRSALEEALQGTVRDHHRFMLAQHLAQIDFLDEQVECFDQQISQHMQTTDETINSPLANDDEPQTAADSEAGTTLPPITWQQAVEFVDTIPGISQRAAEMILAETGIDMSRFASEEHFSSWAKVSPGNNESAGKRYSGSTGHGNRWLRTVLVQAAWAAVKVKNSYFNSFYHRLAARRGKKRAIFAVAHRILIAIYHMLKKQEPFKDLGATYLDERNKPKLLKRMQHRIEQLGFRVVLEPILSAVASPS

SEQ ID NO: 295551 - protein, 417 aa, unidentified
MDTTYSKVAGLDVHQKSIQSAVRCIQETGKLVKQARSFGTMTRDLRALADYLEALGVTHVALEATGVLWKPVWNILEGRFTLLLVNPRHLKKVPGRKTDVSDAEWIAQLLQCGLLRGSFVPPRPIRDLRDLTRHRTQLGGEHTRVANRIHKLLEDANLKLSAVATNILGKSGRAMLAELLEGNDDPGQLAELALGRLRAKLPQLRLALEGHCTEHHRFQLRQLWEHLDHLEQQHECLSRRIGELLDAVLPAQHQEHLDAIPGVNRTTIENVVAEIGVDMAVFPDADHLSSWTGICPGNEESAGKRRRSRIRKGNPWLRSTLTEAAWAASHSRHSYLAAQYRHLAARRGKKRALVAVGHSILVIIYHLLKDNVEYKDLGADFFDRLHPDRLRRHLVKRLEGLGYDVTLASHQPDPPAA

SEQ ID NO: 295552 - protein, 449 aa, unidentified
MSHFTNMSPTNEVGKPLNSHGPVRCLYHSAIGVDVHAQLLVCCFQKHLPETNQLLSEQAQFGTSNSQIKQFVDWVSSHKPEIILMESTGVYWMSPYEALESAGFTSQQLAVVNARDIKAAYGRKSDKADARRLTEFARMNSFKRSFVPSRDIRTARLIARRLHHATQDCTRESNRMQKLLSCSGTRISSVFSSFKGKAAQKIINSFLDDSYPEFIACVRSNCSRLRATFTDIVDAFRQLNTPTFKELLLEQRKSWRQAMERRDRLEALLRIQMKPYKKTVDQLCAIPGVKELAALKILSEIGTDLSSFRSSEAFCSWIGICCGNNESAGKAKKSGTPKGNNYLRAFLTEVGQAIALVKTYTTVLRKVFQAFKERRGHNRAVVAIAHKIARIIYTMIKNSIAYVEISSPTLEKIRLKKLRASINNAKEVGISLQKLSVVKDSTGEILSDT

SEQ ID NO: 295553 - protein, 360 aa, unidentified
MANIKPIQSLSVVGGVDTHKDLHVAAVVDQNNRVLGSEFFATTRQGYRKMLAWMLSFGTIERIGVECTGSYGAGLLRYLQSAKIEVLEVTAPDKMERRKRGKSDTIDAESAAHAALCRIRTVTPKTRSGMIEALRVLKVCRKTAVAARRIALQMIQMNIVSAPDELRDQIRHLTRMHLIRTLASWRPDVTAYRNVQDAYRIALKSLARRYLELHDEIADLDVMITSIVDELAPELIRRKAVGYECASQLLITAGDNPQRLTSESGFAALCGVSPVPVSSGKTNRHRLNRGGDRAANSALHIIAIGRLRTDTKTQEYIARRIAEGHSKMEALRCLKRYISREVFTLLRNQNRLINSTQITT

SEQ ID NO: 295554 - protein, 314 aa, unidentified
MKETEECFVGIDVSKDTLDVAIRPDGDRWTTRNDEKGTQELVDRLRERRPTLVVLEATGGLQMPAVVALASAKLPVVVVNPRQIRDFAKATGRLAKTDSIDSDVIAHFGEALRPEVRPLRDPESQELSDLLARRRQLVDMKTAEKNRLGMATKKVRKNIQAHITWLEKRIQEVDTDLSKRIKESPLWREKDEILRSAPGVGPVLSVTLLAGLPELGTLNRRQVAALLGLAPLNRDSGRYKGTRSVWGGRASVRSVLYMSTLSATRCNPVIRPFYQRLIQSGKKHKVAMTASARKLLTILNVMVKTNTPWRYSCT

SEQ ID NO: 295555 - protein, 429 aa, unidentified
MDLIVNAVEHPPKEEPKEYAARIGLDWADQKHYWSMRTADGKHTRGTLENTPEAVQVWAAELAQRFADRSIAVALEQSRGSVVAMLSKYAHLDLYPVPPASLSYYRKSVCPSGAKSDPVDGDLILDYLIKHPERLVCWKPDTVETRSLQFLVEERRKLVNQQVRESQILTGWLKQIFPQILRWFDDPATPLVGDLLLRWPLLTDLQKATQKTLRGFFYQHNCRSEERIQERLEQIRQAVPATTDAALLRTGKLRIAYSVHVLAASRTAIAEFDAEIKAIYEAHPDCFIAQSFPGAGPALEPRLIAAVGSKRERFESANEMACCFGVAPVTEGSGQSRWVHWRWACSKFVRQSFHEWAACSIRSCDWAREHYERQRAQGKGHHAAIRSLAYKWIRIFFRCWRDRVAYSEDRYLEARRARAAQPDQPGGER

SEQ ID NO: 295556 - protein, 400 aa, unidentified
MLSIGIDVSKGKSTVCGMKPGGEIVYTPFEVQHTREGMSELVSLLRGSGEEVRVVLESTGSYHCPVVAALLENGIFVSVVNSLRMKRFCSQSIRRVKTDQIDAMQIALYGLAYWQELQPTRLPENTYRELQLLARQYYQMTSLLIKAKVDFNALCDQVLPGMQELMSDHAGRHKLSDFVLRYHHTAHILKMGETRFRKDYCKWAEKKGYRNHERMAALIFATAQNGIPVLPDAPSTQIVITEAIRVLHTVEASRDAILTQMQALAKTLPEYSLVREMPCIGDTLAPRLIAEIGDVRRFHSKRALIAYAGIDAPPYQSGKFRANNRHISKRGNRYLRKTGYEVMQSYVMHKPANDPIFTFIEKKRSEGKSGKLAMVAGLNKFLRVYYGKVTELYRSLPAIE

SEQ ID NO: 295557 - protein, 294 aa, unidentified
MRSIGLDIHRDFGEVAIGEGAEVRSAGRIEIAPQALELFAGSLGADDQVALEVSGNAWEVARIVRPHVGRVVVVSPADTGIRSARAKTDRLDARALAKLLASGSLDSVWVPDENTQAMRRRLQRRSQLVRVKTKAKNEIHAALMRRLIPKPGFSDLFGIKGRRWLAELELPAAERETVDGCMRQLDFCEAEIAEIERAIAAEALKSREVLRLMTVPGVNVITAATFMAAIGDIGRFADRKKLVGYLGLDPKVRQSGTTTASRADLKAGLLLGSLRAGRGELERRPRSRPDPRVL

SEQ ID NO: 295558 - protein, 348 aa, unidentified
MAHFVGLDVSVKETSVCVVDDTGKVILEQKVPTEPADIITLLSSLGVSYGRIGIEAGPLSQWLVNGLTVAELPVICVETRHMKALLTAQQINKTDRNDARGIAQMMRVGLFKPVHVKTLVAQEQRMLLTSRKLLQRKLLDLESDLRGTLRNFGLKVGVVSGGRYEGRVRELIAGFPRLAAIAEPLLKVRQVMRQQLAVLHKMLLDTVRDDPVCRRLMTAPGVGAVVALTYRATVDQPQRFVHSRAVGAHVGLTPKRYQSGEIDYDGGVSKCGDALLRTMLYEAAQVLLTHGSKWSWLKAWGVRVVQRRGMRRAIVAVARRLAVVLHRMWVDGSEFRWSKDSAAVPTAA

SEQ ID NO: 295559 - protein, 365 aa, unidentified
MFVGIDISKGSLMAHAIDQDGKDIFHSFKVKNNKPGCNKLIDFIYKHANQADFDVIKVAMEATNVYWEHSFRLINNSEKLNLNFKLSISTFNPKVVKNFKGAYNNLPKTDSVDAWVIADKLRFDRVSNSSVPEEVYRPLRELTRFRFKLVRNIHSEKSRALNLVFLKFSNFENEAPFKAFSEASLDQIITDLKKAARNSYRLKPKMNQAIAQTLSMTFDNIRFLQNQLNKSKKVIKKELKAIPQTLVTVPGIGVILSVGISSEIGDINRFNNQAALASYGGLTWSKHQSGSFIAEETSMTKTGNKYLRYYLVEASNSLRVHNEEYKKYYESQKHKHKRALVLTAHKFVRLVFALLSKGEIYQPRR

SEQ ID NO: 295560 - protein, 415 aa, unidentified
MSENIITAVGIDVSKGKSMVAVRQPGGKILLGPFQVEHNALGLKQLTETLKCIDGEIRIVMEHTGMYWRPVALTLKEAGLFVSVVNAILIRKFSDNLLRKVKTDKADSLKIANYALAFWNELEEYSLEEENRQMLKVQSRLYERTIKGSVALRNGLISLVDQVFPGANDFFSGSPKESNGHFKWVDFIRHFWHKDCVTRLSLNGFAEKYRKWCNREGYRFISSDVARIYKAALESTATFPKSDSTKILIRQAADSLNAVYDTLHILRAEMLRLARLLPEFDVVMSMYGVGNITGSQLMAEIGDVRRFHSKSALVAFAGIDAPPFQSGNFEGSNCHISKRGSPHLRRTLFQISSTILKKSNPDSSIYQFMDKKRSEGKHFYVYMVAGAAKFLRMYYARVTGYLDAIEATENNNLTG

SEQ ID NO: 295561 - protein, 462 aa, unidentified
MNNKATQRTDRKRKSKRIELNEQWEKINPDAAGIDIGAREHYVCVPARRHQPSVRRFGTTTPELEQLAQWLLECGIKTVAMEATGVYWMAAFQILERRGFQVLLVNPRQVKNVSGRKSDVLDCQWIQKLHTFGLLAGSFRPADPYCVARSYARLRDDLVARRSTQVQLMQKALHQMNVQLSHVLSDISGQSGMAIIAAILAGQRNPVALAALANQRVRSSKERIVQALVGDYRDEHLFGLQTAYDLYMAYQAKIDQCDERLVAELAKLPDKVDRKSKPLPPADKKKQIDQELRAGLYLKLGVDITAIEGVGARAGLAMLTEVGPDLKAFATEKHFCSWLGLCPDNRISGGKVLRTRTRRVVNRLADALRIAATTLERSQSALGAFYRRMKAKLGAAEAITAAAHKLARLVYRLIKHGEAYVREGLEQYEKKNHQRKLKAVLKMAESLGLKVLEPQPLACSVS

SEQ ID NO: 295562 - protein, 406 aa, unidentified
MQTVYERCCGIDVHKKLIVACFRNGKKAELRKFDTLTCNIKELANWLLDNDCEMVAMESTGAYWKPIYNILELFGLDVMVVNAHHMRNVPGRKTDAKDAEWIADLLQHGLLKASYIPSKEQREIRDVVRYRKSLIEERSREINRLEKMLEGANIKLSSYVSDLTGISSRKLLNQAIEDEVTPDNIGDLVHHSMQGKIPVLLKAMDGVLTPIQKKLVKAILDHIDDMTRRINDLDDIINNEMKHYEDAINKIEEMPGIGKRSAEVIIAEIGVDMSRFPTAAHLASWSGLCPGNNESAGKRKSGKTNKGSKHLKSILIQCAKAAKAKKESFFYAQYQRLVTKRGANRATVAIAHSMLIAIYHMLKDNVPFKDLGSNYYTKFNTDKKANYYLKKLQELGVSVPVSLATA

SEQ ID NO: 295563 - protein, 397 aa, unidentified
MIAVGIDVSKSKSTVSILNGDGSIRAKPFDVHHVADELQALVDYIKRTSEPPTILMEPTSHYHYPLLKAFTEAELPVCLINPYQMKKYGDTELRKAKTDKRDSLRIAQYALEKSYSLIPYTPQDQKYEDLRFLSRQYSQRISTLTVAKVQLLSLLDETMPGITTILPLKSRDPDNCVLLRFIKRFKSFDVIRKMGKTRFLDSYQVLVKKTKDRFAGSKGLAIYELVLNSVTTRGENPLSAMTQDQCVDLVSTSQKAADEINLQMRIIAETMPEYKVLRSMAGVGDRLGPIILGEIGDIRRFHSGKALNAYAGNDAPPYQSGQFESRNRHISKRGNPALRKACFEVMQALKLTKPQDDPVYLFLLKKEQEGKPYNVAKMAAVNKFLRIYYARAMELYK

SEQ ID NO: 295564 - protein, 358 aa, unidentified
MEKTANGLLMLAERNLNMKKSLYCGIDLHSSNAVYVILDENDKVVFKKRLPNRLATVLDALKLFRKKIAIVAVESTFNWYWLVDGLMDAGYPVCLANPAAIDQYDGIKQANDLTDATFIAHLARLGILPTGYIYPKEYRPVRDLLRRRSLLVKYQTSTKLSLQNMFMRQTGQGFSYLGIRKFSDKELGMLLSDNQHLLFVTSQQLDLIDMLKKKIKQFEKMILAKAELKPEYEHLLTIPGVGVILALMIMLETGDIQRFAKVGNYTSYCRCVRAHCTSNGKVKGKNNSKNGNKYLSWAFVEAVHHAKGCCPRAKKFYDRKFSKRNGALATKALAAKWSKAAYHIMKNQEAFDLNKMFG

SEQ ID NO: 295565 - protein, 347 aa, unidentified
MRFYTQQHKFYCGIDLHTKNMFVCIIDAGGNVRVHQNIHTNQEAFLRTIAPFREDIVVAVECMFTWYWIADLCIQENISFVLGHALYMKAIHGGKAKNDKIDSLKIATLLRGGMLPQSYVYPARMRATRDLLRRRNHLMRKRAELFAHIQNTRSQYNLPDPLGCIAKPQNREGIVQRFDDPSVQKSMAVDLEMIEAYDHILTQLERDIIACAKEHDLRSYALLQTIPGVGRILGLVILYEIESIERFPSVQDFVSYCRLVKCSKESNGKKYGSSGKKIGNAHLKWAFSEAAVLFLKGNEPAKKYLQRLARKHGKAKALSLLAHKLGRVVYFMLKNKEAFNQKKFLGL

SEQ ID NO: 295566 - protein, 369 aa, unidentified
MGEYSEIFVAFDVAKRKHAVAVAESGRRGEVRFLGEIENSGTAIERTLKKLSGRHGRLHVCFEAGPTGYGLYRQVQALGHACTVVAPALVPRRAGERVKTNRRDAVTLARLHRAGELTGVWVPDAVHEAVRDLVRARQAAADDLRRKRQQLLSFLLRQGRIYGAGGHWTLAHRRWLARQSFEHPAQQIVFQEGVDAIEDAAQRLHRLEKQLAIIVPSWSMAPVVAAFQAMRGASFLVAVTFAAEIGDVRRFDTPRQLMSFLGLVPAESSTGDTIRRKGLTLAGNRRARRALVEAAWTYRFPARVSEALRARLDGLPKGIRDIAWKAQIRLCARYRRLSAAGKKLPVVVAAIAREIAAFLWAIGREVAPM

SEQ ID NO: 295567 - protein, 372 aa, unidentified
MNYNTVYVGMDVHKESFTLCSCKYEDEKASHYQRTPASYKNVLRYLAFLRTIYGEDTRFVCGYEAGCLGYSLYHQLENFNVECVILAPTTMLEQRSKRRIKTDKRDAEIIARSLAQHNYSPVHIPTETDNQTKEFIRMRDDHKAELKKIKQQILSFCLRQGYQYDGSGNWTAKHVKWLRSLKPAGLYKEILDEYLLTYTILTDKLNRLDQRIEELASKEEYKESVSKLTCFLGIKTHTALSVIVEVGDFQRFVSARKFAGYLGLVPGQHSSGDDRNGLGITKAGNTHVRRLLVESAQSYTRGKIGYKSRVLRSRQAGNSPQVINYADRANERLRRRYYKMVLKDGKKYNIAKTAIARELACFIWGMMTDNVY

SEQ ID NO: 295568 - protein, 422 aa, unidentified
MRSVGLDVHLDFCEVAIVEDGEVRSAGRVETTPERLELFAGSLGPDDRVALEVTGNAWEIARILGPHVAQVLVVSPSDTTIRQARAKTDRLDARTLARLLAAGSLDGVWMPDEQTWVMRRRLSRRSQLVWARSRAKNQVHAVLMRQLVGRPPFSDVFGIKGRQWLADLELAFEERETVDSALRQIAFLDSEIATVERLIAQAAVGSAQVKRLMSVPGVNVIVATTFLAAVGDIQRFKNPRKLVGYLGLDPRVRQSGPGPATHGHISKQGSTRARHALVEACWTTVRQPGPLHAFYQRVRGRRGHSVAIVAAARKLACLFWCLLTRDEDYAYQQPSLTKKKLRRLEIAAGAPKFSPEAAGIWAANNAMREAELELARQAEIAYQRTVRDYHATQAGKVGASVTPGHASNRPSKGNAARQTTSP

SEQ ID NO: 295569 - protein, 345 aa, unidentified
MHIASIGIDLGKSTFHLVALGERNKILLRKKFSRPQLLAYTAKLPLSLIGLEACAGSHFLGTALREQGHQVRLIPAQFVKPYRKSNKNDFLDAEAIAEAVTKQNMRFAQLKTQEQLDWQAMHRVRDRLVQRRTGLINEIRGFLLERGITFAAQPIHLRKNLPGVIEDAEQNLSPRLRWLLDRMWQEWKQIEIDIEAITDEIERISNDDARCRQLRQIPGFGPLVSTATVAAIGNGAAFRRGRDFAAWVGVVPRQYSTGGKQKLYGISKRGNVYLRRMLIHGARSVLFRVKYDTGGFGQWVRRLAQRAPSNKVVVAIANKLARIAWAVLSSGRDYRHQPLPQLATA

SEQ ID NO: 295570 - protein, 351 aa, unidentified
MDTEVFPKLFIGIDVHKRQWSVSIFTANCHHKTFSQAPDPKALKSYLDKYFPKYRIICCYEACKFGFWIYRELKTFGYECLVINPADLPTTNKESSEKTDPVDSRKMAKALRAGLLRGIHVPTLETEGDRQLFRYRKRLWADLVRVKNRIKDKLLQNGVVTPPKYDNPYWTKDFLDWLAIVELPSESSRLVMDLLLDQFEYTYRHFLKVSTAVRALQRKSKYKANSKLLRQIPGIGPLTTVQLLTEIEDVNRFRNFKHFNSYIGLKPMVHSSGESDRKGYMTYRHHQGLRSSLIECAWTTVQRDPVMLNRYEELLKRHTGKRAIVIIARKLLSRIYHVLKTGEPYQIGYST

SEQ ID NO: 295571 - protein, 433 aa, unidentified
MLKLNYMSTLFVGIDVSSKTNAVYAMDFEENKYISSSFGNNQPGADQLVNMIAECMQKHKNLDTILIVLESTSVYSVHISNFLSASEVLMPYRPYVFCVNPKATSNYRKSYIGMEKTDPTDAYLIADFGRVGRTKKLEPWRGGQFISLKRLTRHRMHLSECITREKTYMVSNLYLKFSELQLLEGDDKPFGSLYGATSSAVLTEFLSPQEIIDMPEEELLTFLAGKSRNRISDLSKTSELLRKAARDSYRLDKCMYEPLNISLASSFNCIHAYQKEIKLIEQAIEKCINGMNPNALLILQSIPGIGPIWASGILSEIGDITVFHSSDALAKYAGLYWPKGDSGDFTSEDNKMSKAGNPYLRCYLGEAANSVRKHIPEYADFYARKYAEVTKHQHKRALALTSRKLVRLVFGLLVKNQLYTGEKLDTEYNIESN

SEQ ID NO: 295572 - protein, 461 aa, unidentified
MRKARRWRRKPGKKIVDVTAGLEVLRPHAAGIDVGNAEHYVAVPPGRSDPSVQTFGSFTADLHRLAQWLQACHIESVVMQATGVYWMGLYQVLESHGFQVYVVNAKYTQTLPGRKTDVLECQWLQKLHTYGLLNNSFLPPEEIRVLRTYLRQRENLVAAAGTCIQQMQKVLTEMNVQLANVLSDLSGTTGMAIVQAILEGQRAPQRLAALADPRVQASRKEIAQSLEGHWREDLLFVLQQVHDLYFTYLESITACDRRIEAHLKTLEAKADLAAQPLPPMPRLPRRKHIPQTQLREELYRVTGVDLTRIDGIHVQTAQVVISEVGVDMTRWPDEHHFASWLGLCPNNRITGGKVIRRGTKKVLNRAATALRLAAQSLHRSKSYLGAKYRRLRARLDGPVAITAMAHLLARLIYRLLRYGTQYHDKGVEHYERKYRETQIKSLKKQAALLNMQLIPAPGVSK

SEQ ID NO: 295573 - protein, 389 aa, unidentified
MTTTAKTTAADTILAIDLGKYKSVACVHAEASGTFHFTSLETTRSELQRLLARHRPTVVIIEACLLAGWVHDLCAELGIRCLVANTASEAWKFKHLKRKTDRDDAQRLAQLYLLEQLPTVTLPPTSVRQWRSLIACRQTLVGRRVAVQNRIRALFVAQGLPAPRGARAWAAIGLAGMASWARPLGDCAADELWRGLLDLSLTEYRQLCELIDQTETKLDALGKQHADVALLETAPGLGPRTAETVAAYLHDAPRFQTGKQVSAYSGLVPRQHQSGEMDRRGRITKRGPALLRKMLVECAWCMIRYNAWARGIYQRLTGGGQRRKKQAIVALARKILVRCWAMLRDRKPWHDPQTGPKPTLSPSKQRRRAEAQQRRQAKQQPALAPVATP

SEQ ID NO: 295574 - protein, 359 aa, unidentified
MAVTMTYVGLDVHARSVHAAAIDVRTGELRRARFGADSDEVIAWLEALPGPLRGCYEAGPTGFGLYRAAEAAGVAVEVIAPSKTPRASGDRIKSDRKDAELLARLLLAGQLKAVVVPPESFEAARHLARCREQVRGDLMRCRHRVSKLLLLHGRVYDGSAWTKTHRGWLEKQRFDQAATELAYLDPLSAVDGLVARKAALDERLSRLAFDGDWKETVARLRCFRGVDTLTAFVLALEIGDFARFQRPAQLSSWLGLVPSLDQSGESRRQGAITKTGSGYARRLLVEAAWQYMRSPGAGTVIAERRSGQPGHVIQIARRAERRLHRLDQRLRQRGKPSNVTTVAVARELACFLWAAATAD

SEQ ID NO: 295575 - protein, 340 aa, unidentified
MAIVMGLDQHRGQIAAEWIDTMTGEVFRARIAPADRAGVRTFLVAFKGQGLEVALEATTGWRFVVEELERVGAEVHLAEPAEASALKGKKKRAKTDWADARHLRELLLIGRVPESWIAPAHILDLRARVRTRHLLSHQRTEWQQRMHAVLYHHGVPQRRDLLTVASRDWLASLSLPAAAREQLEIALHVIDALELKLTPFDRELRAIAREQPGARALVREFYGVGELTAITIIAELGDVRRFANSRDVVRYAGMDITVYQSDAHRAPGHLSRQGPPALRWALYEAAQRARFPASPDRAYYQQLAARIGGNRACLALARKLLKRSYHLLKELGDQALAPVA

SEQ ID NO: 295576 - protein, 410 aa, unidentified
MTETSIAQNAPILVAIDIAKARHEVFIAIPGKKRRRRLTILNQLNDFERLVASLTSYDLPVRVAFEATGNYHRALAYHLATAGFEVKLVSSVALARTREALHNSWDKNDPKDAQVILHMMEIGNEQFYHDPLVRGTNDIQELSKTHDIVSKSKTELWHRILTHYLPLYFPEADRFHRSSRSDWFFAFLERYPSPHFISAMSKDAFIADAWDVVGRKVAKERLLADIYETSKVSVGLPVGLDSDAISMFRLVLGEGRSLIAQRNQIEDRAVALLKDLPDYQLLTSIPGIGPINALTILAEAGDLRRFGHHRQFLKFCGMDLATIQSGTFRGQTKLSKYGNARLRRTLWMAGQVAILQRANSFRDKFERYIAKDRYNTHLRRKAYTAIAAKMARTVHGIIKNGDPYRPFFEG

SEQ ID NO: 295577 - protein, 408 aa, unidentified
MEVVYSRCCGLDIHKASVVACVITPEGQETRTFGTMTPDLLELADWLGQRGVTHVAMESTGVYWKPAFNLLEESFTVWVVNAQHIKAVPGRKTDVKDAQWIADLLRHGLVKGSFIPERPQRELRELLRGRRRLIQDRAQVVNRLQHVLEGANIKLGSVASDVVGKSGLAMLRAMAAGEEDPKVLAELAQGQLRDKIPALRKALEGSMGAHQRLMLQSHLRHLDFLDQEIALMDEEVGRRMGPFEEVIQRIDGITGIGRRSAEDILGEIGTDMSRFPTDAHLASWAKLCPGNNESAGKRKSGRTGKGNPWLKAALTEAAKAAGRAKKGYLAAQYRRLSARRGSKKAAIAVAHSILITIYHMLKDGTEYQDLGENYFDKQHHNRTLMRAVRKIEALGYHVELKPMKIDAA

SEQ ID NO: 295578 - protein, 415 aa, unidentified
MQVVYPVCCGIDVHKTFLVGTMISTTDGVEPNYQKKRFSTYNSDLHRFADWLHQNNCLDVCMESTGKYWVPVFNVLESRGIRATIANPKWVKAVKGNKDDIKDSKWIGDLFRLGLVPGSFIPSKDIRILREFTRYRYKLVSMKSSEKNRFQNAFTVCNVALDSVVSDMFGKSAAAITDYLISGDSFNPEYCVSLLQRSLKKKADSVLDSIEGYSITPEQKFRMRIVRSHLDYIDSAIAQVDSAIDSMVQTHEERIALLRTIPGIDRKSAVTILSEIGTDMAQFGSSKRLCCWAGLTPGNNESAGKKKSVRITRAGVYLKPALVQVAHAAVKAKDTSYYRLKYERIAKRRGKKRAIIAVARMILTAIHQMMTTGEVWNPTDLFKVDIPAALKEKQLAKAVKQATKFLEKQGLTVVS

SEQ ID NO: 295579 - protein, 1436 aa, unidentified
MKTSLSSITNLSISPRGRKLPVSIYEFVATVLSEYALSNLKVDSNDSAFHSISSYFVGGEILAKDLIQKLLIIPEIASIFDCFPSMGNGKEYDYAVWSQFLSDTTWEYDGKSSVFVFKEHTYAMENKVLILEKEPDGLFAKRLHCEATEQYYGRIGPGAREDKTAIQTPPIFTPRPQEVTLQDKDVEKAVSDADFFTLDESLQGADPQQREAITSGIDKNLIILAGAGSGKTRTLVARLAYLRAVKKIPLNRILLLTFTVAAAAEMRSRGKSLVDVIYSNIAPTKKSTVNARTIDSFVIQLVNTYYPQMGFSQKPVIYYSDNVETKQQKIQMLSEIIRENKLEGIFRFYLAGAGTQPEKLGRLLSDLIDYARGLPINCAGFDFLLQQYQEHQRASGKIMGFTEASLFVRDAIMQEDSPVKKGIIGKYSCILIDEFQDVNVLQNSIFEPFYDVGSINFTFVGDDDQSIYYWRGSDNTIIKNLIGKPNCKTTYLLTNYRNNPNIVEAGNAILSTIQNRAKKGKPIRANRATGEKIRVTTYNSKFTNLVNEINILLASGKSADEICILSRDRRTANSIRDELTAADIAVSKEDSIIVLSDMYREMKAILSILNAYNITASAKELRLITQSVNVTERHIQKIVKGRCTEVECEDSLKKVKALSDEVRLNQITSLADAVDRFSIKAGELYEGRVNEHHSDEVFEQFEEYCQNTSAPWPVPRAQLKEIFSTFEDNAKKRAVSGKPLTPGVRISTIHSAKGLEYDIVIITGLSAGQYPNTEQIDRKYAERNEQLKTFQESRACYYRQKQELDQSVFPTLLEECDSPIFTEAERDRMQDFQQELFDMRDGLLTLSADGVEEYLDAYVYFMAPLIAQYSSDIAKLNTELLNKQSEAEEMKEQILVATSDTAEDESNYNSQLEELCKSIADIGESIERLKIKRNRFFEATANLNNFYVQCLTVKGLLADMARADEIEELQQELKVEREQRTNEERRLFYVAVTRARDYLYLCYEAGTQPSEFIRLIPEKLKAEHIMMTLEEERDYRRIAIGIDVSKGKSTVCGMKPGGEIVYTPFEVQHTREGMSELVSLLHNSGEEVRAVLESTGSYHCPVVAALLENGIFVSVINSLRMKRFCSQSIRKVKTDRIDAMQIALYGLAYWQELQPTRLPENTYRELQLLARQYYQMTSILIKAKVDFNALCDQVLPGMQELMNDHAGRHKLSDFVLRYRHTTHILEMGETRFRKDYCKWAEKKGYRNRERMAALIFATAQNGIPVLPNAPSTQIVITEAIRVLHTVEASRDAILTQMQALAKTLPEYSLVREMPCIGDTLAPRLIAEIGDVRRFHSKRALIAYAGIDAPPYQSGKFCANNRHISKRGNRYLRKTGYEVMQSYVMHKPANDPIFTFIEKKRSEGKCGKLAMVAGLNKFLRVYYGKVTELYRSSSAIE

SEQ ID NO: 295580 - protein, 409 aa, unidentified
MRVYLGIDWSQDDHAACFINESGQIIFQLTVKHSVEGLDKLDRARAAMGVMPEECWVGLETAHTMGIDFLWARQYEQVFVIPPSATKSARKRYGQSGAHTDPSDAFVIADMVRTDQQRLIPWRPSSPLIQQMRAKVSLLVYLTHQVTRASNRLTAVLVRYYPAALTVFSQPMPPLGWHFILAYPRPAAIQSLSFAQFETFARQHHHRQAQRTLLASYARLQQPQPEASEAIVQAYAAEAVLLSQQLLTLSQAKVTQLKELGELFDQHPDAELFRSFPGTGDFLAPALLAKCGDDCQRFPSPSGWQCLAGTCPITDQSGHRRRVLFRKACDHEFRAITQQWAMGSLSQSVWAATYWQQMRPHCDSSSAAYRCLANRWLAIAWRCWQDYRPYDEAYHLQQRAQRQLPRSAH

SEQ ID NO: 295581 - protein, 365 aa, unidentified
MGVPTMAQARTFVALDVHVSGTVAASIERESGELRRRRLSGRAAEVVEFVAGLPGPVRVTYEAGPTGFALARRLEAAGVSCVVCAPGLIPRGPADRVKTDRRDAERLVRLLIAGELHAVAVPSIEAESLRDLVRAREDLRGDLMSARHRVSKLLLRHDVRFEGTERNWTGAHLRWLAGVRFAQPGTQAAFDDYRGAVEALIVRRTELERLIAEQLPASPWAQTARRLMCLRGVDTLTAAGLCAEIGDFGRFAHPEQLMSYLGVVPSEHSSGTRRRQGSITKSGSRHARRLLVEAAWHYRQPPRVSEPLRRRQAGADPMIVALSWKTQRRLHRVWSRMEQRGKRRTIIAVAAARELAGFCWAVATA

SEQ ID NO: 295582 - protein, 343 aa, unidentified
MNLHMLGIDIAKSTFQLHGADSAGREVLRKRLPRHKLAAYIANLPACTIVMESCGGANYWARVFQGNGHKVKLISPQFVKPFVKTNKNDANDALAIVEAASRPSMNFVPIKQVEQQDIQSIHRIRSRIVKNRTALINEIRGLCVEYGVVLITGAARVKFSLCVAIADRDNELTPSSRESLQGLYEELVDVEVRVKNLNTKIRQLCRQNESCQRILKIPGVGELTATAIVAAVSGPGEFRNGRHMSAWLGLVPRQSSSGDKQVLLGISKRGDRYLRTLLIHGARAVLSHHKDAANDYSRWVARKKSTMGHNKAAVALANKNARIIWSMLNTGEEFSYGVTTGAA

SEQ ID NO: 295583 - protein, 415 aa, unidentified
MALKIVYKICCGIDVHKTFVVACIASTNQKGVTTYESHRFSTYTKGLKDLLQWLLQRNCKDVCMESTGKYWIPVYNILENDCTIVLAHPKYVKAIRGKKTDKKDAKWIADLFKHDLVAGSFMPPADIRQLRDLMRYRFKLTCFKSSEKNRLQNCLTVSNIQLGNVVSDTFGKSAQAILDKLLENPADTSFDLEPLVYKSLKKKLPELRDAIDGYITPEQAGKLKVIKAHYEDLESRKAELEELIHALAAPYQQELAILQTAPGISSDFTAIGIISEIGTNMEAFPSAKHLCSWAGLTPTNNESAGKKKSVRVSKAGCYIKPLLVQCANAVVKSKKHPEIRNRYLRIKKRRGHKKAIIAIARMLLTALYHMLKNGENYNAELYRKSDLPPADREITVEQAIIIARNQGYKVKSATA

SEQ ID NO: 295584 - protein, 357 aa, unidentified
MISIGIDVHKKKCVATLKRDSKRIVEQTSFCNNSYGINEFIQHIKGYYKEDAIAVCESTGNYWIRLHDTLEDNGINTLLANSLKTKIIAQAKLKDDKIDSNVLVDLLRADLVYESFVPDKEYRELRQLVRTRLDLVTERTVLKNKVHALLAKYEYQCPVSHIFSNKGTEWLKTIDLSWIDRMAVDAYLDALVAIQKQIEIFTAKIAFVSKEDQRVKLLMTIPGIDYFTALTIVSEIVDIKRFSTPWKLVGYAGLAPSKRDSGDAHRNGGHITRQGSKWLRYTIVEAANTSTRCDDRIGRFYKRIAERRGPQKARVAAAKEMLVIIWYMLIKNEPYRTMNREMVERKYKKMERESNMV

SEQ ID NO: 295585 - protein, 401 aa, unidentified
MEGPIVSIDVSNGNSHYMCFIKNNKRFGKVNKIDHDIEGFKRLLEDIQKLEAETNEKVCAVFEATGVYTKPLERFLSKNSIKTYIINPLESARKRKEEIHNKKTDKLDPISISKVYYDKEEMMELKKKDETYNWLRKKNQLYEDQLNHLRKYKVTFQNQLSICFPGYLDLFKDGYSDIPMTILKKHPHPDLLKNKKAETVARYLEKNTCHTHKVSLEYALKIIEFAKKTYPGCEKDDVEVEIFKILLDKVIETQRECEKTLNEMITVASTLEEYRYILSIDGIGSNLAARIIAEIGDIEEFKSREALVAYAGLDPHIYQSGDQDGKHLKISKKGNKYLRCLLFLAVGCSIRGAKDNPVNRFYQKKKQQSNPLNSKAAKTACTAKLLKIIYGICKNKTTYER

SEQ ID NO: 295586 - protein, 348 aa, unidentified
MALFVGLDVSVRETSVCVVDDAGKVVLEQKVPTEPSDIIALLTSLGATYGRIGIEAGPLSQWLVNALTVAELPVICVETRHMKALLTAQQINKTDRNDARGIAQMMRVGLFKPVHVKTLVAQEQRMLLTSRKLLQRKLLDVECELRGTLRNFGLKVGVVGGSRYEARVRELVAGFPRLAAIAEPLLNVRRVMRQQFAVLHKMLLDTVRDDPVCRRLMTAPGVGAVVALTYRATIDQPQRFVHSRAVGAHVGLTPKRYQSGETDYDGGVSKCGDALLRTMLYEAAQVLLTHGSKWSWLKAWGMRVAQRRGIRRAIVAVARRLAVVLHRMWVDGSEFRWSKGSAAVPTVA

SEQ ID NO: 295587 - protein, 364 aa, unidentified
MDVHTTNFTLCCYTMDSEREFATVQTKPDYHEILKYMERIRKQRGEDCRFVCGYEAGCLGYSLHNQLRAHGVDCIILAPSTMPQEKGKRIKTDPRDAAKIAKCLAFHLYSPVYVPDAEDDAVKEYIRMRDDVNADLKRTKQQIIAFCTRHGFCFEGKTYWTRTHLKWLETLVFENDLYKEVLQEYLILYYTLAEKVDIYDARIEELSHTERYEEKVQKLRCFKGIATHTALSLLVEVGDYNRFRSAQHFASYLGLVPGESSSGEKQVRTGITKAGNSHLRWLLVESANSYSRGAVGKKGGVLKAKQEGNTPEVIAYADKANERLQRKYYKLALRSRHNIAKTAIARALACFVWGMMTGNISNAA

SEQ ID NO: 295588 - protein, 426 aa, unidentified
MSYRIAGIDVHKKMLAVVVSDVEIESEYQFERRMFSSNPEQLRSLAAWLVEQKAEEIVMESTAQYWKPVWETLERYWKPLCEKREGARRRSGTLHLAQALSNRGRRGRKRDFVDAERLVKRLVARELTLSFVPDAEQRLWRTVTRKKYQLRRDLVRLNNQLEALLEEAHIKLSSLVSDLLGVSARRMLKALADGETNPAALAALAHERLRATPEQLCDALGACTELKPVYRRLLKMTLEHLQILEQQSGQLDQELATLLHPHQDVVERLAEVPGFAVDSAQQIIAEVGPAAATFPSEKCLSSWVGACPGEEESAGVNYSHRSPKGNRHMRRLLNQTANAAVKAKGSIFEIIYRRCVPRLGHNQAIGVIAHRQCRLIWLILHQGTRYEERGPAVTKRSRYQRTWRMIRQLRNLGYRIDDPSYRGGVP

SEQ ID NO: 295589 - protein, 346 aa, unidentified
MDHYAGIDVSLECSSVCAVDANGKIVREAKVASEPAALIGWFRSLGFDLARIGLEAGPLSQWLYAAMKQAGLAVELLETRHVSDAFKAMPVKSDRNDARNIAQLMRLGWFRPVHCKSMSAQEIRAMLTARKLIQSKLQDIENSLRGILRGFGLKVGKTTKRSFASRISELVAGHPALETIAAAMLAVHMALLREFNGLEKRVRAMSLLDAKAKLLMSTPAVGPVISLTYASAIDDPSRFTSSKRAGPLFGLTPKKHQSGETDYSGRISKLGDASVREALYEAAHIILTKPIKRCSALKSWAMRIARRAGMNKAKVALARKLAVIMLRMLKDNMPFDPAAKAAAAAP

SEQ ID NO: 295590 - protein, 349 aa, unidentified
MHSTTVAVDLAKNVFELAVADSEGEIGERLRLNRARFSSFFVHRAPCRVLMEACGSAHYWARWIGAHGHAVQLLPAQYVRQYVRRNKTDRADAAALIEAARCAAIRTVPAKSLEQQQVLVLHRLRSQWMSTRHRYLNTLRGLLREFGIAVPLGVRVARTRIAHYLAQPPQELPAAIRPLLAQMLSEVKELEHHVEQIERDLTALTRADPVVQQLRQIPGIGLLSSTAIRAAVGDVERFPCGRCFASWLGLTPREYSSGERRRLGGISKRGDVYLRTLLVHGARSALLAAHRQQRSGRPLDHLRQWALQCERERGHNVATVALANRLARIVWATWKHARAFDGNWGRAAQ

SEQ ID NO: 295591 - protein, 344 aa, unidentified
MTHYVALDVSLRSVAICIVDDNGDITLEKSVNAEVEDIVQILRPFDGEIASVGLEAGVLTQYLTYGLQAAGYEVVCMESRQVNAALSAMRNKTDKNDARGIAQILRTGWFSRVHVKSIESHHIRALLSCRRAVLNKCVDLENEVRGLLKIFGIRLPSHLEHSVFEEAVRESIEADPALAHALIPLLEARGVLYQTFLVLDRRVKATARTDALCQLLMTAPGVGPITALTYKAAVDDPRRFKHSRTVAAHFGLTPRRFQSGEVDRLGHISKAGDADVRRALYAAANSLMTRTVGFSTLKAWGMQLMKTKGRRVAIIAVARKLAVILHRMWIDGTEFQWGTEGANT

SEQ ID NO: 295592 - protein, 350 aa, unidentified
MLIIGCDYHPSFQQIALVNTETGELQERRLGHREEAEQFYRALATVGAKVGVGMEASGHAGWFERLLAELNIELWMGDAAKIAAKRVRKQKTDRRDAQHILTLMVKDDFPKIWVPSWENRDVRQLLWHRHRMVQTRTRIMNQLQAAALNEGLRYKKKLWRESGRQQLESLPLAPWASRRRRDLLEVLDRINPTIAELTRAIEQQAEKCPDAQRLMTHPGVGALTAIAFVLIIGKADRFSCGKQIASYLGLVPEEDSSGERRRLGHISKQGNSLLRFLLVEAAQVTVRSDNRWRNRFFHLAQRRGRKIAKVAMARRLAIRLYWMWRRGWDYVQLESFGSHVGQPGHRHGVQ

SEQ ID NO: 295593 - protein, 343 aa, unidentified
MQTITTIGLDIAKSVFQVHGVDNDGKVVIRRQLKRRYVLAFFEKLQPCLVGIEACASSHHWSRELQALGHTVRLMPPAYVKPYVKRQKNDAADAEAICEAVTRTNMRFVPVKTPEQQSGLMLHRTRHLFIRQQTSVINAIRAHLAEFGVTAAVGRKGIEELLRVIADPSDKRVPDVVRACLAALGSQLLSLKKQILDFDRMIMAWHRSNQTSKRLNCIPGVGPLRATALVASVADPKTFRSGRNFSAWIGLVPKQHSSGGRDRLGSISKQGDRYLRSLFVAGALAVIRYAKIHGTKYRPWVAALLARRPTKVAAIALANKLARMAWAMMARGERYNYPASLRV

SEQ ID NO: 295594 - protein, 369 aa, unidentified
MKKILKYIGLDVHKNSISIGIADEGRNGEIRYYGKIDNNMDQLTKCIRKFISQGAELRCVYEAGGCGYHIYRYLTSNGIECEVIAPSKTPRKSGDHLKNDKRDCLSLARLHRAGELTPIYVPNAEDEALRDLVRARSDAQNAHKRAKQQLKAFLLRHHKVFPGKASWSKSYFNWLGDLTMAHPAQHITLQEYIDAVNTCHNRVARLTEQISRLSQESRLWPLIRAIQSLRGVALIVAATVASELGDIRRFERPNQLMAFLGLIPSERSSGDSVKKGSITKAGNTHVRKALIESAQAYRLPARISSLLARRQEPVAKDICELSWKAQLRLCGRYRRLRGRGKKDNVVKTAIARELVGFIWAIAMKTPLAA

SEQ ID NO: 295595 - protein, 556 aa, unidentified
MQVLSPHCAGLDVHKKTVVACLITPDPQGGWQHETRTCGTRTRDLLALSDWLLTAGCTHVAMESTGEYWKPGFNILEAHFAGLVVNAQHSKAVPGRKTEVKEAQWIAELWQPGLLRASFIPPPAQRELRELTRHRRTFVRERATVVNRVQKVLESATSKLASVATDVLGVSGRAMRRALIAGESAPAARAELAKGRLRTKRDQLSQALDGRVQAHHRFVLTELLCQIDSLEDTRRRFNEQSEAYRAPFEEALPLLDTIPGVGRETAEVSVAEMGADMSRFPTARHLAAWAGLAPGNHESAGKRLSGRTRKGNQALRQGLIQAAHAAAHTKNTYLAAQYHRLAARRGSKRAIVAVAHSILVIAYCLLSRQEPYRELGGDYFEAATGSDRQTVAAAVRAPGLYDYPAGSPAGGSGQRLAECPRGLFSQQAFIWTRSRRSAFCSTNRLNNSTPLCCSERHGRSTSETVVTSTTRPTYWRLAAPFLMSMTRFAFCRLPNHGRRFSPCSLSIVQTRLLISRPVVGQPFFLSRKGSSGFSSATRRPIPRWRAASSTRERSFS

SEQ ID NO: 295596 - protein, 316 aa, unidentified
MDVFILGINYHFIVDNGTNGFVSLLETSCKKAGCKKEDLFFCFENTGKYSQMLSVFLHTQTIDFVMEPAIKIKRSLGLTRGKNDKVDARRIALYAYEKRESLKTTVLPGEKITQIKSLLSLREKLVKHRTAYKNGISDLHDCYKDGETKFITEMQQRLIKNLDQEIESVEAQIRQVIDQDQDLINNFSLMISIKGIGKILAFYFIAYTANFTMFSDARAFACYCGIAPFAYSSGTVKGTPKVHGLANHQLKALLNMASMSAIRTKGEYRIYYQRRINELGKNKMSTLNIIRNKIVYRVFAVINRGTPYVDLYKFAA

SEQ ID NO: 295597 - protein, 402 aa, unidentified
MNCVGIDVSKGKSMIAVMRPFGEVVISPFEVQHTASELSELAKLLKSLDGETRVVMESTGNYHTPVAWLLHDAGLYVSVVNAMLVHDYGNNSLRRAKTDKKDAVKLANYGLDHWLTLPRYVPEEDTRLLLKNCHRQYQQYSKVQTMLKNNLISLLDAVFPEVNRLFNSSPRADGSEKWVDFVSTFWHCQCVSTLPLKSFSARYLKWCRKHGYYFSQEKAFEIHSKAQSCISVMPRNETTKLLVQQAIAQLKATSAALAALKQEMQSLAASLPEYPVVMEMFGVGSTLGPQLMAEIGDVRRFHSKKALVAFAGIDAPPCQSGQMDIHSRSISKRGSAALRRTLFLVMGIYLQSAPLDEPVYQFMDKKRSEGKPYKVYMMASANKFLRIYYASVTAYLNTLARI

SEQ ID NO: 295598 - protein, 377 aa, unidentified
MKRIIRIGMDVHSTNYTLCAMEPIIGEDDRIFATVDVTPDYKNILMFIENLKMKLGVDNQYDIQCGYEAGCLGYSLYNQLTAANVKCVILAPTTMLTPQGTRIKTDARDARMIAQCLSYGGYHAVYVPTEDDDSVKEYIRMRDDHKTALKKIKQQISALCLRHGHHYTQSKWTVAHWKWLKQLDLSVLYREVLNEYMASYEEQTAKIERFDQRIEELASQEQYAEKVKKLGCFLGIQTHTALSLIVETGDFARFAKGSIYAAYLGLAPGEDSSGTKTNRTGLSKAGNSHLRQLLIESAGGICKGAIGHKSKALKARQNGNTAEVIAYADKANTRLRSRYYKLIRHGKARNVAVAAIARELACFVWGMMTENISMKTV

SEQ ID NO: 295599 - protein, 500 aa, unidentified
MTLFVLASRGAAIPDSECLVLALVVVAAVGEPVNDENKEHVLKIRVGIDIACRAAHRAACADETGRIIWTGHRFRTAAGELEELWARLPAEASEVTVVMEPTRNAWVPLAGWFRRRGATVVMVPTEQSSDLRAYYTKHAKTDRLDAELLARLPLLHPEGLHPELADGPGDPLKRAVKIRSGLVHRRTTCMQRLDSLLEIMGPAWVEAIGSDMCQTAFKFLATWANPHQVRRLGRARLARWFQRETRKAWGERRADAVVTAAEATLELWGADGLDWDALAADIAVEAGLALELSRQIARLDERIFDLYCEADPDRIVMSAPGVGKILAGQIRGRLGDPHRFTSLAAARSFSGLVPRQNSSGLTHSAGGPTKQGDACLREALFTAAEHARKVDPTLAARYQRLMCDTGRHHTSAVCTIAAVLLTRIVACLRNGTPYQLRDVNGRPITPAEGRAIVAERYQIPPEIRAARRAVSNARSRTRRDERTQQGVAKRSKVTPVPLPA

SEQ ID NO: 295600 - protein, 357 aa, unidentified
MVVAVQYRRLPLKLNVMEQMYGIDLGMSSFEVSFFDVQGKLHQLKQVRNTVEGIARFLSLLPANACLCAEYTGVYGNLLLHMCTGAGVRICFVPGYEIKHSLGLQRGKSDEVDACRIREYAERFSDRLQTCFAPSEELEELQELYRTRGQLVESRKRLSTLNRGDNCKVMVSLAAARARQSLLDELDKQIKGLDAEIDHLIKSNPEQEKNYRILTSVLGVGPVTACDLIIKTENFQKLDTAKRCAAYAGIAPYPKESGKMKCNNHSSPLGDKHLKSLLFLCARSAKDHNKEILLYFIQKYQIEKKPYYLVMNNVANKLLRILYSLIHKGELYDRDYIQIDPRNYQKIRKERIVKLAS

SEQ ID NO: 295601 - protein, 482 aa, unidentified
MKSKPQEKTSKGTDRPGPGHWHEMNRQQRRETMRKIQSDDLSLEVLHPDAAGIDIGNESHYVAVPPARDSQPVRRFGCTTAELKTMAQWLKQCGIRTVAMQSTGVYWIAVYDILEAADLEVYLVNARETKNLPGRKSDVQESQWLMKLHTYGLLRNSFRPSQEIRKMRTYWRQRNDLVQAAGRHIQRMQKALTQMNIQLANVLSDVSGMTGQAIIQAILAGERDPHKLAEFRDPRVKASQLEIARSLEGNWQEDLLFVLKQEQDGYEFCQKQMLECDRQVEQYLQKREDRSKGAPLPEENRKGRLKKKKGNAPQFNLRGELFRMSGADLTQIDSIDVMTATTILSEVGWDISKWETEDHFVSWLRLCPDNRISGAKIIGKGRLPTKNRVSIALKMAASTLRRSSAYLGAQFRRLRTKLGAPIAIKAMAAKLARLVYRMLRYGMKYVDQGAEFYEAQHRNLQIRHLKWKAAKLGFQVVSAPAT

SEQ ID NO: 295602 - protein, 448 aa, unidentified
MGKSTKKTDVVKKISQLQVINPTAAGIDVSDNEMMVAFPINSEQIEVRAYECFTRDLHTLAKTLKSFGITSVAMESTGVYWIPLFLMLQDYGFEVYLVNAKHVKNVTGRKDDESDAEWIQKLHRCGLLSASFQPDNMIRTLRSIVRHRKNLVRMSAGYINRMQKALELMNIKLHTIISDIDGKTGRLIIEAILNGERNPEVLADLRDSRIKASRENIIKSLEGNWTTEHLFELKQCYQLYCYHHQMIDECDKEIESQLIEQLASKNEGLIPDLPKVKRKTVKKNRVDFELTSYLKEIIGVDVTEVVGLSEITVLSIMAEVGTDMSKWKTENHFTSWLGLAPNTKISGGKIISSRIQKKKHHAGQAFRMAANGLHNSKSPLGDFYRRIRSKAGAAKAVVATARKIAIIYYKMVLNKEAYNPKAMEDHQQKYKEKKISQLKRKIEQLEAA

SEQ ID NO: 295603 - protein, 459 aa, unidentified
MKRAKKTAQPPVRSEAAEVDSLTVLNPNAAGMDIDSESVWVSVPENRDAQPVRQFKMFTPDLIEMANWLKACGIETIAMESTGVYWIPPYEILEERGFKVYLVNARYAKHLPGRKKDETDAQWLRRLHTFGMLSNSFRPTGEICAMRAYRRHRATLIEHRAAHIQHMQKALRQMNVLLSPIVKDITGVTGMAIIRAILAGERDPVKLAQLRDPRCAKPGDEFVKALTGNYREEHVFALKQAVALYDAYTEQIRECDLEIERKFSTLKPIHHDSLPPLDTTDKRNTHSKNAPSYDARGLLYQLLGVDLVAITGLNASTVEDILFEIGTDMSCWPSDKQLCSWLHLAPHTDISGGKVLRSHTLPGHNRAGQAFRMAAQAVSHTQTALGAYFRRMRAKHGPQKAIVATAHKIARIFYAVLKHRQPFRDMSAEEYDQRERQRELARLQKKAAQLGFTLVQAAA

SEQ ID NO: 295604 - protein, 306 aa, unidentified
MYRTKVGVDLAKNIIQVCTLNGKKVTSNVEMSVDEFSSWLAKSKPLTVAFEACSTSNYWYQRAIEAGHDARLISAKLVKAVRQNQKTDKNDALAIAQALFLPEVSFINGKSVEQQQLQSIQRLRELAIKSQNASQKQIVSLLLELNIRLPNTQAGILRGLEGVLEDGEINLSDTFRATLSVAKVQLENMISAIREYDKYLEQSIQLLPDCKKLLKLEGVGPVNAINLYIALGANQSQPFKSGKNASACIGLTPIQHSSGGKEVMGTIGKYCKNGSLRSQLITGAMSVVIKVIKYGAKTKKNFGCRA

SEQ ID NO: 295605 - protein, 412 aa, unidentified
MTNPYNLFVGIDLGSQSHHVSVVDRDGTLLGERKFEHDGQGIQQLLTWLAELAGGASPETVAVALEAPRGAIVDALLERGYCLFSINPKQLDRFRDRYSVAGAKDDSRDAYVLGNSLRTDLSHFRRLRPDHVQIVRLRELSRASDALQEDWRRNANQLWSYLQRYFPAILKFSSAADDVWVFDLLEQTQAQSKLAAALPIEELAKLLRRRRIRRFSAEKLYRALQDRLPLAAGVEEALAEQVLLLLPRLRLLHQQRSEVDHRTDRLLVEMAQENFPEHRSVEILRSIPGLGRVFIATVFSEAGRPLLDRDYHDLRLLAGAAPVTWRSGKTEIVSMRRACNERLRDAVQNSANTHMQKDPRAKQIYARLRRKGNTHARGLRGVGDRLLELICVLLRSDQLYQLDRRQPKQDAA

SEQ ID NO: 295606 - protein, 350 aa, unidentified
MNVNHYIGFDVHKKTVSYCVKTADGKIVEEGKLLATHDALRQWAGKRQEPWRGAMEATLFSGWIYDTLRPFAAELQMGHPALMKAIAASKKKNDKLDARKIADMVRCDLLPACYVAPVEIRELRRMLRYRNLVVGQATRMKNKMSGMLMEVGAEYNKQRLHGKQYFTELLDTVAEVPASVKDLLRLSRGAMETFETTQQQLLARLRRDSLLARRVILLESIRGVGEVTALTWALEVSDPHRFSSVARAVSYCGLTSALVSSADKQQRGPLSKQRNAHLQTVLVEAAKLAPRWNPQLAALHARELERGNRNRATLAVARKLVAYLLAVDKSGQPFEVRNPLVAETEAQEVA

SEQ ID NO: 295607 - protein, 319 aa, unidentified
MTLAHPIAGIDISSTTLDVAVLHVDGSFKASSAANSKPAARKLARQLASSGVRLVVIEATGGYELIIMAALAGEDVPVARVNPRQVRHFAKGIGRLAKTDPIDARVLATFGERARPRVTTLPSAQEARLKALSLRRRQLVDARVAEKNHLGMILEKDIKAGVQRMIETLEEEIERIEDAIAQQIAACQPMRERRDLLESIPCIAAATSATVIAELPELGQRSTSVLKALVGVAPFNADSGGSNGERHIQGGRAPLRQALYMAAQTGYRCNPLLKPFYARLRAKGKSHKQAIIACIGKLLSIMNAIIKTAQPFNAKFAAA

SEQ ID NO: 295608 - protein, 346 aa, unidentified
MEHSAGLDVSVKETSVCIVDDTGKIVREVKVTSEPDALLGVLTNPAYRFKRIGLEAGPLSQWLFSALAEAGLPVICVETRHMRSALKAQINKTDRNDARGIAQMMRAGLYRPVHVKTLRSQKLRMLLTHRKLLQSKAIAVENDLRGTLRNFGLKVGMVGAAKFEARIRELVKNLPDLAVLIEPLLAVRRVLREQTAVLHRRLLAIARDDEVCRRLSTVPGVGPVVAVTYRATVDVPVRFRNSKAVGAVFGLTPSKYQSGEVDRSGAISRCGDDMMRVMLYEAAHIMLVRSTRWSWLRAWAMQIARRRGLKKAIVALARRLAVIMHRIWVDGTEFRWTREQHAAAGA

SEQ ID NO: 295609 - protein, 355 aa, unidentified
MSQTLNSKIAVIGIDIGKNSFHVVGQDRRGALVLRQKWSRGQVEARLANLPRCLIGMEACTGAHHLSRKLQALGHDARLMPAKYVRPYSKGQKNDFRDAEAIAEAVQRPTMKFVATKTAEQLDLQALHRVRERLVSQRTGIINQIRAFLLERGVAVRQGLRFLRIELPSILATRSDVLSSRMLRIIEDLSGDWRRLDERIEGLSSEIEALARQDQACERLMTVPGIGPIVSSATVAAIGTGDGFSKGRDFGAWLGLVPKQISTGDRTILGPISKRGNRYLRSLFVQAAWVVLVKLGKKWERYGLRSWIEAAKKRLHHNVLAIALANKLARIAWAVLHKGRAFECVKTNATASQSA

SEQ ID NO: 295610 - protein, 389 aa, unidentified
MKIYVGIDIAKLNHFAAAISSDGEIILEPFKFTNDADGFQLLVSKLDSFDKNSSIIGLESTAHYGDNLVRYLVAEFYQVCVLNPIKTCQMRKNNIRKTKTDKVDTYVIAKTLMMQHDLRFVSFYDLDMMDLKALGRFRQKTIKQRTRLKIQLTTYVDQVFPEIQYFFKSGLHQNAVYALLKEAPSPKEIASMHMTHLANLLKVNSHGHFTKEQAKELRVLAQKSVGANDSAISIQITQTIQQIELLDSQLEKIEAEMTDIMKFNDSVIMTIPGIGYINGGMILGEIGDIHRFSNPNKLLAFASLDPSVYQSGNFQAKTTRMSKRGSRVLRYALVNAAWNVVRNNATFKAYYDAKRAEGRSHYNALGHCAGKLVRVIWKMLTDKVEFNLE

SEQ ID NO: 295611 - protein, 389 aa, unidentified
MEARTVYNPPPAAPHDDAVRCVLAIELSKKSWIVAVNTPLSEKISRHTLGACDWKELLKLCERIRTRIARELRKDVELVSCYEAGYDGFWLHRLLEAHGIRNYVIDPASLQVDRRARRAKTDRVDVERLLRSLMAYLRGEPKVWSVVCVPSVAEEDDRRLHRERGRLINERIQHVNRIKGLLAIHGIYDYPPLRHDRMQQLERLRTADGRTLSPRLKAEILRELQRLELVIGMIKTIEAERDAIASAKIETEHGSAKRIQDLAKIKCIGPEFATTLVGEVFYRSFDNRKQLASYVGLTPAHFQSGETCRDQGISKAGNAKARRVMIELAWLWLRHQPASPLSVWFHDRVGKLKGRIRRITIVAVARKLLIALWRYLETGLAPEGAILKV

SEQ ID NO: 295612 - protein, 364 aa, unidentified
MKRKVYVGMDVHKETIQIAILPSNTKALVKEQQIKHEEGQIKKFIQKLKSEGTEIHCCYEAGVTGYPLYRYLKTLGVNCIIAAPGKIPRQSSDKIKTDKRDAIKLARLLRSGELESIHVPSEEDEAVRDYLRSRDSLRLDLGRNRQRLMKFLLRKGITYSTTKYWTASHYKWLNNLHFENEILQATFNDYYSRVRVQEENLKAMDQKIQEIAKSEPYREKVGILRCFRGVDYLTAMFLLSEVNDFKRFKTAGSFMSFLGLVPGEYSSGPKRKQTSITKTGSPRLRRILVEAAWQHRFPGTGSKVVAARRVGQSALVVSLAEKASLRLHKKFKSMQLRGKTPQVMITAVSRELSGFLWAAMNLVA

SEQ ID NO: 295613 - protein, 342 aa, unidentified
MKDMMIGVDLAKNVFQVHGALRTGEVQFRKKLTRKQFHAFLARQDPCLVIFEACGSAHYWAREIEALGHEVKLIAPQYARPFVKRQKNDAADAEAIVIAARQPEMRFVQPKTIEQQSRAAVFRGRERLVHQRTADVNALRALLYEHGHVFPAGIRYLDRMTALAEEEASDLPVLIREECKDLLAQIAETTTRIAERTAKLKALAARSDRARRLQTMPGVGPLTAVAVEAFGPDMAQFKTGRDFAAWLGLVPRQHSSGGKERLGRMTKAGQADIRRLLIIGAMSRLNWLGQRSIVEGSWLSCMLTRKPKMLVAIALANKMARQIWAMLTKNEDYRDPVLASTA

SEQ ID NO: 295614 - protein, 394 aa, unidentified
MRFVGIDIAAETHVVAVVDESSALVVKPTPFGEDAAGYATLRALLGAPEDVLVAMEATGHYWQNLFAVLVAEGFAVALLNPMRTRRFAGEDLARAKTDAIDAVGIARFAAQKRPAVTRLPEAATQELRELVRLRDRLRQEFGDRTRQLHRLVDLGFPEFTRVIPDLKGRLATGLLAAYPTAAAFRGVSVLRLAALRADGTHRVGAALARALLEAARESVGQHHGPAYQLQVRYLCEDLELLRRRIEALEQDVATTLQTHEVGMLLTTITGIGVQTAARLVGELGDPARFRSAAALAAYVGVVPGTRESGKRRLTHARLAPTGHARLRAALWMPTLVAVRTNPWLRAYYARLRARGKLPKVALIAALHKLLLAIYSVAKHRRPFVPHLTVQGVQA

SEQ ID NO: 295615 - protein, 354 aa, unidentified
MAAAKQVYSFTFQEEIDMRYLGVDLHSNNFTVCFLEEDGTHTFEKYPLKELEAFKSRLRPSDKIAVEATGNSRFFHAQVAPLLAECIVVNTRQFKVIKQSVSKTDRNDARALAQFLSKGLLPSSRIKDELHAQLKSLAQTRDRLVKLRTALFNKVHAHLKAQGRESRKEAYDHPGNLRQVLREQWPASVRLELEVIAAQIQSLSEGIKKLEREICELGKQLEGHECLTSIKGIGDYSAAVLLSIIGDVNDFADEDKLASYFGIVPKVADSNATQHHGRITKRGSKLGRLVLVQCTLTAKRFSPYLRQYYERIKGRRGSGKALIATARKFLGIIYRTLKEGWVFADFPNFVLAEQ

SEQ ID NO: 295616 - protein, 355 aa, unidentified
MSQEKYIGMDVHQATISVAVTDSRGKLIMESILETKATTILEFIQGLHGSLSVTFEEGTSAAWLHDLLKPHVTRLVVCDPRKNALLKDGSKSDRIDARKLAELLRGNQLTSVYHGEHGMRTIKELGRSYLTITKDLTRVMSRIKALYRSWAIPCSGACVYAPRHRAEWLGKIPEPGVRLRAERFYQQLDLLQPVRQQARRDLLTESRKHHAVKLLRQIPSIGPIRAALLVAQLQTPHRFRTKRQLWAYSGFALETHDSGEYRYVRGKLQRNRERMTVRGLSNNHNPDVKNLFKGAAISASTHPGPLYDFYVALLEKGMRPTMARLTLARKIASITLTIWKKGVDFDATQLHRQEA

SEQ ID NO: 295617 - protein, 319 aa, unidentified
MSKKWLDVAIFVENSDLKGYTHTRVNNDKQGYRELLRWLRENGVDASTCTYGMEHTGFYSDGLQHFLDKKDYSYTMLEPAVIKHYPIQPREKNDRLDAAKIADYLYRFRDTIQLSRVPDKTMEELRKLHRERKFYVEDRVCYLNRRQVVDKDEAKRLDKMIELLDKQIDTIEEKIRQIIQNDEALMENYLYLDSIKGIGFVNAVNAIVITRNFTVFKTSREYASYIGVAPHTKTSGTTVRWKPKPRKHCDLTAKADISQAAKIAVVHDVELKKFYERKCNGKDDADTVRKAMNAVKFKLVLRMFAVVRQKHAYRQLTMI

SEQ ID NO: 295618 - protein, 401 aa, unidentified
MPNELWAGIDIGKEHHHCVVIDETGQRLLSTRIANDETALTILIDEVLALADGGEVLWAIDLNRGGAALVIGLLAARSQPVAYLTGLMMHRASAGYRGEGKTDARDAFIIADQARIRRDIGLLRPGDEVAVDLRILTGRRLDVVFDRTRQINRLRAQLLEVCPAMERALTLTNKGPLILLTRFQTPGAIRRAGVARIEAWLREQHVRSAAVLASEAVTAARAQHISLPGEAVSAQMIARIAQGVIVLDAEIAELDTAIEERFRQHHTAEIIVSLPGFGPTLGAEFLAATGGDMDAFTSVDQLAGFAGLAPQPRDSGRINGNLRRPRRYHRGLLRSMYLSAQISISTSLQSRAFYQRKRLEGKSHKQAVLALARRRLNVLWAMLRDHTIYHDSPPSESAIAA

SEQ ID NO: 295619 - protein, 311 aa, unidentified
MTETTIGIDISKDHLDVHRLPGDEHKRFDNTAAGHKALIRWIGAVPARVVYEPTGPYHRKLEVQLAAAGMPIVKVNPRQAKRFAEATGQRAKTDRLDAAMLARMGALLGLEPRPVRSAILNDLKDLHLAREALVKDRTAAKNRGKSISLPLLKRQNEARLRQINQQLEAIDAAIKALIDADPALSARFAILVSIPGVAAVTAAMLVTEMPELGSLDPRQAAALAGLAPITRQSGQWKGKAFVHGGRKQVRQALYMPALVATRFNPDLKAKYQQLVATGKAPKQAITAVMRKLIVLANALLKKGAPWQPSSA

SEQ ID NO: 295620 - protein, 344 aa, unidentified
MKVSTCGIDLAKNVFAVHGVDIHGRPCLRKQLRRQDMVVFFAKMESCLIGMEACASAHYWVRKLTELGHTVKLMAPQFVKPYVKTNKHDAADAEAICEAVSRPSMRFVAIKSVEQQALLALHRARQGFVKARTAQINQIRGLLSEFGIIMPQGIRCAFRELPNILDQIEQTLPASFLNLMRRLSKNLEQIDRQVAELEAEIKQLHRQNEACRKIADIPGIGPITASAIVASIGDAREFKSGRQLAAWLGLVPRQHSSGGKQMLLGISKRGDSYLRTLLIHGARSVVRVAQSKVCAAHTWLTALMARRNRNIAAVALANKNARIIWALLARDRTFRPDCGAISRL

SEQ ID NO: 295621 - protein, 347 aa, unidentified
MQRTTIGLDIAKHVFQAHAVDPASGEVTRTRLQRGEVLSHFAQLRPACIAMEACGSAQHWARQFSKLGHQVMLIGPQFVKPFVKTNKNDAADAQAIWTAAQQPEMRSVAVKTEEQQAVLALHAIRERLMKARTAAVNQLHGLMGEFGIALPKGWNKMLPQAAVALDRTDSPVPALLRPQLQRQLKEVRDLTEQMAEVERQFAAWKRRRDECERVAAIPGVGLLTATAAVATMGQASTFRSGRQFGAYLGLVPRQSGTGGRVQLLGISKRGDKYLRTLLIHGARSVLARSHAARDPNSWMGRLLQRRGRNRAAVALANKIARQIWAILAHGRTYEPNHGLAKAVTTPA

SEQ ID NO: 295622 - protein, 348 aa, unidentified
MGYFAGLDVSLEETAVCVVDDAGRIVREARVASEPEELVAFFAACGMTMERIGLEACSLTAWLHGGLTEAGLPAICIEARQAKAAMGAMPNKTDRNDARGIAQIMRTGWYRAVHVKSPACRSWRALLTARRMVLNKRRDIENGIRALLREVGLKVGTPSRKDFPARVRELTADEPVLASLAESLLSVVEVMTREVERLTKRVLDEVKTEPTCRRLMTVPGVGPLTALAFRATIDQPGRFRKSRDVGVHLGLTPRRYQSGETDVQGRISRCGDELARTALYEAAHSLLIRGTKWSTLRAWGMNIAKRRGMARARVAVARKLAVILHRMWADGSEFRWGKQAAAPAMAAA

SEQ ID NO: 295623 - protein, 357 aa, unidentified
METAYDGRQVVGIDLHRRRSVLVRMTEDGRRLGTARITNSPQELRAQIARAGKSPRVVLEATFGWYWAADTLAAAGAEVHLAHPLGVKAFRYRRVKNDERDAADLADLLRMGRLPEAWIAPVEIRELRELTRYRQKLVHLRTSCKDQVHGVLAKLGVLPACTDIFGVAGSAWLDQLGLPQPYAGKVTSLRQLTGELTSEITMLSEVIADLAAGDRSYQVIQQLPGIGPVLAAVIIAEIGDVTRFKNAAQLCSWAGLTPRHRESDTKVTRGHVTKQGSRMLRWALIEAIQRAGADTVTGAIKDAIIARRGKQARNIAKVAAARRLLTLVFYGIRDGQIRCLSTTPGGSPPTTRATRAA

SEQ ID NO: 295624 - protein, 342 aa, unidentified
MNVKTIGIDLAKAIFQIHGVNEHGKCLFNKQLKRAQMISFFANLPPCLVGMEACSSAHYWARKLQGLGHTVKLMAPQFVKPYVKTNKNDAADAEAICEAVSRPNMRFVPMKSSEQLAVLALHRARQGFVKARTAQANQLRGLLAEHGIIIPKGIAHIGKHLPEILEEYENGLPGTFRQLLERLGEHLKALDRQVQELEVQLQSWHRENVASKKLAQIPGIGPLTASALIASVGDAKSFKNGRQLAAWLGLVPRQHSSGGKQTLLGISKRGDSYLRTLLIHGARAVLRVAERKAQHANSWLAGVMGRRNHNVAAVALANKNARIVWALLAQEREYEANYGVVA

SEQ ID NO: 295625 - protein, 435 aa, unidentified
MQPQPEPKPQPHTEPASPPLVAWIGLDWADQEHHVCLQAVGSSQIEQRVVAQRPEALQEWVQQLRARFPQGRVAMALEQSRGALIYSLMGYDFLLLYPVPGKTVADYRKAFFGSGAKGDPRDSELLLELLRCHADRLRPWAPEDVPTRHLGLLNEQRRKLVEDRTALTNRLGSLLKESFPQALDWIGELSNPPASAFLAKWPSLAAAQQAPPSSLRQFYRRHFRLPPQQLEKRLAEIRQAQPLTSDAAVLDSHALILPLLAAQLQTLLASVRSVEKAIAALFSKHPDYDLWDILPGAGAALAPRLLVAFGTDRQRYQNATELQTFSGIAPVTASSGKSRWVHWRWACPKFLRQTFHEFAVQSIVRSTWARAYYFQQIHRGKHHHAAVRALAYKWIRILYRCWQNHTPYNEQRYLQALARRGSPLLVHFRIPEAVG

SEQ ID NO: 295626 - protein, 400 aa, unidentified
MRSVFGIDVSKASSEVAILVNGEKVHSYTMSNDAIGFSRLLGDLKTVHKPEIIFEATGVYSRRLQAFLEDNGYAYTRLNPLEAKKQLDSLRVRKTDQIDAEKLAQSQFVLNRKPTYVQEEVYQNLRDLSRFYQNLTEDIVRAKNRLHKVLQVTFPELETILSTPTGEQYWNLVIAFPCKDFVLELSKDKLSKRIRLSTSKRISDKRVVYLAEKLTELANQSYCAVKKTSPMLEEVRYYAKELLRLSEQRQAVLDEMVELAQPLPEYDILFSIPGIAETTATSIIGELGDIRRFQSANQINAFIGIDLRHYESGNFIAKEHITKRGNPYARKILFKCIHNIASASHTNPCHIADFYEKRKRQSQTTSTKPHTIASIHRLIRTMYYLIMHNKLYDYTSTQNQ

SEQ ID NO: 295627 - protein, 338 aa, unidentified
MNTTAFGIDLAKRVFQIHWVDTETGEIGRRQLKRAQLNGFFANRAPAVIVTEACGSAHYWARQLISLGHDVRLIAPQFVRPFVKRNKTDAADAQAIWEAAQRPEMRFAAVKSKAQQSVLTLHRVREQLVKVRTMQINQIYGLLYEFGAAVSANRHSLSEAAQALTRLADTVPAVVIDTLREQLRRIDVLTQDIVEIERRLAAWQRGNEATRRLMAIPGVGLLSASAAVATIGDGRTFRCAREFAAFLGLVPRQSGTGGRVKLLGISKRGDVYLRTLLIHGARAVLACSKHLNETLQRLLARRPFNVAVVALANKNARTIWALLAHDRVYQPDHTAHAA

SEQ ID NO: 295628 - protein, 348 aa, unidentified
MLFVGIDVHKETHTAVGVSPFGEKIFEAKIGNHPKDFDFLAAKVEKMRGSLSPYFGLEDCHGYGERLAEYLVEKYPVIHVPSVMVDHARKKTTHPEKTDSLDAYGVAKVMMNDMDSLPQYTLTEELKRTKQIREISLDREHLVLERARLKNQLHAIFYRIWNHDYQDVFKDPFTLKAMRHWMKARPSCDQFLLRAMKRKIKRLIDLRYEIIDLEKDLSELLEKSDYTIQTAPGCGTAIASAIIGEIGDIARFKSPASLAKYAGCSPRECSSGKTRKHRKTWAGNRRLNCAFHRMALSQISRMGNEKARTYFARKVSEGKSKSQALVCLRRQMVNIVWCMMKNKTTYHD

SEQ ID NO: 295629 - protein, 351 aa, unidentified
MNYLGIDHHRQYSHLTLMDEKGNVLQSGNVINRRSEMEAFLEDVKDCRAVIEAGRSSYTLVDMLAELGVDVRLAHPKEVKSIARAKVKTDKRDSRILAHLLRTDLVPEVYQRSKENREVQKILRQRAFYVGAMTRVKNRIHAFVVQQKEEIQQEAAREKNMFSERGQKMLLGLACPEPEKKMLGSLVKTHRHLEDRLRETTALVEEVYQGNRNAQLIQTVPGFGTFLSVLAATEIADVGRFADAAHLHAYAGVIPSTHSSGERSYHGKITKEGNRWLRWAAVEAVWPAIRADFDLRIFYERIKKRKGANSAKVATARRLLTIIYRMLKENRPYIPYKRNQSAAFGKFLTDR

SEQ ID NO: 295630 - protein, 402 aa, unidentified
MNAVGIDVSKGKSMVAIMRPFGEIVSAPFEIKHTASDINSLVELINSVEGESRIVMEHTGRYYEVLAHQLSAANLFVSAINPKLIKDFDNDSLRKVKSDKADAVKIARYALDKWQNLKQYSVMDELRNQLKTMNRQFGFYMKHKTAMKNNLIGILDQTYPGVNTYFDSPARSDGSQKWVDFASTYWHVDCIRKMSLNAFIDHYQNWCKRKKYNFSQSKAEEIYGKAKELVPVLPKDAITKLIIKQAVDQLNSASTTVESLRTLMNETASKLPEYPVIMAMKGVGTSLGPQLMAEIGDVSRFTHKSAITAFAGVDPGVNESGTYEQKSVPTSKRGSADLRKTLFQVMDVLIKTHPQDDPVYQFLDKKRAQGKPYYVYMTAGANKFLRIYYGRVKEYLSSLPES

SEQ ID NO: 295631 - protein, 372 aa, unidentified
MDQHSRLFVGLDVSKLKISVAVADGERGGEVRFFGDIPSDPASVSSIVQKLAKRGAKLHFCYEAGPTGYELYRQLTEMGHDCVVVAPALIPKRPGDRVKTNRRDAVSLARLHRAGELTAVWVPDRGHEAMRDLVRAREAAQEAQKRARQQLQSFLLRHGRIYSGRSSWSLAHMRWISTLKFEHPAHFIVLKEYCQAIEDAEVRLKRLTDLISETVKSWTMAPVVEAYQALRGVSLIAAVVFVAEIGDIRRFENPRQLMAFLGLVPSESSTGEHVKRGGITKAGNSRARRMLVEGAWAYRFPARVSRTKQAQLEGLPRSVREIAWKGQLRLCSRYRKMILAGKHKAIAITAIAREMGAFLWAIGQEVQPTHHA

SEQ ID NO: 295632 - protein, 483 aa, unidentified
MITIPAVRERCAGIDVGKRGLAIAVMTGPADKEAAIQTRWLGTTVPELEALREWLLQEKVTSVAMESTGSYWIPIKNILENSLEVVLVCSKKHHPKKGEKTDFRDAIQLAHLHRHGMLTGSYLPERGIVELRDLTRRRKKLLGNLASEKNRIQKTLEVANVKIGNVVSDVFGISGQEMLEALLSGREIEAEEIAGMAKSQLRTKIPQLVETLKGHQMNDHHRWLIQQSIEHVVLLDRQLEQLEDRIMMKVDPYRKQFDLLCTIPGVKDLNAATILAEIGPDMSVFPDSDHLCSWAGRCPGNNRSAGKSKSGRVKKANKFLGCALRQAALGAVRTKDGIMRRKFQRWVRRMGGKKANVAVGRSLLKVAWSVLKSGKPYREPDAGVMHEMERQKLVRHHARRLRALGAEPGAIEEIVQQLLCPVPQQKNPRVASQLKKSVWQTKTRSPPRASRVERLAGCRKNAASHAVESWDSGPGNHADTPQL

SEQ ID NO: 295633 - protein, 344 aa, unidentified
MQVHFVGLDVHKQVIAFCIKTPSGEIVREGTVLARRESLDQWVATLPGPWHGGMEATMFSHWIYRHLEPHAAQLEMGHAARMKAITAGKKKSDKIDARTIADLLRCNLFPACFVISPELGALRQQLRFRGLLVQQRVRFKNKTAGLLMEAGVEYQRRRLHGQRYFQDLLQHNAEIGEHLRPLLEFNHREIQTLRRMDRQILVRLQQHPRLQARVKHLQTIAGVGQITALTWALEIATPQRFPSIKQALSYCGFTSALRESAGRQMRSPLSKQRNRHLQSVLIEASKLAPRSNALLREVHRKALQKGAHKNRATLQVARKLVAYLLAADRAFGAQESLAAAPAAA

SEQ ID NO: 295634 - protein, 335 aa, unidentified
MEFEFFIGIDVSKNQLDFAVRRGKQLLFHREIVNEPAAINAFLKELSKLPGFNLSTAVFCMEHTGIYNNHLLVCLHKKKANICLEAATHIKKSLGNIRGKNDKVDSIRIAEYAYDKREKLRMWAPKREIVQQLSHLAATRSRLIKVKKILKTPLKEAGPFVKKSITKQNIKVCIGTLNAIEADLKKVEKEIDKIISLDPELKRLFNLVISVCSIGAVIATQVLISTNEFKDITEAKQFACMGGMAPFTEESGIFKGKGRVSHMANKKIKTLFHMAALVAIQYDPELKLFFERKVNQDKKNKMSVLNAVRNKLILRIFACVNQNRKYEKNYARLVA

SEQ ID NO: 295635 - protein, 343 aa, unidentified
MQIVRVGLDLAKYVFVVHGVDARGKVVLRKTLRRSAVSNFFANLPPCLIGMEASNGAHYWARVLSELGHDVRLISPQFVTPYVKSNKNDRNDAEAICEAVGRPTMRFVPRKSVDQLAVQAIHRIRSRLVGSRTRLVNQIRGVLSEHGIVIARNIAKLRQGLADVAGSNEQNLSDLVRALINELQVELAELDRRIAAWDQRIRELYRGSELCQRLGKIEGVGPLSATALMAAIGDRRCFKNGRQFAAWLGLVPKQRSSGGRERLFGISKRGDRYLRTLLIHGARAVLVRVGAKQDPRSRWLGKLRERRHPNVAAVALANKNARIAWALLSGNEPYNPRLTVGTA

SEQ ID NO: 295636 - protein, 445 aa, unidentified
MEVVYRRCCGLDVHKRAVVACLLLLDEAGRKTKKKREFGTFSDDLRQLMLWLFSNHVTHVAMESTGVYWKPIWNVLEDKFTILLVNPQHMKALPGRKTDQKDSEWIAELLQHRLLRPSFIPAREIRELRDLTRLRVHLKQEVNRVRNRVHRILEDANIKVSCVVSDLFGVSGRAMLEAIVRGKTDPGWLADYARGTLRLKKDELVRAFQGHLGEHHRFVLSELLEELTFLEGRIARLETEIERRLQVHRQVIERLCTIPGVERITAWTLIAELGLDMSVFADAAHLASWTGLCPGHCESAGKRKTGRTRKGNVYLRRGLCQAAWAASHCKDTYLTALFYRVASRGGVKKAVVAVAHRIAVIAYFLLAEPVVYKELGGDYFDRLHPERTTRRLVHRLEQPGHQVALHAKAPLPPAPTTTPHIPKCAKPRGRPCKCRERGITCLHTI

SEQ ID NO: 295637 - protein, 409 aa, unidentified
MTNTLFVGIDVSKKTNVIRFTDSAGETLSLFNAPNNQDGATKILEKLKDTILHTDFRSVTIGMESTSIYADHLAVFLRNDDFLKKWHVKVHILNAKQVSKFKESYPELPKNDNIDTLIIADYLRFGRIAKEVNLDEKYIALRNLTRARFQMAQNLSREKTRFLETLFYKFSALDSSKVFSNTFGATSIAVISDFFSVDDINDMPLEDLADFVALKSKNKFSVPQKIALELKAAAKSSYRLSKTVNDSLNQLLAVRLVGIRSLQHQIKDLDKAISSYMQLFPDILSSIPGFGPVYSAGILAEIADIHRFNNHAALAKYAGITWSRYQSGGFEAANTKLILSGNKYLKYYFLEAANQVRMHDPEFQRYYQSKFKEVPKHQHKRALALTARKLVRLVYALLHTNRLYIPPTL

SEQ ID NO: 295638 - protein, 339 aa, unidentified
MARYIGVDLHRNQFTVCVIAENGREYLSEYRLEQLPRFVAKLRATDEVAVEVTGNTRLFYDAVAPHVAKVVVVNPTQFRVIRDSVKKTDPHDARTLAFYLSKGMLPEVRMKDKLHAQLASLTQTRDTLVKQRTALKNKVNNILSAHGVNLRKEALSGDSGLDEVLGMKFDPIVMTELRVIVGRIRACNASIAELEKTIQAEGPKLPGYKNLRSIKGIGNLGATVLLSVIGDIDDFAHPGKLAAYFGIVPRVRNSNEVERSGRITKRGTKLGRTTLVQCSLIAMRYSRYLATFYHKIQARRGTGKAIIALAKKFLGVIYNTLKNNWIFEDFPNFVLAEAS

SEQ ID NO: 295639 - protein, 339 aa, unidentified
MGLYAAFDLHSSNSYLGISDEKGKRIFKKKLPNDPTTIKETLRPFKAEIEGIVVESTYNWYFLVDLLREEGYRVHLANVMKTQQYSGLKYSDDKNDAFWLVEMLRLGILPEGYIYPKEERPIRDLLRKRGHLVRLRTSLIVSLQNIIARNLGSRLKSNDVKVLTMDRVTPLFQGNEDLALAGKVSKEAIDFMTRQIKTIEATIGERIHLSNPYNRLLSIPGVGKILAFTIQLETGSIERFQKVGNYVSYCRKVPSGRFSNDKKKGTGNRKNGNKYLAWAFSEASDHARLFDSESRRYYQRKLQKTNAPIAHNALAHKLARAAYYIMKDGVVFMPDKAFA

SEQ ID NO: 295640 - protein, 361 aa, unidentified
MRMIGVDLHTRQQTLAMLDSTTGEVVEKTLMHEANNVRNFYSPLSRPVCVGIEATGSMQWFVNLMEELGIECQVGHPAQIRAAEPRKQKHDRRDADLILKLLLENRFPSIWVPSKELRDLRALLLHRDQWVRMRTRVQNALQAIALANGLRRGASLWSQAGQHTIASLPLAPHTAHRRTELQALYVKFEAEIEKLNQRVEEQAWERPGALLLMTHPGVGPVTALATDVFLGDPTRFADGKTLASYVGMIPSEYSSGGRQRLGGLSKQGHPLLRFLWCEAAMHAVRRDPQLQRFYRRKLIQKGLGKARVAAARKLGIRLWIMLRDQIDYNEFCRRGQMRHKNGGACAGMPDTAHGAKQSPTE

SEQ ID NO: 295641 - protein, 347 aa, unidentified
MRIIGCDYHPSWQQIWWVDTETGETEEQKLEHASGEAERFYRGLRGPVLIGMESTGNCQWFVEMVASAGHELWIGDAARIRASEVRQQKHDRRDAALILKLLLEGRFPRIWGPSVEEKDLRQLLIHRHKLVRIRTQVKNELQHLAMNRGVTRGRKLWNKAGESALRELTLRPWASRRREDLFKVKGMLDEQIGLLDQAAMGAAEQNEKARLLMTQPGVGPLTSLAFVLTMGDVSRFPRGKQVASYLGLIPREYSSGGKQRLGSISKQGNRFMRMMLVEAAQVAVRCDPQMRNEYLHRCHSKAKGVAKVAAARKLAIRLYWMLRTNTAYPEVVRVESSSRVPLVVRQG

SEQ ID NO: 295642 - protein, 417 aa, unidentified
MVNDVQWFVGIDWATQSHCVCLLDAEGRSVGQRDFAHGGAGLTELRDWLLEKTKAAPGQIAVAIETPHGPVVEMLLEHGFVVFAINPKQLDRFRDRFTVAGAKDDRRDAYVLGSSLRTDRAAFRQLAADNPVVIELREWSRMAEELQQERTRLANRLRQQLWRYYPQAAKLTDDVADDWFLALWQKLPTPARAAKAGEKAIARILGAYRIRRLDAATVLKTLREAPLFVAPGTTEAACAHIRSLAARLHLVNQQIKQAQQSLDRLCAELEAEENPSGQSCEQCDVTILRSWPGIGRINLATLLAEAAEPLRRRDYHALRALAGVAPVTRQSGKQRFVIRRLACNRRLQSAVHHWSRVALQHDAAPRRRYDALRQRGHGHARALRGVGDRLLFALCATLKHQVPYDAAYTSVKTSPAG

SEQ ID NO: 295643 - protein, 344 aa, unidentified
MYDCYKTFFKIMEKLIHFIGIDVSKLTIDVAIIINNDIGKIIQLVFTNDSKGFKELKNRLNKEKIPFPETIFCMEHTGYYSKQLSRFIIAQHGNLWMEMSLKIIRSLGVQRGKNDKLDAKRIALFAQRNQQDFVPYNPPRLIVENLKTFLMLREKLINSKIALVVPVNELTCVDKAAGKIALKAISKALQGIKKNINTLDAKIDELIASDKELAEKFKLVSSVPGVARITFCYLVYFTNEFKNYTEAKQLACYCGVVPFEYTSGSSVKGKPKVHNMANKKMKKLLHTAALCAVTHYPEFKQYYERKIKEGKPKMLILNNVRNKIVLRIAAVIKNNLPYKANTAA

SEQ ID NO: 295644 - protein, 384 aa, unidentified
MTDEVDGSFTTASKCHTSWSYSVVTTAKKEPYMERISIIGLDLAKRVFQVHGVSEKHEVVTQKKLSRSELLIWFTKLEPCLVGMEACATAHYWGRELKKLGHEVRLIPPAYVKPYVKRQKNDRADAAAICEAVSRPAMRFVAIKDKDQQAVQVLHRTRSLLIRQRVQLGNALRAHMAEFGWVFPLGMAGVTQASSAVRETPDADLPALARQVLLGLVDQIDVVKKQISSLDRQMVVWHRDHAESQRLATIPGIGVVTASAIVATLGDGKQFRSGRDFAASIGLVPRQNSSGGNDRLGRISKQGNPYLRQMLILCAISQLSGRCREKPAGGVWFEQLLKRKPARVAAAALANKMARVAWAVHTKGENYRVARTVISPEGVVTMAA

SEQ ID NO: 295645 - protein, 341 aa, unidentified
MGELYVGLDLHSVNTYVGIMEGETKRRIYQNRHRNELGEILQALEPYRCEVKGIVVESTYNWCWLVDGLMDAGYDCVHLANPAAMKQYEGIKYKDDRHDAFWLAQLLILGILPEGYIYPKEDRPVRDLLRKRAFLMRHRTANILSCQSMIERNTGLRISGAGIKKLCTEDLRKIFADDHLLFSGKMSTFIIDVLDHHIKSIEKMVRKVLKIRPGFEDLLTVTGIGDILAMTIMLEVGNISRFPGVGNFSSYCRCVNSVHTSNGKKKGVGNTKNGNKYLAWAFMEASNFARMHSERANAYYQRKSRETNPIIARKALANKLSRACYYIMRDQVPFREEALFS

SEQ ID NO: 295646 - protein, 426 aa, unidentified
MTMKVTYLTCCGVDVHKSFLVATIVKTTGGIEPSYQKKRFSTFNHSILEFKQWLLENDCHDVCMESTGKYWVPAFNLLEDEINVTIANPKWVKAVKGNKDDTKDSKWIGDLFRLGLVKGSYIPCKKIRILREYTRYRYKLVSCRSSEKNRYQNALTVCNVALDSVVSDIFGKSSTSIIDYLLEQADNSINHEEIASKLLRRLKSKEDAVIESIEGYQMTDSQKYRIRLVRAHMDYITAEINDVDSMIESMISSDPDYENAIQFLMTIPGVKRDSAITIISETGIDMSQFCSSKRLCCWAGLVPGSNESGGKKKSVRIARAGVYLKPALVQCAHAAVKSEKSPYYKKKYESLMKRRGKKRAIVAVARMILTAIYQMLSTGEAWNPSDLYKIDMPEALLEKQKTKAIKQAMKLLQREGLYPPPEPIAS

SEQ ID NO: 295647 - protein, 422 aa, unidentified
MVLKGVPMALKIVYQICCGIDVHKTFVVACIASTNKQGVTTYKRHRFSTFTQGLKELLQWLLDNHCKDVCMESTGKYWIPIYNILEKDCNIVLAHPKYVKAIRGKKTDKKDAKWIADLFKHDLVAGSFMPPADIRQLRDLMRYRFKLTCFMSSEKNRLQNCLTVSNIQLASVVSDTFGKSSQRILDKILENPDDTAFDIEPLIHGSMKKKLPELELAIDGFITPEQAGKLKVIKKHFEDLESRKAELEKLILALASPYQQELDLILTAPSFKNKFTAIGIISEIGVNMEAFPSAKHLCSWAGLTPTNNESAGKKKSVRVSKAGCYIKPLLVQCANSVVKSEKHPEIRNRYLRLRKRRGHKKAIIAIARMLLTALYNMLKNKEPYNAELYRKSDALPVNREITIEQAILIAQFQGYKIKSATE

SEQ ID NO: 295648 - protein, 436 aa, unidentified
MQSAGAFGEEMTKAMLAESQDEEQIIARAAALDIGKAELVCCVRVPVEGNPKKRLQEVSTHSTMSRSLAELANHLVDLRIERVVMEATSDYWKPVFYLLEAHGLEPWLVNARDVKHLPGRPKTDVLDAVWLCKVAERQMLRPSFVPPAPIRRLRDLTRYRIDLVGARTAEKNRVEKLLEDACIKLSVVASDIFGVSGREMMAALIAGERNPAVLAQLARSRMRTKITELEEAFTGRFDDHHVFLLARMLARIDGIDADIAAVDEQIEAQLAPFAAAAERLDKIPGIGPVAAAVILAEIGVDMSRFPTEGHLCSWAKFSPGINSSAGKTKGNGSTGHGDRYLARILGEAAVVVGRTDTFLGERYRRIARRRGKNRAIVAVGRSILVIVWHLLHDPDARFRDLGADHFSRHTDPDTKKRGHIRQLEALGYTVTLAPAA

SEQ ID NO: 295649 - protein, 344 aa, unidentified
MEAAVTIGFDLGKSVFQVHGVNREGVVVVQRRLTGARLLAFFAKQPGCLVGMEACAAAHHWARELRKLGHRPKLMPPRYVKPYVKRQKNDAADAEAICEAVTRPNMRFVEIKSCEQQGVLVLHRVRLMLMRQRIALSNAIRGHMAEYGLVASVGRNGLQRLIEIIADESDERLPAMARSSLVILASQLQLVNEQVLENDRRVRVSARSTDVGRRLMEVPGVGPVLASAIVASVPDPAAFRSGRDLAAWIGLVPKQNSSGGKEKLGGITKQGDRYLRQLLVVGALSVIRYAQRHGTRRPWLVALLSRRSSKIAAVALANKMARVIWAMMMTGERYREPVLVGSAG

SEQ ID NO: 295650 - protein, 334 aa, unidentified
MEKITTVGIDLAKSVFSLHGVDGAGRVGLRRTVRRDQLLRVVAGLSPCLIGMEACSGAHEWGRRFQELGHTVRLMAPKFVVPYRKSGKNDGNDAEAICEAVSRPSMRFVPVKSAEQQALLAMHRVRQGFVVERTATINRLRGLMSEFGVVLPLRSIMVRRQGAAAAENLPELARRAIGDLLDQLRVLDERIDGYDREIEAQAKLCEPAQRLMKIRGIGPTTALAIVATVGNAREFKNGRQFAAWIGLVPGQYSTGGKTRLGHISKRGDAYLRNLLVQGARSVLHTAATHRDPVSRWALELQPRRGYYRTLVAIANKNARIAWALLAKNESLRTV

SEQ ID NO: 295651 - protein, 412 aa, unidentified
MKVVHEICCGIDVHAKMLVACLLQANGEKEIRSFSTMTDSLLHLRDWLVAARCTQVAIESTGVYWKPVFNVLEDALTVILINPEHAHALRGRKTDVKDAEWLADLLRHGLLKASFIPPPEIRELRELTRYRESVVREQSAVANRIQKLIESGNIKLGQVASDALGASGRAMLWALARGETDPLKLAALAQRQLKEKEPQLRRALQGRLTVNQRFVLRELLQRWEELEQADRRVTKEIDRYLQARPKLARAREILDSIPGIGPRVAEVITAEIGVQMAAVFASDAHLASWAGLCPGNKATGGKRLSGRTRKGNTYLRAALVQAAWGATMKKNCYLSSQYFRLVKRLGRKKALVAVAHSLLVIIYHVLHGDQTYTELGGDYFDRHHIEQQRDYYLRRLQMLGLKVSVEELPQAA

SEQ ID NO: 295652 - protein, 438 aa, unidentified
MSNKVIFNLDELFISVGIDVSADFSWMSIALPNQQFVGKPYKILHNSIDSLTTAVSKIKEAEELYSLESRIFLESTGIYHYPLFCYLRDKGFNCSVINPIITKNSTNINIRKVHNDRFDSKKAALVGLKPDLKVSLMPSDLVLNCRNLSREYYDLMDNRSAYVNKLQGELRMAFPQYLGIFSKVTTHTSLTLLETYTSPSAFIAADKQEIIDTIKSTARFGLAYAQNKYNAIIKAANEAKEFGYIIDSNIKRIRLYISFIRKYDEEINSILQAMHELVNANEDTDFVKQIHLIETFKGAGFLSAVSLMGEIGDFSAFSKPKQLFAYFGLDPAVKQSGKFEGSKIQMSKRGSAIARRVIHTLTLQSISTSRTGEAKNPVLRDYYLKKCESKPKLVAMGAVSHKVCNMIFAILRDNKPFEIVTPQEHIKQYNAAKCDIAA

SEQ ID NO: 295653 - protein, 352 aa, unidentified
MARILAIDLGKFKSVACWYKADSGEARFQTVPTSRQEMRQLLLARAVDVVVFEACTLAGWVYDLCGELGLKGRVANPNGEAWKWKNVKRKTDRDDALKLARLTALGELPEVYMPSPATRQKRGLLQYRQSLIGQRVAVQNRIRALLSAQGLPAPRGHRAWTQLGLEGIAQRSRPLAECASEELWRGELALCVSQLQQLRAWLEEVDGKLDQLGRADARVQLLQSVPGMGARTAEVVVAYLDDPKRFTKGSQVSSFAGLVPRQYQSGETDRRGRISKRGPGLLRKMLVECSWMMLRYNTWAQRLVQRISRGQRTRKKQAVIALARKLLVRCWAMLRDGQPWRAEKAAPMTASA

SEQ ID NO: 295654 - protein, 408 aa, unidentified
MINDAINTSRVIGFDAHPDSFTAAILSGPTPAAAVVEKMFNKVPMNRLLQWAKKNTLDSDIIVLEASGNSFHIARSLRSAGREASVLESRHIGKLKEAHANNDKISAIRIGKAYLAGTAKIVWIPDETTQERRDTFHTYSKAVKRSTQVTNRIKSYLSDHGVRLKSKTHILNQKESIMQACQWSPRERLIIEGMLMDLQNAQSQRAHWKHFMAQEVLHDPLLLSLTRLTGVREIVAYSIGAIIGDINRFASPKKLVAYIGLNPAFDKSGEGEWNGGIKGHGRRDLRSHLIEAAQSILQSNHDLGRWGKKLMARKGSRNLAVAAVARKLAVAIWYLMKGLWSTVEEVEAGMKLKIGKMIGKMGKEGLSLIGKTRKEFKEEIEQNLKKGREYILDRARSSPLKSSLKEAS

SEQ ID NO: 295655 - protein, 355 aa, unidentified
MNSVRYVGLDVHRDTISAAVLNESGRMIQQSILATRAAAILDFIGGMRGTLHVTFEEGTHSAWLYDLLQRRVARLVVCNPRMNSLLKSGNKSDAIDARKLAELLRADMLSPVYHGEKSAMEVQHLARSYALLTEDTTRVMARIKAIFRGQAISCAGQKLYGHKHRNEYLEQLGACALRRRAELLYEELEAVRQLRRQAKREMIVECRKYPETKLLTSVPFLGPVRAAVLIGRVQTPHRFRTKRQFWAYCGLALEMRDSGEYRVVDGQVERRKKPAQIRGLNWNHNHELKNLFKAAATTASFSNGVFREFYLGLLKKNMQPEMARLTLARKIAAITLKIWKKGEAFDAELMKLQAA

SEQ ID NO: 295656 - protein, 340 aa, unidentified
MNHYAGIDVSLEASSVCVIDASGNIVREAKVASEPEALIAWFGSLGLALTRIGLEAGPLSQWLYARMRDAGLAVELLETRHVRNAFKIMPVKTDRKDAHGIAELMRLGWFRPVHCKSMEAQETRALLTARKLVQKMLHEVEMNLRGVLRGFGLKVGKTTPVAFEARIRELVAGHPNLEVIAHALLASRATLRREFNGFEKRLRAMARSDTRARLLMSTPGVGTIVALTYATAIDDPARFGSSKTVGAYFGLTPTRYQSGETDYTGRISRIGDGSVRAALYESAHIIITKPVKGCAALKSWAMRIAKRAGMKKAKVALARKLAVIMHRMLADGTIFASQPA

SEQ ID NO: 295657 - protein, 394 aa, unidentified
MRFIGIDIGAEAHVVAGVDEAGQTWLKPTSITEDAQGYTHLREVLGDPTHALVVMAATGHYWQNLFATLTAHGFAIALVNPLRTQRFAEEELRRTKTDAIDGLGLARFGHQKRPPPTPLPDRATQELRELVHLRDRLVQDMGDRVRQVHRLIDLGFPEFARHLTDLGSALATTILHAYPTAAAFRGLALADVAGLLYAGRHRVGDELALTLLAAASTSVGPHHGEPYRLQIRYACEDLDLWRGRLSTVERDIERLLDAHDVGKLLTTIPGIGPPTAARLVATLGDPAHFRSGGALAAYVGAVPGLRLSGKRQGRHAGLHPLGHGRLRAQLWMPTLSAVRFNPGLRAYYQRLIARGKLPKVAVVAAMHKLLLAVYSVAKHRRPFVPNLTPQETPA

SEQ ID NO: 295658 - protein, 348 aa, unidentified
MYYVGVDLHKETSWFYIVDAQGKKYDSKNIQNKPEILKRYFEQIPKPFTLAVEATYNWYFFVDLAEQYAQKVFLANSYELKAFAKRHKKTDKIDARLIAHVLQKGFLPVVAIADQETRQVRELLRYRLNLVTDRSRNIFRLKALLDKLGLNSQVDFTTYKGLKSVVIEKLPGIYIRLIKNYIERITGLAQKLTRIGKEIETVSSLDHDMVNLMSIPGVGHFSAALIKSEIIDIARFASFNRLCAYAGLAPRVSASANKTFHGPLNTNRRKNLQWILLENVYHFIRAVPEMKEKYENLKQRKGHNTAKVVLSRDMLKIIYHVLKEQRPFYSDKKEFQIQSVAAPALCGV

SEQ ID NO: 295659 - protein, 348 aa, unidentified
MTVYCGVDFHARKQTISYLTTEDGEVQQVELEHEQDNIRGFYAKLRSQGPVIVGFETSGYAAWFEDMLEELGCEIWIGMPAAIRRQARRRQKNDRRDADLILELMLRGDFPRLHRYTPESREVLQQLRYRHRLVKLRTIVVNSLQYLALSRGVSLRTKLLTGRGQKRMKELKLPSHLAKQRDEMCELLKELTEKIETAESWLNLRAEQDTRVGRLRTHPGIGPLTGLCLVYTLEQVQRFANPRKVTAYVGFDPVEDSSGERQRIGAISKQGSRLLRFLLVEAGQVAVRSDEDLKAAYWRVQLRRNHQKAKVAVARRLLVRAFIMLRDEIDYAEFQRRGVAARSTRRTA

SEQ ID NO: 295660 - protein, 341 aa, unidentified
MRAVGIDSHKDTLAVAVVDEVGRQVATTEVANTPEGFERLAGWLTRHRPERVGIEGSGGHGRQVALRLLRAGYEVVDVPPQLTARERRRQRTPAKSDITDAVGIARVTLREAHLPGVRTNGDLEDLRVLVRYRRELVAERTRLASRLHADLEQLHPGYQQRIGRLTTRRNLDRARRLLTGDPQPRAVVARQRVTQLRQLTRQITDLTSEITQRARRLNTSLVTIPGIGDLTAAELLAEIGDISRYRTRAQFAMANGTAPIPASSGRTQRYRLNRGGNRRLNRIIHLIALTQISHHPQARVYYQRKQAEGKTRREAIRSLKRHISDRIYRTLRDTHPHTALT

SEQ ID NO: 295661 - protein, 394 aa, unidentified
MKLVGIDAGKNSHHFCVMDKETGEFNVAPSSFSNNKEGFDFLINSLKPYSKKPILIGMEDTGHYHVALLKFLLSKGYTVALINPKTTDLTRKMEGGITKNDKLDTITICDVLDTPERKKQYRITKVDRFDLYEQRQLTRHHHNLKEELNVYCNRLQKSIDLVFPEFNTLFSSKYSIVYMNLLKTFGSAEAIASTDIRTIRKCFEIKGRGNRISLTPEKLKECAKNSIGISSEVETIQIKHLVSQISLIKEQIAEIDKKIEEFSIKNNSPILSIPGISHFSGTSILAELGDIGNYSKPSQIIKFAGVAPYHYESSQYNAQHTAITKKGSKYLRKTLYQIILPVIKNNPVFKKYYRLKISQGKGHRCAQGHCIRKLLRIIYHLLEAGQSFDPALLR

SEQ ID NO: 295662 - protein, 408 aa, unidentified
MRVYVGIDWADGTHRVAEVDEQGQRVNMRSVEETVEGLAEFGRWLAAQRGAGIDVYCGIERPDGRLVERLLTHGAVVYALNPKAVDRARDRHRANRCKDDDLDAYVIADFVRTDHPHLHALRPNSAELEELRLLTRDYDSFVRQQTRLLQQLVVTLKEYYPLALTLFADLTTQTAQDFLHRYGTPESATQLSRQQWTAFARRHRMAPAAAEQRWTQLRAGQVAVPAHVVRAKARRMEALRRELGTVLATVAAYRSEVERFFAALPASKLTDSLPVGGGGVMIATIWAGLGDAAGRWSFPAHFLAHAGMVPGTERSGKQRTGLVFFRRGCDHLLRYALTQYAFVSLGHCEWARAYYKQQRARGHGHYRALRALGAKWAKIFVVMWQRQAPYDDNYHLANIARQQLRRAA

SEQ ID NO: 295663 - protein, 361 aa, unidentified
MFSERTSVGLDVHARPTTAWALDGMTGEIFSDRLVVNTADVVAWVRRLPQPAAVAYEAGPTGFVLARVLQQAGIRCVVAAPSKMERPAGDRVKTDQRDAQRLAKLLRLDELPAVRVPDLEQEAARDLTRARDDVRADLMRARHRVARLLLRRGIVYTDGRAWTAAHHQWLTGRRFDEFGLRVAYDEALETVLALEARRTRLDAAITELAAQPAWAPVVRRLACMRGVSTFTAFGLAVEIGDWHRFTGSTIGSYLGLVPSEDSSGSQRRQGGITKTGNTHARRLLVEAAWHHRRPYRRPGTGLQARLDHVAAPVRQRAERGNRRLHQRWVNLDARRKRSTISVVAVARELSGWCWSLAIMED

SEQ ID NO: 295664 - protein, 342 aa, unidentified
MKIIGCDFHPSFQQIAMVDTETGEQTEKKLTPAEAVQFYGQLPGPVLVGMEACGNTLWFERLLAKLGHQLWLGDAGKIRALEVRKQKTDRRDAELLLRLLLEKRFPRIWVPSPEQRDLRQLLLHRHKLVGMRRQVKNQLQHLALNQGVQQKHKLWTAAGRKLLEELALTGWTAQRREELLLLLDDLNPRIGKLDQAVREAADKDRVAQRLQTHPGVGPITALAYSLTLGEVGRFAHSRQVVSYLGLNPAEHSSGGRQRLGSISKQGNPMLRSLLVEAGQSAARLVPELKRAYQRLKHRKHSSVAKVMVARKLAVRLYWMWRNEQPYSATRMRGSPSHPVAEV

SEQ ID NO: 295665 - protein, 355 aa, unidentified
MDNRKYIGMDVHQASISVAVRESTGSLVMESILETKAATILDFIRGLTGSLHVTFEEGTSAAWLYELLQPHVTQAVVCDPRKNALLKVGNKNDRVDARKLSDLLRTGVVSPVYHGECGVRTLRELARSYLALSKDLTRVMNRLKGLYRSWAIPCTGRRVYSRRGRSAWLEKLQAAGVRRRAEQLYQQLDSLVEIRSQARRELLRESQKHPANQLLRGIPRLGPIRVALLIALLQTPHRFRTKRQLWAYSGLALETRISGEYRFHAGQLQSGKRLPAIRGLNENHNPDLKYVFKSAATPAGARKDAWSDFYDDLLGRGMKPALARLTLARKMAAVVLKIWKKGERFDPQQLKQQCA

SEQ ID NO: 295666 - protein, 355 aa, unidentified
MSQEKYIGMDVHQATISVAVMDAGGKLIMECLLETKAGTIVEFIRGLHGTLWLTFEEGTSAAWLHDLLKPHVNRLVVCDPRKNALLKDGNKSDRVDARKLAELLRGNQLHAVYHGEHGVRTLKELGRSYLTITQDVTRVMNRIKALYRSWAIPCAGTTVYAARHRAEWLAKIAEPGVRVRAQRLYQQLDLLQPVRLEARREFLAESHKHSAVKLLRQIPSIGPIRSALLVALLQTPHRFRTKRQLWAYSGFAVETHDSGEYRSVRGKLQRNRERMTVRGLNDNHNRDLKNLFKSAAISASTRPGPLRDFYVARVEKGMRPTMARLTLARKMAAISLTIWKNGVEFDAQQLQRQTA

SEQ ID NO: 295667 - protein, 393 aa, unidentified
MFFVGIDIAKNSHEAAVIDGSGKIVVKPFKFPNSIGGFEKFLAAVKGVSEDLSQFEFGMEATGHYWLNLYTKLMDFNVVVHVINPVQSDALRGLYIRKTKNDAKDAFIIAELIRFGRYSETTLSDSDLLSLRELTRQRFYLVDCVSDAKRKAISFIDKIFPEYQTLFSDTFGATSVELLQTYTSPDVIAELDTELFTRFLKSVSHGRFGRSKAEEIQSVAKNTFGSFLFADSATLAIRQFIQQIKLLEEQIAEIEDFISEKFASFDCKLDTIVGVGTTLAASFLAEIGDITRFESPDKLAAFAGIDPSVKQSGEFNGTRNKMSKRGSPYLRRTFWLAAISGIRANPALKAVYDKKRAQGKHHAVAVSAVMHKLCNIVFAILKTNQPYKIILPE

SEQ ID NO: 295668 - protein, 357 aa, unidentified
MKHYIGLDAHSATCTFVVINEKGIETQKAQILTSVKKITDFLESIKGEKVLTFEESGISVWLHAILHNLVSKIIVCNPVYVAKKQGAKNDYRDALHLAHELRKGHLISVFHDKDNIYIPLRTVTSAYLDINRDIVATKNRLKAIFRAQGKSQVGPSIYFEPEKIQNLVGEENKFAADALMYQLQILDEIKEKYIFQFQENMKRHKILKLLDSVPQVDVIRANILAAYICDGRRFETKHKFWAYVGLVRHEQNSDGKSYGSKRIYGRSELKTVFMGCAEGILRGETSLKKHYDQLRSKGLDHRAAKKAVARRLAAIVLAIFKKEKPYDDKFLERKNRSELKNKKFETSKVLDSSVLAT

SEQ ID NO: 295669 - protein, 399 aa, unidentified
MKKNLPLELRVGVDVGCHSHNVAIGLSTGEILEEFSIAHEPEGFRQFFSRIEKNERKYGCPVAVAMEGYNGYARPLDTLVRTRNYRLFNINNLKLARFKEIFPGAAKTDDIDARKALELFQLRDHLPIAKDVLQEVKTTPQENDILKRISRRRRRLVYERVRVLNNLQADLQSVCPGLLEITGEAGNLWFLRFITSTDDLRKLTRLRETTIRKIPGIGAKYTSIILKWQKAAEFSHETEWVSDMIQQDAERVLALHDQIETLETQMAEMAANSNIAQLLTTMPGFGPITTAELAGEIGTIERFESESSLALYLGMSNLDNSSGKHKGSKAPKQVNERAKAAMMIAVDRHRKSVAQSQKYYEKKRAEGKKHNQAVRALGRHLCRVIFKMLKENRGYFFTQ

SEQ ID NO: 295670 - protein, 421 aa, unidentified
MPNIEIGVDSMVKENFIYVGIDLHKETHTAVMIDCYNQKLGEITFPNRPADFPKLVTKVKKCNTDAKEVVYGLENAYGYGRPLAVWLIDKGYFVKDVNTAISHRQAKHRGAMYRKSDSDDAEAIALATLNMLDKLPDACPNDAYWSLGQLVHRRDNIMKQRTRLVNQLHEQLCIAYPSYKQFFNDISRPTALYFWEHYPSRKYLKGKSVEDLRTELVPVSHNRCSTKNCEKILDAVASDKVKNNAYQDARDMVTLSIVSDLQHYDSQLAEVDKMLEQMYKMLGCTLTTIPDVNVITAVKILAEIGDIKRFSNANKLAQFAGIAPLHLSSSGKGKDVATKQGNRRLQATIYFLAIQMVQVSSKGTPRNSVVRAYYEKRKAEGKTSQQALICISRRLISIIYGMLKHGTEYRMPVVESAGEKL

SEQ ID NO: 295671 - protein, 418 aa, unidentified
MKLFVGLDVSSEKLDVCFLSDDDQLTILLEDSLGNDIEGASQIKQKILTFQKVYSFSQIVIGMESTSMYSFHPATFFNEDRELQRINTVVTIENPFRIKQFSRIFDEDKTDKNDAMRIADFLRIQRYTTSPIKEEKYMALQRLTRTRYQLIGQLVETKQHFLENLTYKCNALTRELKNSETTSSVFGATLLSLMTEDYGLDELAHMPLTDFASLLQEKGNGRFKNPEGLAKTIQRAITMSYRLGEVAQQSVNIILSVLAREIRALEASIKDLDKAIEQLVIVLPEYQCLTSIPGVGKVYAAGLLAEIGQIRRFEDQTKLAKYAGLSWKIKQSGNYQSENTPLTKQGNRYLRYYLVEAANSVRRYLPEYQAFYQKKYKETPKHQHKRAIVLTARKFVRLVDTLLRNHQLYTPPRSVIEK

SEQ ID NO: 295672 - protein, 478 aa, unidentified
MIYSVGIDLHKGQHRVYCLDEKAQPCDAFSFQTAPEGLAALEQRIFRDGSNPIVVFEPAGLTWLIVAAYLRSCHPECRVVRAKGQKVAALRRYLRGPVKSDRIDALTLAKMPFIDPERLDEVYLAPAQTHALQRLTRQRKRLEDQITTHKKRIGSIVDGYLPGVRQAFSHPWSVQVRAFLHSQINPFAVIRAGEEVLHRFLTQAKPGNKGGRTESHFVYQACQKVLALQELCAAAGMLNEEFFVYLQDEIDRELRLMEVEEAESKALDRRIEELYQELHPSDNLRTIPGVGEHTAPVFVASIGDPTRFPGQSEFANWTGVVPAARQSSNVESKGLRMTKAGPTTVRWALYQAGQISRRWDPQLASVYYRQMVYHGKNHKQAMGAVMSHMAARIFTVLREGRPYELKDTEGKSISKLAARDLIMAKYRVPEDIRQERRKSKGRKTNTLGLQKKRGTAVGREHEAAIAPQPATNLPSLVI

SEQ ID NO: 295673 - protein, 322 aa, unidentified
MTLYQHFLGIDIGKFTFVVSLYGTKSTSEYENSSTGIGQFVQEYKNILPSSLCVLETTGGYELEVLYSLIAQGFKAHRADTRKVKSFIRSLGSAAKTDALDAKALAAYGQERSDKLPLFEAQSKEAVELFQLVQRRSDLKITLVAEKNRLQAPCTKLIRDGILVLIAAVKNQIDVITDKIKLIIENNPELKRKKDILKTIPGIGDIVAFELLILLPELGTLCRRKIASLGGVAPRANDSGKFSGYRRTGPGRCGVKPILFIAAMAARNSKTHFKEFYEKLVNKGKKKMVALTALMRKILVIANARLREEMCFEKSQQKVSAF

SEQ ID NO: 295674 - protein, 424 aa, unidentified
MKFKMQDKQNQLIERISIKHLIVGIDIAQQFHVARAVNFRGIVIGDPLTFENNEDGFARLIQWINRLKALKGLDTTIVGMEPTEHYWVNLSKWLYERNIEVVTVNPHLVKKNKENRDNTQSKSDKKDALVIADMVKNGYYSFIRPSSEIFEKLRVLMSNRDMTVKRLVSAVNQINRWVDIVFPELRQVFKDVKGKGAIATLRLFPTPLEISSMKPQDIVNGWKTLMKRQAGLRKAKLLIELATHSVGTPQALDAYKLHLEQLLEEFDLATAQLERVEKEVTEVLKKIPFAKKLLAIKGISEIALAGILGEAGDLSGFAHGNSLLRHAGLHLAEASSGKWKGQIVLSKRGRSRLRRFLYLATMSLVMNNPDFKELHSNNVNVKKMKKMKSIMKLINKFARILVGMARKNESYRSDKVQPLISIAA

SEQ ID NO: 295675 - protein, 370 aa, unidentified
MAKRSMFVGMDVHKESIDISVAEDGRQGEVRHYGVIAGDLEALAKVVRALRAPDRCLHFVYEAGPCGFGIHRYLTAQGEDCVVVNSSSMPKRSGDRIKTDRRDGNALARLHRAGELTAIYVPTADDEALRDLVRGREDAVGLSTQAKHRLKAFLLRQGRRYPGRAGWTLPYRRWLADLSFPLAPQHIALQEYRDTIDEAERRVDRLTDQLRHLVPTWRWAPVVEALQALRGVSFVTAVGLVAEVGDFRRFQRPRHLMAYLGLVPSEHSSGPSVRRGGITKAGNPHARRLLAEAAWAYQGIPRIGRQMLYRQESLPKAICAIAWKAQLRLTSRFRRLVARGKAKPKVATAVARELTGFIWAIAREVPAPPA

SEQ ID NO: 295676 - protein, 351 aa, unidentified
MMIIGVDYHPSFQTIAFLVEETGEYGEQELNHSDGEAEKFYRKLKQRGVSVRVGMEATGHARWFERLLAELGFELWIGDPAEIKTKRVRKKKTDREDARLMLKLLLENRFPQIWVPSPENRDLRQLLWHRHRLVQMRTRIMNQLQAIAMNEGKRWKKRLWKERGRAELAQLQLPPWTSRRRQDLTELLDRLNPTIEELSTAAEQEAKKRPEVLRLMTHPGVGFLTALAFVLIIGTPERFRCGKQVGSYVGLIPSEDSSADHQRLGHISKQGSTLLRFLLVEAAQAAARSDADWRRRYLHLAMRRQKSIAKVAMGRRLGVRLYWMWRNGCEYSRSVEFGSYAGQLVTGHGVK

SEQ ID NO: 295677 - protein, 388 aa, unidentified
MQTTAHQPQAPTAIRTDLGAIFVSMELSRTSWLLTSVSPGDGERMSKHAVRSGDVAGLRARFSLLKEKVRTRTGLAVSIIVIQEAGLDGFWIHRLLLCDGIESYVVDPASIATSRRRRRAKTDKIDGEALVRALLAYKRGEPRVCAMVRAPTPQEEDRRRICRERKTLTAERVEHVNRIKGLLFAQGIADYEPLLRKRRERLDELRTGDGRLLPQHLKAQVGRELDRLELVLQQMKSVEAERDASPNASDKETPTPAAMLKRLKGIGPEFANVLWSEGLFRSFANRRQVAAYAGLAPTPWQSGSVAHEQGVSKAGNPRLRTTMIQLAWLWVRHQPNSILTQWFHQRVQFNGGRVRKVLIVALARKLLIAFWKYVTAGVVLEGAETTAA

SEQ ID NO: 295678 - protein, 412 aa, unidentified
MTVTNQFAAHVGLDWADKKHDVCVQFKNGERVFDVIEHTAEALDAWLTELHQKVKGRIAIALELKKGPVVYALQKYPFITVFPVHALSLARYRQAFSPSGAKDDPQDAELALELMLRYPQKIKAIEPDNADIRLLQQLVEQRRQLVEDKRRFVNRLINTLKQYYPQPLEWFSHRGSLLLCELIIRWPSLQQLKRARRDTIRNFLNARGGRAMALTEQRVASIDNAIPLTTDPSVIEANALMATALATQIKVVSEIIKTYDERIETLFDTLPDAGLFKSLPGMGPCMGPRMLAALGDNRDRFNSAEEIQNYAGIAPVTERSGQKSWVHWRWQCAKFVRQTFVEWAAKTINSSYWARLYYQGLREKGKSHQSAIRALAFKWIRIIYRCWKTRTQYDEAKYLLALEARHSPLLKP

SEQ ID NO: 295679 - protein, 345 aa, unidentified
MKQYAGIDVSLEASYVCVVDAEGKIVREAKVLSEPDALISWFAGHQVAMERIGLEAGPLSQWLYASMSRAGLAVELLETRHVRAAFKTMPVKTDKKDARGIAQLIRLGWFRPVHCKSVPAQEVRAVLTARKLLQGKLHDIEMSLRGILRGFGLKVGATTPKTYPARIRTLVDGHPALEVIATALLKAREVLAGELRGFERRVRAMARQDERAHRLMTTPGVGTLVALTFVAAVDDPERFRSSRAVGPHFGLTPKKYQSGETDYTGRISKIGDAGVRTALYEAANVILTRPVKGSDLKTWALSVAKRAGLRKAKVALARKLAVVLHRMLRDQTSFVSHKAAPMVAA

SEQ ID NO: 295680 - protein, 368 aa, unidentified
MSTRNTQTDATQKTLSRWCGCDVAKATFDAALLLPVEEERPFTMKDMPVRTFQRTREGVREFLAWADELLEPYMDSLCPMRVVMEATGKYSTQLAIWMTEERPSLSPAIINPQTARAFTESLSLRNKTDKTDARALAIYGVERRPVAYEPPSRELSELRSLSRHRQSVIEMRVAEENRLKETNDSPLVRQMLKRHIAQLRRDEGRLEKEMKKVLETMPELKRDAQATDQIDGVGFITAVTVLAEVGDLRRFEKARQLSAFSGISPRQNRSGQSVHHKTRMSKKGSSRVRKALYMPAMAAIRGHNDLADCYHRLLAQGKPKKAALGAVMRKLLLLMRAILISGEEYQKHYRRPCGKLLKKGLKTELILT

SEQ ID NO: 295681 - protein, 343 aa, unidentified
MEKKRWLGVDLHRNGFTCCTRLENGRNYLSQWKLEDLDRFVKKLRPSDEVAVEVTGNTRLFYQAVAPQVKRVVVVNANQFRVIAHSVKKTDPNDARNLALYLEKDLLPEVRMKDPQRAQIASLTQTRDTMVKLRTALKNKVNNSVSAQGINLSKESLSSEKGLAAVLKFRFEALVEVELKVIVEQISSLNHSIAQLEEIISREGQKLEGHSNLTSIKGIGKLSGSILLSIIGDVNDFAEEGKLAAYFGIVPRISHSNETEHSGRITKRGTKLGRTTLVQCALIAQRYSPYLKSYYEKVKKRRGAGKAIIALARKFLGIIYRTLKYQWTFADFPNFVLAEETTG

SEQ ID NO: 295682 - protein, 340 aa, unidentified
MNTTQIGVDLAKSVFEVAVSHIPGRVHERHRLSRTRFRRFFADRAPTEVLLEACSSAHHWGRELQALGHRVALLPAADVARYRDGNKTDRADAKALLEAARNEAIDRVPVKSVEQQALSALHRLRQGYLQTRTARINALRGHLREFGVTIPLGAAQVLPRARAALAEERLPSYLRHALTEVLEEIATLQAKAAALQDQLDRLARQLPEASLLMSVPGVGVLTATALLAFVGDIHRFRSGRDFAAYLGLTPREHSSALSRRLGGITKHGNSYLRMLLIHGARSALRAGHVAACPDDLRTWALALQHRKGHNIAAVALANKLARVCWRVWRDQRPFERRDAA

SEQ ID NO: 295683 - protein, 354 aa, unidentified
MSHHHTITAGIDLGDRYSHLCLLDTDSGEILEESRIPTTQKAFERRFSGSQTMRVAIETGTHSPWVSRLLKGAGHEVLVANARKVRLIYAQERKTDVIDARKLARLARLDPQLLSPIEHRGEGSQAHLTLLRSRDALVGTRTKLVNHVRGAVKAFGARLPKCTAQSFHKKVTEHLPQELVPALGPVLETIASLTAHIREYERRLESIAEDSYPETRLLRQVHGVGALTALAFVLTLEDPSRFAKSRQVGPYLGLVPGAKQSGKSDPQKRISKHGDEMTRKLLVNCAHYVLGPFGEDCDLRRHGEKIAQRGGSNAKKRAVVAVARKLSVLLHRLWVGGEVYEPLYNASRSEGKVA

SEQ ID NO: 295684 - protein, 345 aa, unidentified
MNANQSKDYAVYVGADISKSTIDLSYHSNDTHISKQVANDSKAIKKFIKTIKEHDEAHLHFIMEATGAYSRTLYTTLRDLKIRFTQVNPRFSYAFARSRGILDKTDKIDAQLLEEYGRRMTPLATIPDEDIQIELKNLYMLRVALIKARREWKQRAHHQKEGGACRIVKRMIESTEKSIKAQDKEIQKKIKKQKIIKEIFETILKIEGVGKTSASAIICLLPEIGTLSSNKICKLAGVAPMLHQSGTSVHKAAHITGGRKYLRTALYMPCMAACISNPVIRAHFQRIRESKGGVKVKGSGAIALVACMRKLLKHINSVARKVREEMQRSVAAEGCGEAAQASPSR

SEQ ID NO: 295685 - protein, 338 aa, unidentified
MTIVMGLDQHRAQVTADWLDTETGELKRGRIAPADRTGVARFLSRFGGQELDVALEATTGWRFVVEELHRIGARVHLAEPAETAARRGKKKHAKNDRADARHLRELLMVGRLPESWIAPEHILDLRARVRLRHTLGEQRSEWQQRIQAVLYHHGCPQRRSLMVGDGREWLASQPLTATAREQVAVALGMIDALQAQIAPLESHLRAYARRQSGCRALMAHYGIGELTAVTILAELGDCRRFSSSRHAVRYAGMDITVHESDQRRAPGHLSRQGPPALRWALYEAAQVARRPAGPDRCYYEQAAERLGGNRACLSVARRLLKRSYHTLRELGEEALAPA

SEQ ID NO: 295686 - protein, 407 aa, unidentified
MKLLIGLDWSQDHHHVCFLAANGSQQASFEIPHTVEGFARLDAERAKFGLSAKECLVALETAHNLVVDYLWSRQYQVYVIAPAVVKGSRGRYGASGAYTDASSAFLLADLLRTDRARFILWQPDGLLVRQMRAKLSLIEALRRDINRWSNRLWAVLLRVYPHPVGLFSDLTTQIGLHFLIAYPTPQAAQGLSYEDFEAFCRQHRYPVSRWPTLYADLQSPRPKPDTAALLAYQDEIPFLARTLLPLVQHRLQLIREVKELFGQHPDHFIFESLPGAGDLLAPSLLVKFGDHRERFPNAAIPQALAGTCPYTKQSNKKRAVLFRKACDHDFRRIAQQFAIESVKQSVWAATYWQETYARCRSKSQAYRCLANRWLAIIWKMWQTRKPYDETYHLKQRLLRRQPRPRKH

SEQ ID NO: 295687 - protein, 390 aa, unidentified
MIYVGIDVSKDKHDCCILDAEGRKLYPVFTISNDKVGFDDLFSRIEEVTSDKTKIKVGLEATGHYSNNLLASLVDKGFPTVVINPLHTNLYRKGLSLRKTKTDKVDASSIAMMLMTDRTLKPYSETSYHNEELKSLTRYRFDKVHERSKLKASLARLVNILFPELEKLVPTLHQNSVYTLLEELPGADYIAGCHLTHLKKILEDSSRGHYSRDKAIEIRNAAIDSIGTPMDAKSMELRHTIHLIWMLSEEIEEIEASIKSIMDETQSPIMTIPGISYRMGAMILAEVGDFARFDNADKILAYAGLSPSTYQSGQLDSSHSHMEKRGSRYLRYALFNATKFVCKWDESFGIYLGRKISEGKHYNVAVSHAAKKLIRTIYRMELTRQTYSPS

SEQ ID NO: 295688 - protein, 583 aa, unidentified
MLLHHVPVSQPQADAKMHRIGVGIDTSRYGHYAAFLRDDLQPAAGELQFVESAVGYAQLRSRLEQIVSKLGTVHFAVRLDVAGQYADNLLHFLHTLQRQLANATLVISCGDPQRNKNYRAALFGSQKSDPVEARAAARYALSERPAPVKMLSAEQRTLRHVASRLQAVVRQRTRLINQFHLLLTSTFPELALLANDIASGWVLTLCERYPTAKLLAAASAQDIGQIPYLPEKLIAPLLEHARTAIASLEGDTVAELVRDQVRQLRDVRARQLRLEKTLVDAYRQLPDANHLDSIPGIGDVTAAILTAFIRDIDRFQTPNQLVAYFGAMPIEESSGVDRDGKPRAAKRNIMSRRGNDLVRRYLWMAALSAVRYNPAVRALYARVVAKHPDQKAIAIGHGMRKLLHLVFAIWKTKKPFDKTHYPWDTPAHVAALDARDEQEAAATPEQEQAAGLTLTAEPAQKEVTAACESSLPHDAEPGQNAFVDFAHVKAQLPIARVLEHLNLTRKLQGAGAQKRSACPIHCPHSHGRTFSVNLDDNVFQCFSPRCQKKGDVIDLWAALHHQDLRQAVLDLVRTFALEPAPNK

SEQ ID NO: 295689 - protein, 368 aa, unidentified
MIKYKLEAAPTAISKTQNSQKELKANRILIGVDVHLKSYEAARKIDNDSVGVVQRLRSKEEFLLYAQKQLEQAEEVVVVYEAGPLGYTLYWDLKARGIECLVCAPQSQEQKRKRRKNNAIDARTLSGNLFNYLNGNKHALQLVRVPTKAQEQARIGSRQHDALVEERKRIAAMGNSLLLSQDYGSWRNWWRPKAFERLSQLVAPWVLKQLKRWVKILGELDQQIQQAKVELTQQYQGPRPKGMGAPSLAQLNAEVLDWNLYCSGRKIGCLGGMVPSEWSTGQGQRLGAITKVGLPAIRRIITEMVWRMILFQPQYKAVQKWREVLEGSNPGLKKKAVVAIGRRLIVDIWRLQTGRISAQELGLIMIEG

SEQ ID NO: 295690 - protein, 345 aa, unidentified
MTTMNYIGLDVHKKTISYCVKDVSGRIQQEGKVGSTRRELDCWMKTLPQPWTVAMEATIFSGWIYDHLLPHATQIKVAHPLMLRAIAAAKKKNDQIDASKLADCLRCDFLPECHMMPRAIRDRRRTLRYRHLLVRQMVQMKNRVSGLLMETGVEYNKQRLHKVSYFRELLSANGEVPPSLRPLLKLSRETIERCQKTEYALVSSLQRDPVLADRIKRLRTVPGVGPITALTWALEIGDVSRFGSIKQAISYCGLCGDERSSADKAMRMPLSKQRNKHIQRALVEAAKLAPRQNHEMAVIYDQERQKGNSNRATLAVARKMVAYLLAVDRQQRDFVPAEERRTTAA

SEQ ID NO: 295691 - protein, 355 aa, unidentified
MNSEKYIGLDVHQATICVAVMDPKGKVVMESILETKAATILEFFAGLRGTLSVTFEEGTWAAWLYDLLKPHVANLVVCNPRKNALLKHGNKSDKIDARKLANLLRLNDLEPVYHGETGVRMLRELARSYLTIVKDVSRVMNRLKALYRSWAIPCAGRDVYYTRHRSEWLGKIPEAGTRRRAEQLYQQLDMLQPLRQQARRELLAESRKHTITAKLRQIPSLGPIRSALAVALIQTPHRFRTKRQLWTYSGLGLETRDSGEYHYVQGQVRRRKKQVSIRGLNKDHNHDLKGLFKAAATRASVQPGPFQDFYQRSLAKGIKPTMVRLTLARKIAAITLTLWKKGENFDVEKLKSQAA

SEQ ID NO: 295692 - protein, 392 aa, unidentified
MDSPPPRHHSATVAFEEANGSEGETMKKHSSKNDSLSSTDVELCTTISVDLAKQVFQLAGEDAAGRVIYEDRIKSRQSFHDFLLKLPATVTVLMECGPGAQAWARLLQAKGNAVRILPAQRVAEHRSGAKNDRNDAHAILRAGRDISIASIPIKSTTALAIQALHRIRRGNIKRHTALGNQIRGLLLEHGVSMPQGDTAISNHVPRALEDASLPLPDLLRELLDELLTDWLSLGQRIAGLSKRLETTAQEDQVAQRLITIRGVGPIIATAIVAKQTEPSRFASGRMYSAFFGIVPDEHSSGNKVRLGKMSKRGDGYIRSLMIQGAHAVLTQLRPDFDEPDDRRLLRWLSRLGRKEAAIRLANRNLRIIWALLQSDQVYQRKPNNNAKTAVSH

SEQ ID NO: 295693 - protein, 399 aa, unidentified
MTTEYSITLGLDVGKTAHHGCALTPEGQRVYDQELPQDETALRKVITDLQQHGPVLVVVDQPNTIGALPITVARDLGADVAYLPGLAMRKAADLYPGRSKTDARDAFIIADTARTMPHTLRAVDRNSEVLSALKVLSGFDEDLARESTRAINRLRSLLVQIYPSLERVFPGVVLTRAIVLDLLIRYHGPAGLKAAGKAGVKRWARHHSRKDPGPLIDQVFAALSEQTVTVPGADAVELIIPRVAAQIKELKHQRDIVAEEVEKLVDDFPLSTVLTSMPGVGVKTAAQILLAAGDLSAFPTPGHLAAYAGIAPVTRRSGTSIRGEFPARAGNKKLKNALFRSAWVASCHDPVSKAYYERKRAEGKRHNAAIMCLARRRLNVMYAMMKTGTLYEPRTPAAA

SEQ ID NO: 295694 - protein, 452 aa, unidentified
MRYSKGLRREHKNNQRKKEVVAGRTLICSFDLARHKHAYHVVDAERNVLARGHVPHSLEGLEQLLKELEALREKENYDRLVFFMEGASYFWMPIASLLVRRGYTYRLVQNRAVKHQRQLAGQSGHKNDPRDAAHIATLAGTLHFTFTQLPLQHEWIALRACALEYQELVDLVTAEKNRIHAFLGTVFPGYYGIFVEPFSESSLAILQALPHVMQLESEAFVEQVRQCFQGQNLQVKRCRAVWEYARSKDPWGYVEARAALSERIATAAARIQLLLRQQDTMREQLLAAHRQTPYHENADSIHGSSPVANAVLLGVLGDPKDFDDARTLVRIAGLDPGEQASGEYQGQSRITKAGRIHLRRAAVSATMAVLKSGKNPDFVRRYFRLQQRTDHPMKELQALCACAGKYLRTLWWLCVTGSHYEPNVAHHGFTKETGTGDNKTTHTAMEPALTIE

SEQ ID NO: 295695 - protein, 345 aa, unidentified
MNKISVIGLDLAKNVFQVHGVDSAGEVVVRKQLKRSQVRRFFTNVEPCLVGMEACGGAHYWTRELAGLGHTIRMMAPVFVKPYLKTNKNDRNDAEAICEAVQRPSMRFVQPKTPEQQAVLHLHRARRLLVRQRVALSNHLRGILSEYGIVLPQGAKVLSGRLPALLEDAENDLPMLTRDLLAECKEEYDQLMERIERLEGRIKAWHVTHDVSQRLASIPGIGVLTASALAATVGEGQDFSNGRQLAAYLGLVPRQASSGGKVRLLGISKRGDGYLRGLLIQGARNVIYHIRRRQRAGQPGGNAWVEQLLQRSHPNAVAVALANKMARIAWVLLVRNQTWCPARTL

SEQ ID NO: 295696 - protein, 416 aa, unidentified
MELQRNKVCGIDVHKRFLIATILCRDGKKDTQRFSVTLEDLLKFRDWVIENGCEQVAIESTGIYWHPVHSVLEGKIDLIVANSYKIKHTPGRKTDVSDSEWIAELCLNGMIEPSRIFPKDDRELRRLTRAREGYVKQMTQEKNKIHQSLDSACIKLASVISDIFGKSGMYLLNCVLEGREIDDIIDGIPSGRLKKKADQIKESIKSRLDVSQVILIRGSLSLMKSIQERIDELDGEISARIQYRKNDLAIAMSIPGTGFVSATAILAEIGNYTDFKKPEQLAAWCGLVPSLYQSAEKTILGGITKQGSKHIRRMLIQVAYAISRTKDSKLKKFFLRIQAKKGSKVAAVALARKVLCILHHLLINQEMYLEDRDKKNMRQKPLIPPSPIEMSIQEMIDCIVRAGYVVTKSDSIGGFG

SEQ ID NO: 295697 - protein, 410 aa, unidentified
MNEAVRVVERVIGLDAHPDSFTAAILRGPTPATAVVEKVFNKVPMARLPDWAQKHTTARDRVVLEASGNSFQIVRTLAAGGRQAKVLESCQMGKLKEAHANNDKISAVRIGKAYLAGTAKEVWVPDPKTQEWRDWFHAYTKATKRTTQMQARLRSYLSDNGVRLKSGTRLTQTEAEAEIRQARLWSSRQWQVIQILLAELRHAHQQRQHWHSLMAQEVLAEPELLSIVRLCGVREVVAFALGAFIGDIQRFAHPKKLVKYVGLNPAFDDSGDSEWSGGIGGHGHKLLRCLLIEGAQAILRCGKTPLARWGKKLLAAKGSVNLAVAAIARKLTVAVWYLMMGRWTTLEEVDARLAIKVGKMIGAVGPRGLQSLGKTRQAYREEIYQRLKTGRTYVLDPNKKYSPHPASSPA

SEQ ID NO: 295698 - protein, 430 aa, unidentified
MPLFLFFDGRVIFLKIVHPICCGIDVHKKVIVATIAATDKNNITLYATQSFSTFNCDLFRFRDWLLENDCKHACMESTGKYWIPVFNILEEHVCTILTHPKYVRSIKGKKTDKKDSKWIADLFKFDMVRSSFIPPKDIRTLRELARYRFKLVAMRSSEKNRYQNAMTVSNIALASILTDPFGKTAKGIMEHLLSSAVFNEEYCKSLIQKSAKKKTELIIESVRDCHIESDQSFKMNEASRHMAYLDQMILRTEAELFVRIQPYYHFVELLAQIPGISELSAALIIAEIGADMSVFESSKHLVSWAGLTPANNESAGKKKSVRISKAGQFLKPLLVQCALAAVKSGKEPYFAVKYHKLKKRRGHKKAIIAIARMMLTCVYNMMTTGEAWNPSDHKDYDSPFIRKQEFSEESAIAFLAAQGYDVSALVKKAV

SEQ ID NO: 295699 - protein, 347 aa, unidentified
MEYFAGLDVSLETVNVCIVNAAGDILLEKKIAAEPAAIVNLLKSFGSPFKRIGLEAGPTSSWLYGELRAAGYGAICLECRHVKAGLSAMRNKTDRNDARGIAQLVRLGWFRQVHVKSEEAQRTRMLLVNRQQLLTKALDIENSVRGSLKVFGLRVGVVARRGFEARVLELVADDPILLAVTKPMLRVRQALLEEFERLDRLCQQLARRDPVCRRLMTVPGVGVVVALTYRTGVDAPERFSRSRDVGAHFGLTPKRYSSGQTDYDGRISRCGDEMVRTALYQAANVLLHHGRWSSLRSWAMRIAKRGSVKGAKVALARRLAVVMHRMWTDGTDFRWSDTRRMTVSTAA

SEQ ID NO: 295700 - protein, 379 aa, unidentified
MDFSTVARLPVGEKPATLFVALELSKATWLVALHSPAADKISLHRLAGGDTQGLLTLIERKRDQAQTALARPVHVISCYEAGYDGLWLHRLLCASGIDNRVLEAASILVDRRSRRAKTDRLDAAALLRTLMALERGEPRVCRVVRVPSPEHEDTRRRSRERARLVNERTQHTSRIKGLLMTQGIRDFAPTRRDWRERLEGLRTADGHALLPCLKAEIARECRRLWQVIDMIAEVEAEQHQVAAETTTGASQLSRLRGIGLTIASVLGNEVFFRTFQNRREIAGYLGLASSPWNSGSVSRDQGIQRSGNPRGRQTAIELAWLWLRHQPESGLARWFHERVGASKGRIRRTMIVALARKLMIALWRYVTQGLMPEGAVIKA

SEQ ID NO: 295701 - protein, 413 aa, unidentified
MEPIVEKGCGLDVGQESVVACLMTGAAGEKPRKELRTFTTFTAELERMRDWLLAEGCTHVAMESTGPYWVPIYVVLEQAQRFELVVGNAQHIRNVPGRKTDVKDAEWLADLLRHGLIRKSFVPPRPFRDLRDLLRYRRALVNAGSAERNRLLKLLESANIKLASVASDVFGASGMLMLKALLRGGSTPEQMAELAKGRLRQKLEPLRLALRGNLDPHHRSMLETQIRRIEAAERDLVGLDQLIDARLEPYRDKHDLLTQIPGVDWVTAAVLIAELGIDMGVFPTAKHVAAWAGVCPGNNKTGGKAKRAAARKGNVYLKTALVQAAHAAAHTKGSYFRNKYFRLRARLGAKRAALAIAHKILIAGYHMLSTGKPYNELGEFYLDRRDKRGLATSLIRRLHHLGYTVLITEEATA

SEQ ID NO: 295702 - protein, 356 aa, unidentified
MSIVADTHPFVVGVDTHARKHVYTILNASSGVYVDSRDFPTSSAGINRAIAWVARRTDADADTLWVIEGTASYGAILTGMVASHGYPVAEAPRMDAKQHRGVGKSDTLDAHRIATAALPLPVDKLRRPRLNDGVRQAIRILVTAREAMTTDRTRTVNALTALLRSNDLGMDARKALSRTQIAEVSKWRTRNEELSISVARAEAVRLAKHAIDLQEQLDANEQQLAELVAVSEAAPLLDETGFQAISAAKCLAAWSHHGRVRTEAEFASLAGVNPIPASSGNTIRHRLNRGGDRALNSALHMVAVTKMRHDPETRAYVKKRRTEHKTDREIRRCLKRYIARRVFRALNASHQALQPA

SEQ ID NO: 295703 - protein, 364 aa, unidentified
MGFATIIALDLGKFKTVGCVMDVATRTHAFETIDMSPANVHDLVARHLASPPADTLVVFETCDTAGWVHDLCTALGTSVTVVNANDERWRWRRVKRKTDRDDALKLARLALLDQLGAVHMPGPSARQRRRLMLHRRSVVSRRTQSRNAIRSIFSQQGLALARGGKQWTRAGVAQLREHARPINQCADALDLWRGRLQVELDLIEATDAQLKLLDDKLDELAKADARTTLLRSFKGVGPRLSEAVVLYLDDPRRFKSAAEVACYAGLVPKQLESGQMSRNGHITGRGPGLLRSLLVEAAWTVYRCHDWARAWVEKVSRGGKGRRKLAIVALARKILIICWGMLKTNTPFRPSTAIPAMASNVALE

SEQ ID NO: 295704 - protein, 478 aa, unidentified
MSQSKAHESPSRKKHRRLSKAQARVTKVQLEATAAKAVPAPEVKNPHAAAIDVHSDNHVVCVGPDQVLTFGAYTVDLHAIVTHLRQHGVTTVVLESTGVYWVPLFELLESEGFEVFLIEPSQAGHCGARPKTDVVDCQWLQRLHTYGLLRPSFRPPEAVLALRGYWRQRQMQVRYAASHVQHMQKALEQMNVKLTEVAADIMGLTGTRIIEAILQGEREPNRLAQLRDPSCKKSEAEYAKALEGTWRPEHLFALKQAYALYRFHHQQITECDQRMAEELARLPNRATGKPFQPRRRRGGRKSNAIRFPATQPLFKALGVDLTLIDGIEVNTALVILAEIGVDVSRFPTEKHFASWLRLCPQLQQSNQTCKKRSPRRGKHRLAQALRMAAQAVSRTQTPLAVFYHRIKARLGGKGAITATAHKLAVLVYRLIKFGAEYVRQSLADYAAQVQAQLERSLRRKAAQLGYNLVPKTPASQPS

SEQ ID NO: 295705 - protein, 384 aa, unidentified
MYKHNILFIGLDTHKISTEVAHIEDQRGAKPIHYGKVKTTKAAITKLARQYQSKYPQATLHFVYEAGPCGYWIYRLLTSLGHCCYVVAPSLIPKKPGDKVKTDKRDALKLAKLLKDEELTPIYVPEPEDEAIRDLSRARETAMKDLKDAKYQLKALFLRNNINCKVNDNWSLQHLRWLTELILPHPSQQIVLQEMIQIITERIQREKRLANELFHQVKSWRFYPVVKALQALRGVRLLIATGIVAELGDLRRFDHPRKLMSYLGLVSKEHSSADNRRLGGITKCGNGRARRLLVQGAHTYKHKANISTELQKRQEGLPKEITDIAWQAQLRLCRRYNRLLSRGKHRNVVVIAIAREMAAYLWAIAREVVITPVNTRLRISRVPA

SEQ ID NO: 295706 - protein, 319 aa, unidentified
MNSMTKARITSKERHVGIDVGKDTLDIYIYECEKHWQVNNTSEGVKSLIKQLNRYHLTRVLVEATGGYERRLVEACAEKGLPLIVAQPIQVRQFAKAQGILAKTDKIDARLIAQFGVIMQPEPRPLPGKKIRLVRDLLARKRQLNETRTQELNRLHKAPKILMPTHRRLLKLLDKEITWVNERLAKEVCAITEWQRVYEVLSSVPGIGDGVAYTLLGELPELGELSHKQIAALTGLAPFNRDSGHMKGRRRIRGGRAPIRTVLYMAMMCAIQHNPVMKRFYDKLVAQGKHKKVALTACMRKMITILNAMVRDNKEWQMS

SEQ ID NO: 295707 - protein, 343 aa, unidentified
MVHYIGLDVSLKRTSICVVNQVGSVVREGVVESEPEAIAAFVRSQAPGAVRVGLETGPTATWLWTELKRLGLPVICIDARHAKAVLKMQINKSDRNDAAGIARIMQTGWFKEVRVKDLDSHSVRALLASRALLVKIKRDLENQIRGLLKNVGLVIGRAKFNVFTVRAEELIEDRPELMAVVRPLLKARQAIEQQTDDLDRKVLKLARYDAQVRSFMTVPGVGPITALCFKATIDDPTRFKRSRSVGAYVGLTTRRHASGEVDWTGRISKCGDAMLRSYLFEAAGVLLTRVPKWSALKAWGIRLAKRSGLRKAKVAVARKLAVILHRMWIDGTEFNWSTKKAAA

SEQ ID NO: 295708 - protein, 339 aa, unidentified
MTKITTVGLDLAKKFFHVMCCDEQGKVVKKRMLKRDQVLAFFAPLERCLIGMEACASAHYWARQLAALGHEVKLVPAQYVKAYVRGNKNDYNDALAISEAVTRPQMRFVSVKTVAQQDVQALHRLRERCIQTRTGLCNQIRGLVGEYGLICAKGVATLRRQIPVWLEDGENGLSDFFRRLLSQSYQQLRMIDKQIDFYTRELKHHSQQNEACQRLQSIPGYGPIVASVFYSQVGNGEAYRRGRDVSASLGLVPRQHSSGGKDTLLGISKRGDRYLRSLLVHGARAVVSRAENKDDRLSRWINRIRAERGMNKATVALANKMARMGWAILANKTVYQHAV

SEQ ID NO: 295709 - protein, 369 aa, unidentified
MTQCIKTRFVGLDVHKDTIVVAVAELGREAARVVATVPHEWKALRKVLDKLGPRSQVACCYEAGPTGYGLARTLIAAGWACDVIAPSLIPKKRGERIKTDRRDAVKLAQNHRAGELVAVFIPDEKTEAIRDLERAREDAKKAERVVRHQLSKFLLRNGRRYPGKTTWNDAHHAWIAQQTFAEPAQQYVLSDGLAAVEGATLRASQLTARLREVTVGWSQEPLVKALQAMRGVEFVTAVTLVAEVGNFRRFAKAQDFMGYVGLIPSEQTSGNHRRQGPITKTGNAHVRHVLVESAWHYRRQPRMSKALRERSAGISPQVCAIAWKAQKRLHGRLNRLIGRGKNKAEAVTAVARELAGFVWAISRECPCSA

SEQ ID NO: 295710 - protein, 338 aa, unidentified
MLHSGIDLHKNDLVIGTLDSAGVLVDQRRLRTQRPAVAAYFRALPGPHRAVVESTASWYWLADLLREEGVDLTLAHSKLVKAIAYAKVKTDAVDAHTLAQLLRVDLIPPAHMIRPELRGVRDVLRVRLRLVQKRSRCQNAVGALLTKYNVRTVDELPELARVEAKCHSEQIELLEKQIKRVVGTISPELLESDDVQHLLWIPGIGRINAFSIHLEIDDISRFATVKHFLSYARLVPGSSNSGGKTRHKPSKDGNRYLKIAFTHAAVRAIQYYPEIKSFYQKQCRRKPKPIARGIVAKELGKLVYFVLSKGEAYDGTFKGQPLSRSKQPEWPRRRSPDA

SEQ ID NO: 295711 - protein, 342 aa, unidentified
MLYVGIDVAKNKHDVTALNVQGKTVLKPLTFSNNKAGFELLDLSLRQLNQDCLIALEDTGHYAFNLLNFLHEQGYKVYTYNPLLIKEFAKSLSLRKTKTDKKDAHGIALKLLSDPNREQFQHDNRQVELKILARHIHRLKKKQSDWKVQYTRCLDIIFPELDKIVGKHSEYTYQLLTRYPNPQKRIEAGFDKLIEIKRLTASKIQDILSVAPRSIGTTSPAREFEIIEIIKHYKRLIDKAETCVNDLMAEFNSVITTVTGIGGRLGAVILAEIRNIHAFDNPAQLQAFAGLDSSIYQSGQIDLAGRMIKRGSPHLRWALIQAAKACPRFSPAFKAYLKTKLE

SEQ ID NO: 295712 - protein, 385 aa, unidentified
MRQLNDLSRSLVTLEQDATLIAVIEMSLSSWLVAGIVPGVERQPLKKLAVDESALLKLLHRWREEAEKAGQVIKRIAVAFEAGRDGFWLARWLGARDIEVHVIHASSVAVSREHRRAKTDRLDTELLKRAFLGWLRGERDHCKMVVIPTINDEDAKRPNRERESLVGEQNRIINRMKATLIRLGIRGFNPKLKKAAERLEGLRTPESEPIPPNTLAELYRDMERRRLLRDQIRQIEDARLARFEQAPNDGPHAMMRLLARVMGIGIETADMLVQEVLSRNLRDRRAVARYAGLTGSPDESGRKRREKGLARSGNPRVRRGMIQLAWRFLVYQKDSALAQWFRTRTENARGTRKTMIVALARKLLIALWRLVREGVVPDGIVLRPA

SEQ ID NO: 295713 - protein, 411 aa, unidentified
MDTIVERPGALDVHKAQVTACVRTPGEGGKRDAHFAEFPTTVQGLLTLSDWLAAHGVTQVTMEATGVYWKPVWAVLEDSFELLLVNARHVKQVPGRKTDMSDAAWLCQLAEAGLLRASFVPPKPIRALRNLTRYRKTQIQERAREANRLHKALEDTGIKLDCVATDILGKSGRAMLDALVNGTTDPEILAELAKGRLRVKIPALKEALEGRFDRMHALWIGAILSHIDFLDEQIASLTEAIAEQIVPFEKAVDLLCTITGVQRRTAECIIAEIGVDMSIFPTAKELASWAGQCPGNHQSAGKRRSGKTRNGSKWLDWALEEAALAATRSKDTYLAAQYARLRPRRGHKKALGAVKHSIIVAIWHMLTTGELYNDLGGDYFARRDPEKTTKRLVAQLERLGHSVTLTDAIAA

SEQ ID NO: 295714 - protein, 426 aa, unidentified
MNANNNETLNQYAAFIAIDWADQQHVFSLQVAGHTKKETGILAQKPEVIGPWVAQLRERFGGRSVAIAVEQSRGALIHALLSYDFIVIYPLHPTTVAKFREAFKSSGAKSDPLDTDQILEIVTKHLDQLKPLNPDTEETRLLGRLVEDRRKAVDLRTGHIQALLASIKEYFPQASELANSNLTSRLACDLLKKWPTFQAFQQAKPSTIKRFYYGHNIRSSKVLEKVLKLAQTAQPLTTDPAIVESGSRLSLMHAQLIQTLNPLIEGYDRRIEQVFQAHPEAHLFSRLPGAGPALAPRLLSFFGTDRSRYETAHNVHSFSGIAPVTKSSGKTKVVYFRQACPKFDRQTFHEFARLSLAKCQWARNYVDYYKAKGKKYHTIIRALAFKWIRILFRCWQDRTPYSDDTYLKALKKRGSIFATLHLEQKS

SEQ ID NO: 295715 - protein, 427 aa, unidentified
MKYAPIQVLPDVPAGGVFAGIDWAVADHVACVVDMAGRILDRFSAGHDKAGLETLITRLRRSGITEVAIERGGGVLVDALLAAGLTVVVVSSRQVKNLRARYRSAGGKDDRFDAFVLADTLRTDRARLRPLVPDAPATLALRAAVRARKDLVAHRVAACNQLRAHLAVAFPAAVGLFFDLASPISLRFLASFGSQDAAAALDEQAITAWLKTSPGRGKTAPASVLCARLGAAPDGVTGEDGAAHAVITAALTATAGMLAAQIKVLEAGIGAQLAAHPDGHIFTSLPRAGTLRAARLLAEIGDCRSRYPGPQSLAALAGVVPVTRESGTHTSHAFRWAVNRPLRDAVCDFADGSRHASPWAESVYQAARSRGKDHPHAIRILSRAWILIIWRCWQDGTAYDPAKHTALQQILDQQAAQAAVAGPGDTP

SEQ ID NO: 295716 - protein, 343 aa, unidentified
MRLHAVGIDLGKTIFHLVGLDSTGKVVIRKKCSRKQLLAFTANLQVQVIGMESCSGAHFLGRALRDQGHEVRLMPAQYVKPYVQTNKSDFLDAEAIAEAVQRPRMRFVPIKTEEQLDLQALHRVRERWVMRRTAVVNQIRSLLLERGLTLPKGRRYVDQQLPRILEDGELRLSGSFRVLLAQLKIELEQLTARIEEMDRVIQKTAKENEDCQRLTEIPGVGPVTATALIAAVGNASTFRKGRNLAAWMGIVPGEYSTGGKQKLLGISKRGNKYLRTLFIQGARSVVQQRHKQAPGLSSWLAQLLARAHQNVVIVALANKLVRMAWAVLCKNERYRAPVLAVTT

SEQ ID NO: 295717 - protein, 352 aa, unidentified
MNEITTVGVDLAKEVIVVCAADGAGRVVYFKQFSFHGFAAWAANLAPCSFGMEACSSAHYWARWLRAHGHSARLMAAEFVKPFRKSQAAKNDRNDAQAIRIAMCQPEMCFVTVKSVEQQAMLAWHRMRSGYHQERTALINRTRGLLAEFGVWLGRSASALLRALPRLAEEQDLPARLRPLLHQAHEQLLLLDERIERCDREIHAHARQSEAAQRISALTGIGPLTSSAVIATVANARDFRNGRQMAAWSGLVPKQASSGGKERLGAITKRGDTYLRGLLTQGARSTLQAALTRAADKRSRLEHWIVALHGRVGYHKTLVAIANKHTRIIWAILAKGEHYDPDAWQRYAHARN

SEQ ID NO: 295718 - protein, 384 aa, unidentified
MAKHNIVFIGLDTHKSFIEVAYIEDVRGVKPIHLGKNPSTKQSVKKLVRQFESKYPDATLHFVYEAGPCGYWIYRLITSLGHCCYVIAPSLIPKKPGDRIKTDKRDAMNLAKLLKSEDLTAIYVPEPEDEAVRDLSRARETAMKDLKDGKYQLKALLLRNNVTAKVKDNWSKQHLRWLTELILPYPAQQIVLQEYIQAITERMNRLKRLDNELEHHVKNWRYYPVVKAIQAMRGVRLLVATGLVAELGDLTRFDHPRKLMSYLGLVPSEHSSGGKRSIGAITKCGNSRARRLLVEGAHTYRYAANISTELQLRQEDLGKTIVDIAWKAQLRLCRRYQTMLRRGKHYNVIVTAIAREMIAYIWAISREIVLTPVEPKLRLSRVPA

SEQ ID NO: 295719 - protein, 416 aa, unidentified
MEVVHRRCCGLDVHKKSVVACVVLSDPSGPPQREVRTFGTFTHEVLALADWLAEQQITHVALESTGVYWKPIWNLLEDRFALLLVNPRHIKAVPGRKTDVHDAEWLAELLRHGLLTASFVPDRTQRELRELTRYRTSLINERSAAVNRLQKTLEGANIKLASVASDVLGVSSRQMLAAVVEGTTLEASALANLAHGQLRDKVPQLEHALSGRVGPHQRFLLAEQLAHIEALDASLERLSTEIAERMRPFDELIERLDAIPGVGRTIAEVLLAEIGADMTRFPTANHLVSWAGMCPGHNESAGKKRSGKTRKGSPWLRAALVQAAHAAARAKQTYLAAQYRRLTARRGTKKAAVAVGHSILVIVYHLLTDPDCPYFDLGATYFDQRDPGAVQRRLIHRLEALGYHVQVTPLAESSAA

SEQ ID NO: 295720 - protein, 470 aa, unidentified
MLRLVVSGGRFVTWRDKPAQESDPDAAEHPELLPSSTRERVPQGPASATTVALWEERTMRIVYMLCCGLDVHKRTVTACLLKWGAQGRAVKEVRTFPTTTRGLLELADWLTREGCQHVAMESTGVYWKPVHNILAGVCREVLLVNAQHVKNVPGRKTDVKDAEWIAELLSYGLLRGSFVPPPEIRELRDLTRYRTTLIRQRADQCNRIQKLLEAGNIKLASVATDILGVSGREMLTALAAGQTDAAQLAELARGRMRKKIPELTEALRGALSDTQRWLLGQQLEHVSHLDRMIGELDQRIEALAAPFLPMIEKLCQIPGVSRHLAEVIIAEIGVDMRQFPTAAHLASWASICPGNRESGGKRFSGRTRVGNPWLKGVLAEAGWAASHTKNNYLAARFHHVARRRGRKRAVLAVGHTILKITHRLLSDPPTTYRDLGPDYFAPPSKERLAQSLLRRLNKLGYKVHIETTAA

SEQ ID NO: 295721 - protein, 388 aa, unidentified
MIYVGIDIAKTNHYASIVNYSTGEVIENPFLVTNNKQGFELLYSKIKDFDKDKVLIGLESTAHYGNNLIFYFHDKQFKLGIINPIQTASLRKTRIRKVKNDKVDSMLICEALSLGYYNLLSDYDIKLLEIKSLCRFRKELKDKASDAKIQLKTYVDQLFPELNVFFKDNIDIKTAHELLKLYQSPDDISKINLTKLSNLFIKYSRGKYNKSRAIELKQLASQSVGINNNALCIQIKMTIELIELLESQIKDIEKQVSEFIKKSDNVITSIPGIADTTAAIIMSEIGDINRFNNPGQVLAFAGLDPSVKQSGTFNASSTRMSKRGSSLLRYALILAANNVQLNTKTFNDYYNTKRAQGKLHYNALGHCAGKLVRTIFYMLKNNVTFNLD

SEQ ID NO: 295722 - protein, 376 aa, unidentified
MNEKLRFLGLDVHAETIAVAVAEPNGEVRSLGMIANREDSIRKFIRKLGSPEHLRACYEAGPTGFVLYWQLTQLGVKCDVVAPSLVPKKPGDRVKTDRRDALKLARSHRSDDLTAVWVPDEGSEALRDLVRAREAAKQDQLRAKHRLTKFLLRTGQRPPLGVKAWTEKYVEWVQQVRYTHPAQEATLLDCLNEVQHMEERVKRLEQSIVEVIQRAPAPMQEVVRGLQALRGIAHISAVTIAVELGNIISRFESARDLMGYSGAFPSEDSTGKRIRRGGITKSGNAHLRRIVVESAWSYRHRPAIGARLRRRQEGLPAEITEIAWKAQNRLHKRYMTLMARGKEQRKTMTAIARELLGFIWAIGIKAEAACKQQMAA

SEQ ID NO: 295723 - protein, 407 aa, unidentified
MKHEQRVVYGGVDTHQDVHVAAVIDELGVLLGTRSFPTSLLGLKSLHRWLTGHGPVVKVGVEGTGTYGLGLQRVLQDAGVEVVEVNRPNRQLRRAKGKSDTVDAESAARAVLAGQATATPKRHDGIVEAIRMLLVAHTSTKQALQKIDGRIRGLTITAPEALRVDFAGLSAPARAERAVRLRPGSDHREVTSATKLSLRTLGRQRQMLAADLKSLEVELEQLTTEANPGLRQVPGVGPIVAATLLVTVGDNPERMTSEATFAALCGVSPVPASSGKTVAMRLNRGGNRQANSALFRIALVRMSQQDKATIDYVQRRTAQGLSQKAILRCLKRFIARQIYRHLVDPRPAIRTDDLRARRQAIKRPLREVADALNTQIMAISCLERGTNHNADLATRYRNWLQQQETAA

SEQ ID NO: 295724 - protein, 380 aa, unidentified
MTSIDSLPRDEHAALRDDLFMSLELGDKRWKLSIGDVRHRASRYDVPAGDVEAVVTCIETTRSRLKATHEAAVHSCYEAGRDGWWLHRRLVGLGVDSIVVDASSIEVNRRARRAKTDRLDAEKLRTMLVRHHGGEHVWSVLREPTEKDEDARRVHRELQRLMHERTSHMNRIRALLVLHNLRPNVSIAGRDWPAWWQEFGEQVAPKLREEIGREIARLKLVKDQVRAIELERRRELAKGQHPMVAQLARLGAIGPKGAWMLVHEVFGWRRFSNRRELAGCLGLAPTPYASGSSETEQGISKVGNKRVRALLVELAWGWLRRQPDSGLTHWFNRRFANAGARMRRVGIVALARRLAVAMWRFLQNGEIPLGARLKMVQATS

SEQ ID NO: 295725 - protein, 371 aa, unidentified
MEELNTIYVGMDVHKESIEVALAAAGRDGEVRHYGRIDNTPAAVAKLLCKLSKAGARLEICYEAGCCGYGLYRQTQALGHGCTVIAPSLTPRKPGDHIKTDRRDALSLARLHRAGELTAIWVPDPAHEAMRDLVRARHAAMVSLGRARQQLQGFLLRHGRIYQGKSPWTRAHRTWLAGQRFDHRAQHLALEDMQTTIEAASERLKGLDAQILALSSDWSMAPVAAAYQALRGVSFLSAAILAAELGDLRRFSHPRKLMGYLGLTSAEHSSASRRRLGAITKAGNSEARRVLVEGAFSYRLPARKAPAKQAVLETLPKPVQDIAWKAQVRLCARTQTLWAKGRCRNITTIAIAREMAAFLWAIAQIVPPKAV

SEQ ID NO: 295726 - protein, 426 aa, unidentified
MPYRIAGIDVHKRMLAVVVADVEVEGPYQFEQRKVGTSPAQLRALADWLVEREVEEVVMESTAQYWRPVWETLERYWRPRRQTSPGARPRAGTLHLAQAQSNRGARGRKKDFPDAERLVKRLVAQELTLSFVPDVEQRLWRTVTRRKYQLTQNRVQVHNRLEALLEEAHIKLSSLVSDLLGLSARRMLQALADGETDAAKLAELADQRLRATAEQLCDALGACTELNSVYRRLIAMALDELRLVEAQIVALDEEMARLLRPHQGAVERLAAVPGLGVDSAQQIIAEVGPTAGTFPSPKHLSSWVGACPGDEESAGVSTSHRSPTGSRPMRRLLNQAANAAVKTKGSIFELLYRRLVPRLGHAQAIGAIAHRICRLIWKLLHQGVAYEERGPAVTKQRKQARTAKMIRDLRRLGYRVELVTPSGSPA

SEQ ID NO: 295727 - protein, 359 aa, unidentified
MKSIGVDLHKCSLTAVVLDEEGRLTEEKQIPTKCRVQIQEFFASYGLQCQVAVESVGFYQWFWDLVRPLVARILLADPVGVRAFVGRQAKTDLKDSHLLATLLRDNRLPTAYVPPEPIRQLRELVRLRHSLGRSLAAERRQLRWIALKNNLPGPTSLTSDRAQKWILANEPKFSEVHRLAVHKRLNHILGLERDLYELDRSLLASVEKDPQILARVQLLESIPGIGRLSAITILTETGDITRFRNTDQVGAYAGLVPHVSQSGQTVHHGHITKRGPPVLRWILQQAAWTAIRVSPEARRIFARISKRAGAKKAATALARKLLCYAWSVCRRGQPFRWPNPITPASTAAQTAASPEPAHA

SEQ ID NO: 295728 - protein, 429 aa, unidentified
MRTESTPGARGPVFCGVDTHADSHWLCVLDWRGRRVLSRRFPADAAGYEALAGAIAAAGEPACVAMEGTSSYGAGLTRHLASLGMPVREALSPAGMQRRRPGQGKCDEADAERAARAAMSGSRLGTPKSQDGWVDGVRCMLAARSGAVKARTSAINTARSLLTTAPEGLRSRFRGMGGPRLMEELPSVRAEGALGAALGALADLWAAARDAALDMERAIEASLEENCPALLAMYGCGPVSAAKLAVAAGDNPGRLRSEASFAAICGACPIPASSGKTVRHRLNRGGDRQANSALHEIARQRVMRDPETAEYAERARARGKSDREVMRCLKRYVAREAYRALMRPHEIRRPEDASELVAARRAAKVSQVRAASILGTSEKYISMLERGQRELKPIRRAYEAWVEAGLPLDWDRQAFEAERKMDSKKHLAK

SEQ ID NO: 295729 - protein, 450 aa, unidentified
MNASFVLGIDPGKSFFAATLMHSTGERIWKARQFDMSCDGFEELRSSLPHGDLTVGIEASGRIDDNLLAWFGRWKSSCRDRKMKVIRVNPGQSARFGGPKPRRDQTDGSDSDHVGEFTRVYADRLAVFEHDPKAQAMTRLISERQHLVEDLAATKNRIHEQLLVCFPEFTEMFADPFAKLARAILREAPTGRHAATRRPLSLARVKAGRKERSLGTEQAQKLIQLAKKSIASAGEDNDAAAMIFLLDQLDLLEKRLANIVETLAAYAAQAQNEVGPVGEQGVSAARQIGLLDSIPGIAIVAASTLVLGTRGLARFDSGSALAAQWASCPERTQTGTSLDKTRLTARGDHKRRAMLYLATQIACMYDPAFAFHKWRMVQRGLCPQQAVCAAMNRMARVAWALVAKNQIYDVNLMIGQIQIHHAELWKTFVRLHQNNGSLWKNVEIRYKKIA

SEQ ID NO: 295730 - protein, 337 aa, unidentified
MEVTTIGLDLAKNVFQIHGVDRTGKTSLRKRLTRNKMLPFFANLKPCLIGIEAQGSSNYWARELIKLGHEVKIMAPQFVKPYVKSSKNDQNDAEAICEAVSRPSMRFVPLKSIEQQDLQTLHRMRELAVKDRTAKANQTRGLLAEYGIVIPRGITRLKKEMPRILENADNELTHFARELFLELYRELMELDARAKKYDHRILKIFNSSPTCQKLNQIAGVGPLTATAVIASVGDASSFKNGRQLSAWLGLVPRQNSSGNKRMLLGISKRGNTYLRGLLIHGARAVIRHSEGKDDSASRWLNGVKARRGTNRATVALANKNARAIWRLLRNDAAMQTI

SEQ ID NO: 295731 - protein, 328 aa, unidentified
MKEQQIKHNEVQIKKFVTKLKSEWNEIHCCYEAGVTGYPLYRYLNSLGVNCTLIAPGKIPRQSSDKIKTDKRDAIKLARLLRSGDLESIHIPSEEEEAVRDYLRSRDSLRLDLGRNRQRLMKFLLRKGNVYSATKYWTVSHYKWLNNLHFENEILQETFNDYYSRVKVQEENLKAMDQKIRGVAESEPFRERVGILRCFRGVDYLTAMFLLCEVCDFKRFKTAGSFMSFLGLVPGEYSSGSKRKQTGITKTGSPRLRRILTEAAWQHRFPGTGSKIVTARRVGQPALVVALAEKSFLKITQNLQKNPIRNTYISAIERLISSNYSRNT

SEQ ID NO: 295732 - protein, 425 aa, unidentified
MLPDVTRRDGRIKLLFIGDDWAEGHHDVVAQDDAGKTLARRRLPEGTDGIARFHELVASCLGEDAEPDPARVIVVIETDRGPWVKALAAAGYRVYPANPKQAARHKETIANSGKKDDFFDAGALADMGRTRRHQLRELAADSDIAEAVKIAARARQKLVWERTRHLLRMRSALREYFPAALEAYADLTLTGPDALELLGRAPDPDSAARLTVTQITAALKRAGRRGDLPQRARDIQAALRAPHLPQPAVIAEAYAASGQAGAAVIRALNEQCKILEAKVSELFRRHPDAGLYLSQPGIGDITGARILGEFGDAPGRYATAKARKNYAGTSPLTIQSGKKKTVHARYIRNRHLIDALHAQALSALTASRGARAYYDELRAHDAGHDDALRRVASRLVGILHGCVKTGCEYDETTAWSHRAESPQAA

SEQ ID NO: 295733 - protein, 423 aa, unidentified
MAYRIAGIDVHKKMLAVVVADVEVQGEYQFERIRYGSNPEHLRLLAAWLIEHEVEEVVMESTAQYWKPVWGALERYWKTSCQKREGVGPKSGTLHLAQARSNRGRKGRKKDFPDAERLVKRLVADELVLSFVPDVEQRLWRTVTRRKYQLTRNKVRLQNQLEALLEEAHIKLSSLVSDLLGVSARRMLKAVADGATDPAALAALADKKLRATQAQLCDALGACAELQPVYRRLLKMFLEELQLIEQQIGQLDQEMATLLSQHPEAVQRLAEIPGLSADSAQQIIAEVGATAATFPSGKHLSSWVGACPGDDESAEVSRSHRSPKGNRHMRRILNQCANAAVKAKGTIFEIVYRRLVSRLGHNQTIGAIAHRLCHLIWIILHRGVRYEERGPSVNTKSRRQRTSRMIRELRNLGYRVEPLGTPA

SEQ ID NO: 295734 - protein, 390 aa, unidentified
MFIVSIDIAKRNHEATLIDHAGKVYGKSLRFANTIMGFNKLMDFVNSYVGEEEVEFGMEATGHYWLALYAHLRNNGYTLHVINSIQSDALRGLYIRQTKTDSKDSFIIAEVIRFGRFSETDVSSPDMHAMRELCRHRFFIVDSVLDIKRKVIALLDQIFPEYETLFTNTFDKTSLELLSEATTSKEILALDTQKLFEIINTASRWHFGMDKAVRIQETARNSFGILLSTSSYALLIRQYIEQINFVEAQIAEIDTEIARLLAGFDTQLTTITGINTTLAAVILSEIGDVRRFESSAKLAAFAGIDPAVKQSGDFNGTHCKMSKRGSPYLRRAIWLAATVAAFHDPAVSILYQKKRAEGKSHGTTMGHICRKMISIIFAVMRNNTPYLTAI

SEQ ID NO: 295735 - protein, 331 aa, unidentified
MVYAGIDVHRKRSQVSLIDVDGRELLNRNVDNGSEAMLDILEDLEPGTPVAFEAAYGWGWLADLLEERELEAHLVHPSACKAIASARLKNDKVDARMLAHLLRTELLPEAWIAPKEVRDLRVLLRHRASLVRVRTSLKNRIHAVLADEGLKVEGEKLWSDEGQQWLAGVSVRGMHRLVIDDCCGMLDALAIPIGRLETDIRKQAKTDPRVEALCVMPGVGLITAMTLVSEIGDINRFPTARKLCAWAGLTPTVRNSDNKVRHGHITKAGPAAVRWVLTEAGYHARRFPPFNSTFEAMTKRRGKHIAGVALSRKLLARSFHILKSLEAAKTQ

SEQ ID NO: 295736 - protein, 427 aa, unidentified
MNTVIPIAVPNRKYVLSVGLDWADQKHTLCQRCWADGQRQQFEIGADPASVEAWLAQLKALAGPEGRVAVGFEQNRGALFAMLRAHTDWIDLYPLNPLTVSKFREALFTSGAKDDPLDSQLIEELLYHHLDRLRPYMAPEPELRELDLLCQQRRKAVDAAVACANELCSLLKVYYPLPLDLHEELRCSLTLHFLKRWPTLEQLKKAKPQTLRSFYYQHHSRSQSLITERLEKIARAQAVTEDLALIRPSVLSLQRLVNQLLTLQASVAAFDKAIQALFAKHPDHLIFESLPGAGPRLAPRLLAAFGSNRAALSHSSEMQKKSGTAPVLDRSGQAKTIARRWCRSKFLCQTFHEFAAHSIPHSTWAKACYQQLLARGKSHNAAVRALAFKWIRIIFRLWQNGTLYDESHYLKALENRRSPLSKKISKL

SEQ ID NO: 295737 - protein, 381 aa, unidentified
MKKNSISQTTTKKPRHRRRSKRNPTNLYLSAVPPSQTVGMDLGDKTSRYCVLDQAGAIQKEGSTPTTKKGMTQTFAQMARSRVSIEVGTHSAWVSRLLASFGHEVIVANARRVRAISDSNCKDDRMDAQLLARLARVDPALLYPIRHRGQQAQQHLAMIRARAALVDGRTALVNTARGLVKSFGERLGKCDTDQMGVEKLSHLPAEEQAALRPLLETVAALTEHIQEYDQQIAEIARKHYPETALLEQVSGVGQLIALTFILTLEDKDRFERSRDVGAYLGLRPKRKDSGESQPELGITKEGDVYLRRLLVQGAHCILSVRGPDTDLKRWGVKLAARGGKKAKKKAVVAVARKLGILLHHLWATGEVYEPLRQSQAQAAVA

SEQ ID NO: 295738 - protein, 423 aa, unidentified
MSYKIAGIDVHKKMLAVVVSDVEVDGEYQFERVRYSSSPEHLRLLAEWLIAQQVEEIVMESTAQYWKPVWGALERYWKPSCQEREGASPKSGTLHLAQAQSNRGRRGRKKDFPDAERLVKRLVADELVLSFVPDTEQRLWRAVTRRKYQLTRNHVRLQNQLEGLLEECHVKLSSLVSDLLGASARRMLKALAEGETNPVALAVMADKNLRATQAQLCDALGACTELKPIYRRLLKMFLEELQFIDQQISQLDQELANLLSRHHDAIVHLAEIPGLGVDSAQQIIAEVGAAAATFSSAKQLSSWVGACPGEEESAEVSKSHRSPKGNRHMRRILNQAANAAAKSKGTIFEIVYRRLVSRLGHNQTIGAIAHRLCRLIWIILHRGVRYEERGPSVSAKTRRHRTNRMIRELRNLGYRVEPLVTTV

SEQ ID NO: 295739 - protein, 467 aa, unidentified
MGKGSSGMTRGDRRRNARRERLRGMLPRGGSVIGIDLADEKQAIVVIDHDVRVLARTTVRVKAFRLGEALDWAVGQARAKGFEAVTVACEPTGPRWLQVQRLCAERGLPLVCIQPLMSHIAREQQDYTTHKTDEADCVLIARLAVELHCYIPEELDETWAHLRHLGRRRAQLITSATASAQRIRDFLSVAWPVVTETCAQPLQSLTWLAALQMVTSRCGADPGGLAGLGEQEFTALVRSAVPGWGGKKGWGPICARIFAALTSTEGVVVASRRGLLRRCADELGDLQRTRAQLRAVEADMVAVLDELGLSRLADIPALTAVGAAAILAETGDPRRYDSSSSLVKHAGLSPSDNASGAFYGQAHISRRGRPGLRLTVWRAVWPMLLHNPVMAAKYAAMTEAADTAAARADAGSQQVTAAAATARARRAKARVACAASLLRWIYSMVAHGTAWDPVIASGAASCPAEAA

SEQ ID NO: 295740 - protein, 362 aa, unidentified
MRTQTYKKSEPELVNFAGKTIYSGIDVHKNSWNVSICLDDMFVKRFHQEADPKALHAFLTNRFPGAKYVACYETGFSGFSVQRELAELGIECVLAHAADIPQTNKEKLNKTDKVDSRRIAEALSKGMINSIYILDKQAEADRAFVRYRRGCKERLKARKAAIKMKLFTLGIKIPPQFDKSHISKKYISWLSSLTFDEPITKFTLDFMIEDIEALRKKEYELNKCLRKMSVSDRYKDIYIELNKIPGIGLISIMTLLTELVDINRFGSFKKINSYVGLCPTEFSSGEKSMHGKITPRANKGLRTVLVEAAWTAVSCDPAFTQKYSELCKRMKKNDAIVSIARKILSRIYAVWSKKIDYKIGVR

SEQ ID NO: 295741 - protein, 369 aa, unidentified
MNHVLNELTAENGAEIKPLYDYGVGIDTHKDFIQVCVMLRQGEAIKQYESEHRTTWKGLLEAGEWIKKTIIEKSIPTLCPEPLRFTIESTSTYHLPVIKALKGKPSVVNPVLAGSTRRKTDVLDARLLAYQNMTGLWPVSFIVSPEIHEFRLLMKQREYHARECTAISNRINNYILRFGHTLGSYKSVRSIESRGLLEDMCRNDYEYNENLLNANAANFVCPEGLPDEVKKIIMNMYREFDIHEEQVKYYHKLAVDYAKKIFWKTDNGNVSGKDLIQNLLTVPGVGEMTVLIWLSEIVTPLRFESVKPLCAFCGCDPSLKVSAGKVTSHTRRSGNTKLHRQLTTIVGIFASRKRRYAPPLFVGFIQAHV

SEQ ID NO: 295742 - protein, 406 aa, unidentified
MMAAVMIGVDPHKGSHTAVAIGADEAPVGLVRVRACAAQAERLLTWAKSWPERTWAVEGAAGLGHLLAQQLVAAGERVLDVQPKLAARVRLLAAGAVNKNDPGDARSVAIAALRSAACLPVRPDDHAAVLKIWARRHRDLSRARTQVACRLHAVLCELVPGGVSKEICAAQAAAILDEAEPGGAVQQARLELAAEFTADLRRIDAQLRETRKKLAVAVRASGSTVTEVFGVGPVIAATVIGDVRDVSRFASRDRFAACNGTAPIEVSSGNRTVHRLSLRGNRRLNHAIHMAAINWIRYKHSDGRACYDKKIAEGKTPKEALRALKRQISDAICKHLEADAARVTAAGAQGPGGQPGNDSVASAAGSHPERQLFGQATPGPVTTLRPPADQQKRTSSHARKKTARTT

SEQ ID NO: 295743 - protein, 367 aa, unidentified
MTILADPTGAQTSPSPVWVIGVDTHADTHDAALVDALGGVVAQVQVETTPTGLARLVDWARAHVPAGQPLWWAVEGSRSHGHGLTRHLRTGGQQVVEAPKPVAASRRRGGKSDALDAVHAARAALAMLATGRPAHPRTDGIREALRMLLVTHRHDTDIRTATVNLFKSLLLGAGDLRETLRRLTTIRQIHTVLTLPHPGTGTGTGTDVETQVRIHALRRAAATILDLDKAIKATEKQLRTLVAQACPGLLDLPGVGPIVAATLLTTWSHHGRIHSEAAYAALAGISPIPASSGRHQRHRLNRGGDRQLNRALHTVITTRRRMRHAPTSAYIARRTAQGRNPKEILRSLKRYAIRHLYRFLEANTITT

SEQ ID NO: 295744 - protein, 328 aa, unidentified
MSNPESFVGIDVAKGWLDVAWLTGETLRIDHAEKAIAVLVERLRSQPPALVVMEATGGLETGVASALAAAGLAVAVVNPRQVRDYAKACGRLAKTDRIDALILAAFAAAIRPQVRELPDEHTRSLGDLLARRRQLVEMRVQEKLRLQRASNVQRASLREHIVWLDERIGRLDIDLTHALRSSPAWRDKDDLLKPIPGVGSLTRATMLALLPQLGTLSRRQIAALVGVAPFNRDSGQHQGGRVIWGGRAQVRRTLYMAAVAPMRCNPVIRSFYQHLRSQGKPAKVALTACMRKLLVTMNAMLKHHSAWSNRLDTQHSCSRVNTLHDGLQ

SEQ ID NO: 295745 - protein, 343 aa, unidentified
MLTKNIIAIDLAKNVLQVCYISIDGELLSNKALNRQKTKEFLAKAKPSIVAVEGCCGCHYWGRYAEQFGHEVRIINPKKVKGYLEGHKTDRNDALAIANAAIQIGIKYSPPKSLEQQAMQSLESSRRFLSRNLVSLGQHIRGSLLGYGVANPKGEKGLRASVQTVLDGETNIPANVIGVMAILWEQYKQLKNELKDFEKEKNALTRQIEPCKRLMKIEGVGEAVAAMLYTTLGDGKQFKNGRQASAFVGLTPKQHSSGGKVFMIGIDKCGGVKELRSLLYLGAMSHLGRLPEKPRTQKDAWLRQIVERIGFKKTCIALANKIVRTAWAMLRYETEYKPILLAA

SEQ ID NO: 295746 - protein, 412 aa, unidentified
MFKIFRNNCCGLDVHKTWIYACIAITDPNGRTVYKQARFSSFSKGLRELAAWLAKYSCTEVCMESTGKYWIPVFNILEKSCSVTLAHPKYTKPQKGNKTDRKDAKWICDLFMCDMIKPSFIPSPEIRQLRDLVRYRVKLTNMLTGEKNRAQNCLTVSNLKLDDVFSDVFGKSARSITNYILEHPGETFDVSPFVDPRCKTPVSEIQAAVDGAISPEQAVKLRQCLAHIDELEAHRKEIESEILQIAEPFSAVLDLLYTLPGLDKNPMTAIAILSEIGPDMSVFPSSKHLVSWAGCCPRNDQSNQKVKSRRISRAGSYLKPLLVQVPNALIKSKKHPEFKERYHRIKSRRGHKKAIIAVCKMLLTAIWNMLSKLEPYNPEGFLEHRPVKQEKILTVSQALELLRLRGYTITNQ

SEQ ID NO: 295747 - protein, 363 aa, unidentified
MHDFITWIGMDVHKESISVTAVGHDSEGVKARFETPNTDKGVHRLAKRLREWGEVRCVYEAGPCGYELRRFLSSQGIPCEVVAPSLIPKKAGDRVKTDRRDAEKLARLLRMGELTAIRVPTPAQEALQDLVRTREDAKEDDLRRRHRLQKFLLRQGRRYEGKSWTQAHWNWIRSLKFADDNAQTVLVEYLLALEQELERIKRLNERIEEESHRSDIAPTVAKLRTLRGVDTVTAMTLVSELVDMNRFATARELMAFAGLVPSEYSSGGKEWRGRITKTGNAHVRRVLVEAAWHYRHTPVGTGIALRKRREGQPANVLEIARRAELRLCRKYRKMTTKGKNSRLTVVSVARELAGIVWALGRSH

SEQ ID NO: 295748 - protein, 444 aa, unidentified
MTKAKSKLEIVNPNASGIDIGSAVHYVCVPEGRDKQRVQKFGCFTADLHNLARWLKKCKVTTVAMESTGVYWISLFQILESYEFEVKLVNARHVKNVPGRKSDVQDCQWLQQLHSYGLLRGSFRPDNQMCVLRSYVRQRKKLTESASTHVLRMQKALIQMNIQLHKVISNITGVTGMKIIEAIIEGQRNPEKLAEFRSSNIKNDKATIAKALTGDYREEHLFVLKQELELYNIYQEKIAECDENIENYYKTFETKFCGNKQCSKIKNRSTKNRPNFSIHEELHRVTGMDFTKVPGLDALSIQTIISETGINHNKWPTEKHFSSWLGLSPANKITGEKVFSTRTCRVINRAANAFRMAAHCVSRSNSGIGAYCRRLKKRLGAPKAITATARKLACIFYSMLKHGQEYVEKGIDYYEKLYKERVLKNLSKKASELGYVLTKKHELI

SEQ ID NO: 295749 - protein, 346 aa, unidentified
MFNLTEKGKSVNNVTTVGIDLAKNVFSLHGVDGQGREVLRRTVRRGQLLAVVAQLPACLIGLEACSGAHEWARQFATFGHTVRLMAPKFVAPYRRGGKNDGNDAEAICEAVSRPSMRFVPVKSAEQQAVLSLHRVRQGFVEERTATLNRIRGLLAEFGHVLPQKAVEVRRRLPPLLEELPVLAARALGDLQAHVRILDERIAEYERELARLAKADARAQRVQELYGVGPLTASAILASVGSAHEFDNGRQFAAWLGLVPRQFSTGGKTRLGHITRRGDPYLRTLLIMGARAVMQAATRREDRLSRWALSVRERRGYHRACVAIAAKNARIVWALLAKDEPLRTVMA

SEQ ID NO: 295750 - protein, 384 aa, unidentified
MWIIGCDFHAGFEVLSIFDNRTGEVVERRLSHPQEAVAFYRGLREPARVGIESGVPCQWFRRLLAECGHELWVGDAAKIRAAETRKQKTDRRDAELIMKLMIEDRFPRIWVPTEEERDARQLLMDRHHRMRARTQAKNQLQSLALNQGLQKGWKLWTPAGRQLLSDLPMMRHAARRRDELLAWVGVLDQQIAALDVLIVEEVKKRPRAQLLMTHPGVGPQTALATVLTLGDVSRFGQARKVASYLGLVPSEHSSGGKQRLGHISKQGSALMRFLLVEAGQSAARGDEELGRAYKRMWVRKGNRAVAKVMWRGGWLSGCTGCSAMNGVTRSWFVMRVSPGHAVGSSNWTERLSGQPASLTGRGVRRRESWEQLPNRWLVKPVFTA

SEQ ID NO: 295751 - protein, 383 aa, unidentified
MGETQNMKLAVGIDVHKEKCVACAVYAGQGEATSKQQYFLDRFEDGFKRFPSDGRGMLDMVRFLRGHELHVLIENSTKSHDIYWLLRALDVDVIVAHATDLYRITKSVRKNDDNDARELAGYMRRKLMGEVEFSVSHIPSHETLEKRELCRFDMNDRSELTAVKLQIRSHLLIRGMELSKKYSDITSISALDELTATKDTILMLDAKKAKELKLRILFTDRIIRQKMWNDRIFEIVWSIPGFGVLSAAYLACMADDMSRFDDGRAFAASFGLTPKLDESADKSKNCGISRRGDADMRRLIGQATFVHVTRAESFISEKYKRLRARGKHHNEALVACANSMVRMIFALIRDDRPYSADPESLAETRVYADSDALEDDMEAAGKD

SEQ ID NO: 295752 - protein, 355 aa, unidentified
MIVIGVDSHKRTHTVVAVDQVGRRLGERTVKATSDGHLELVRWSAQWSRVTFALEDCRHLTRRLEADLLTAGQPVVRVPTRLMAATRRGARQPGKSDPIDAEAVAVAALRHPDLPVAALDGPTREVKLLVDYRRDLVRQRTRVANRLRWHLHELDPALQIPSRGLRRYRVIDDLTAQLAGVDGMVARLARLLLARCRELTAEINALEAELRPLVHRLAPRLLAVPGCGVLGAAMILGETAGVGRFRSKDAYARFTGTAPIPVWSGDRRGKVRLNRGGNRTVNCALHMIAVTQARGVGPGQAYVDKLMGRGKTRTEAVRLLRRRLSDVVFSALRADEQARSTGAQPQCSPATARAA

SEQ ID NO: 295753 - protein, 410 aa, unidentified
MDLLRREVPASSLVVAIDPGKAFNRVWLTSGEQGMIGEPVSLPVLRDGVDQLERLIASSGVGGSPVIGLEATGALHRAWATEIERRWPGSLRLFAPSETTAARTQLGSRRFKTDDRDCAALVWLVRQGAGRHAGPQSVQALLGTVRHRAQLVHARRVLQQQLHDQLNVLCPGLSAPAEHGRALKLESPTGQAVLACAAAFAGRAPSKRSLLARAPGRTSDATAVFWTERWKRLLGPPLDGELRAQRLGADLRRWQGLQRDIALAEEQLAVLLAKTPGQILTSLPGVAIVRAAAFSAYTLPVERFESPEHLYSATGLAPASYQSSTITRRGRISRQGLPEHRDALMGIAWGLSASSESFRARDAELRARGFRPIQARVALARHACRLCWALLHSQHPYDDRRYARARRRGR

SEQ ID NO: 295754 - protein, 384 aa, unidentified
MSEVIIIGLDIAKHVFHAHGADERGQAIFSKRISRGKLLDFFAAQPSCTVALEACGGAHHWARQLTRLGHEVRLIPPAYVKPFVKRQKNDAIDAEAICEAAQRPSMRFVAVKSEQQQAAGLVFRTRDLLVRQRTQLINAIRGHLAEYGWVAPKGPSHVAMLADLIEEEAMASSLPEATHAMFRLMLDLLAGLNGKIADLDKEIARRAREDEVSRRLMTVPGIGPISATAIAALAPPAETFAKGRDFAAWLGLTPLQRSTGGKQKLGATSKMGERTLRRLLIIGSSAVVQQASKRGAPRGSWLEQMLARKPRMLVTVALANKMARIVWALLLIVPGARIYDLVPVRELPYGPAAPSLHQRPDRWQHPTTCQSSSNTACIWRGVHR

SEQ ID NO: 295755 - protein, 340 aa, unidentified
MKLFGAIDLHSDNNVIVLIDEKDEVVYRKRLPNDLSMILEQLSPYHSRIEGMVVESTYNWYWLVDGLMEQGYKVHLANTAAIQQYNGLKYTDDNSDARWLAHILRLGVLPEGYIYPRETRPVRDLLRKRSQLVRQRTTNLLSIQNLVTRNTGSSLSAKQIKGLDVHQVDELLPDRDLALAVKANLSVLCSADEQTEILERTVIERVQLRPQFCFLKTVPGIGKILALTIMLETGDIGRFASVGNFASYCRCVGSQKISNSKKKGKGNTKNGNKYLAWAFVEAANFAIRFNSRIKSFYQRKKAKSKGVVAIKAVAHKLCRACYYIMRDRVAFNVTKAFDQK

SEQ ID NO: 295756 - protein, 465 aa, unidentified
MDQMTLGIDVACRAAHQASLADERGKFAWSGRSFRTTVADLERLWALVPAGVTLTVVMEPTRNAWVPLAAWFRRRGAAVILVPPEQSADLREYYSKHAKSDHLDSRILARLPLLHPEGLRPSQGLGPADELRRATKLRASLVKRRSTILARLDAYLELLSPAWHAALGGDLALNTPLRFLAAGYAHPHTLRRLGRARLTRFIWRYSHGAWGQAHAAALLDAAAETLALWQDDIDYTELADDIAVEARLALAITTEIRDLEQKIAALLHHRDPAGIMTSVPGVGLINAAQILARLGDPARFRSLAGARSFTGLVPSLTASGTSGHHGPPTKSGDAPLREALFLAADHARRTDPTLAARYYRLMVHQGKHHNSALCHISTVLLTRIIACWRAGTRYQLRDTDGTPITPAQGRQIIHQRYRVSDDLRAQRRTSHTKTTRRAGDVRSRQALRHQPAPTTLRSASQLDIH

SEQ ID NO: 295757 - protein, 410 aa, unidentified
MKAQLETLHKRVAGIDVHRMKHVATVLIEDAAGNLTRETREFGGFKRDLKALAEWLRESRVELVIIESTGIYWKSVYARLEDVGLCIWVVNAHHVKNVPGHKTDVADSEWLAQLGRYGLVRPSFIPPKDLRQLRIISRYRIKLDRTMSAETNRLHKLLDDAGIKLGGLVSDINGKAASAIVDGLLDGLAPCELIKLSGRLRASKEDLLASLEGDLTARHRFVLLEIRKHLRELEGHLETVDTYLRDAMVPYAWAWTLLQTIPGISEIAAALILIEIGDDLSHFGNADRFASWAALCPGNNESAGKRKSGKTRKGNSVIRYLLCEAANGAIRTLSVFREKYRGLVVRRGHKKAIVAIAHKMIRTIYFMLTRRQTYHDSGFDYAAANVKKNAPRWIKALELHGYVVKLSAAH

SEQ ID NO: 295758 - protein, 351 aa, unidentified
MASTRIDEEDCMTVIIGIDPHKATHMAVAIDGGEQSVARFEVRAQRDQTERLLAWAAPFPDRRWAIESADGLGKLLAQQLLAAGEDVVDVPPTLSARVRLLGSAKAGKNDGNDALSTAIAGLRHCALRAVRVDDHATVLRLLVSRYDDLIALRTQAACRLHALMRELVAGGAPLRLSADRAAKLLRGAHAVGLVALERKRLAGDLLSDIRRLDRELTAIKVRIGDAVAASQTSLVELHGVGPIVAGLILGYVGDPTRFPTKERFAAYNATAPIEASSGPRKRHRLNPRGNRKLNHAMHLIAVTQIAHDTPGRAYHDRKIAEGKTKKEALRALKRRISDAVWRQLQADLAHP

SEQ ID NO: 295759 - protein, 366 aa, unidentified
MTDRQGNVVGVDPHKHTLSATVLDERGGIIGTSHYRVSGDGHRALEAWALSFGAVTRWGIEGANGLGRHTSVYLCRQGHDVRDVCPTRTAERARGRHQGKSDVLDSERIARETLAHPELPVAFKRAGEDTGPDETAELMALWHKERRSVLKTRQHLLNEAEPLLNELPEELRGRLPDTKAVRPRLAALRQRRGAWPAATALRLRLLEDHRRTILELDRRDKEITKELAKLVRSVGSTLDGLCGLDIRSTAEILVEVGDPRRFTEGGFARFSGTAPLPASSGEGPGQPVRHRLNRGGNRQVNAVLHRMAVTQLRCDERAQRIRDDAKRRGHTRKEAMRILRRHLAAVVYRRMIRDLKAGEAPLHLVA

SEQ ID NO: 295760 - protein, 342 aa, unidentified
MSEVTIIGVDLAKRVFQLHGASGDGSVVFRKKLSRGQVLAFFARHAKCVVAMEACATAHGWGRELEKLGHSVRLIPPVYVKPFVKRQKNDAADAEAIVEAALRPTMRFVAVKTEDQQARAMLFRTRQMFVGQRTQMINALRGHLAEHGLVAATGTAQLKRLADAIEDSDTALPESVRDLGQMYLAQIAGLNARVTELDQKMRHAAKEADVARRFQTMPGVGPITALAIETFAPYLATFRRGRDFAAWLGLVPKQHSTGGKARLGKTSKMGQRDIRTLLVSGAMAVLQAVERFGTPNNGWLTRLRARKPRMVVAIALANKMARGLWAMMTKQEDYRNPVATMA

SEQ ID NO: 295761 - protein, 401 aa, unidentified
MTENPGAVIAGVDTHSTTHHAAVLDATTGICLADAEFAATTVGYRQLAEFLASHGQVLRVGIEGTNSYGAGLTRHLLGNGIEVVEVIRPTRTERHRGKSDPLDAINAARNTLAHNNLPSPKVGDGPVECLRVLHIVRDSAVKAHTKTIQQIKSILVSAPAPLREHLDQLTDSQLFSTLRTAVPNPATSPVTRTTVRALRTLAQRLHHLDAEINSMTIEIADQVEHIAPALVHARGIGIVTAARLLITAGDNPERLCTEAGFAALCGVSPIPASSGKTTRHRLNRGGDRRANCAIHQIALVRMSCDRRTQAYIAKKTGQGKTTREAMRCLKRAIAREVFHLLTNPPEIPAIDDLRPARKARGWTLQHVADHLGVWPAQISQLELGKRRHDPLISAYRDLLRS

SEQ ID NO: 295762 - protein, 353 aa, unidentified
MINKKTQKIKSELAKITVVDKEKGASYIIVGVDLSKSKLDVMTTKYKSYANDEKGCNLFCKAIKELGNNVVVVYEATGYISLNFAELLDERGIARCQVSPRHVRHHAKAGMSEAKTDKIDCAVIQSYAMKYWECLSINTPMGKNHSELMELQRLRNFYTESISRAKQILSTCKHESSRTHFENIIKELSEKRKEIEQKITELIEAEEDTKHRMQLYMQHPGVGKETAKTLILCLPELGTVNRREIAALVGVAPFNYDSGSRTGKRIARFGRRNVRNLLYMCVRAALNTTEENDYKKKFSRLSTVTNLKQGRHYRQVIMACMRMMIVRLNAITRDWIAAGRPAPQQSKRIKSKV

SEQ ID NO: 295763 - protein, 368 aa, unidentified
MQTSIAPTTFVGLDVHQDSISVALFRPGAQFPDQDQIANTPEAVRTLVRHWTDPQHVRVCYEAGPTGYGLQRTFTSLGVDCAVIAPALIPKRAGERIKTDRRDAHKLAGLFRAGLLTTIRIPPPEEEAVRDLVRAREDLCEDILRARHRLSKFLLRHDRIFRETKTRWTERHLAWIRRQQFDVAGLEELVGHHLAIIETRLRQRDLMDQAITRIADSEPYAAAVRRLCCLRGIKSLSALTLLVEVGDFRRFAGAAAFMGFTGLVPSEYSSGERHRRGSITKTGNAHLRRVLVEAAWAYRQKPAVGSAWRTRFADQPAELVGYAIAAQQRLHARYWRMTQRGKLSNIATVAVARELAGFIWGVMTERWA

SEQ ID NO: 295764 - protein, 370 aa, unidentified
MEQYSEAFVGIDTAKNKHALAIADPGRDGEIRYLGEIDSSPATVQRMIRKLAGRYEKLYFCYEAGPTGYGLYRQVRALGHDCIVVAPSLVPKRPGERVKTNRRDAVTLARLLRAGDLTPVWVPDAVHEAVRDVVRARTAASEDLRRKRQQLLSFLLRHGRIYRGRKHWTKMHLYWLAQQKFDHPAQQIVFQDAVDAIEDAATRLRRLDQQVAEIVPSWSMAPVVEAYQAMRGVSFGVAVTFVAEIGDLRRFDNPRQLMAFLGLVPSERSTGERVRRAGLTLAGNKRARRVLIEGAWSYRYPARVSQTLQARLEGLPKTVRAIAWKAQIRLCARYRRLTAAGKKRPLVIAAIAREMAAFLWAIAQHVAPAA

SEQ ID NO: 295765 - protein, 318 aa, unidentified
MENISQWVGIDISKATLDVYLRPLGKAMKVANTKEDISKLVETLKSYTVNLIVLEATGGLETELVIQLQEADLPVALINPRQGRDFAKATGKLAKTDAIDAQILAHFGEAMQPQILAVESEESRQLGDLISRRRQLVEMRTAEKNRRERARGKALVDIEAHLEYLDNCLEKLNQEIEELTQANQQWLEKVNLLKTVPGIGQVISTTLVSDLPELGQLTAKQISRLVGVAPINPDSGQHKGKRMIQGGRAQIRATLYMGAVVAMRHNPVIKTFYERLVGRGKSKKLALTACVRKILVILNAMVRQNQPWQLADNLPPCS

SEQ ID NO: 295766 - protein, 382 aa, unidentified
MDSTCSWSRIIGLDLSKATFKGCILSGEGFVQRKNFSGEMRQDKSGYVLINNTIQDGDIVLMEAGSSTFNLARYLLRNSKAMDVVVLNPANLRIIWDSQKKNDKADAMKIACIARDMRPEAWPRVSVPSEQEQSERSVIMHWIFLRKQETMLCNRFFALFNGLGFPEIDKSHLKKDADFRVQTINDLLSFNELAFTDAIMLEEQIATVQRQLAFMEDRLRNICLDHPQQSLAWLSIPGIGLVNAATLIAYIGDGSRFSKPDQLLNYAGMVPKQNQSGTVDIKGKITKRGCTAIRRSIVQGAQVLIQLPPTCDITRFAYRKRKECPFNGKVAVAVANRMLRTGLALLHHNDLYRPMIEGGFDRFERKLAANKLQALAAYLTRN

SEQ ID NO: 295767 - protein, 352 aa, unidentified
MNYCAGLDTSSSKTAICVVASKTGDTVFETTVTTDPLAIAEALEPYLERLERIGHEAGSVAPWLHRDLSGLGLPMVLLESRHAAMALKIQRNKTDRNDAYGLAQLVRTGWFRPVHVKSEESHRFRLLLTHRRTLKRKLLDIENEIRQSLKVFGLLVGPRVRELTAQDALIGGVTECMLRAWSALWREYKRLHDLLIRFVGHDELCRRFMTIPGVGPVTALSFKAAVDDPRRFAKSKTVGAHFGLTSRRIQSGDSIDFDGHISKCGDGEVRTALYEAASAMLVRSKKWCAVKAWGVKIAAKRGHKRAVVAVARKLAVIMHRMWMDGSEFRFSAGEPAPKPAKKGARLALATAP

SEQ ID NO: 295768 - protein, 323 aa, unidentified
MKDYHNFIGVDIGKFSFVVSVYNSKETKEFENNSQGILLFLEHYKLFLSKSLCVLETTGGYELELLMNLCNSNISVHRANTRKVKNFIRSYGNGAKTDKLDAKALALYGFERRDKLMLFVPKSTNDLELYQLALRKQDLMKMIIAEKARIQGPNAKFTKASCKFMIDTISDQIRLINDRIEVLIQASEALSSKKDILKTIAGIGEVSANQLLILLPELGTLDRKQIAALVGLAPRANDSGTYKGYRGTMSGRDNIKPILFMAAMAARRSHSSFRTFYEKLISRGKKKMVALTALMRKIIVIANAKIRDLLKQSEEIKIKTGNF

SEQ ID NO: 295769 - protein, 366 aa, unidentified
MSFAHANGRGPTETEVPARMKVLIGVDPHKASVAVAAVDEVGEFLERATFPQNCAGLRSLERWAKRFPEHRWAVENTGGLGRHLVGRLAAAGESVVDVPPKLSARVRVLSTGNARKNDELDALATALAASRNERLAAVDPEAASEVLRLLSERREDLVAERTRALNRLHGLLRDLVPGGVAGTLSAHRAARILRGIRPKGASARLRRQLASEVLLRDIRTLDRKIADLNGRIEAEVEAFGTTLTEIFGVGPILAAKIIGTVGNVARFPTKAHYFASYSGTAPVEASSGEVVRHRLSLAGNRKLNNALHMVAICQTRSDARGGAYYRKKIAEGKSRKEALRCLKRRISDAVFKSLMADSRAPSRSAA

SEQ ID NO: 295770 - protein, 364 aa, unidentified
MYSECKKVQFDGQHVYVGIDVARKSWKVSVYVGQAYHKRFSQAPEPKAMVEYLQRNFPGAVYHTVYEAGYFGFWIHRALTGLGVDSMVINPADVPTTDKDRRTKTDRVDAAKLAWALARGGLRGIYVPERIAEEDRMLVRMRASFVRKQTRTKNQIKACLRYYGEQVPEDITDRYWSRAYIAWLEGRSFEHESGHVAFQALLTELLTLRATIAELTKRIHALSHTERYRRSVEVLLTVSGISLAAAMTFLTEIVTLERFRRLDHLLGYIGLVPGEHSTGDTEHDTGLNPRRNAALRYMLIECAWIAQREDPALLQAFKDYCQRMPKSLAIIHVTRKLVCRMRYVLKHQQPYVTGVRSTGTPWAA

SEQ ID NO: 295771 - protein, 381 aa, unidentified
MTTAATHHEHGNTPAGTLFVAFELSEKTWKLGFTTGHGQKPRERTVTARQQERVLDEIAQAQRRLRLPDTAPVVSCYEAGREGFWLHRFLQGHGITNHVVDSSAIEVNRRRRRAKSDGLDVRKLLSMLMRYAQGERQVWQVVKVPSVEAEDHRHLHRDLETLKQERASTTTRILGLLRSQGLRVTSLTKLPEQLEALRLWDGSPLPPGLRRRVLRVYAHHTFLSAQIAAVEAERRAQLHASTDARIDKVRQLMLLKGIGINGAWLLVMEFFGWRAFKNRREVGGLAGFTPPPYQSGESAREQGITKSGNRHVRWMTTELAWSWLRFQPDSALSVWFRERFGGGGKRLRRIGIVAVARKLLIALWRFLETGVFPEGAILKAA

SEQ ID NO: 295772 - protein, 461 aa, unidentified
MAKQSGKRKKGGAKADATEGLPPLNLHAAGIDVGSAEHYVAVPLDRDVEPVRRFGSFTADLHRMAHWLKDCRITTVVMQSTGVYWMALHDVLESHGFEVNVANARHTKTLPGRKTDVQECQWLQKLHTFGLLNNSFRPPEEIRVLRGYLRQRENLVAAAATCIQHMQKALTEMNIQLANVISDISGTTGLAILYDIVRGERDPYKLAMHKHSRIRASRQEIARSLQGTWRQELLFVLEQSLDLYQTYQQKIQTCDERIDGQLRSMEPKIDPVREPIPEPRRGKDWRGHQSGFDLRGQLYRITGVDLTRIDGIEVQNAQTIISEVGVDMSRWKTEKHFASWLGLCPDNRISGGKVLKRGTRHVVNRASTALRLAASALLRSQSALGAKFRRLRSKLGAPKAITAMAHTLARLVYRMLKFGHDYVDRGIDFYEAKYQHQQLQRIRKQAAALHMQLIPLTGVVS

SEQ ID NO: 295773 - protein, 394 aa, unidentified
MKLIGIDIGKNKHFFCIMDKDSGEIVSQPASFSNDKEGFDFLLQKIKSYPKNSVLIGMEDTGHYHFALLKYLLDLQYTVALINPKTTDFNRKMQSGITKNDKLDTINICDVLDTPERKKQYRITKVNNFDLYEQKQLTRQHHNLKEELNVYKNRLQKSIDIVFPEFNSLFKSKYGTVYINILKTFGSAENIANTDIRTIRKCFEIDGRGNRISLTLERLKERARSSIGISSIAEVIQIKHLSAQIDLIEEQLSEIDKKIEEFSIQNNSPILSIPGISHFSGTSILAELGDISNYSKPSQIIKFAGVAPLHYESSQFNAQHTAITKKGSKYLRKTLYQIILPVIRHNPVFNKYYQLKISQGKGHRCAQGHCVRKLLRIIYHLLKTNQQFDPQLLR

SEQ ID NO: 295774 - protein, 411 aa, unidentified
MDKIYDKCCGIDVHKKLIVACFRCGKKQEIREFGATTRELLQLADWLKDGDCEMVAMESTASYWKPLYNILESSDLNAIVVNARHMKAVPGRKTDVKDAEWIADLLQHGLLQPSYIPDKDQRELRELVRYRKSLVGERTRELNRLQKMLEGANIKLSGTVSDINGKSARSILEYLLTGKSIDGAKYDEMYEQKIIAHNLKATKEQIVDDLNGVMSPLQRRMMKELLVHLDELNIHIKNLDDEIDNFMKPEEKQASQAIQDVTGIGNTSAQAIISVIGSDMSRFPTDRHISSWAGLCPGDNESAKKRKSGKTRKGNALLRTTLITCAHAAVKNKKSYFYAQYMRISAHRGSKRAYVAIAHSMLISIYHILKDGVVFKDLGADYYNQFNKERKINAYLKKLKALGWEAPIVDA

SEQ ID NO: 295775 - protein, 471 aa, unidentified
MAKATVFEAINAPSCGLDVHKDVIEACVLDENGKKHHMTFDTMRKSLYALRDWIVSLKCFHVLMESTSVYWIPIYELLEEVKGMDVGVGNPHKMKQVPGRPKTDKGDADWIARLCMIGLILKSFVAGRKFREIREYTRYHKKLVQERARQVNRIEKLLQMNGFKLSSVLSDITGLSGMRLLKKIRDKGSVTLQEVQEAMHKRVKKTASDIESAINGLMKPSSRMLLGMMLSRLEICDNEIEKIYGMMVKMSQDYRPQIEQLVSIPGIGELSAIYVIAEISTDLSSFKTSKHIAAWAGLAPKDNESAGWLRFSKTHKANIYIRSVLTECAWAVTKTRNTRLSNWYWSNVKRIGQRKAIIAVARKLLVCIYAMIKSGEMYDDSLDVADTKKREAKKLDSALKIIEHRINESDTKKHCDDNGQGTVAPASSLLRTEVGTCIPPIATDPLVLSPKKRGRPRKVANNNIQAESLEV

SEQ ID NO: 295776 - protein, 319 aa, unidentified
MSKIVLGIDVAKSKLDVALMLAGKALMKKFDNNIKGFKLLQGWLSSLKIEQVHACLEATGPYGDAVAEFLHERGHRVSVVNPLRIKSFAKSDLQRNKTDQADARTIAAFCLAKDPDDWHPLPPEIKQLQALTRRIEALERMLLVETNRLEMAPTTTRPSIDRMIENLKQEIENVQRLIKDHIDNHPDLKQQSDLLQTIPGIGEKTARLLLGEIEFRSFTSARALAAHAGVTPRQFQSGKSLNWTRLSKLGNGRIRKALYFPAIVAVQRNQIVKLFARRLSENGKTPMQIVCAAMRKLLHIAFGVIKNNRPFDPTPAFDV

SEQ ID NO: 295777 - protein, 422 aa, unidentified
MLEETQETEEIIGRVAALDIGKAELTCCVRVPSPGKRGRRAQEVRTYPTMTRSLLVLADRLAELGVTRVVMEATSDYWKPPFYLLEAAGFEVWLVNAKDVKHLPGRPKTDRLDAVWLCKVAERQLLRPSFVPPPAIRRLRDVARYRADLVGVRTAEKQRVEKLLEDAQIKLSVVASDIFGVSGRAMLAALIAGERDPKALAQLARGRMRAKRSVLEEAFTGFFTDHHGFLLAKMVARVDALDADIAELDGKLEELIVPFAQVVDRLDEIAGVGRVAAQLILAEVGVDMARFPTAGHLASWAKFTPGVKQSAGKTKGKSSTGHGNRYLARVLGEAAVAAGRTDTFLGERYRRIARRRGTKRAIVAVGRSILVIVWHLLADPTARYHDLGPGFYDTRSNAERTKRNHVRQLEALGYTVTLEPAA

SEQ ID NO: 295778 - protein, 369 aa, unidentified
MEKDTTYVGLDDSKRKIVAGILRPGDAQPELREIANDPRQIRRLFERLTREGPVAACYEAGVSGYDLYRQISALGVACAVMAPALTPRRPGQRIKTDRRDAAKLVRLFRAGELTAIHVPAEAEEAVRDLVRCRDDIRRDVLRWRHRVLKLLARHGRAYLAGKNWSQAHWRWVREQRFDLPPLQRAFEATLFALEQALARQAELDKEIEALAATAPYREPVGGLRCFRGIDTLSAMILLAEVVDFQRFRRPRELMAYLGLVPSEYSSGETQRRGALTKAGNSHARRVLVEAAWHYRHRPTIGRALASRSQGQPDAIVSHAWRAQQRLHRRYRHLVGHGKRTPVAVAAIARELVGFIWAAMTRHESRRQAA

SEQ ID NO: 295779 - protein, 345 aa, unidentified
MEISTIGLDLAKNVFQVHAVSPAGEVVIRKTLRRVQMLPFFEKLPPCLVGVEACGTSHHWARELRKLGHEVRLMPPVYVKPYVKRGKNDAADAEAICEAVTRPTMRFVAVKSPEQQASLALHRTRRLLIGQRTQSVNLMRSVLAEQGIAIPVGLERALQMARQIAEQESDLDLPVDAVGVASMLSEQILQLHAQLRKLDLRLAALQRSDETARRLATIPGIGPVGATALAASVTDPSQFRSGRQFAAWLGLTPRQTSSGGKERLGRITKMGDKYLRQLLVIGATSLVRRAKEKPETADPRLVALLARKPARVASVAMANKMARVAWAVMTRGECYQANHAPALAS

SEQ ID NO: 295780 - protein, 349 aa, unidentified
MKIIGCDFHPIYQQIVMWDKATGEMLERALSHERKEEVRAFYAGLQGPVRVGIEASGQSQWFEQLLAELGPEVWIGDAAKIRASCERKQKTDRRDAELLVKLLDEERFPRIWVPTPAERDARQLLLHRHKLVRMRTQLKNQLQALALNQGVQRKRKLWSEAGRKQLEALPLLPWASRRRAELLVLLDQLEASIGELDGAAAEQANTRPAVRRLMTHPGVGPITALAFVLTMGPAQRFRRGKQVASYLGLIPTEHSSGGRGQRLGHISKQGNPFLRGLLVEAAQSAVRHEPEMRRAYQRLAQRKCRALAKVAMARKLAVRLYWMLRTEVDYAQLIQGSHAGQLESFRGRV

SEQ ID NO: 295781 - protein, 413 aa, unidentified
MDVVHPRCAGIDISKRDAKVCVRIQGRGNTPTTSTVTTWGAMSNQILALREHLLTDRVSCVVMEATGDYWKPYFYLLEDTLTVMLVNAHDARNMPGRKTDVSDAAWLADLGAHGLLRGSLVPPAAIRELRDLTRARTALTRDRSRQVQRIEKVLEDAGIKLSSVATDIMGVSGRAMLAALIAGTATPAAMADLAQRRMRSKIPALTEALTGRFTPHHGYLIRMHLDLIDQYGQALADLDVRIGEAMAPLAAARELLISIPGVSRIVAEVLLAETGGDMSVFPTAAHLASWAGTAPGCNESAGTVKSTKTRRGNRYAKTALGTAALAASRTKGTYLSAKYKRIAARRGPMKALVALEHSILVATWNMLTNGEFYRDPGADYFTLRIPAKTKARAIGQLEALGYRVSLQPLTDTA

SEQ ID NO: 295782 - protein, 323 aa, unidentified
MEIWVGIDISAETFDAAWVDETGRHHLKIDNKLEQFPKLLAAAPNATGFVMEATGSYYLNLALSLSEEGRYVSVVNPLRIKSHCKADMARSKSDKSDAYAIARFGSEKKPAPWSPVTKDRAAMQQLRALADKINMQITQLSNQRHAFSQSRLVCEEATHLIDSMIKVQRRVVEVTMEELEEVAKRAFPRELELATSIRGIGEETATRILTVVGDFKRFSTGRQLVSFLRISPTLKQSGTSVHSRGHISRLGSAQVRKALYFCAITATRFNPQCKSMWIRMKEQKKPTKVILMAIANKLIRQIHALIRTNKPYDPNFNNFSLAK

SEQ ID NO: 295783 - protein, 349 aa, unidentified
MLADELDYVIGVDTHRDEHVLAVVVAPVGAVVAQRSVQTSARGYAAAARFAEEHANGARVWVVEGAGHYGAGLARYLSGRGETVLEVGRGPRAERRLRGKDDSLDAIRAARTALASETLAMPRAGQRREALRLLLLARRSAVDVRREALLQLRSVIVTAPDGLREQLRGLPVLRLVVRCSRLRRSSSAPPDELATRQVLRSLARRIEAATAEAAELEREILAHVRALAPQLLDEPGVGPIVAAQVIVAWSHQGRVRSEAAFARLAGAAPIPASSGQTTRHRLSRGGDRQLNRALHTVILHRRLHDPATQAYIARRVAHGKSRRDAVRLLKRYLARHLYRILDNQTPLTT

SEQ ID NO: 295784 - protein, 421 aa, unidentified
MKEWQDITHYAGFDWARDHHAVVIVDSQGRIVADFEFKHSLEGWESFQQQTAVWPNLAIAIETNQGAAVDQLLQRGYTVYPVNPVASESYRKRKAPSGTKTDHFDGWGLADALRVDGHGWKPLQSMDPLTHQLRLLCQDEVTLIEQRTSLVNQLQQALVEYYPAALEAFDDWTCPFTWEFIIQFPTPQALVAAGRRRWEKFLHSHKLWRPETAEKRLALFAQADQFKASAPITRAKGQLAMSLCKLLRTLQQQLEEYRKQIEALFKSHPDHDLFGSLPGARKVLAPRLLAAIGNDPQRYGNHRVLQSFAGTAPVSYESGQISKAKIRWACDKFLRHTVHLWADCFRHVSHWGQTYYQKKRQQGMSHACALRCLGQRLLKIVFKMLTDKKPYDADLHARNQHKHGSWVLSLAKETLSRKPCE

SEQ ID NO: 295785 - protein, 372 aa, unidentified
MTSIIYVGMDVHTTNYTLCCYSMEDDRFFAEVQVEPDAKNILKYLARIEKQQSRDCRIVCGYEAGCLGYSLYHQLHAHGIDCVILAPTTMMTKPGKRIKTDRRDARLISKCLAFHTYSPVYIPTEVDDAVKEYIRMRDDANSALARVKQQIIAFCIRHGKIHDGKSYWTNSNLEWLSSLDLGNKILSEVLQEYLIRYYQLQEQVDMYDMRINELAQAEPYRQKVEKLGCFRGIAAHTALSFCVEVGDFQRFATAQQFASYLGLVPGECSSGDKQQYTGITKAGNSHLRKLLVETAQVFGRNATKSGKSVALKERQAKCDSLTVAYADKANARLKKKYFKIAMRSKVNIAKTAVAREMACFIWGMMTDNISCA

SEQ ID NO: 295786 - protein, 367 aa, unidentified
MKKVSIAATKQSRNISQQKLTIGLDLGDRNSWYCVVDEAGQIQLEQRVRTTAKALQEVFAAMPRSRIALEIGTHSPWISRLLSELGHEVIVANARKVRLIGESRKKDDRLDAQTLARLARIDPELLYPVKHRSAQAQADLMLIRARAGLVRARTGLVNSARGLAKSYGERLRGCNVRNMNPEKAEGLSPELQAALEPLLNAIESLSERIVEYNERIEQLAQQSYPQVALLKQIKGVGTLIALTYMLTLEDPHRFRKSRDVGCYLGLQPGRRNSGQSEPQLHISKEGDPYLRTLLVQGAQHILGPFGIDCDLRRWGLKLAERGGRNGKKRAIVATARKLAVLLHHLWVSGEAYEPLHNSSRTTVAAAA

SEQ ID NO: 295787 - protein, 341 aa, unidentified
MSDYSYFCGIDLAKNHFSLHAVDQNGKVILHKSVTRSKLLTTIANMPLMRIGVEACGGAHYWARTLNKLGHDARIMAVKYVIPYRTKGKNDLNDAVAICEAVQRPSTRFVPVKSPEQQAILSVHRMREHWVRERTALMNRMRALLSEFGLVIPVGRSSLMKHVPLMLEDAENELPHLARTVIADAYHHLGELNQRIADTEQVFDSFAKVSANVQRVMKVRGIGPQTATAILASIGNGSQFDKSRDFSAWLGLVPKQYSTGGKPRLGRITKHGDKYLRTLLVHGARTVIANLGDKQDKLSQWCRGVLERRGMNRAIVALAAKNARIIWSLLHNQTEYENYAA

SEQ ID NO: 295788 - protein, 336 aa, unidentified
MTDIEQHDSVQVFVGVDVGKGAHHAVALDRKGKRLLDSALPNDEAKLKALLGKLKAHGPVLLVVDQPATVGALPVAVARDEGVLVAYLPGLAMRRIADLHAGESKTDARDAYIIAEAARNLPHTLRSLKLADSQVAELTMLCGFDEDLAGQITQVSNRIRGLLTQIHPALERVIGRHLDHPAMLALLERYPSPAQLAALTQKQLANRLAKLAPRMGKTWATEILQALSEQTVVVLGTQAASIVLPRLAQQLAALRTQRDEVAKEVERLVLAHPLHPVLTSMPGVGVRTAARLLIDVVSRAFASAGHLAAYAGLAPVTRRSVRRSEASCPPGAATSN

SEQ ID NO: 295789 - protein, 405 aa, unidentified
MAAVMIGVDPHKASHTAAAIGPAEEPLGGIQVRAVASQAAQLLAWAAAWPERTWAVEGATGLGNLPAQQLVTAGEVVLDVQPKMAARVRLLASGNTNKNDPGDAGSVAVAALRSRAPRRVTAEDHTAVLKVWSKRYRDLGRARTQVACRLHAVLADLVPGGFSREITAGQGASMLKRIRPSGPAARARRELAAEFPGLRRLDGQIRDTRNKLAAAVQASGTTLTGIFGVGPVIAAAILGEAGDTTRFGDRDRFAACNGTAPIEVSSGGRKIHRLSLRGNRRPGHAIHMAAVTQIRYAHSPGRAYFDRKLAEGKTGKEALRCLKRQISDAIYARLVADAAPRSTPAQAEGPGGQPGNGSVSSAAGSHPGRRLFGKATPGPHPSLRPAATARRAVQATALKTSHRSP

SEQ ID NO: 295790 - protein, 369 aa, unidentified
MDERIKFFVGLDAHKDSISAAACDASREPARYVGSFRPDVNGLLKVLAKGGSPSQVSVVYEAGPTGFGLCRELRRRGYQCDVVAPSLIPKRAGERIKNDRRDCLRLAELSRSGELRPIWIPDEAHEAMRDLCRAREDAVGMRLKARQQLKAFLLRHGRTYPGKTSWTKSHMHWIAEQRFDHLGERVALGEYQLAVQSAEERVQRLTSALEEAIKGWRFEPAVAALRALRGIDTVSAAGLIAEIGDIQRFASPRQLMGYLGLVPSEHSSGNSVRRGSITKTGNGHARRLLTEAAWNYRFPPRMSTTLRARSASLPEPVRNHAWKAQLRLCARYSRLSSRGLQANKICVAVARELAGFVWAIARQAQHTLQ

SEQ ID NO: 295791 - protein, 359 aa, unidentified
MTNEENVKNIVGIDIGKKILEIVRKTSNGKIERFKTGTNADGETKLINWLKSGDTVVMEAGNQAFRIAKKLKALGYETIVLNPGEVATIYASLRKTDKEDALKLARLAERHPREELPEVSIPTDAEEDSRRLSTEQAFWTQSSTKAKNRLHSLFTQAGFTDITKKHLSTHKNREEYIKLLPERYQNEAKRLVKSLLECDFNLSEIASEMTEILKQNKGYAEIAMSMPGIGPVTTLAFLSYIGDCSRFSKGQQVSYYVGLVPRVDQSGDTIHYGKIIKRGCVPIRRVIIQAAWALVKSEYGGSLKQFYERLYPRIGKKKAIVAVARKMMETFYAMITNGELYRGVPQVFIDKKIKSYGLT

SEQ ID NO: 295792 - protein, 456 aa, unidentified
MPEKEKRTRARSSGRLSTINEHAAGLDVGSTFHVVAVRGDQDDRPVRTFRSFSGDLHQMADWLTSVGIKTVAMESTGVYWIPVFEILEARGFEVLLVNARDVKNVPGRKTDVNDAQWLQQLHQHGLLRGSFHPRAEVAQLRTYLRLRERMVEYAAAHVQHMQKALMQMNVQLHHVVSDITGATGLRIVRAIVAGTHAPEQLATYRDVRCGASEETIREALTGNYRAEHVFGLKQALELWDFHQAKVTECDIEIEAVLKSLNETHVEPEKPIPAVRHAKARNEPKFDVRSALYTLLGADLSQIHGFGPYTVLRLVAECGDDMKKWPTAKHFTSWLTLAPGNKISGGRVLSSKTRRSSNRAAALLRIAAVNIGKTQTALGAFYRRLSARAGKAKAVTATARKLAVLFYRALRFGLAYADPGAGYYEERYKRRAIENLQRRARGLGFTLVEIPETGGVS

SEQ ID NO: 295793 - protein, 432 aa, unidentified
MTAHPYDLVIGLDRSDRKADLCLIDTRTGQRRPAVIDTAPEALWEWLRELRQHHPGARVGLCLEQPAVHLIPFLETYDWITLHPINPITLQKYREAFVTSRAKDDTKDAEYLADLLLTHHAQLPVWSPEDSATRAVQQLVVHRRAVVDERTGLSNRLIALLKQYYPQALTLCGEDLWRPLATAFLLKWPSLQSVQKAKPATLKTFYHLHGSRSTRLQTERLALVAKAVPVTDETAVIASFVLRVQLVCRQLQLVQRTVTEFDQQIAAAYAAHPDRAIFASLPGAGPVFQPRLLASLGSQPERFDSAASLQCYTGVAPVTKRSGGSCYIHRRYCCPKFHRQSFHEYAKESILWSRWAAAFYLQQRTKGCAHHTAVRALAFKWQRIIWRCWQDRKPYDERLYEAALRRHGSPVVALFDRVELGKSPWKNPAKKN

SEQ ID NO: 295794 - protein, 426 aa, unidentified
MAKVEHTSDALVLVGIDISKHRHEVLIAVPGKTRRRRLTITNSTDDFMRLIAILRESGLPVRIGFEATGNYHRVLMYHLGVAGFDLKLVSSVALARTREALHNSWDKNDPKDAQVILHMLQIGAVQIFQDPMVAGTNDIQELSKTHDAVSRSKTELWHRILTHYLPLYFPEADRFHRSSRTDWFLAFLEMFPSPHMISAMTKEEFIQTAWEVVGRKVEKSLLLSDIYETAKVSAGLPVAPDSDALRMFRMMLAEGRSLIRQRNAIEDRAVELLGDRPDYQLLRTIPGIGPINALTILAETGDLRRFHHHRQFLKFCGMDLATVQSGMFRGRSKISKYGNARLRRTLWLAGQTAVLKKANSFRDKFERYIAQDRHNPDLRRKAYTAIAAKMARTIHAVIKSGEPYRPFFEGTSPSGRTSLSKGRGGA

SEQ ID NO: 295795 - protein, 340 aa, unidentified
MTITTVGIDLAKNVFAVHCVDQNGKTVLVKPKVSRAALPGLIAGLPPCVIGMEACSGAHYWARVFRQYGHEPRLMAAKFVSPYRMAGKSGKNDAADAQAICEAVRRPHMRFVPVKDESQQAMQCLHRTRQGFIEEKTATYNRLRGLISEFGVIAPQSTDALRRMVSVQKSSLPLQVQQCVDDLLEHVDRIEANIAEYDRILSRMAKTDHRSQRLMELKGVGPTTACALVACIGNAHDFKNGRQLAAWLGLTPSQYSSGGKSKLGRITKAGDSYLRTLLVQGARSVLIGAEKRTDSFSRWVCTLVERRGYWRAVVAIAAKNARLCWASLHYGDDFRLYSAS

SEQ ID NO: 295796 - protein, 429 aa, unidentified
MKIIYPRVCGIDVHKKFIVAVICISESVEPVYLKKRFSTFHNDLIRFRDWLIQNDCQNVCMESTGKYYIPVYNILESHISNIVVANPKWVRAVKGEKDDDKDAKWIADLFKLGIVKSSFIPQKDFRILRELTRYKYKLVNMRSSEKNRYQNALTSGNCKLDMVFTDVFGKSASNIIDLILSDNPYTDEDILSKVHKNCKASPDMILNSINGTDLTPVQKSRIELVNNHIKQLSSNIQRLDKLIDLMIEPYEDYISFLCQIPGVSRNSAITILSEIGVDMNQFTSTRRLTSWAGLTPSSNQPAGKKKSVRISRVGVYLKPCLVEVAHAAVKDTNHPYYANKFNKISKRRGKKRAYIAIARKILVAAYHMLLTGEIWNPADLAEVETPVEQRIKYVKNNLKSDIKQLLDIGLTVEELTLMIQQNANNIATQ

SEQ ID NO: 295797 - protein, 350 aa, unidentified
MPCSTIRVVATIGVDMGKNTLHMIGLDSRGAIVLREKVSRGRISSRLANLPPCLIGIEAGMATHYVARELAALGHDVKQVPPTYAKPFRQGHKNDFRDAHAVAEAVQRPTTRFVPAKTDEQLDLQALHRVRSRLVSERTAVINQIRAFLLERGIIVRQGLRFLRQALPDILAKRTDVLSPRMVRIVADLASDWRQLDERIEVVTDEIETLAKSDSSCRRVMTVPGIGPIISSAMIAAIGSGAAFARGRDFSAWIGLVPKQMSTGDRTILGRISKRGNGYLRMLFMQAARVILLRPASWPKHGFGVWLARAAQRLHPNVLASALANKLARIAWTVLAQQRSYEARITNAAA

SEQ ID NO: 295798 - protein, 356 aa, unidentified
MDVDKEKIVLARLGAGRGAEVQEHVIANTPSAVKKHFTVLLADAEVHASYEAGCFGFGLYRQLSAMGVAVLVAAPGLIPRKPSDHIKTDRRDARTLAMALRAGQLTGIYVPTAQDESVRDYLRMYEDLRGDLRICKQRILHFLLRRGIRYDQGGPWTVRHKNWLSSVEFSDPRDRKTLDMYLSTMQEIEGKCSEAAEEVEQIAAQDRYREQTKKLTAFKGIKTLIALSFVADIGDFRRFPNARQFMAYLGVVPSEHSSGNKRRQGGITKAGNSHLRRLLVEAAWHYRSYHPSSRVLTERRKGVDPQILTYANRAGRRLSRKYMHLLLRGKRSQVAVTAVSRELAGFIWGAMTGQVA

SEQ ID NO: 295799 - protein, 348 aa, unidentified
MAMTIVEAAPTVVGGVDTHLDVHVAAALDGIGGLLAVESFPATAGGYRKLLAWMAGFGPVGRVGVEGTGAYGAGLSRFLRRHGVEVIEVDRSNRQARRQHGKSDPADAIEAARAAHNGRARGLAKSRDGNVEAIRALLVAKRSARVVRIKTVNQIRQLSFTAPEELRERMRGLGTVALMAEAASLRPRPGGGTVTYATKVALQTLGRRAVSVNAEAARIDELLGELISDTAPSLLDVFGVGVDTAATLLVAAGDNPERLRSEAAWAHLCGVAPIPASSGKVVRHRLNRGGNRQANSALWRIVMVRMVHDPATRTYVERRLKEGRSRLEIMRVLKRYVAREIYRHLPRG

SEQ ID NO: 295800 - protein, 400 aa, unidentified
MDVHEKKVDVCIAHGPFDKPPKFEIRTFSTMTSDLEEITTWLKKYEVTTIGMESTGIYWKPIFNVMEGEFEIVLANAQRLKAIPRKKTDIIDCKRIANLLRYGLVPNSFIPPKEIRELRDLNRTRRKLVGMMTSEKNRLIKVLESANIKLSSVVSKIYGVSSLAMIRSLLEKDKLSGEEISLMAKGKLKKKADLLEKALNGKITDHHRFLLGMHLENIDHLAKQIKKMDEEIERKMVPFQKESKLIQTIPGISDVNASAILAEIGVNMSQFPDEAHLSSWAGVCPGNNESAGKKKSGKTQKGNSFLKGALTESAWAASKTKASSYSAIYHNIVRRRGKKRALVALAHRMLIDIYYILKTGEPYQEIGAKAVYERTSKRREQSMIRSLERAGYSVAKAATA

SEQ ID NO: 295801 - protein, 425 aa, unidentified
MNYKQNEKINQVKESTLVVGIDIGSTTQYARAFDWRGIELGKVFTFSNSREGFEAFKAWMQHLQDKYRKSDVIVGIEPTGHYWFDLGAYLEDEGILLVMVNPYAVKQTKELDDNSQSKNDRKDPKVIAKLVTEGRYSAPYTPDGVYADLRIMVANRKRLIREMTQIKNRFARWFAIYFPEYTDVFGDYEAQSSMLLLKKVCTPEAIVELGAEKINQIWRDAKLRAVGMKRATTLCETAKRSIGLKKGSSAARYEMKLLLEDYEYKKAQLDAVMEEIEKLCRKIPESEQMLAIKGIGVITVAGFLAEVGDVRRFESPRQIQKLAGLSLRENSSGKHKGQTTISRRGRSKLRAVLFNAAIPLIAKNPEFKSLHEYYTTRANNPLKKKQSVIAISCKLIRVFYAILAKGVTYDAQKLISDIHRQPQVA

SEQ ID NO: 295802 - protein, 434 aa, unidentified
MLTSDPMTPFRGAASAALRREQNRAYADQFAGLVGIDCGRTFHKLVARARDGRRHQAVRVDVNRVGFEAAHTYLRRTFPGIRPSEMLVGIEFAGHYGATFAQFLRLQGYAIVTVLSSVTKKLREVEDNSPRKDDAKDAGQICQLVSDGLFVGHAVLSDLVSQMRVLSTERLRLGVEETRLRNRLRSALDLAFPEVLEAFATLRNRTPLAIVARWPLAQDLAAASPRSVHAQLRLSSQNHIGRERTKQLSADARTSIALLDAAPARRAEIQRMVARRAFLMEQMAACEAELAELVEAHAGAKALCTLPGIGVVVAAALVSEIGTPETFLSPRQVLKLAGMNLAGKSSGTSVRGRIRQTKRGRPLLRRQLFLLAGRWCQSRGLYRDYYLAYVARNGGSKIKGLAAVARKLVPLVLHIIQTGEPFDAARWGRQRHVA

SEQ ID NO: 295803 - protein, 476 aa, unidentified
MNSKTKKANNQVNSVINVQEQKEMVEKANHILSEMKSFTWRDLETQGKFSKNDKLSFISDDMLILGCDIGSETHYVRAIDTRGRELSRKALAFDNNAEGFQKARDWAVQLAAVNDKKQIVLGIEPTGHYWFCLAAWMVSNGISVVQVNPYAVKQTKELEDNSQQKDDRKDPKLIANLVKDGNYGMPYLPEKVYAELRRLSMFREQLTEDRNRNMNRLHREMKIYFPEYKDAFGKIDGAFCMAVLKEAPFPEDILRLGTEGLREIWHEAKLRGRGYSRAAEIVKYAEKSIGLKEGTAAGKEAVRWFAEKIMELNEELEKTENSLSEKCKEIPHAENVLEIPGIGGKILSGILAEIGDISRFDDAKELQKLSGLGLVSCSSGKHKGETRISHRGRKRLRYWLFQAARSAVSHGEEYKRIHVHYTTRAGNPLQKMQSLIVIACKILRVIYTMQKTGKRYDPEKLQKDIRYPENVQTAAA

SEQ ID NO: 295804 - protein, 400 aa, unidentified
MLSIGIDVSKGKSTVCGMKPGGEIVYTPFEIQHTREGMSDLVSLLRGSGEEVRAVLESTGSYHCPVVAALLENGIFVSVINSLRMKRFCSQSIRKVKTDRIDAMQIALYGLAYWQELQPTRLPEDTYRELQLLARQYYQMTSMLIKAKVDFNAICDQVLPGMQELMNDHAGRHKLSDFVLRYHHATHILEMGETRFRKDYCKWAEKKGYRNCERMAVLIFATAQNGIPVLPNAPSTQIVITEAIRVLHTVEASRDAILTQMQALAKTLPEYSLVREMPCIGDTLAPRLIAEIGDVRRFHSKRALIAYAGIDAPPYQSGKFCANNRHISKRGNRYLRKTGYEVMQSYVMHKPANDPIFTFIEKKRGEGKCGKLAMVAGLNKFLRVYYGKVTELYRSSSATE

SEQ ID NO: 295805 - protein, 346 aa, unidentified
MKKIFIGIDFSKETFDAALLKGSSVEEISYNKFTNDLKGCDQLLEWIKSMTNSPKKTWMLCGEHTGIYTHVLSYYLNSKGIDFWLEPAMQIKYSKGMCRTKNDKIDAKNIALYAYRFQDKAVCFKIKQPSIQALKDLMAYRERLLKAKMSLSVSCRELKRISASGSVSEYIYQDSMDEVETLRKKIKQVEKTVLGIIEADGDLKENYDLMLSVKGIGIINAVMILIATGNFTLFTEARKFACYCGVVPFEKQSGTSVMGKTKVSHLADKNLKRLLSQAARNAAKYDMVLKEYYQRKKQEGKTDRLIINNVRNKLVHRIFAIIKSKRKFIDDYVHPLQKMQGNADAC

SEQ ID NO: 295806 - protein, 337 aa, unidentified
MGESSKTLYVGLDVHKESIAVAYAPEDRGAEVASLGSIGTRQCDIDKLIRKLQSKGATLVFVYEAGPCGYWLYRYLTRTGLSCHVVAPSLIPKKPGDRVKTDRRDAITLARSMRSGDLTAVYVPQIEDEAIRDLSRGREDAMRDLKATKHRLKAFLLRQDIRYEGRANWNAAHLRWLSEVVCPTRAQQIVFQEYVRAVTEQHERLQRLETELHEEVKGWRLYPVVEAIQALRGVELTGAVIVIAELGDLTRFDTPRKLMSYLGLTPSEYSSGERRRQGGITKAGNSHARRALVEGAGAYRYPAKVSRHLQLRLEKLPARSRPSAGRRRCAYASGIAS

SEQ ID NO: 295807 - protein, 408 aa, unidentified
MNTLYVGIDVSSKSNVVCLMLPNGDTFSKFSVANSHDGSSQLVKRILAVLSSQSLDTVKIGLEATSVYGDNLVYFLREDASLVPFNSKIHVLNPKQVNKFKESYNDLPKNDYVDAFVIADCLRFGRINKEVYTEDYHYLALKNLTRARYYTVCNLVKEKQRFMNVLFKKYSTMTQEKVFSDTFGTTALAVYEEFESAEALAAMDLKELTEFIIEKGKNRFPDPDSVAKAIQKAARSSYRLPKTINDSVNQVLSISITSMKALEAQIKEFDKAIATQMELLPNVLTSIPGIGPVYSAGIVAEIGDINRFKSHKQLAKYAGLAWKQHQSGNFEAETTRLINSGNHFLKYYLCEAAFSLVRCDKEYSDFYHLKYKEVNIHKHKRALVLTARKFVRLVFALLKDNRLYIPVK

SEQ ID NO: 295808 - protein, 355 aa, unidentified
MTESSDYESVQVFIGVDVGKDTHHAVAINRSGKRLFDKALPNDENKLRSLISDLKQHGQILLVVDQPATIGALPVAVARSEGVLVGYLPGLAMRRIADLHAGEAKTDARDAAIIAEAARTLPHALRTLKLADEQIAELSMLCGFDDDLAAQTTQASNRIRGLLTQIHPALERVLGPRLDHPAVLDLLQRYPSPEKLASLGEKKLAAQLCKLAPRLGKRLAADIAQALAEQTVVVPGTNAAAVVLPRLALQLITLRKQRDEVALEVEQRVLAHPLYPVLTSMPGVGVRTAARLLTEVACRAFASAAHLAAYAGLAPVTRRSGSSIRGEHPSRRGNKALKRALFLWILSPGLTTPAK

SEQ ID NO: 295809 - protein, 414 aa, unidentified
MKYNKKMEEIKGVKVFAGVDIGKEAHFMSLIAKDGEVIESGMRIVNSKEGFKEMLEMLKSIGTEKEVAVGMEPTGHYWKPLGYYLHEKGYRVYLVNPYHVKLSKEMRDNSQRKTDKKDSRLIAYLLMEGKFLNSRLLSGNYEELRRLTTARERIVQEIVRCRIRLISILDEYLPEYERCFCKITTKTSLKLLNKYGIRGLREKSNTKEVLEDIVKFSKHKISEARALEIVGKLENTIGLKEGLKGAEIELKLWIKQLEGYMADLKNIEEEIERVLNETEESKYLLSIKGVGYITAAIVLGQTGSFRNFSNAKELEKFAGLDLVERSSGKRIGEKSVSKRGRKLLRHGLYRVAIVAIARCKEFKALYEYKVNILRKNKMVAVTDITVKILRIMFAVVKNQAMYDGNLVLKAIAYS

SEQ ID NO: 295810 - protein, 368 aa, unidentified
MSDIIRIGVDTSKSVFQLHGVDAAERPVLRKKLRRRDFLSFFAQLPPTRVGLEACGGSHYWARELMALAHEPKLLPAQHVRPYVRRNKNDKQDADAICEAMSRPRMSFVRIKSAEEQAAQMLMTTRQRLIDYRTQLINTIRGHAAEFGLTAAKGPAHVEPLLARVAKDVTVPALAKELFAIHGQEYDRLKLELREIEAKLKAWHRGNEMSRRLAEVDAIGPIGGCLLAIKAPDPQAFHCARNFAAWIGLTPKDHSTAGKMRLGVITRAGDEALRRTLVVGATSVIKQVRNGKAHPSPWLRDLVARKPPKLAAVALANKVARIAWKLMVSGERYDAARAGIVSPTARVAPCSRRQGRCAPPAAVACGQP

SEQ ID NO: 295811 - protein, 368 aa, unidentified
MKDTIKFIGLDVSKEKIAVAIAEQGYGEARYYGMIPNTPEAIRKLVKKMGEPHTLRVCYEAGPTGYPLYRLLTKMDVHCDVIAPSLIPQRPGERIKTDRRDSLRLAQLYRAGELTSIYVPTSEDEALRDLVRCREDAKEDQLRAKHRLSKFLLRYNIHPPSGVNKWTVKYFRWLDTLKFESSKLRVVFQEYYHQIKEIEQRIQRLEEEIKLQSTEGVHAPTIQALQALRGVALITATSIAAEIGSFKRFANAKQFMAYVGLIPSEYSSGESRKQGKITKTGNRHVRRLLVESAWSYRYQPAVKRELKRRLEGQPPEIQSISWKAQNRLHKKYYRLLARGKESGKAITAVARELAGFIWAVTQELEEVR

SEQ ID NO: 295812 - protein, 448 aa, unidentified
MPLDCCQESTRVCVLAEVPPDRRCEVMVASRAERGRDAMEVLFDRVAGLDVGKETLTVCVRTPGPRGGRRSQTRTFKTTTGSLRVMRDWLVEAGVSIAAMESTSTYWKPPFYCLEEVMEVWLLNAAHMKAVPGRKSDVRDAEWIAQLLEHGLLRPSFVPPPQVRRLRMLTRYRMQLMGDRRREIVRLELMLEDASIKLSSVASSLKTVSARAILTAMIEGETNPLTLANLAKGKMRRKIPDLAQALTGTFDAHHAQLARSMLRRLELVESALAELDAVIAAACQPWQHQIDLLQTIPGVGPKVAQVIVAETGADMTRFPSAAHLAAWAGLAPAMHESAGKQTPAGKRHGNKWLTAMLVEAAGSVGRMHGKNYLAAQHARLLKRRGMGRTQVAVAHSMLVSAYWMLKRDEPYHDLGADWHRRRNDEAHTRRLVAQLEHLGHTVTINPAA

SEQ ID NO: 295813 - protein, 315 aa, unidentified
MVEQVVVGIDVSQAKLDVALLPGGEQFTVSNDRHGVGELLRRVRPLAPSRVVLEATGKLEQLAVCELAGAGLPVVVINPAQVRHYAKARGKWAKTDPIDARLIAEFARDLEPELRPLPDAQTQALAALCQRRNQLLEMEQMEKSRLQRAPRANQQSIKAMLRFVRRQVEQVEKQIEHSIRNSPLWQAKRELLESMPAIGKVNSSTLLARLPELGQFTRQKICALVGVAPYDDDSGQWHGRRHIAGGRAGVRQVLYMATLSAVRCNPELRDYYQRLLGRGVEPKAALIAVLRKMLTILNAMVRDNTPWRPPCPTHA

SEQ ID NO: 295814 - protein, 416 aa, unidentified
MNAVGIDVSSRKSTVAVLRPFGEVVRLPFDVAHNTEGLASLAEQLKALDGETRVVLEHTGRYYEPVAKALHEAGLYVSAVNPLLIKEYGANSLRRVKTDKADAVKIARYALDNWADLRDYTPMDTIRYDLKTLNRQFQLASKQRTASANNLIALLEQSFPGIRKCFDSPVRSDGTQKWVDFIHTFWHVECVRKQSLNAFSERYRKWCKRHGYIFKQGNAVEVYSLAKNAVVLVPKSEVTKVLVQEAANQLTSISRSVETYRAEMERLASTLPEYPVVMAMYGVGKSFGPQLMAEIGDVRRFERKQSLVAFAGIDPMPNQSGDKNVRSNKSSKRGSPYLRKTLFNIMGIYLKCSPQDEPVYKFLDHKRSEGKPFYVYMTAASNKFLRRYYAQVRDYLSTLDDLPPVDMDSTGLKPSD

SEQ ID NO: 295815 - protein, 346 aa, unidentified
MLHAGLDLSRRKVDVCLLSTQGEIVDEWASPPDADGLRGLAARAAMRGPAVRGVIESMNGARFVHDRLEEHGWDVLIADATKVKGLAPLACKTDKIDARVLATLSARDLVPEIWLPDPSIRRERELARFRLHLVRHRTTLKNRIHAALIAFGHPCPVSDLFGHAGRELLNRLAIPDPWRRNIEVSLRLIDDLELQIAQLTVQLKRQGADHRYIPLLVTAPGLGWINAFTVASEIGDIGRFASPAKLCGYTGLCPRVIQSGASDRRGPISKHGPKYLRWALFEAALNACKHPYYAERYQHTKRRLGRQRGPKVAQIDLARRLTEAIWHMLTNNQPFAPAGAPFRLAA

SEQ ID NO: 295816 - protein, 338 aa, unidentified
MELYCGIDLHSTNHMITILDETDRRVFERRLTNDLQLTRRTLEPYREHLVGVAVESTFNWYWLVDGLMDFGYPLHLVNTAAVQKYSGLKHCDDRHDARWLAHLLRLGILPTGYIYPKEERAVRDLARQRGRLVQLRSSQVTALQTQIWRVTGEKLGARLLKSDADVGWPALNYEEQRIGVASGRRVIATLNAEIDSLEQRLLQRVKLARPFQALRTVNGIGEILALTIMLEVGDIGRFASAGQFASYCRCVESIHSSNGKRKGEGNRKNGNPHLAWAFHEAAHFAIRYLPAAQRFYQRKARERNAIVAMKALAHKLARACYYVLRDGVAFEPERLFSN

SEQ ID NO: 295817 - protein, 484 aa, unidentified
MEATYRRCCGIDVHKKSVMVCVLPPAGERKGEPRKRKFRTYTRDLKQLRAWLKNCKVTEIAMESTGQYWRPIWNLLEGHFEKLLLVNPQHIKGLNGYKTDPKDARWIADLLESDRLKGSWVPPRDLRELRDLTRQRVHVMEDQNRVKNRIEQLCQTGNIKVSSVATDLFGVSGRRMLKAIIEGKRDPGWMADYARGTLRGKRAELQLALDGSFTDSQRWLLDKELQHLEWLEKQVQGLEQEIERRVTCQEEPMRRLMTIPGIDRKTAWTLVAELGVDMSVFADAQHLASWAGLCPGNRESGGKRMSGRTRKANSYVRRAMCQSAWAASHTKGTWLNSFFRRIQVRKGAPKAVMALAHHLLIVVYNVLKRNEEYVELGGDHYDQRNKPKLVSRLVERLTRLGYHVDLKPIESHSSEQPNPVADLPSEQPQEIAAIANDAPAAAEAMAPRTPKRGRPCKCIDRGIICKHGRAKEVNSLKEHAHTGG

SEQ ID NO: 295818 - protein, 346 aa, unidentified
MMIIGCDFHPSWQQIAWLDTATGETGERKLVHASGEAKKFYRQLAAPVLIGMEATGNSQWFVELAEDLGHEIWVGDAAQIRASYVRKQKTDKRDAAHILKLMVEGRFPRLWTPDREQRDLRQLVVHRHKLVEIRSRVKNELQHLSLNKGMQKKRTLWSQAGQKLLRELALKPWAACRREDLLGLLAMLNQQIGKLDAAVQHAADGHPQAQLLMTQPGVGPNTALAYVLTIGDVTRFPRGKQVASYLGLIPREHSSGGHQMLGSISKQGNRLLRSLLVEAAQIAVRFDPGMKKEYLHRCHQKPKGVAKVAAARKLAVRLYWMLRTQVAYPEIVRIESSPRVALVGAS

SEQ ID NO: 295819 - protein, 423 aa, unidentified
MNRSTLCIGADVHLDEIVLCAVDQADSHEVTDRFRVTNNLPGAQAAATTIAQLATDLGYTHIEIAWEATGMLWIPFHRYLSRCPQLQSFELKLVCLNPQLVTKFKDGLVLRRPKNDPLDASAIAARLRFGELPLSYVPGDFWQGLRRLTRHRFHLSRTLAREKMRFQTYAFLKCSDWKRVKAFADVFGATSVTLLTEYTVAELTQMTHDQLVDLIGRRGRKHFADPAATARKVRQALRSSYPIDPQMDELVTATLATAWDHIRFIQRLMKRLDQHIARAIEPVPNPLITVKGLGAVITAGLLAEIVDITRFAEHKHLAQYAGITWEKRSTGKFVSQNTRLTKVGSKYLRYYFILGANTLRQFNLEYKAYYWRKHDEVAKYQHKRALVLTARKLVRLVHALLTKNVAYVRPQSLAIVQEDGALQ

SEQ ID NO: 295820 - protein, 362 aa, unidentified
MPNATRWVGLDVHASQTACAIFDSETGEVITRRVLGRPHEVMGVLLELERPVRAVYEAGPTGYGLARRARAAGIDMQVCAPGMIARSPTERIKTDKRDAMKLARLHAAGQLVCVHVPSVEHERLRDLARCREDARQDLMRAKHRIGKFLLRRELYYPGRGRAWTKGHRAWLASLRFADAASEATFCDYLHAHDTLAARRDELDRTIDTLARECSWAETIARLRCLHGIDTLGAFGLCGEICDFQRFTRPTALSAYLGLVPSENSSGDKRRQGSITKAGSTLARRLLVEAGYHYRRPPRIGGALLARQDGAEAWVVDLSWRAQRRLHGRWQRLRSERRKHNGIAAIAVARELAHFCWELATTD

SEQ ID NO: 295821 - protein, 349 aa, unidentified
MTTQRLSYVGQSVYVGVDVHKDTYAVTCVCNKQIVKTATVKADPAGLTASLSQWFPGARLSTAYEAGFSAFVLHRALTKAGIMNIVVNPASIAVAANDKVKTDRRDSKKLAIDLSDGRLQGIYVPTEDEELARLLPRTRAQIVEHRATIARQIKAKLHQFGLIAPASRRLISNRYLREIDAWPLPPDLRVSLTFLAEQWRFATRQLIEMRRLLREQAKAHPAIEQVSRSVPGIGEVVARTLATELGDMTRFANERALFSYTGLTPSEYSSGPSVRRGHISRQGSSRVRHLLIETAWRALPRDAVLKEIFDRIAATRGKKRAIVAIARRLTGRIRACFRQGTTYAVGTYA

SEQ ID NO: 295822 - protein, 436 aa, unidentified
MTLINFVAANQKYYAFNLLSVFIMVFWSVQYLLQHLLVQTQVSHQLLQPLILILQLPQTPQFRHARPGKFFLPVNGMDYFLPLRLTVRNVLTRRITMNIVFLGIDLAKNVFQICGLNQAGKPVYTKRTGRKELLQTLANIPACLIGIEASTGAFYWQREFEKLGHKVKVISPQYVRPFVRGQKNDGNDAQAIAVALMQPTMQFVPPKSPEQQDIQALHRARQRIVNHRTATVCQIRGLLLDRGIPIGSAVSRARRAIPLILEDAENGLSSRMRRTIAELYDLFNDLGRRIHFFDKEIETVFRQSEACPRIAKVKGIGPKTATAVVAAIGKGTEFKNGRHFAAWLGLVPRQHSSGDRQVLMNMTKKGDKHLRTLFIHGARAVVRVATNNNDGHMNQWVNQLKERRGFNKTTVAVANKNARIIWSMLRNDTGYQVVCN

SEQ ID NO: 295823 - protein, 378 aa, unidentified
MTKASVVSTAKSSSLRSPSGRKLGGAKPKPSSKGGLRVREQQYVGIDLHRRRSVLVRMNDAGEVLAVSKIDNDPLALSMAVAEAGPDPEVILEACYGWYWAADLLQAEGARVHLVHPLGLHWDSRRVKNDVKDATELAHRLRRNDVPEAWIAPPAVRELRELVRYRAKLTALRTSAKAQIHAVMAKLGILPPQAEMFGPTGQVLLDEMDFPGPYGLRVESLRDLLEIYDRELALVEREIAGWLKDDVGYRAIQALHGIGPITAAILVAEIGDIHRFASARHLCSWAGMTPKLKESDTNSNRGKISKQGSTLVRWALVEAVARYHGGAPIAPTYRRIAERRGGKIGNKIAKVAAARKLLTLVYYGLRDGEIRCLYNEAV

SEQ ID NO: 295824 - protein, 314 aa, unidentified
MSTPVFIGIDVAQARLDIAIRPGSSFSSAHDESAIVMLVEQLRALRPTLIVLEATGGMEIPLTSALATAGLPVVVVNPRQVRDFAKASGQLAKTDALDAQTLAQFAEVMRPTARPVPDEQTRALAALLTRRRQLVEMLTAEKNRLLSAPPPIRKRLRTHIAWLERELHHTDTDLSAAIRQSPVWREKDELLRSVPGVGPVLTSTLLANLPELGTLTNKQIAALVGVAPLNRDSGTLRGKRTVWGGRAQVRAVLYMSAIVAARFNPVIRAFYQRLQRAGKAKKVALTACMRKLLTILNAMLKHRTPWRDMEAHHA

SEQ ID NO: 295825 - protein, 333 aa, unidentified
MKKPKITVGIDVSKKKLDVTIVLNPKDSKHLHFIITNDKKGIEKMLNKIKALKIDKEELLVCFEHTGVYTMPLCFVLQEKQIQYCMVPSLEIHRSRGILRGKTDKADSKMIAFYAITHAHKLKFISLPEEALMKIKVLLSERNKLVKTIGIFRKTKEVKGFLPESIFEDSLQINQQTLAFLRQQLREIDKLIQDLIKNDKVLKNKYDLATTVPGVGVQTAVYLLVITRAFTAFENWRKLACYGGMAPFEYSSGSSIRGKTKVSQLGNKKLKSILNMAALTSRKYDPQIKSYYERKINEGKNPMSVTNAIKCKLISRVFATVNRGTPYVKMEAY

SEQ ID NO: 295826 - protein, 317 aa, unidentified
MEVSLIFVGIDVSKAQLDVAIRPTGEKESFANDKAGIKALVKRLAKIEPTLIVLEATGGYERQVTRALVSADLPVVVVNPRQVRDFAKATGQLAKTDSIDAAVLAHFAEVIRPELRPLPDVVTLELRALTARRRQILEMIAAENNRLAMTSKAVAKRIDAHIRWLEQELERANQELDQAIEQSPIWKENDELLRSAKGIGPITSRTLLAELPELGTLDRKQISALVGVAPFNRDSGSLKGRRSIWGGRAPVRCALYMATLVATRRNPVIRDFYKRLTAKGKLFKVALVACMRKLLTILNSMIKHKTRWSETFSLHTT

SEQ ID NO: 295827 - protein, 416 aa, unidentified
MDLVHPRCAGLDVSKRDAKLCVRVAGAGRSGATETVTTWGSVTNQVLALRDHLIAEQITSVVMEATGDYWKPFYYLLEDCPFELMLVNARHVKNLPGRKTDVSDAAWLAQLGAHGLVRGSFVPPEPVRQLRDLTRTRTTLMRARAKEIQRLEKLLEDAGIKLSSVASDISGVSGRAMLEALIAGQRDPGELADLAKRRLRSKIPALTEALTGRFGAHHGFLARLHLDLIDQHSHAVDELTKRIEVVIEPFRSARDLIVSIPGISTLVADVVIAETGADMSRFPTAGHLASWAGTCPGSNESAGRIKSTKTRPGNPYLKGALGIAAMSAARSKDTYLAAKYRRIASRRGPVKAIVAVEHAMLIAIWHMITNGVFYEDLGGDFYSRRNPDKTKQRALDQLKQMGYDVTLTPSPTSMAG

SEQ ID NO: 295828 - protein, 344 aa, unidentified
METKRRYIGVDLHRNCFTACVRLENGREYLKQWQLEDLSKFATKLRPTDQIAVEVTGNTRLFHDAVSAHVERVVAVNPNQFKVITHSVKKTDPNDARNLALYLSKDLLPEVRMKDKTQAQIASLTQTRDTMVKLRTALKNKTNNVCSAHGVNLNKESLASEKGLRAVLDMKFDVLVNLELKIIVDQIRSLNKSIAELEETISKEGTKLKGHRNLTSIKGIGGLSGSILLSIIGDINDFAEEGNLAAYFGIVPRVSNSNETEHSGSITKRGSKLGRTTLIQCALIAQRYSPYLKKYYERIKNRRGTGKAIVALARKFLGIIYRTLKNNWVFADFPNFVLAEPAKA

SEQ ID NO: 295829 - protein, 370 aa, unidentified
MKPKLSDYELATIAYHRDTLGVNPVAVDVASRVMQVCYFDSDKKLLKNFQLTRSKFFEFVDKATGPMLFGIEACGSCNYLSRYFESKGHQCRIIPASKVKAFLKLDKNDKIDATGIFKAMLSSVESIPAKSLENQLLMNLFTIRDQLIKQHTQCINAAHGILYEHGIVAGGAGVETSAKISLGFTDAQESFEHDPMASAHFSVIKNAVFNILDNLKEQIDTINKYIQKYGSSNKTCLNLATIPGVGIQTAVALNTALGDPERFHSARAFSAYVGVTPIITGSGGKITVMGIRKSGIRSLKKSLYMGAMVYLSNAMKNGTESSWVKDRLKTKRKKVIICAIMNRLARIAYAVAKNGETFDETRCNLIKKLR

SEQ ID NO: 295830 - protein, 377 aa, unidentified
MSTVRFVGLDVHAETIAVAIAEPGGAVRSVGIIPNRLESIRKLLGKLGPVQHLKVCYEAGPTGYVLYWQLTALGVACEVVAPTLVPVKAGDRVKTDRRDAEKLARCYRSGELTAVWVPDAAHEALRDLVRAREAAKKDQLRARHRLGKFLLRHGRRPTQAGKAWTKKYLEWIKTHVRFDQPALEATLAHYLQEVDHAASQILQLEKAIDEAVAQADPEIRSVIEALQALRGVAQMTAATIVCELGRLSRFPSPRQLMGYSGLVSREHSSGNRIQRGAITKTGNAHLRRVLVEAAWAYQHRPNVTGFLLRRQKSLTLSEEVKQMAWKAQCRLHKRYLAFARRGKNKNQIVTALGRELLGFVWAIAVHTEAQRKLAKAA

SEQ ID NO: 295831 - protein, 317 aa, unidentified
MTHTTTLTAGIDTAKDKLDFAVHGLAVHFSTSNDRVGWQKIAAECKRLGISRVGIEATGGYERGVTQHLRQAGYTVLVLQPMQTKAVARLNLARAKNDRIDAFLVAAAAHLTQDPGLEHDPRMLDFADHLTFIEQVEEDITRAKTRIEHTHIPRLRRIATQKIKSLQALRDKELQRLAASLRTQPDLARRLELVLSIPGIGERTAIAIVVLMPELGRINREQAAALAGLAPFDNDSGQHRGQRHIAGGRGRLRRSLYLAALAAAFRWNPALKDLYQRLIKAGKPHKTALVACARKLLIFANTVVQRGKPWIKNQQCG

SEQ ID NO: 295832 - protein, 422 aa, unidentified
MRAVGLDVHLDFCEVAVVEDGEIRSAGRIETKPEQIELFAGSLGPDDRVALEVTGNAWEIARILEGHVAQVLVVSPSDTGIRQARAKTDRLDARTLARLLAAGSLDAVWRPDRQTWVMRRRLSRRSQLVWARSRAKNEIHAVLMRQLVGRPPVSDLFGVKGRAWLAELELASEERETVDSAMRQIEFLDSEIAEVERLIAADALESPEIRRLMGVPGVNVIVAASFLAAIGDIHRFENPRKLVGYLGLDPRVRQSGSGPATHGHISKQGSVRARHALVEACWSAVRQPGPLHAFYERVRARRGHSVAIVAAARKLACLFWALLTREEDYAYAQPSLTKKKLRQLELTAGAPRYTPKAAGIYSANTAVREAERELARQAEVAYARTVHDWHAAQANKMGASATPGRASNKPSKGKAARQTTSP

SEQ ID NO: 295833 - protein, 399 aa, unidentified
MRAVFGIDVSKTSSEVAILVNGEKVHGYTILNDAIGFNRLLGDLKTVHNPEIIFEATGVYSRRLQAFLEECGYAYTRLNPLEAKKQLDSLRVRKTDKIDAEKLAKSQFVHNRKPTYVQEEVYQHLHDLSRFYQNMTEDLVRAKNRLHKVLQVTFPELENLLSTPTGEQYWNLVMAFSCKEFVLSLSQSDLYEIIRQSTSKRISEKRIAYLTDKLIELAKQSFCAVKKTSPMLEEVRYYAQELLRLSERRQVVLNDMVALAQPLPEYDILRSIPGIAETTATSIIGELGDIRRFQSTNQINAFIGIDLRHYESGNFLAKEHITKRGNPYARKILFKCIHNIASASHTNPCHIADFYEKRKRQSTIASTKPHTIASIHRLIRTMYYLITHNKLYDYSLTQN

SEQ ID NO: 295834 - protein, 339 aa, unidentified
MTILFVGIDLAKNVFAVHGVDGHGKAVLIRPSVQRSKLHELVASLPVCTIGMEACSGAHHWACLFKQHGHTVRLDGAKFVSPYRMSGVRGKNDAADAAAICEAVQRPNMHFVPVKSEDEQARLCVHRVRQGFVEQRTATINRLRGLLSEFGIVLPQKAAIVRREAAAHLEDLPGWANTAVGDLLSEVHRLDERIAEYDQHVSHMAANDERSRRLMQLQGVGCTTASALVSTIGDAHDFKNGRQLAAWLGLVPAQYSSGGKARLGSITKAGDRYLRTLLVLGAKSVLAAAKSKDDRLSRWAVALQTRRGYWRALVAIAAKNARMAWAVLAKGESFKPINT

SEQ ID NO: 295835 - protein, 362 aa, unidentified
MFKIFRKNCCGLDVHKTWIYACIGITDVNGRTDYKEARFSTFSRGMRELADWLAKYECKEVCMESAGRYWFPVFNILEKTCWVTLAHPKYTKPQKGNKTDWKDAKWICDLFMCDMIKPSFIPPPDIRHLRDLVRYRFKLTNILTGEKNCAQNCLTISNLKLDDVFSDVFGKSASSITTYILDHPGEQFDIAPFVDGRCKTPIEEIQVAVDGSISPEHAIKLRTVLSHIDEIKAHKQTIEAEILRLAAPYETLLELIRTVPGLSAAPMTAIALISEIGVDMSVFPTAKNLSSWAGCCPHNDSSGGKRKSTRISRTGVYLKPLLVQVANAVVKSNKYPGCKERYRRLKAHCGHKKPSLPSAVCS

SEQ ID NO: 295836 - protein, 428 aa, unidentified
MDQVNHNRLEEFRQLRQEVRHSGEYLIVGIDIAKDRHYAFFGTATGKTLLRRLVFSNDHEGFRKLLDQAEALRVQHGLKKVVYGMEPTANYHKPLGEYLIGLGRTVVLVSGVTVKRNRETLDGRWDKHDIKDSANVADLISQGKCLYYEHPSAELRGLRGLLSLKRRLKKQEHGYKVRIRNHLIAQYFPEMDRDYAQLGAEGLSIVRWCFPASQIVQLDVDPFIERVTSRRIRVEKRRRLEVIWEKAGESIGCDGVPGVEHEAKVMVEGLRQIREMIKETEEKIEELCNAFPEYRFLLTIPGFGPDVSAKVLGAIGDPDRFQNGKQVLKMGGLDLSADRSGKDSDKATPVISKRGKADLRYALYQAAFIASTKNRDFMLYYTNKLRGREKEKGIHTKMIVKLSAKMLLIAWTLMKKKEAFDPAYLITE

SEQ ID NO: 295837 - protein, 408 aa, unidentified
MDLTPMHKRVIALDVHQAKITACAVVEHEDGRVEVSKRDFGAFKRDRRALAQWALEIGPEVVVMESTGVYWKSPFAALEAVGIIAWVVNARHVKAVAGRKTDMADAQWLATLARAGLLRASFIPPVELRQLRLVGRQRQKLVGMCSAEKNRLHKVLVDAGIRINVLVGDIHGQSARAMLKALIAGQPMHEVLDCRGRLRASREELCEALSTEQFSAVHRFVAEEIMQHIEQIEQRIARMDQYLLDGLRAWQPQLNLLQTIPGIDIQGAAMLLVEIGADMAVFSSAERLASWVGICPGNNESAGKRKSGRIRRGNAWVRRLLCEFAQAAARTRCALKAKFDSLAIRKGHNKSVVALAHKMLRTIYAMLASGTHYQDRSVDYEALSVARNAPRWIKMLRKHGFMAESAAA

SEQ ID NO: 295838 - protein, 339 aa, unidentified
MGCAAVLEQLEPLNGSLNSYCKMEPTDPTTNEATYVGLDVSKDRLDYTVDGTHVAHVPNNAQGLRTLTQVLGKLPSPARVVCEATGGYERAAVAALLLAKVEVCVVNPGRVRAFAHAQGQLAKTDHLDAKVLRRFGQQVQPRLHAPMHQAAVELRELLDYRRQASDQLVATSNRLCTAGAVLAKLLASQIEFLKARLKEVDQLIKKHIDHDDDLRTKAQRLSQLDGAGPVLTATLLAYLPELGQIGDKAIASLVGVAPYAHDSGQHKGKRHVRGGRSQVRTVLYMAAVAAIRCNSVLNAFYLRLRENGKLPKVALVAVMRKMLRVLNKLIAEPSFELAH

SEQ ID NO: 295839 - protein, 304 aa, unidentified
MFGIGIDVSKATLDVVVHGEQFRQFSNDKRGFVRLIRWLKTWPIKQVVLEASGGYERAALDVLHAAGLPMVRINPARARRFAQGTGRAAKTDRLDATVLAQMAHLLPLTRYVPPAPWQQRLAEFAQCRRHLVQMRVSEMQRLRRLVDPDLIAMKQRHIAQLSDDLKQLDKAIAEQLEGQPSWKNIGTLKGVGPILISTLACELPELGSLGSKAIASLVGLAPMNRESGTWQGQRRISGGRAVVREALYMAALTAIRYEPGLRAFYAGLKAKGKASKVALVAVMRKMLVILNARKRDAEVALGCP

SEQ ID NO: 295840 - protein, 374 aa, unidentified
MLRPARKALAQKAHQENPMNTTHYIGFDVHKKTISFCVKTAAGEIVEEGSVPAQRSVLRQWASARPQPWRGALEATLFSGWIYDTLKPYGEQLEMAHPAKMKAISAGKKKSDRIDARTIADLLRCNLLPACYVAPPRIRELRRLLRYRSLVVSEAVRMKNKMAGLLMETGALYVKEKLHRKKYFASLLEELEEVPESVIDLLRLSRGALEMFESTQQRLVRELLADSELAQRVQRLMSIPAVGEITALTWALEVGDPQRFRSGSDAMSYCGLTAALKSSAGKQQRGPISKQRNHWLQTTLIEAAKLAPRWNPQLAALHARELERGHRNRATLAVARKLVSYLLAVDKSGQSFQLRALLPEDRAEEERTQKIKTA

SEQ ID NO: 295841 - protein, 345 aa, unidentified
MADFNVLAIDLAKTVFQVCKTNSRGKVIFNKSFTRKQLKELLIKEPMSLVAMEACGGTHYWARYAIEHGHKVKSMSARRVKAFRQGQKTDANDAAAIAIAALQPQVKSTRLLSIENQCQQGLVRIRELLVTQKVATAKQIRDLLLDFGFPIPKGDSALFEALSGILEDAENSLGMDFRMAIESQRKHLNQLLARLADIDARLATQIKADETCQRLQKLEGIGPVNAIALKLTLNTVEHFRNGREAAACVGVTPIQHSSGGKDKIGSISKSSGCKGLRSTLFEGSMAVIRQLDKREARTTKEVWVKDIVSRRGKKVAAIALANKNVRTAYAMLKNGTDYQPSMLAA

SEQ ID NO: 295842 - protein, 345 aa, unidentified
METMYYIGLDVHKKTISYCVKDGSGRIHAEGAIPATRLDLDIWMKRLPQPWTAAMEATIFTAWIYDHLLPHAVAVKVAHPLMLRAIAAAKKKNDRIDANKIADCLRCDFLPECYMASTEIRERRRTLRYRNLLVRQAVQMKNKIAVLLMEAGVSYNKQKLHKVGYFRELLATNQDINDGLRSLLRLCRETVVRLGKTESALVRSLQCDSLLVERVERLMTIPAVGPITALTWALEVGDVQRFSSIKKAISYCGLCGAEQSSANIIKRTPLSKQRNKHLQTMLIEAAKMAPRNSPDLAMIYDREKQKGNANRATLAVARKLVAYLVAVDRRQKDFLIVERENRTAA

SEQ ID NO: 295843 - protein, 356 aa, unidentified
MTSMAHPDAPQLTIGVDTHLEVHVAHANDQLGRPVATIQIPTTPAGYQQLLVWAHELGEPIVWGVEGTGCYGAGLTRFLAANDQVVVEVNRTDRQARRLKGKSDPLDAQAAARAVQAGQARVVPKAGDGQVEMIRCLRVARATAMRARTQTINTLKGLLVTAPAELRQQLRGRTATRLVQTAAALEPGPITSPLAAATFALGSLARRHQALSAEIDALSNQLDRLTQTAAPELVARFGVGHDSAGALLVAAGDNPDRLRSEAAFSMLCGASPIPASSGKTIRHRLNRGGDRQANAALHRIVVVRLRYHQPTRDYMTTRLAQGKTKKEIIRCLKRYVAREVFAVLHQLHHDNITPAA

SEQ ID NO: 295844 - protein, 387 aa, unidentified
MNRVEDLSRSLLPFDQEKAVVAVIELSSTSWLVAGTLPGIARRPLKKLDPDPAALSRLLDRWCEEATSKGRQIDRVIVAYEAGRDGFWLARWLQARGMETHVIHPASVAVSREHRRSKTDRLDTAMLMRVFLGWLRGERGHCGMVAIPSLAEEDARRPSREREKLVGEKTRIINTIKAAMQRLGIRGFNPALKRAAKQLESLTTPDGDPLPPNLRSELHRYLERLSVVREQIAMIERERLVRLEAAPDKKTNAMVLLLTRIVGVGIETADMLVQELLSRNLRDRRAVARYAGLTGAPDESGARRREKGLSKSGNARVRRGLIQLAWRFLMFQKGSGLAQWYRRRTVGDAPTPRKKMIVALARKLLIAFWRMVTTGELPAGVVLRPAV

SEQ ID NO: 295845 - protein, 410 aa, unidentified
MTVIAITQNTPVLVAIDIAKARHEVLIAVTGKKRRRRLTVLNELADFTRLITALKDYGRPVRAAFEATGNYHRALAYHLATAGFEVKLVSSVALARTREALHNSWDKNDPKDAQVILHMMEIGNEQFYHDPLVRGTNDIQELSKTHDIVSKSKTELWHRILTHYLPLYFPEADRFHRSSRSDWFFAFLERYPSPHFISAMSKDAFTADAWDVVGRKVAKERLLADIYETSKVSVGLPVALDSDAISMFRLVLGEGRSLIAQRNQIEARAVALLKDLPDYQLLTSIPGIGPINALTILAEAGDLRRFGHHRQFLKFCGMDLATIQSGTFRGQTKLSKYGNARLRRTLWMAGQVAILQRTNSFRDKFERYISKDRQNTHLRRKAYTAIAAKMARTVHGFIKNGEPYRPFFEG

SEQ ID NO: 295846 - protein, 345 aa, unidentified
MEQISRIGMDTSKYIFQLHGVNTAEQPVLRKKLRRKEMFAFLEKLAPTVIAIEACGASHHCARLLQSFGHSVKLIAPQLVKPYIKRGKNDAADAEALCEAMSRPTMRFVPVKTAEQQAGLMLVGVRDRLIRNRTQLSNAIRGYAGEFGLTAARGKAHLAPLLERIHADESLPALARELFAAQAEEYAQLQAQIDEVDARLMAWHRADECSRRLSKIPGVGPIGAVLLTMKTPEPELFRSGRQFAAWIGLTPKDHSTAGKVRLGGITRAGDEGLRSVLVVGATTVIQHAQRGGRPSPWLTQLLKRKSPKLAAVALANKTARIAWKLMVTGENYAAKAAPAALAAAA

SEQ ID NO: 295847 - protein, 425 aa, unidentified
MTPRGDAITSMAADDYAVFIAIDWADKKHVWALQKAGSRDRQQGEIEARPEAVETWVSGLLARFPGQRIAVALEQKQGALLCQLSKYESLALYPVHPATVSRMRAALYPSASKDDPKDAHLLLDILVQHRQHLRRLDADTVETRKLQMLVEDRRKLVDDQTAYSNQLRAKLKLYFPQAVRWLPELHSRLAGEFLQRWPTLPLLQQARLETIRRFFHQHHCRSEELMRQRLQEIPQAVAATQDAAVVDAGTAMVQALLHLIAVLRAQIAEFDRQIAATAAIHPELSLVASLPGAGEVMTPRLVAALGTQRERFSSASELQSASGIAPVRRRSGQSEWIHFRWACPKFVRQTFHEWAGHSIAQSRWAKAYYDAQIANHKGHHAAVRALAFKWQRILFRCWKDHQPYDEQKYIEALRRRGSPLAAALL

SEQ ID NO: 295848 - protein, 421 aa, unidentified
MAEFAALIGLDWGHSSHAIAIQMRGEQTETLTLEHCAENLHQWLDQLEKRCGGKSVAVAIEASKGAAVYALIERPWITVYPIHPATSTRHRAAFRPSGAKDDTPDALVLLSLLEHHRDRLRELELEDEATRTLALLVEARRKAVDRRSLLSNQLQSTLRDYFPQALELIGENLAAPLALDFLEKWPRLTDVQAAKNVTIKNFYHRHNVRRPKLVQTRVDRIRAARLLTRDAAIIEVAVRVVRLLVAEMRVLQEHIGEFEAAIAQNFAAHPEKNLFRELPGAGPALAPRLLVAFGTLRDRFCDASAMQRYFGVAPVTEKSGGRVWIHWRWNAPAFLRQTLVEWAGQTVVYCPWAKAYYEQQRAKRVGHWAILRALAFKWLRILWRCWQKSELYDQEKYLRQLEQRRSPIAASARRLAKQMAA

SEQ ID NO: 295849 - protein, 417 aa, unidentified
MNKHNNSGKKSEPTSKQAKPRGPIRRDTKDVLAELVGKLKEKLDPKKLAATSAGEKHKRGELRPNLDRLTVGVDLGDQWSNYCILSLEGETLAEGQLRTTQEDLAEFFQALNAARVVFEVGTHSPWVQEVIGGCGHEVLVANPRMMDGSKRRKRKNDRIDANKLARLGRVDPQSLHPIQHRSREVRQDLVVLRARDALVAARTELINATRGLVKSMGTRLRKCSSPGFAERVEGTVPAELRDALLPLVRMAAALSDCIQEYDEKIEKLGREKYGHTALLRQVKGVGPITALAYVLTLENPDRFVKSRDVGPYLGLVPKQEDSGEIQPQLGISKTGDTMLRKLLVGSAQYILGPFGPDTDLRRYGLRLCERGGKNAKKRAAVAVARKLAVLLHCLWVSGEVYEPLRQGTSAMAPAVAA

SEQ ID NO: 295850 - protein, 361 aa, unidentified
MSQSSWLVAGIVPGVERQPLKKLAVDESALLNLLNRWRVEAEKAGRKIERIAVAFEAGRDGFWLARWLRARGIEAYVIHASSVAVSREHRRAKTDRLDTELLKRAFIGWLRGERDHCKMVAIPTTKDEDAKRPNRERESLIGDQTRIVNRMKAALIRLGIRGFNPKLKKAAGRLEDLRTPEGEPIPSNTLAELRRDMERRRLISDQIRQIEDARLERIEQAPGDGPHAMVRLLARVIGVGIETADMLVQEVLARNMRDRRAVARYAGLTGSPDESGTKRREKGLARSGNARVRRGMIQLAWRFLMFQKESALAQWFRARTETARGTRKTMIVALARKLLIALWRLVREGVVPDGVVLRPAQ

SEQ ID NO: 295851 - protein, 316 aa, unidentified
MSQAEVFVGIDVAKARLDVALHPSGTIWTVPNSEAGIATLVAQLQEQPVTHIVLEATGGLELPLLGALGAAALPAVAVNPRQVRDFAKALGRLAKTDRLDAQVLALFAERVRPALRPLPDQATQALSALVARRRQLVEMLTAEKNRRGQAPPTIQADIATHIAWLEGRLERLDKELGQHLKQSPLWRAQDDLLQSVPGVGPVLSRTLLADLPEIGTLDRKQIAALVGVAPLNRDSGTLRGARTCGGGRAAVRAVLYMATVAATRCNPVIRAFYHRLCQAGKAKKVALTACMRKLLTILNAMLKHRTPWHAERLQRA

SEQ ID NO: 295852 - protein, 408 aa, unidentified
MNPLYVGIDVSSKNNVIYLMLPNGDKHSSFSLANSHDGSTQLVKRIFTAMTSNNIDSVLIGLEATSVYGDNLVYFLKEDTTLASFDRKIHVLNPKQVNKFKESYNDLPKNDYIDAFVIADCLRFGRINKEVYMDDYRYKALQNLTRARYFAVTNLTKEKQRFINVLFKKYSTMTQEKVFSDTFSTTALAVYEKFESAETLAKMDLQELTAFIMEKGKNRFPDPDAVAKALQKAARSSYRLPKTVNDSVNQVLAISITSIRALESQIKAFDKAITKQMELLPNVLISIPGIGPVLSAGIMAEIGDINRFQNQAALAKYAGLAWQQHQSGNFKAQTTRMIHSGNRFLKYYLCEAAFSLVRCDKEYSRFYHLKYKEVNRFQHKRALALTARKFVRLVFALLKDNRLYRPAE

SEQ ID NO: 295853 - protein, 389 aa, unidentified
MKIFVGIDIAKLNHFAAAISSDGEIILEPFKFTNDADGFQLLVSKLESFDKNSIIIGLESTAHYGDNLVRYLVAEFYQVCVLNPIKTCQMRKNNVRKTKTDKVDTFVIAKTLMMQDDLRFITFFDLDMMDLKALGRFRQKTIKQRTRLKIQLTTYVDQVFPEIQYFFKSGLHQNAVYALLKEAPSPKEIASMHMTHLANLLKVNSHGHFTKEQAKELRVLAQKSVGANDSAISIQITQTIQQIELLDSQLEKIEAEMTDIMKFNDSVIMTIPGIGYINGGMILGEIGDIHRFSNPNKLLAFAGLDPSVYQSGNFQAKTTRMSKRGSRILRYALVNAAWNVVRNNATFKAYYDAKRAEGRSHYNALGHCAGKLVRVIWKMLTDEVEFNLE

SEQ ID NO: 295854 - protein, 340 aa, unidentified
MTIVVGFDVHRAQITFDALDGATGEVTTGRISPADRQGLRRFLCRWNGREVEAAVEATTGWRFVVEELQRAGATVLLAEPAETSARRGPKRRAKTDRRDARHLRDLLLERRLPVAWIPPQHILELRAQVRLRKTLVDQRTEWLQRIHAVLFHHGAKLAVSRLDGRDARRQLVALKLAPSACQQIEVALAIVEQVNAQLAPLNRELKAFARRQPGCRALMRHYGIGPQVACAILAELGDARRFSSSRQAVRFAGLDVTVHESDTKRRPGHLSRQGPPVLRWAAFEAAESACKPSSPDHAYYLQLKQRVGQNRAVLSVARKLLRRAHHTLRELGDEALQPAA

SEQ ID NO: 295855 - protein, 370 aa, unidentified
MKKPATLFVGLDVHKESISVAHVADDRRADVTYVGRIGTRPADIDRLVRRLQEKADRLVVAYEAGPCGYVLYRHLSRRRITCLVVAPSLIPKKPGDRVKTDRRDAIQLARLLRSGDLHSVYVPSVEDEALRDLSRAREAAVVTLKAAKFRLKSFLLRLGLHYTGRADWNDAHLRYLAEVVCPTPAQQIVFQESLRAVGEQVERLKRIETELADLVPAWRLAPVVRALQALRGVQDTVAITMLAEIGDLTRFDNPRQLAGFLGLVPSEDSTGESRRQGPITKSGNGHARRVLVEGAWAYQYSAKVSPHIRKRLEGLPQPIQDIAWKAQVRLCKRFRRLVARGKHPNVVVTAIARELAAFMWAIAKEVPVTA

SEQ ID NO: 295856 - protein, 341 aa, unidentified
MNNVAIAAIDLGKHSFHLHAQNDRGHELYRKKFTRATLTQHLANLEPCTVVMEACGGAHFMAQEVAKLGHTPKLIAPHLVRPYVKSNKNDFADAEAICEAATRPTMRFVPPKTQAQQALAMLNSTRDSFIKDRTATVNRIHAALLEVGVSLAPGFTSIKDLPALLETSSVPEPIRKILMMLHKHFNYLDGQVKKLDKDVESQAAGDDLASRLMTMPCVGPITSSVLAAELGDGKQFKCGRGYSASIGLVPKQHSTGGKTVLLGISKRGDRNQRRLLIQCARVYLMQLDRQKGWLADWVRRLLAHHHSNHVVCALANKLARIAWAIAAHHTEFDAGPAAMNA

SEQ ID NO: 295857 - protein, 446 aa, unidentified
MRLYLGGDVSKGYADWVILSEKKQTVLENFQLDDTYAGHCKLYSMLEAYIEKHPGSEIYAAVESTGGYENNWLNTLKSYQKVFNLKVARINPAGVTFNRKAGMKRNVTDAISALSIAEFMIDHPKNITYDQDDKWKSLCRHWNFVEMEKPQRVQTINQLETILYSANPTLMRYKKGDLPNWLLELIIQCPTADKLAKAKPEKLAKIPYLSLARAKELVAEADQNIASATDRNAEILVSQIAMQIKSFDQNIKSQMQLIERDLTCPEIELLKSFKGISTISAIGLLLEIETIERFPTVKCFSCYFGLHPKFKKSGDKVIGVRMSKQGSKNMRKILFNIAKGAITYNPLIMSVYEKKLSHGMKKMAAIGVCMHKILRIIYGMLKHKQEYNPLIDKLNCEKSKDKKQEKQQQENANIEKSRRYQEFDVKAPISRKQTKKRRDTICPNVK

SEQ ID NO: 295858 - protein, 371 aa, unidentified
MSELPAETRPARLRVEASLRPPGARKPETELGAVSTTAVPHPDSRSGPSPHLQGRVTAEQRTVFVGIDVSKDRLDVHLRPSGEAFCVPREGKGMDDLVIRLQGLSVALVVLEATGGFEATVAAALAGVGLPLCVVNPRQIRDFARAMGRLAKTDTLDAEVIALFAERVRPQARPLREPERVHLAELVGRRRQIIEMIGMETNRGRQAIDKPLARRLARHVAYLQKELDAIDHDIGDAIKHSPAWREAEALLKSVPCIGDVTARTLLAELPELGTVSRHQVAALVGVAPINRDSGLMRGRRAIAGGRTSVRAVLYMAALTAIRRRSPFRAFYDQLTARGRPKKVALVAVMRKLLTILNAILRDHTPWRPLNA

SEQ ID NO: 295859 - protein, 343 aa, unidentified
MNNTTIGVDLAKDVIQVCVFSQQKIISNTEMSVADFAIWLTQRKPSTIIFEACGTSNYWKQKATSLGHTVHLISAKLVNVVRQQQKNDKNDALAIVQASHLPNVKFIKGKTLEQQQLQSLIRIRDLAVKQKTAIKNQIKALLLELNIRVSTKNGGLNGTIQLVLEDAENGCAMYFRQAISTVWKTYLQLCQSVSKYDKVIERAIRKSPECKRLIQLEGVGPINAINLYLAIGCSDSMVFKQGKDVSACIGLTPVQHSSGGKTKLGKISKNIRNQMLRSQLVTGAFTFVNSIAKKESKTEKERWLKSLIDRKGKKCASVALANKTVRTAFSMITKNTEYKVTPV

SEQ ID NO: 295860 - protein, 454 aa, unidentified
MKKQELSLQVINGHAAGIDIGSRFHMVAIDQLKENVRQFGVYTKDHEQLIDYLRNAGITSIAMESTGNYWQTLFSKLQEAGFEVLLVSGSQTKNVKGRKTDVLDCMWIQKLHSLGLLSGSFLLSNAIQELRTYYHHRLHLIEQASMYVHKMQKSLRLMNIRLDIVIRDVVGKSGLNIVEAILAGNRDPKHLSTLVDIRVKKSQQEIADALQGSWQEELLFELRTSLNFYKVYEKALLECDKQIENKLISYIPQTTLDAQEEKMLKESSKKNRKHAPALNVSRLAYQYFHTDLFAISGISHTTVLCLMTNMGHDLHKFSSAKSFASWLRLVPNNKISGGHIISSKTPSGKNLIANALRQAANSIGNQKNHELTPFFKRIAFRKGRIAAITATARKLAVILWNMITKVQPYKKSLTLNSTKNKSTQLKNIEKRIGLLQLTQDELRKLFLRTSLLTE

SEQ ID NO: 295861 - protein, 339 aa, unidentified
MSRYVGVDLHKNMFVASFYDADVGEHQLGKFGLKDIPKFKRQLKKTDILGVECTTNTRYFVEQIEQTVDSVKVVNPSQFRVISRSVKKTDENDARVIAEFLSKDMIPEVRLKDKRLSELSSLAHTRDKLVKLRTALKNKTHNILSAYGIVLKKEQLSSDKALDKVLDFRVSETARIELEVMVAQIKNLNEGIKKLDSELEDRGKDLPGHKNITSIKGIGNKSGTVLLCAIGNINDFESEKKLASYFGIVPRVSNSNETMHQGRITKHGNKLARTTLVQCTLVAIRYSPYLRAFYDRIKAKKGSGKAIIATSKKLLGIIYQTLKNNWVFEDFPNFVLKSA

SEQ ID NO: 295862 - protein, 341 aa, unidentified
MKKFIRIGVDLAKNYFQIHALASESGPAVTRKLKRSKMVEFFSQIEPCLVGMEACGSAHYWARELKKLGHEVLLMPPDYTKPYVKRGKNDAVDADAICEAMSRPGMRFVPVKSAEQQATLMLHRTRELLVKQRTMSVNALRSHLSEFGIIAAKGIGRVDELLELAESDATLPAATRAAVEVLALHLEGLDKSIDDLEDTIASAHAQSEMSRLLDEVPGIGKLIASVIAASVPDAGVFKSGRDFAAWLGITPRQNSSGGKQTLGAITKQGNRYIRKLLVLGATSLLRVVGKRKGALRDWIVGLLAKKPARLVTVALANKLARIIWAMMKTGESFRTEMFAKA

SEQ ID NO: 295863 - protein, 335 aa, unidentified
MQIKHFVGIDVSRDTLDLNLVIDGSCQKHHCIPNRTIDIGSTLNKIMKSVGATLDDTIFCMEHTGIYNLPLINWLQSHNGKIWMESGVHIRKTLGLVRGKNDKVDSMRIAMYAYLNRHRIKTWKAPRKLIARIAALLSQRSRLNKAKKQLGTANQEQKLFMDKDIMRSLNTYTQKTIAVINKQILAIENEILSLIKEDEKLNRIYRIITSVAGVGFVTASYILVTTNEFININDPKKYACYSGVVPFEHSSGSSVRGKTRVSQIANKNIKTLLHMAALSTIKKQGDLHEYYIRKVAEGKNKMSVLNAIRNKLILRIFACVNQNRVYEQNYCYKLV

SEQ ID NO: 295864 - protein, 346 aa, unidentified
MMIIGCDYHPSWQQMAWVDTETGETGERKLLHADGEAEQFYRQLRTPALIGMESTGNSHWFVDRVTAMGHQVLIGDAAAIRAKQVRKQKTDRRDAVHILDLLLKHDFPVIWTPSIEQRDQRQLLIHRWGLVRLRARAKNELQHLAMNQGVQKKARLWSEAGQKLLRELPLPYWAGQRRENLLRLLAIFDQQIAVLDRAAEKAAQESEMARLLMTQPGVGAITSLAFVLTLGDVTRFPRGKQVASYLGLIPREYSSAGKQRLGAITKQGNRFLRMLLVEAAHSVIRCDPGFRKQYLHRCHKKPKGVAKVAVARKLAIRLYWMLRSKTAYPEIVRMESSSRVALVGAS

SEQ ID NO: 295865 - protein, 313 aa, unidentified
MSKNNPPILYAGLDVAKSALQLDLAGKSHALTNDAKGHARLLKVLRDQPGAHVICEATGGYEQPVVRACHAAQVPVSIVEAGRVRHFAKAKGRRAKTDPIDATVLSEYGRTFQPAATTAPTAQQARLAELSTRRLQLIETLIAETNRAAHYTGKLLRSQTRQLQRLLEKQISACDTALAELIAADETLKERAAKLDAIPGVGAVTAATVLAELPELGKISNAAASALVGVAPYNRDSGEHNGVRHIGGGRKAVRCALYMAALSAVQFDPILKAFYQRLRLAGKKPKVALVAAMRKLVILMNRLLKNPQFQLAN

SEQ ID NO: 295866 - protein, 375 aa, unidentified
MPAPHHLRGDVPSPVVDVHRLRPWQVVISGPHYLEELAVKLYCGIDLHSNNHYLTLIDEQDRRILEKRLPNDLAVTLKVLDPYRADITGIAVESTFNWYWLVDGLMDAGYSVKLVNTAKVRQYEGLKHTDDRHDAFWLAHQMRLGILPTGYIYPKDQRAVRDLLRVRRRLVRQRTTHVLSTQSTFWRHTATKVPSAVILGEKKAPWPTLPNASDELGVKAHRAAIGVLNTQIERIERRVLKILKPRADYQMVLTVRGIGPVLAWTIVLESGDLQRFKNVGHFASYARCVDSKRTSNDRKKGEGNAKNGNAYLAWAFFEAAHFAIQFLPAAKRFFEKKAAQRNPILAMKALSHKIARACFYIMRDKVPFDPARLFS

SEQ ID NO: 295867 - protein, 373 aa, unidentified
MPRYSTAFGMDVHLRSTTVCALDAETGEAVTRRFRGNPWGEVAEWMSGFPGPSLAAYESGYLGFAPQRELSGLGVDCVVAAVSKVPRSAADLSSKNDRNDAARMAKAILSHDVTPVWVPSPEIEGLRDLAAAHDAATARLAAAKQRLLAFLARRGYAYGGTTPAGNPRKYWTYGFLRWLDGIRPADDGGIRALAALRNEVEAADETREAVLAEYRAAVAAGPLSAEVEALQSIKGCGFALAAAFAAEVGDFSRFRSGRQVTAYFGLAPKQRSSADSVRLGGISGAGDALVRKLAVEGSWCYAQAGRQPKLMPKGSGVPLEVRMHGRKGSERLLRRREEMLERGMPQAKANAATAAELVRWLWALGAMCREATE

SEQ ID NO: 295868 - protein, 411 aa, unidentified
MVESILKSCAGLDVHKKEIKACIAHGDLDKPPQYEIKTFSTMTSGLRKLKDWLNSYNVTAVAMESTGVYWKPVFNILEDDFDVILSNPYHIKNLPGRKTDVKDSQWIAMLLRNGLVPRSFIPPREIRELRDLTRTRRKLVGNMVAEKNRIQKVLEDANIKLRSVVSKIDGVSSMKIIHALLEKDDLSREEIAEMTHGRLRSKMDLLVEALDGRVTGHHRFLLKMHLDHIEFLADQIQNLDEEIQIRMVPFHVQSSLIQTIPGISNISAASIIAEIGTDMSQFPDEAHLSSWAGICPGNNESAGVKKNSKIRKGDKFLKATLTEVAWAASRSKDSAYSAVYNNIAKRRGRKRALVALGHRILIDVYKTMKFQVPYKDVGAEVVYQRKTKNREQAMIRSLERSGYVVTKVAPA

SEQ ID NO: 295869 - protein, 303 aa, unidentified
MAHFVGLDVSVKETSVCVVDDAGKVVLEQKVPTEPSDIIDLLTSLGATYGRIGIEAGPLSQWLFNALTAAELPVICVETRHMKALLTAQQINKTDRNDARGIAQMMRVGLFKPVHVKTLVAQEQRMLLTSRKLLQRKLLDVESDLRGTLRNFGLKVGVVSGGRYEARIRELVVGFPRLAAIAEPLLNVRRVMRQQLAVLHKMLLNTVRDDPVCRRLMTAPGVGAVVALTYRATVDQPQRFVHSRAVGAHVGLTPKRYQSGETDYDGRVSKTGDALLRTMLYEAAHSLLIHSGKWSWLKACEST

SEQ ID NO: 295870 - protein, 318 aa, unidentified
MEQEDVIYERCAGIDVHKRMIVACLRIGRKTELRTFGTLTHELREMTSWLKGNDCQMVAMESTGSYWKPLYNIFELEGLPAMVVNAQHMKAVPGRKTDMKDAQWIAKLLSQGLLKPSFIPDREQRDTRDLTRFRKSQMEERARNLNRLQKMLEGANIKLASLVSDIDGQYATQLLELVIGKPDFTAEDVAARRHNRMKASAEELFQSLEGVITPVQRELFRHVMQIIREQTKQIEQTDALIKSHMSEAYQQAAQALTAIPGIGIVSAQQIVAEIGCDMSRFPSAGHLCKWAGVCPGNNESAGKSGKAEKPVMPMHMLQ

SEQ ID NO: 295871 - protein, 323 aa, unidentified
MTRTICGVDVASKSLEARIGRQGAAASFPNHPEGIAALAAFCQSHHVDLVAMEATGGYERQAFAQLSAQALPVAILNPRAVRQFAQSMGSIEKTDALDAGMIAWYAEVKQSPPAWLAPPSQLQLRALVTRLRQLTEVRTAQLNQQRLVTDRAVQASFKKLLAVIERQIAALEKKIAALIDQDPLWRELNHDFRAIKGVADRTVARLMAEMPEIGALSNKTISKLAGLAPLANDSGQHQGKRRVRGGRAAVREILFIVASVVGRHEPDFAAFQQRLRDAGKPPKVVRIALAHKLLVRLNAKAREVRQRLAAIPAEPVALPAAAW

SEQ ID NO: 295872 - protein, 434 aa, unidentified
MSQQNISTPSTPPVYAAFVGLDWGDEKHALSLCAAGATVIERTTLPQTPEALADWANVLRSRFPSGKIALCLEQARGALLAGLMQYEHIVPYPVNPKTLACFREALYPSRSKDDPIDADLLLDLLLKHREHLRAWQPDTVQTRQLALLNEQRRHFVDHRTALTNELLSHLKAIFPQALELVGQSLASRLATDFLKKWPTLQAVQKVKPAVLRQFYYGHNSRSQELITGRLQRVKNAVALTSDPALLAVHSLAIQTLAGQLQALRPFLDQHEQQIAELFATHPDAALFESLPGAGSALAPRLLAALGSDRSRFPDALSIQCYSGIAPVTERSGKTQYWVHLRWSCPKFMRQSWHEFANCSLKFSTWARACYQDLNKRMDHHEAIRKLAYKWQRIVWRMWQERQPYDETRYLRSLQKRGLKIYADLVPQPIAPAGE

SEQ ID NO: 295873 - protein, 391 aa, unidentified
MFLLGIDIAKLDHVASCIDSSTNEVVFSNFKFKNDFRGFCSLLDKIRTFDAENLIIGMESTSHYGENLISFLFKQHFKVALINPLQTSHLRKANIRDAKNDRLDSLNIARSLIFGKLNFVSEKNIDCFSLKKLTRFRSNLIKQRSKAKIQLTSLLDLLFPELQYLFKSKIHSRAIYSLLKKYPSAEEIAALKDDEISNLLYASSKGHFKKEKSIELKSLAKTSVGIKDTSISLHVIQLIELIELYDRQIKDIVTKITDTVDKLDTKLLSVPGINIISCAIILGETGNLDNFSDSKKLLAFAGLDPKIRQSGNFYASSCRMSKKGSPYLRYALVFTAWNIVRHSEKFNRYYCLKRSQGKSHYNALGHVAHKLVRVIFTLIKKDIIYQEENLR

SEQ ID NO: 295874 - protein, 592 aa, unidentified
MGGAVRITRRDLTAKDLRAAAGREKDGSAARRMLALAMVLDGVDRKSAAESCGMDRQTLRDWVHRYNAEGLGGLHDLKTPGPKPKLTAEQQAELARLVEAGPDPARHGVVRWRRVDLRDELERRFGVALHERSVGKYWQSSATAGSQVRPRHPQADEEAQEAFKKTSPRRSRHSFPTTPRTSRSKSGSRCYEDGLSRYFGSPNQSDGAATMQTIDTVNPTILLAIELSASTWLVAARVPGLEKPHLHRIDGGDTAALLALISSLRARVARRLDATIGIVCCFEAGRDGFWLHRLLTAHGVVSHVLEPTSILVNRRARRAKTDRLDAEGMLRVLAAYLRGDHQACSMVRVPTPEEEDAKRTPREREKLVQERLRIENRIEALLFTQGIRKRPSLRSWERDLAVLRTGDGREIPHHLRAELDRLRRRLVMTLELIREVEAERDQAAKTKPQDQACHKIAALCRIRGIGENFAAVLTREVFYRSFDNRRQIASYVGITPMPYQSGGMDRDRRISRAGNPRARTTMIQLAWLWLRYQPGSELAEWFRERVGTLAGRTRRIAIVAMARKLLIALWRYAETGVIPAGAEIRAETTVAA

SEQ ID NO: 295875 - protein, 375 aa, unidentified
MKEKVRFLGLDVHAETIAVAVAERDGEVRSLGTIANRAESIRKLVKKLGPVEQLKACYEAGPTGYVLYGQLAELGVACEVIAPTLVPMKAGDRVKTDRRDAERLARSHRSGDLTAVWVPDEGSEALRDLVRAREAAKADQLRARHRLSKFLLRTGRRPETKIKLWTGVPMTWVRQLRFEHPAQESTRLDYLHEVEHMAERVLRLEQAISDAIKLATPEMQEVIRGLQALRGIAEISAVTIVSELGTLSRFENARQLMGYSGAVPSENSSGKRVQRGSITKAGNAHLRRIAVEAAWSYRLRPGIGPRLRKRQENVPEEIKEIAWKAQIRLTKRYARLAAAGKDQRKIVTAVGRELLGFIWAIGIKAESAAMQKVAA

SEQ ID NO: 295876 - protein, 348 aa, unidentified
MTVYGAIDLHANNGVAVVLDEHDRVLLQRRLPNRLEEVVSALAPYRGELKAVAVESTYNWYWLVDGLQEQGFPVVLVNTSAVRTYEGLKYAGDEHDARWLAHLLRLGLLPQAHIYPREQRAVRDLLRKRMQLVQCRTQQVLGVQNLLARNLGSSTTAHAVKRLDEEQLASLPVLPEQRLALAANVAVIQCVQQQLERIEAEVLRATLASSMAAAYRGLQTVDGIGKVLALTIALETGDIGRFARVGQFASYCRCVGSQWVSNGKTKGRGNTKNGNPFLAWAFIEAANFAIRYNATIKRYYERKERRSKHRLVALKAVAHKLARACYFVMRDGVAFDVGRAFGPEAARG

SEQ ID NO: 295877 - protein, 422 aa, unidentified
MSIDHARNQPAAIQTQINAVFASLELSRSKWVVTSISPGAGEKMSRRTVKGGDLAALWDLLQSIEAKARARTGASTPYNIIVIHEAGLDGFWLHRALEARGCQSYVVDAASIAAPRRKRRKKTDRLDGEALLRALLAFMRGEPRVCSMVHVPSPLLEDERRACRERNELLKERVTHVNRIKGLLYAQGVSGFQPLNRDRRRRLELLQTGDGRALEPNLKRQLARILDRLELVIDQIGEVEKARNERLGLAQMRKAAAKAAARLKGKLEGEEKAIDEAAAPAAGEARTVEVAQMLFKLRGIAEEISSGLSTEGLARDFHNRRQAGAYSGLAPTPWRSGEIDHEQGVSKAGNPRLRTMMIQLAWLWPKHQPDTELSRWYVRRLAEARGRHAKQRLVVALARKLFVALWKYTAFGEPIQGAIMKA

SEQ ID NO: 295878 - protein, 350 aa, unidentified
MQGNGRWIGLDLSKRTYEMCYFDQKGKVGRSGGETTKGGRAKLYAKLKAEDIVAMEANSLAFVMEKEMRAIGCTVVILNASQLSVIYASTKKTDKEDALKLARLVKIYEKEDLPTVDVPTDKEYYRRKLIKEYKTLKGDRTQELNRLHALFVQCGITTIKRSNVQTEVKRQKVLPQLFGYEAEQAKRLCERLTMLEAQIEELEQLIKKECKEDKDIQRLQTIPGVGDKTALAFAAYVGDGKRFNNGNEVANYVGLVPRVDCSGTINKYGHITKKGNKIVRALLYQAAWAIVRSSHGGALKAKYFYLTEHGKGKKISITAIARKMAKLMYLIMKNKEEEYQEVPVSALKAG

SEQ ID NO: 295879 - protein, 444 aa, unidentified
MADFGMILIREVADAPVIMGISKPAGLKSPCGEVKIVNPLFVGIDVSSKNNVAYLMKPDGSKHSSFSVQNNLGGAKLLSERIVSALGSMQLERVVIGLEATSIYGDSLVYALREDGRLGRFQRKIHVLNPKQVRKFKEAYSDLPKNDWVDAFVIADHLRFGRINREVYMDDYRYKALQTLTRARFDVIQNLTREKQRFANYLFLKCSGMAQDKDIQNTSATTIALMEHFETVDDLANADLEELTAFITETGRGKFADPDATAKAVRAAAKGSYRLPKTVNDTVNQAMAVSIASMRALKGQVKVLDKAIEQQFEIIPNTLTSIPGIGKVYSAGIIAEIGDIHRFDSQASVAKYAGLVWNRSQSGDFEAEHSRMIKSGNRYLRYYLLEAANSVRRCDSEFRRYYDLKFKEVNKYQHKRALALTARKLVRLVFRLLKDNRLYIPPEG

SEQ ID NO: 295880 - protein, 342 aa, unidentified
MKIHTIGIDLGKTSFHLVGLNERGEVVVRKRFSRAQLLRFTANRKVHVIGMEACGGSHFLGRALQEQRHEVRLIPAQYVKPYVKTNKSDYIDAEAIAEAVGRPTMRFVPIKSDDQLDLQSLHRVRERWVSRRTAVINQIRGLLLERGITVRKGRRYIEAALPGILEDADSKLSGALRWLLAQLKLELDQMTKRLEEADALIEQTAQENEACQRLVKIPGLGPVTATAVIAAIGNGAAFRKGREFAAWMGVVPREQSTGGKQKLLGISKRGNRYLRKLFVQCARAVLQQKTKQTPGLKAWLEKLTARTHRHVAGVALANKLARIAWAVVATGEAYRAPLPAAA

SEQ ID NO: 295881 - protein, 468 aa, unidentified
MGHNRSRSRQPGGKKFKHPSLLKRINRHAAGIDCGSETHYVAVPPERDSESVRSFKTFTSDLHRLADWLEGCKIKTVAMESTGVYWIPIFEILEEHGFEVVLVNARHIKNVPGRKTDVLDCQWIQELHSVGLLRGSFRPAAEIASLRAYLRHREKLVQSAASHIQRMQKALVQMNLQLHNVISDITGVTGMRILRDIVAGVTDPMALAAHRDPRCRASQEEIAASLTGNYRAEHLFVLRQHLELFDTFQRQIQLCDAEIESLLHQLAARQRKPETPVPSPRCKLRFYDNEPRFEIRDPLYRLAGADLTQIDSIGPFTALKLIAEIGTDMSRWPTYKHFTSWLTLAPKNKITGGRLISSKTQPSANRAATVLRMCAMVVGRTSTALGAYYRRIAYRIGKPKAITATARKLAILVYRTLKGDLDYSDPGVQAYEERYKERTIRNLRKRATQLGFGLISVETGEVLEGAVS

SEQ ID NO: 295882 - protein, 352 aa, unidentified
MEKSILAGCDLHDRSLLVLAACGSDAPQKRTFLNTPVVRADMLKWLHNIAAGARIVFAYEASGLGFGLHDELVAAGVCSHVLAPSKLQRSPQQRRNKTDEKDAQQILAVLRGHFLAGNPLPAIWIPDKATRDDRELLRARMDAQDKCSGVKTQIRTLLKRNGVMHPERLKTCWTKAYCDWLQALSECDEPLAPGARCTLGSLLRQMQLLESEVELLDQQIQTLAKTRCYGKPATALMALAGVGCLTAMVFLTEMGDLKRFRNRRQIAAFLGLAPSAYESGESNDRKGRITRQGPSRVRHVLCQAAWNCVRGDPHEKKIYDRIVSKNPKQKKKALVATMRRLAIRMWHNAVAA

SEQ ID NO: 295883 - protein, 389 aa, unidentified
MKIYVGIDIAKLNHFAAAISSDGEIIIEPFKFTNDADGFQLLVSKLESFDKNSIIIGLESTAHYGDNLVRYLVAELYQVCVLNPIKTCQMRKNNVRKTKTDKVDTFVIAKTLMMQDDLRFITFFDLDMMDLKALGRFRQKTIKQRTRLKIQLTTYVDQVFPEIQYFFKSGLHQHAVYALLKEAPSPKEIASMHMTHLANLLKVNSHGHFTKELAKELRVLAQKSVGANDSAISIQITQTIQQIELLDSQLEKIEAEMTDIMKFNDSVIMTIPGIGYINGGMILGEIGDIHRFSNPNKLLAFAGLDPSVYQSGNFQAKTTRMSKRGSRVLRYALVNAAWNVVRNNATFKAYYDAKRAEGRSHYNALGHCAGKLVRVIWKMLTDEVEFNLE

SEQ ID NO: 295884 - protein, 406 aa, unidentified
MAEETIGWFAAVDWGSEKHQACVLNARGGVAGEREFPHSGAGLTELADWVQSITGEASVVAIAVEVPHGPVVDVLLDRGFMVHSINPKQLDRLRDRFSVAGAKDDRRDAYVAASGLHTDRHLFRRVQAADPRITELREWSRLAEELKQERVRLGNRLHHQIWRYYPQLLELTDDVAADWFLDLWAIAPTPAKGEHLRKAAVEQLLKRYRIRRIDAEAVLRNLRQPAIKVAEGVAAAASVHIRSLIVRLHLVNRELRDAERKLDEFCASFEGDRQDDVAILRSLPGIGRINLATLLAEASGPLSRRDYPALRTLSGVAPVTKRSGKSHIVIMRYAAHTRLRNAVYHWACAAVRHDPKSRCRYTALRQRGHSHGRAIRGVADRLLNIACVLLQRQTPFDPEREQPAAA

SEQ ID NO: 295885 - protein, 348 aa, unidentified
MTVYIGVDFHARQQTISYLTTEDGEIQQLVLAHEEPAKVRAFYEQFASQQVVVGFESSGYAAWFEELLEELGCEIWIGHAADIRRFARRRQKNDRRDAALILDLLVAGDFPRIHRYSAASREVLQQLRYRQKLVKMRTMVVNGLLFMASSRGVTLRSQLQSKRGQARMRQLALPAPLAQQRDELCQLLLELSGKITTVQAWLESRAEQDVRVQRLRTQHGIGPLTGLCLAATLECPERFANGRKVTAYAGLDPTEDSSAERRRMGAISKQGSRLLRFYLVEAGQVALRKDADLARVYQRLLRRCGHAKAKVAIGRRLLVRAFIMLRDEIDYAEFQRRGVAARSSRGTA

SEQ ID NO: 295886 - protein, 348 aa, unidentified
MTVFVGLDISLDETHICVVDQEGKTLKETKVMTEPEAIAPVLRGFGDQIKRVGFEASSLSPWLSNELIKLGFPAIIVETRHMASALGAMRNKTDKNDARGLAQMMRTGWFRAVHVKSDNNHRLRILLTNRRILKRKFLDIENAIRGTLKVFGVKMTRTTRGRFEQDLTIKLADEDPMLREMTQSMLEARRTLLEQHNRCHKLVLQVVRGDDVCRRFMTVPGVGPITALGFKTTIDDPTRFKKSKTVGAHLGLTPKRYQSGTVDYEGRISKCGDPEMRTLLYEAASSLLTRVQSWSVLKAWGMSVQKRAGKRRATVAVARKLSVILHRMWLDGSEFMASREEINTAKVA

SEQ ID NO: 295887 - protein, 354 aa, unidentified
MLAELVDHVIGVDPDRDWITVAALDARTSGVITTDRFPATGDGYRDAIVWADAHTTGSERAWVIEGTASYGRGLTMALQRRDELVVEFDRPTRKAAKDGAKSDALDAIRAAREALGRDRLHEPRAHEGIREAIRVHTVARAGAVRARTAAINELKALIVTADEQLRSEFRGLRTHKIVVRCSRFRDTQKRPIDERCTRNTMRALARRIQHLNVEIADHNTAIKALIDEAAPQLIAEPGIGYVTAAAFYLAWSHPGRCPSEAAYARLGGTAPIEVTSGQTQNRHRLNRGGDRQLNQALYFVAVTRQRCCPETKAYMTRRTSEGKTEREATRCLKRFIARRVWRLLEHPEHHLDTT

SEQ ID NO: 295888 - protein, 372 aa, unidentified
MSQSSTLYVGMDVHKDSIAVAYVAQDHGAEVISLGTIGTRQCDIDKLLRHLQSKGQQLVFVYEAGPCGYWLSRYLMKQGDVCWVVAPSLIPKKPGDRVKTDRRDARQLARLMRSGDLTPVYVPAVDDEAIRDLSRAREETLRDLKAAKLRLKAFLLRHDIRYTGRANWSPAHLRWLSEVVCPTPAQHIVFQEYVQTVTAQTARLQRLEHALHEQVQTWRFQPVVEAFQGLRGVQCTVAVTTVAELGDLTRFDNPRQLMNYLGLTPSEYSSGARRQQGSITKTGNTHARRALVEGAWAYRYPAKVSRHLQLRLEKLPQAIQAISWKAQVRLCKRYRHLMAKGKNANQVVVAIARELSAFMWAIAKQVTVTPKA

SEQ ID NO: 295889 - protein, 344 aa, unidentified
MPSIVGGMDIHRKQVTFDYLDLVTGEVKCGQIAPADRAGLRAWLRRFDGVPGVAFAVEACTGWRYVTGELQRAGIDAHLAEPADTAAARGRKMRAKTDKADSRLLRDLLTGGRLPECWIPPAQVLEYRALLETYHDLRREHTAWVQRVHAVLFHHGAPVFHDLSRTDAPQELAALARAHLSPAGQQQIALYLRMLEVTGGEADVLRAQLAAAAGQLRGAIVLAGQLYGVGPVTALALCCWLGGAGRFSSARKAVRFTGLDITVYSSDSKRSPGHLSRQGPPVLRWCVYEAGKTHARTGAPDHGYYAAVKDRKGGKRAALSEARKIVRRACHILGELGDDAFAAA

SEQ ID NO: 295890 - protein, 426 aa, unidentified
MSETVIDLYSRAAGIDIHQSLAVVSAIIPIGDDPFKCKFVRGEFDTFSEQGLKALVDFLRPLGVEMILMESTGVYWMAPYDALLEAGFNVAIGNAHEIRGMRGRKTDMNDADWLARVAKHGTFHPSYVPEREYRGLRSLARHSTRLRGMVSSEKNRLGKLFNAAGYRLNSVFSNIFGAGGMLCVRGILNGEKPEEILKKLPSARYKHSREDMLLALGGKFEEGDLVAARAALKIIDFLDAAISEGVGELERIVREKEERKCELLQTIPGIDVLAACLILAELGGGGLEAFDSAEALCAWAGLCPSQNESGGKSRPAKSRKGSKYLRRDVCECAQAAVKTKNTTMRSKFQSFMQRGKGYKKSIMAMGRKLLTYVYYVLKKDQPYVDPHIDYQKQHAEKHFQRFAAQLRRCTAKYDIQIINRETGVAV

SEQ ID NO: 295891 - protein, 424 aa, unidentified
MMIKLSGSKQLPNIFKGCGSMIYVGIDIAKQKHFAAATTADGEVLIPPFGFSNDAEGFKLLLSKIKSFKKENTLIGLESTAHYAENLICHLFELGYNISVINPIQTSTLRKTNIRKTKTDKVDCLLIIKSMIVNKPRIYSKIDIDSLRLKSLCRFREKIKKAKAKLKIQLVTYVDILFPELQYFFKSGIHTNTCYQLLKEHSSPDDIAALHLTYLANLLQKASHGRFGKEEAFALKGLAKSSVGTGNTAVSIQITQSIAQIELLEQQLADLDRAIESIMLEMDSVILTIPGIGFLNGAMILGEIGNISRFSNPSKLLAYADLDPTVNQSGKFNAKSTKMSKRGSKLLRYALINAAWNVSLNNKTFNDYFNLKRSQGNNHYAALGHVAHKLVRIIFKMPIFRLSKFLSVGIIFLLTIHSWSLSFS

SEQ ID NO: 295892 - protein, 341 aa, unidentified
MQDVTLIGIDLGKHSFHVHGQDQYGKALLRKKFSRKQLLEFLATFHTCTIVMEACAGAHWMARQLADYGHDVKLISPQFVRPFVKSNKNDFVDAEAICEAARRPSMRFVTPKNEAQQTLSALHRVRESLVHNRTKTSNQIHGFLLEFGISLPIGHAAIRRLPTILADQPLPPRLVQVLARLQSHFKYLDEQIAEIERELTAQLADDDLGQRLMAVPGIGPITASVLASEVGDGKQYRCGRDFAASLGLVPRQYSTGGRNNLLGISKRGDKNLRRLLVLGARSYMQRLERQTGQLARWVRAMLMRRHSNVVACALANKLARIVWAIAAHHTSFEIKEAPMHA

SEQ ID NO: 295893 - protein, 379 aa, unidentified
MTMATDTRDVCCAALELSKTGWVCAFAAPGAGRAAVYKMKAGDTERLLEVLNNGKTKAERELGRPVDVVLCHEVGYDGFWLARLLIARGVRVVVFDPASFLMPRRGRRAKTDRLDAEGMTRTLRAWLGGNHEAAREVQIPSVEQEDAKRIERERKTLVEERTSLVGRIKGLLALHGIWLAGKRIGQGLRAQLGALKTGDGRPLGPFLRGEIERLLMRYDILCQQITEVETQRKAALNGAAGQFPNANKVRVLSTLGGVGETTATVLVAEVYHRTFATRRHLASFLGLSPSPYSSGDVERDQGINKAGNKLARQTLVELAWFWLRYQPDSKLSLWWRERFGAKGARGRKIGIVALARKLAIALWRFVEAGVVPDGATLKA

SEQ ID NO: 295894 - protein, 388 aa, unidentified
MALQRTVSAFNPRLYDVFAGLDVDKRSIVVTFTDWRQSVKSIRMPYSSQHLIGYVRKHFPKKRIAFVYEAGPTGFGLFDQLTAKGHPCLVVAPSMVPRAPGQRVKTNRLDSENLSRKLRGGDLQSIHVPSPTYRELRHLVQLRDTHVSQVAATKCRIKSLLTYEGIEFPAENETWSAEAVRKLQELNCSGAVRFKLDNLIRTLQFHFQSAAATHKELRRYCHNNPELQKTIALLTSIPGIGLTVATHLAARLGDPEEITKLTQIAGFLGLASSERSTGDSQNRGPITRVGDSRLRNKLIQSAWVAIRKDPELLAFYRRIHNRNPKDAAAKKAIVAVARKLTTRIYAILKQQRPYVLRPDSSIVSLTKDETGGPTGKTRRRTERSATKG

SEQ ID NO: 295895 - protein, 341 aa, unidentified
MNEVSTIGLDLAKYVFQAHGADATGKVVFRKQLRRNKLLAFFAEQPACLVAMEACSGAHYWAREIGKLGHEVRLIPPAYVKPFVKRQKNDMADAEAICEAAQRPTMRFVPVKSEEQQASAVVFRTRDLLIRQRTQAINALRGHLAEYGVIMAKGTAHVGELVERAMDPKTNVPEAARFVLDILIKTMVTLEMQIKKLDSEITHRARKEKDARRLMTIPGVGPMTATALLALAPAAGSFRCGRDFAAWLGLTPLQRSTGGKQKLGATSKMGERTLRRLLIIGATAVVQQARRRGTSPSSWLGRMIARKPPMLVATALANKMARVVWALMANGGVYKAPAVAA

SEQ ID NO: 295896 - protein, 337 aa, unidentified
MENYIGIDIAKSTLQIYIPLNNMDLELENSPDGLKKLYSKLKKYYKKNIDEIVFVYESTGSYSTILESYCEKQKIKCFKVGAYQSSSFAKTIKNRNKTDKVDARMLSRMQILAQPNDIKVPYRDAKAHQIRSLMKYYQSLIKEENRLSNYLEAATYNLEDDYVLNKVQKKVTNLKKEQDTIISKILKIIKDNKDYKQAYDNITSIKGVGEKSGIILLYLFLRYPNASRQHITALSGLDPIKKESGTSVNKKSRISKQGLSLVRSILFMPVMTAVVFNDEMKYFYDKLLSRGKCKSLAQIAVMRKIILLAHSLYKNNEKYNPEKYLEYIEKEEVKIMA

SEQ ID NO: 295897 - protein, 374 aa, unidentified
MEQCTAFVGLDVHKDSISVAMMSTEGVAVELGQIENTPTAIRKLVRRLADKHSRLSFAYEAGPCGYGLYRQLKDMGHDCLVAAPSLIPKRPGDRIKTDRRDAMTLARLLRMGELTAVWVPDPHHEAVRDLVRCRDDVKQAERRCRQRILAFLLRQGRHYGKNNWTQEHRQWLNSQQFDHQEHQTVFTHYLHAIIESEERIGQLEREMGEALGSWSLAPLVRGWMAMRGIKLVAAMTLASELGDVSRFARPEGLMSFVGLVPSEHTSGQSRRQGGITKSGNRHVRRVIIESAWAYRHKPCWSSALRARAAGASEAVRVIAWKAQKRLHKRYHRLTTLCKPAQVAVTAVGREELGFIWAIGCQVMREQQSPAQAGV

SEQ ID NO: 295898 - protein, 397 aa, unidentified
MRYVGIDIASEVHVFAAVDERGETLLEPASFGEDHAGYEKLRAALGPPEGTVIALEATGHYWENLVATLAAEGFAIALLNPLRTRRFAGEDLARTKTDAIDALAIARFAAQKRPPSTRLPDPATQELRELVRLRQRLREDFDDRVRRLHRLVDLSFPELTRRVRTLDSELAIALLRDYPTAQAFAQTSPRRLAKLCYDGRHNVGDELATWLIETAKVSVGRHPGLPYRMGVRYACEDLDLLRRRLRDMDQDIHALLEQHEVGRLLTTIDGIGPTTAACLIAELGDPANFRDAAALASYVGVVPGLRQSGKQRPTRAGLSPLGNARLRAALWMPTLTAVRRNPWLKAYYERLRARGKLPKVALVAAMRKLLAAVHSVARHRRPFVPHLAVPLAAGAAT

SEQ ID NO: 295899 - protein, 368 aa, unidentified
MTTVANRKRDGKRNGKRDNRQWTPSADERVHVGLDVHKKAIHVAVWSVRQEQIVRQWVTPANDARLVEQLEPLRAAIVRIVYEAGPTGYRVARSLAEATLPVEVIAASKTPQVADRLAKSDGLDCRQLAEYSAKGLLHRVAIPTEQQEADRQVTRLRDSWTSKRRRVQQQIKSFLLQHGLGEPDGLANWSAKGLEGLGQIELGPELRFALDLMVEELGQLNGQLLRINQQIRQLSKTDRHGPAVAVLTSHPGVGLTVAMAFRTELHQAGQFTDAAQVGQYVGLAPRVSQSGQTRRDGPISRSGRGPLRALLTQAAWVWIRFDEAAKKVFNRLVSNTGSAQKAIVGMARRLAIRLWRMMVTGEVYRVAA

SEQ ID NO: 295900 - protein, 367 aa, unidentified
MEKSTKVFVGMDVHKESIDITLAEEGGEVRRLGQIGGDRGSLLKMVRRQQSQGGERVFVYEAGPCGFWIYRELAALGERCMVVSPALIPKRAGDHVKTDRRDSERLASLARAGELEAIHVPDIRDEAIRDLVRGRDDAVIAQRRVRQQLKALLLRNDIRYVGKTSWTGAHRRWLSELKLPEPAQRIVFEEYVDAIAVATGRIERLTRAIGTEGIAWRFAPVVAALQALRGIQFVHAVTLIAELGDLTRFASARALMGYLGLVPRENSSGEHRRQGAITKAGNSYARRALVEAAWAYRHPARVTRIIATRQTGLPKAACDIAWRAQLRLSSKYRRMNARHLHHNKIVVALARELSGFVWAIGQCVKPQ

SEQ ID NO: 295901 - protein, 298 aa, unidentified
MVSVGCGIDVHQQLIVASIRKSADEVETREFEAYTSSLISLREWCKSEGVTHVAMESTGVYWKPVFNVLEEDFEVILVNARHVKNVPGHKTDKKDSRWLSKLLLGGLLKGSFIPPRDIRDLRDLVRYRKKVVCQIASEKNRIIKILEDANIKLSGVLSNVDGGVGTKVINDLIDGETCINKLMRHYHGKQKVSREEFRKALEGHVTEHHKLMLRLYKDSISDKELQLQRLDEAIDKATEAYTVEIGLLQTIPGVGKDSAIKIVSEVGVDMSRFPDETHLSSWSGMSPGNSETGGKKKV

SEQ ID NO: 295902 - protein, 338 aa, unidentified
MSVYAGIDLHSNNSVLAVMDEGGQALLQCRRANDLSRILADFEPYREDLNAIAVESTYNWYWLVDGLMEHGYDVRLVNTAAVPQYSGLKHGNDHSDALHLAQLLRLGLLPEGYIYPREQRALRDLLRRRFTLVRQAVQLLLTIQSSFSRTSGKQVSANALKRMSPAELQALFADPNTRCGALAQYTVWLTVHEQIRQIEQRLSAQLLHSPEFTRLRSVPGIGPILGMTIMLETGPIERFASVADYASYCRMVESVRLSNGKKKGHGNRKCGNRYLCWAYMEAANYATRYSPLIRHWYDRKRSSKHRVVAIKAVAHKLARACYHLLKDGTEFDPKRAFG

SEQ ID NO: 295903 - protein, 464 aa, unidentified
MQSKRVSGKRARRSRPLLERVNANAAGIDCGAGAHYVAVPPERDPEPVRCFKSFTDDLHRLADWLVACGVTTVAMEATGVYWIPIYEILEGRGLEVLLVNARHVKNVPGRKSDVTDCEWLQQLQSVGLRRGSFRPTAEIAALRSYLRHRETLIHSAATTVHRMQKALVLMNLQLHGVISDITGTTGLRVLRDILRGERDPVLLARHRDPRCQASQGEIAAALTGHYQPEHLFVLGQNLELYDVLQGQIRSCDTQIEAYLRRLAGDTPVPQAPLPPARSRRKLSRNEPTFDIRSVLHQLSGTDLSQIHGIGSYNALRLISEIGTDMARWPSEHHFTSWLTLAPNNKISGGRLLSSRTQPSANRAAAILRGAAMSLGRTQTALGAFYRRLAYRIGKAKAITATARKLAILVYRILKGTLIYKDPGADAYDSRRREFVLRRLRDRAAGLGFSLVSRQTGELLEEGVS

SEQ ID NO: 295904 - protein, 368 aa, unidentified
MNKQDQSISSSGTSEASEDNDRKRVLRLGLDMHYRQVTVAMQEDGGRIKAVGKMSHGAFWSWVNKKLKEGWQIESCYEAGASGYWLHRQLEQMGVQNLVVVPKAMGQGGQKQKTDKRDSGMLCDALDRYLRGQDKALSVVAVPSVEQEQKRALIRNHLQIMADRGRFEARGKGLLCAQGIEVHGRWWKGKGWQELQTNPLVADWMREQLEDWRQKVLSAQEQQEGLRERIEALAPKSLPKGVGAYSAAVLEYEMKGFARFKNRRQVASYTGLCPGIHRSDSRGKEGSINRCGNPRVRWTLVEMVWRLSFWQPQYGPVRRLASGLAKRAKKRLVVAAARRLAIDLWRLATGQTTPEKLGLIMQNHTQSK

SEQ ID NO: 295905 - protein, 391 aa, unidentified
MFLLGIDIAKLNHVASCIDSSTNEVIFSNFKFKNDFKGFSALLNKIKSFDTKNLIIGLESTSHYGENLINFLFRHDFKVTLINPLQTSHLRKANIRDAKNDNLDSLNIAKSLLFTKLNFVSEKNIECFSLKKLTRFRSNLIKQRSKAKIQLTSLLDLLFPELQYLFKSKIHSKAIYSLLKKYPSTEEIVALKDDEISNLLYASSKGHFKKEKSIELKSLAKTTVGIKDTSISLHLIQLMELIELYTKQIKDIEIKITDTVNKLDTTLLSVPGISIIACAIILGETNNFENFSSSKKLLAFAGLDPKIRQSGNFNASSCRMSKKGSPYLRYALIFTAWNIVRHSEKFNKYYSLKRSQGKSHYNALGHVAHKLVRILFTLIKKNISYQEEKLE

SEQ ID NO: 295906 - protein, 367 aa, unidentified
MTSLAHRGFVHLGMDVSKDSISVAVLHPDRDLAVVDKISSDAESVRRLVKRVGRPSGLWACHEAGPTGYDLYRLLTKMGVRCDVVAPSLVPKGRGDRVKTDKRDARRLAGLHRAGELTAIAVPSPAQEAVRDLCRTRGDMVQDLTRARNRLTKFLLRHSLVYRDGSNWTLKFERWLSGLHFEDRALAATFNHYRSTVQLRDTSLAAVEADLEHYFDKEPFADAVLRLGAYRGISHMGGLCLGAEVFDWRRFPGARAFMSFTGLTCSENSTGLSEHRGEITRAGNAHVRGQLCEAAWSYQHRPAMGTTIKARQGGVSPATVARAWAAQTRLSARWHALAARKNVKSVVAAAVARELAGFCWAEMTATD

SEQ ID NO: 295907 - protein, 352 aa, unidentified
MEIIALDAHKRYSQVCVQGKNGQLLCEKRINHGKGQITEFLSRWTAGSAVAIETVGNWYWIVDEIEKAGMEPKLVHAHKAKLMLGSINKTDKLDARGLNRLQRAGTLPTVWIPPGEIRDHRELPRTRMVFANLRTRLKNRIHSVFDKYGLHTDFDGIADIFGRRGREQMALSIKKLPAQTRFTVRCLLRELDMVEGQIQRIEKRMKKVFARTEDVRRLMTLPGVGFILAVVMANEIGDIGRFATAQRLAGYSGTVPRVHSSGGSIRYGKLRSDVNHYLKWAYSEAGNSTAVNHKRLPGRHVSRLYKRIRAKSGHAKAVGAVGRHLAEASFWVLSRGEDYKEPNVKSVSPTVA

SEQ ID NO: 295908 - protein, 383 aa, unidentified
MKKNSIAKLQANKSQIRKMAAKQKLTVGLDLGDRTSRYCILDGAGNKVGEDHLPTTKVGLDSLFGKMAPSRIALEVGMHSPWVSRQLAALGHEVIVANPRKVRLITQSVKKNDRMDAEHLARLARVDPQLLAPIRHRGVEAQADLAVIRARAELVEARTKLINAARGLAKPMGERLKSCDADYVKESLADGLGEATQNVIRPLLKSVEDISQQIGVYDKKIREVEKRYAETELLKQVHGVGTLIALTYMLTLEDAERFEHSREVGPYLGLTRKQRDSGDRQPELGISKAGDELLRRLLVQAAHCILRDGAPDSDLKVWGMTKVQTGAKTGNGKKGSKRRKKKAVVAVARKLAVLLHKLWVTGEVYDPQYNRKAVEAGKGKAAA

SEQ ID NO: 295909 - protein, 408 aa, unidentified
MKTLHRRCAGLDVHSDSVVACARLTVRTKASHEVRRFSTATRDLLELADWLAAQGVTHVAMEATGVYWKPIWHILEGRFELVLANAAHIRNVPGRKSDVNDAVWISDLLAHGLIRASFVPPAQIQDARDLTRTRTQLGREVAQHIQRIQKTLENANIKLTSVISNIIGTSGRRMLKAMIAGETNPAKLAQLGSTRLKCPRDELTAALDGRVTAHHRFLIAHHLSLIEELERHIEAFDARIEKLLAPLRDAVAQLITIPGVSQVSAQVMLAEIGADMTPFPTAGHLLSWAGLVPRLDESAGKRRSTRVRKGAPWLKPVLVQCAWGAARSKGTYYQAQFFRLKARRGPKKAAIAVAASLLTAAYHMLKNGTFHQDLGADFLVKRDKVRIATKLANRIKDLGYDVSITPAA

SEQ ID NO: 295910 - protein, 345 aa, unidentified
MKVTTLGIDLAKNVFQLHGVNEFGKPVIKKQLKRDQMADFLVNVPPCLIGMEACGSAHYWARKLQGFGHTVKLMAPQFVKPYVKTNKNDAADAQAICEAVTRPSMRFVPIKNVEQQGVLALHRVRQGFVKARTAQANQIRGLLAEFGLIVPQGIGHISERVPELIEDACNELPGAFRRLVQRLLEHLKELDRQVQELEAQIVAWHRQSDLSRKLEQIPGIGPITACALVASLGDAKSFKDGRQVAAWLGLVPRQHSSGGKQNLLGISKRGDTYLRTLLIHGARSVIYHAQNKAADNPQCCWINGVVQRRNKNVAAVALANKNARIVWALLAHERSYEPGYVREQA

SEQ ID NO: 295911 - protein, 339 aa, unidentified
MLKRKFTLGCDVGSSTIVCSVLETPEKMILEPKEFANNFAGFERCISWLKSSDLKTKDVLVCMEHTGVYSESFCYYLYDQKIKIVIESGAKIKKSFKLATHKTDEIDSIAIAEYAIRYADRLIAWEPRHSAVESVKSLLSSRELFVKHRTAQKNALSAYKRKVVQNELIRKEYEKSIQGLNQTIKNLENEIESILKQNEYWLAVIKTIKTVKGVDKLLPYNMFVISNAFSMKLEYKKLAAYLRICPYEHSSGTSIKKKAKSPKYGPAIIRKLLFLAAKDACQYNEYFRAYYARKNSEGKCYFVIMNNVGNKLLKIICAMINSGKPYIPNYRSVNPILVK

SEQ ID NO: 295912 - protein, 423 aa, unidentified
MQNTAARKLKQVPEGYLIVGVDPHKKKHAAVAITQDFTIRDRFKFDNTREGLEFLLRRVRAEMVKSNCLGVMFAIETGGHYWRNVAYYLDEKGISFRFINQYTLKRRREGKDLNRRKNDYRDSEVAAQLLCTGEFVESILPQGVYAELRTAHNAYRRMVKERTRITNLIKGLLDSLFPEFVRVFKDPCGLTALNVLSTCPIPWLIANMAEKEFVVAIKAKHQGRLMRKKLAALHHIAGLSIGIVAGSKSISSEISFLAEKLELIRGHICIIERTLIRLVDETEEGKYLLSIRGINYIAIAGLLAELGSFKAYRSAKQMIKMAGSNPTESESAGKKRSRTPMSKQGRPVLRYCAWTSVIPMLRLNPDLRAWAKQRRERPAHANPLNGKEVVGAALNRLLRLAFAMVKNQTYYQVSKPELALVSC

SEQ ID NO: 295913 - protein, 453 aa, unidentified
MKKDQKNSSTPKVKKKTFSHGLPVYNPHAAGIDLGDTKHDAAISDGAGGYEVREYRSFTEDLTLLVAWLVSEGITTVAMESTGVYWLNLYLMLEEAGIEPYLVNAKHVKNVTGRKKDDTDAIWLQKLHSCGLLQKSFQPESEIRVLRTYVRQRKNLIIIGSDSVRRMQKALELMNIKLHTVISDILGKTGLEMIVAILQGERNPDKLAMLKDPRIKASDEEIRKSLEGIWKEEYLFMLQQAYEGYMFYQSQIKSCEDKIKEQLIKHAANVLDGDITDIKDIKKKPKKNQLSFNAQDLLKIIVGVDLCEVEGISEISCLELISEIGTDMSKWKNSKHIAAWLNLAPNTKITGGKIISSKMQKKKNHAGQTLRMAASTLSRSKSPMGDYSRKMKARLGKKGGVVATAHKLARIVYTMISEQRPYNKDVIANDHEKWKAKKIKYLEKQLDQLKKVA

SEQ ID NO: 295914 - protein, 428 aa, unidentified
METPALNPPVVAWIGLDWADQAHEIRLQAADSARAESFTVEQKPEALHAWVAQLRARFPQGKVALALEQSRGAVIYALMNYDFLLLYPVPPKTLARYREAFAGSGAKSDPADADLLLELVRAHPDRLRVWQPDDALTRRLRLLVEYRRKTVDNRTALTNQLTDLLKTYFPQALEWVGELGKLAACEFLEAWPSLQVLQGASRSELRKFYRRHRRLCAEELEKVLDAIAQARPLTEDPALTEASALMTQTLVTQLRAVIDAVARLDQELEKLFGQHPDQPIFGSLPGAGDALQPRLAAAFGTHRHRYQSAEEIQNFAGISPVTESSGKKHFVRWRWACPKFLRQTFHEYAAASLKKSLWARAYYEQRRQKGVSHHAAIRALAYKWIRILYHCWKTHTPYDESVYLQALRRRHSPLWLAANSLSIREAQA

SEQ ID NO: 295915 - protein, 315 aa, unidentified
MYLGLDIAKAKIDCCLMHDTKYLHRTFENNQDGFIKLTNWLEKHTSNKVYACCEATGSYSEAIADYLHDTGHKIAVVNPLRIKAFVTSELQNVKTDKQDAKSIAIYCQRNQPELYKPASPSERELKALTRYLDGLKELLTSHTNRSLVAHHSVKPYIETSIKNTKAEIKVIEKVIQSRIKSDDDLDKQAKLLKSITAISDGTIPHILTLFADKQFKTAKQATKYVGLNPIIKQSGNKSTRHLAISKMGDKYIRSALYMPAVVAFRMAVYKPFIKRLKDKGKTNKQIICAMMRKLLVYCFTVLKTGNQFDPDLILK

SEQ ID NO: 295916 - protein, 472 aa, unidentified
MGYRSTIKRNKGHRQESKRYTVGELETMPLLYPDLAGIDIGSREHYVSVPGDRSEHPVRTFGCTTPDLLEMANWLKLCGITQVVMESTGVYWVPVAMMLEDAGLKVALVDARESHRLSARKTDVYDCQWIRQLYACGLLRNAFRPAAQILLLRSYWRQRQELVSMCATSLHHMQKALELMNVQLHKVISDIAGVTGMRILRAIAAGESNPESFVPMVHPNCKCSSAQIVNALTGHYASEQVFALGQALRRYDLYQEQIAELDGELHRSLGELPPKQNSEPDVATAAPKSPDGKRRKNQSHFDLAGEVRRITGVDLTRIEGIDALTAFTVITEQGIDMSPFPTEKDFASHLGLCPNNQITGGCVRKRRTRRVHCRAAHALRLAAQSLARSKTALGAFYRRMKARHGAAKANVATAHKLAKILYRMLKHGEQYVARGLEDYERRYRERLLKNLKRQAKTLGCELLVLETGEVLS

SEQ ID NO: 295917 - protein, 474 aa, unidentified
MGKGSGNGTTRGDRKRNARRERLRGLLPRDGAVVGIDLAEDKQALAVIDHDVRVLARKTVRVKAFRLGQALDWAVARARAKGFDRVAVACEPTGARWLQVQRLCAERGLPLVCIQPLVSHIAREQQDYTTHKTDESDCVMIARLAVELHCYVPEELDETWGYLRQLGRRREQLITAETASMHRIREFLSVAWPAVLETCAEPLKPVTWLTAVQLVTQQGGGQPARLAAMGWQAFTAAVRAAVPDRGGKRAWRPIAVRVFDALTDTEGVVAWSRRGLLRRVADELAGLQRIRAQLRAAEADMAAALDELGLSRLGQIPALSAVGAAAILAETGDLHRYDSSSSVVKHAGMSPSDNASGAFPGDAHITRRGRPGLRLAVWRAVWPMLQFNPVMAAKYQALTQAADAAEQQATATAPQASAAAAAARARRAKARVACAASLLRWLYSMVVHGTSWDAAAAAGETCLPAARSSQAEAA

SEQ ID NO: 295918 - protein, 309 aa, unidentified
MNPDQKIYCGVDVSKNYLDAFTDGKTVRFANTVKGICALMKQAGDVHYVFESTGGYERPAAWHFLAGGRTVSIVNPGRVREYAKSIGQIAKTDRIDAQIITRFAELVHPREAEVPSEDQRKLAVLVERRQQLIDMLLAEGNRLDTAGEPYLHKMIQKHRQWLEKQIQQIEQAIEETIGDNAEMKQKAARIQSIKGLGRVSAATLLAVLPEIGSLSRKEVAALAGVAPYNRDSGTFRGRRHICGGRKRLRACLYMAAVCASRSNPHLKVFYNRLVEENHCPKKVALTAVMRKLLIAANSAVKNPEFLVAA

SEQ ID NO: 295919 - protein, 475 aa, unidentified
MNIKGSKKKNQVLSVNIFEQQEIIAKADAIKAELKASTWHELETKGKFDKNDKLSFVSDDMLILGCDIGSETHYVRAIDTRGRELSKSAFGFSNMAEGFESMLDWSTKLAAANDKKQIVLGLEPTGHYWFCLTTWLVAKGISVVQVNPYAVKQTKEVEDNSQLKDDKKDPKLIANLVKDGNFGMPYLPEKLYADIRRLSMFRDQLNEDRIRNLNRLHREMKIYFPEYKDAFGKIDGAFSLELLKEAPFPDELAALGTEGMKQIWHEAKLRGRGYANASSILEYARKSVGIRDGADAGRQAVKWFVSRIIELDEQLSDIENQLNQRCNEIPYAKNILAISGIGENILSGILAEMGDMSRFDNVKEIQKLSGLGLVACSSGKHTGETKISHRGRKRLRYWLFQAAKSAVAHSEEFKELHVYYTTRKQNPLKKMQSLIVIACKILRVIFTILTKGTTYDPKKLLGDIVRPDQSIPQAA

SEQ ID NO: 295920 - protein, 402 aa, unidentified
MRFSVGIDWASAAHAVCILDQTGRVHWQGAVPHTADGLADLLARLRRFRRRGSLRVALERPSGLLVDTLLDAGLEVVPIHPNALKASRPRYSAAGAKSDPGDAFILADLLRTDGHRFRPLHPPSDDTRALRALVRGRDDLVAQRIALANQLRALLERFWPGAAAIFADVDSPIALAFLARYPTPDSAARLGEQRLAQFLGQHAYCGRRPVAELLARLRRAPTSQVGAAEADASRDVVRALVAVLSPLVAHVQQLSAAITAALAQHPDGPLVQSLPRSGAVNAAQILAELGDDRARFPTDEQFAAEAGLAPVTHASGQHRAVVFRWACNKRLRRAVTTFADNSRHASRWAALVYQRARARGCRHQHAIRILARAWARILWRCWQDRTPYHVGRHRAAQALAAA

SEQ ID NO: 295921 - protein, 330 aa, unidentified
MSDNPIVGIDVSKLKFDVCLLKGQVEKFETFSNDSAGFLELEKWLKKNKVKTVEACMESTGPYWQELAEYLHNAGNIVSVVNPTKIKGFRQSELKRSKTDKIDAGLIARYYRALKPAPWTPMPKEIQTLQHLERHLDTLKGLRASEKTRLKNLPDSELLAAYINAHIAFLDQQIASVERAIKQQIKTHPKLQQQYNLITSIIGVKDVTATVFLGEIGYHERFSNTREIETFCGLNPRVFQSGTSVSKQSRISKVGNARVRKALYMPALAAMYFNPQLRDFAARLSAQGKPKRVVIVAVMRKMLRIICGVLKSGRPYQAEYCSEMPQLMRV

SEQ ID NO: 295922 - protein, 337 aa, unidentified
MMYSGIDLHSNNSVVAIIDDADRVVAQKRLPNDVTKIVGFLARWQDELAGVVVESTYNWYWLVDGLQDAGLHVHLANTTAIKQYEGLKHSGDETDARHLAHLLRLGILPTGTILPREHRAVRDLARKRMQMVNCCTTHVLAVENIMARQLGGRMPSNQIKRLTNDAIDQMPLAADVGLAMKTNIAVIATLQSQIEVLERRLQECVKPRPQYGLLTSVPGIGQTLATVIFLETGPIERFADVGNFASYARCVDSVRTSNRKKKGEGNVKNGNKYLAWAFVEAANFAKRSCPEAKRFHERKKAKTNNIVATKALAHKLARACYHILREGKPFDGTRCFA

SEQ ID NO: 295923 - protein, 364 aa, unidentified
MKKSNKKQQGGTVAESKPAQVVGLDLGDRYSRYCMLSNTGEMMEEGRMQTTAAAIEKHFGSEPRMRIALEAGTHSPWVSRLLKSYGHQVIVANPRKIPTLTKSESKNDRNDAEQLARMAAFDPKLLHPIEHRSPERQQDLNLIHTRSVLVRARTMLINSARGLVKSAGQRLPACSSEVFPEKVPAAVPPALKAACRPLLEQITQMNKTIAAMDKQIDKLDKKYPEITVLRTVPGVGSVVASCYVLTLDSPQAMKTNRQAGAYLGLRPRQQQSGDSDPQCGITRMGNTYLRSLLVQSVQYILGRFGPDSELRRWGLKLAASGGKRGKKRALVAVARKLAVLLLSMWRNRKNFVPFPQPAAQLVTA

SEQ ID NO: 295924 - protein, 400 aa, unidentified
MRVVFGIDVSKASSEVAILVNGEKVHGYTIPNDAIGFNRLLGDLRTVYQPEIVFEATGVYSRRLQAFFEDNSYAYIRLNPLESKKQLNSLRVRKTDKIDAEKLATSQFILNRKPSYVQEALYQELRNLSRFYQNLTEDIVCSKNRLHKVLQVTFPELANILSSPTGKQYWNLVMASPCNSFVLELDDAALRAIIRQSTSKRISEKRVTYLVDKLTKLANQSYCAVKKTSPVIEEVKYYAGELLRLSEHRQGVVEEMVTLAQSLPEYEILLSIPGIAETTATSIIGELGDIRRFHSANQINAFIGIDLRHYESGNFLAKEHITKRGNPYARKILFKCIHNIASASHTNPCHIADFYEKRKRQSQVTSTKPHTIASIHRLIRTMYYLITHNKLYDYTSTQNH

SEQ ID NO: 295925 - protein, 413 aa, unidentified
MTDESLSWFAAVDWGSEKHQACILDAKGDVAGEREFPHSGTGLTELCDWLLSVACDTSAVAVAIETPHGPVVDALLDRGFAVYAINPKQLDRLRDRFCVSGAKDDRRDARVSADGLRADRHLYRLVQVSDPAVIELREWSRLLEELQQERVRLCNRVRHQLWRYYPHLLDLTDDVGADWFLELWALAPTADKAGRLRETTIARLLKQHRIRRLNAETICRILRQPAIKVAAGVTEAAVLHLRSLFARLRVVNRERHQAERKLDELCTELSERASEGQSGEPCDVAILKSLPGIGRVTLAALLAEASGPLSRRDYPALRTLSGVAPVTKRSGKSNIVVMRYAAHARLRNTVFHWARAAVQNDPKSSCRYAALRKRGHSHGRALRNVADRLLQVACILLQRQTMFDPDRCQPAAA

SEQ ID NO: 295926 - protein, 365 aa, unidentified
MTSLAHRGFVHLGMDVSKDSISVAVLHPDRDLAVVDKIPSDAESVRRLVKRVGRPAGLWACYEAGPTGYDLYRLLTKMGVRCDVVAPSLVPKGRGDRVKTDKRDARRLAGLHRAGELTAIAVPSPAQEAVRDLCRTRGDMVEDLTRARHRLSKFLLRHSRIWRGGSAWTFRHEAWLAAQRFEEAALQTTFDHYRAVVSSREAQLAAVEADLKLWVAKPPFAEPVRRLAAYRGVTALGALGLQAEVCDWRRFGRAAQMMGFVGLVPTEYSSGGSTRRGHITKAGNVHLRTQLVESAWAYQHRPNVGTGIAQRQAGLPPEVIARSWAAQLRLCGRFRHLAARKNTKSVVAAAVARELAGFLWAEMTS

SEQ ID NO: 295927 - protein, 337 aa, unidentified
MKSWSVTVLSETSVLKKFSQHPSPEALHGFLARSYPGAEYHSVYEAGFCGFWIHERLTALGIDNIVVNPGDVPTKSSEKLRKSDAVDSSKLARSLRANELKGIYTPDSASLEMRSLIRLKNSITKDTTRQKNRIKSQLRYLGIGIPQEFLEPFSNWSKRFIAWLKEVETLTPSGRQALDIQIRHLEELRRQKLEMTRALRTLAKTDRFREPLRLIMTVPGFGQATGMAFLSEICDIARFRNAEQLAAYIGMIPMCHSSGEKDGTGDITVRRNAVMRCNLIEAAWVAVRQDPAMNLFFTEQCKRMPKSKAIVKVARKLVNRLYFVLKHQTDYVNSVMS

SEQ ID NO: 295928 - protein, 430 aa, unidentified
MNLKPIAGIDVSKYFSEMVVISPTNEIIARLTIHHNNPSDFDRAIEILKKVEEDFAARPTIVMEATGHYHKILSRFFTSNGWDVAIINPIQSNSIKNAGVRKVKNDKIDALWIALTFRLTNSTTAQPSSEILECLKNLCRQYYNLSDELTSYKYRLTSVVDQIMLNFKEVFPDICSKTSLAILENYPTPNDILGADTEKLISIIQQTSKKSYQWAKEKYELLIAKAKEFKSFSISNLANVTMLKVYINMVLTLQQNIDKIFESINQLVQQSSQTQPSISENINLLQSIPGIGFLSAATILAEIGDFEKFSKPNKLVAFFGIDPSVNQSGQFVGTKNKMSKRGSKILRRILFTIALANIRTKRDSKPCNPVLFEYYQKKCQQKPKKVALGAVMRKIICIIFAVMRDKKPFELRTPEEHIRRCFNNTAVYCV

SEQ ID NO: 295929 - protein, 412 aa, unidentified
MDVVYERCCGLDVHKRTVVACLLTPGPQGQPQKAVRTFGTMTGDVLALAEWLAAAGCSHVAMEGTRVYWQPIWNLLEDRFVLLLVNARHVKAVPGRKTDVKDAEWLADLLRYGLLAGSFVPDREQRELREVTRYRTALLRERAATANRLQKTLEAANLKLASVVTDITGKSSRAMLCALIAGETEPTRLPALAEGRLREKIPQLEQALVGRFGPHQRFLVAQQLDHLDFLDERIAQISAEVATRTQPLAAAVAQLDAIPGVGQRTAEVLVAEVGTNMARFPTADHLASWAGMCPGNRQSAGRQLSGKTRKGSPWLRAALAEAAQAAGRTKGSSLQAQYRRLAARRGKQRAMVAVGHTILRIAYHLLQDPASVYDERGAHGVTERTRQAIERDLVRRLQQLGNTVVLHPVGAT

SEQ ID NO: 295930 - protein, 385 aa, unidentified
MAPIRMPEAVIGLDVGKSSHWACVATRDGEVLLSTPVANREDDLDSLFGRFPDALVVVDQSRNIGALALARARAAGMSAAYLPGLAAHGAARLFAGDAKTDERDAMVIAKTALGIPDALLPVGDPGPTIAAARALAAQRNFLTCENTRNKNRLRSILLESCPAFEALVDLSDGSQLRLMASLGGAWSVADAGPRRAAALTRGAARGKIEALVRSTTSSTRPDASVVAAEDRAVKLLARRISENSAEIEAITAEISALLEGDDTYRCLLTVPGIGPKTASELAISIDIEDFPSHDRLASYCGLAPRNRQSGTSISSVTASRQGNKRLKNLLIFSCNCLTRTEGRWGDYYTRCRERGMSHGKALKALARKRLKVIYAVMRDMVPYAA

SEQ ID NO: 295931 - protein, 310 aa, unidentified
MERIVVGIDVAKHQVDVHVRPQGGAFRSLTDEAGLTELIERLQALGPTLVVLEATGGYEVPVAAALGSAGLPVAVVNPRQVRDYARATGQLAKTDTLDARILARFGEAVQPAVRPLPDAQARLLGALVARRRQLVEMLAAESNRHRQGHERQVRELIATHLEWLRQALKALERELDDTIRTTPIWRERENLLTSVPGVGDVTARTLIAELPELGHLDRRRIAALVGVAPLNRDSGTLRGRRMIGGGRAAVRNVLYMAAVTAIRWNPSLAAFYQRLITAGRPTKVALVAAMRKLLVILNAIVRDGRPWQSV

SEQ ID NO: 295932 - protein, 342 aa, unidentified
MKVSTIGLDIAKNVFQVHGVDEAGALVVARRLRRGQVLAFFAELAPCLVGLEACATAHYWARELRRLGHEVRLLPPVYVKAYVKRNKHDAADAAAICEAVGRPTMRFVSPKGEEEQSVLMLHKTRALLVRQRTMLANALRAHLAEFGFVARQGREGLSKLLALAEAEESEELAALARPGLRVLAAQWRALDLEIRGLERALKAWHLGNERSRRLAEIPGVGPLTASALVASVGDAGVFSCGRDLAAWIGLVPRESSSGGKRRLGPISKQGNRYLRWLLVSGAMAVLRQGKRRGFRNRPWLARLAAERPAKLAAVALANRTARIAWVLMARGERYRAPAPQAA

SEQ ID NO: 295933 - protein, 342 aa, unidentified
MKDTMIGVDLAKSVFQLHGASLAGHLKFRKKVTRVQLRHFMAKHEPAVVVMEACGSASYWAREMVKLGHEVRLIAPQYVRPFVKRQKNDAADAEAIVVAAQRPEMRFVEPKSEDQQACAVLFRARERLLHQRTELVNALRSVLYEYGHVFPKGIAHLRRIEAVLTDPASDLPALVRDECQDLLEQISEQTARIEAKTTKARGLAGTNDKARRLQTMPGVGPQTALAISGFAPPMDSFKRGRDFAAWLGLVPRQYSSGGKERLGRISKAGQTDIRYLLIIGAMSRLTVLARKSIQEGSWLARMLHRKPLMLVAIALANKMARAIWAMMTKKEHYRDPARAVST

SEQ ID NO: 295934 - protein, 355 aa, unidentified
MFHVGLDIHTKRISICALDEKGQVVHRSQVRSIQDLLRVLTDLPDRFQVCYEASCGYGHFHELLRPLATRVVVAHPGQLRLIFRSRNKNDRNDAERLAKLLYLGEAPAVHVPSADVRTWRELINCRSQVIAKRTRAKNAARALLRGAGVTPPKHPGLWTKEGLAWLRRLELPTASQQLRRDLLLEEMETLLRQVQRIERQLTQQAQRTPAVVRLRSIPGVGLRTAEAVAAFIDDPHRFPNAKAVGSYFGLVPCQDQSGDRNRLGHITRQGAPVVRQLVAEAAWQARRRSPTVRAYFERAQRDDPQRKKIALVATAHYLVRVMWAMLKRGTDWQEGPALATASGAAAGGDPAPEVD

SEQ ID NO: 295935 - protein, 265 aa, unidentified
MNSPDRFIGMDVSKDTLEVAVQPKGERMTFANQEDGISLMVDFIQSFCPRLIVLEATGGLEKAVVCALAVRELPVVVVNPRQVRDFARSKGILAKTDKIDAGVIAQFAEAIRPEVRPLKTEEAQKLDALLSRRRQILQMLTAEKNRLQSAPVWTQKDIQKHIHWLEKNLDQFNQDLDRMVKESPIWRAKDEILQSAKGVGPVLSVTLISHLPELGTLQGKKIAALVGVAPLNRDSGKFRGRRTIWGGPSGSPFCSSHGDKDCHSF

SEQ ID NO: 295936 - protein, 310 aa, unidentified
MNDTIGVDISKASLEVWRLSDRKHIRFSNDKPGLKELCKWLGPDPVRVVYEATGRFHRDLEAAVSNAGHGPVKVNPSRARRFAQATGNIAKTDRVDARMLAQMGATLALERTEVRSQSMHEIKELHVARVALIKDRTACRNRLDTARNKIVLSQLKARERQIDKQIAQIDAELVRLIKAEPELARRYEILMSIRGIGPVAATAMIVDMPELGAMTPKEAASLAGLAPVTRQSGSWKGKARIFGGRHGLRTLLFMPAVIATRYNAPLRKIYLALYEGGKPWKVAITAVMRKLIVLANALIRDDRKWAEIAP

SEQ ID NO: 295937 - protein, 402 aa, unidentified
MNCVGIDISKGKSMIAVMRPFGEVVVSPFEVLHTDSELSKLARLLKSLDGETRVVMESTGNYHAPVAWLLHDAGLYVSVVNAMLVHDYGNNSLRRGKTDKKDAVKLANYGLDHWLTLPRYVPEEDTRLMLKTCYRQYQQYSKVQTMLKNNLISLLDTTFPDANRLFTSPPRADGSEKWVDFVAAFWHCECVCGLSEKAFTAKYQKWCRKHGYNFSQDKALDIYASACGRFGVMPKTNTAKLLVEQAISQLQTTSAALAALKQEMQSLAASLPEYPVVMGMFGVGPTLGPQLIAEIGDVRRFHSKKALVAFAGIDAPPYQSGQMDIRSRSISKRGSASLRRTLFLVMGVLLQCAPMDEPVYQFMNKKRSEGKPYRVYMMASANKFLRIYYASVKAYLDSLEHD

SEQ ID NO: 295938 - protein, 347 aa, unidentified
MNFYTQQHKHYCGIDLHARAMYVCILDQQGTKLVHKNLPTTPEAFLRRIAPYREDLVVGVECIFTWYWLADLCSKEGIAFVVGPALYMKAIHGGKAKNDRIDAHKIAVLLRGGMFPLAYVYPAEMRATRDLLRRRCHLVRKRAELLAHIHNTNSQYNLPEIGKKLAYKANREGVEDHFPDPSVRKSIEVDVSLIDHYDKLLGEVELYITRTAKGHDSQPFTRLQSVPGIGPILALVLLYEIQDIARFPRVQDFVSYCRLVKCAKESGGKRLGTSGKKIGNVHLRWAFAEAAILFLRQNQLGKEYFAKLAHKHGKAKALTVLGHKLARAVYYMLTRQQAFDRQRFVAA

SEQ ID NO: 295939 - protein, 354 aa, unidentified
MDSVKYIGMDVHKETISIAVRNSSGKLVMECVIETKASTILQFFQGLSGSLQVTFEEGTWAAWLYDLLKPQVTELVVCNPRKNALLKEGSKSDRIDARKLSELLRQGALSAVYHGEHGLRMLKELSRSYLTISKDLGRVMNRLKALYRSWAIPCAGTQVYAPRHRSEWLSKIREAGVQRRAEFYYQQLDALRFLRQQARKELLAEARKHNATKLLRQIPGIGALRAAHLVALLQTPHRFRTKRQLWTYSGLALETHDSAQYRYVQGQLQRSRKPQQLRGLNANHNHDLKDIFKGAAMRASTCHGPLRDFYQTLLAKGMRPTMARLTLARKIAAITLIVWKKGVSFDANYLKQAA

SEQ ID NO: 295940 - protein, 343 aa, unidentified
MEHVAIDLGGRESQVCIRRADGTVVEERRCRTDELGMYLARRPPSRVVVETCAEAFHVTDLAKAAGHEVRVVPSMLVRTLGVGNRGVKNDRKDAQVLSEVSTRIELPSVHVPTQESRERRATCTSREALVAARTQLINSARGWMRTEGVRVRQGATESFPLRLRSTGGAKLPTHIESILQVIELLNTQIAEADRRLREIAESSATCRLLMTMPGVGPVTAVRMMAALDDVSRFDNASKVASYLGLVPGEDSSSGRQRRTGITKAGPPSVRRTLIQAAWCVRRVRPFDPMVIWAAEIERRRGKHIAVVALARKMAGVLFAMWRDMKPYAAKRAARACLPEAPMA

SEQ ID NO: 295941 - protein, 351 aa, unidentified
MNVTHYIGFDVHKKHINFCAKTASGEIVDEGKLVAQRSVLREWAMRQSPWRGAMEATLFSAWIYDTLKPYGQALEMAHPAMLKAITASKKKNDRIDARTISDLVRCNLLPTCYVATPEIRELRRLLRYRNLVVRESVRMQNKIAGLLMETGTPFVKEKLHGKKYFANLLKSLEEVPESVKDLLRLSRGTMEMFQATQKRMVQQLLANPSLGQRVERLASIAGVGEITALTWALEIGDPHRFSASAKVMSYCGLTSALKSSADKQQRGPISKQRNQWLQTALIEAAKLAPRWNPQLAALHARELERGHRNRATLAVARKLAAYLLAVDKSGLPFQAHTPTTEPTAPLLDRAG

SEQ ID NO: 295942 - protein, 462 aa, unidentified
MPERNDRETGESNRRQLQGLPVIRRNVAGVDLGSERHWVCAPTQDGSGREIASFGATTPELLRLAEWLKARQVESVAMESTGVYWIAPHEVLEAQGLQVLLVDTRQLARVPGRDKKTDPSDCEWIQRLHSCGLLRGSFRPEEAVCMLRTLVRDKANLVAESGDWLRRMQKSLDQMNVRVHRAVSDIDGVTGMAILRAIAAGERDAQKLAQLRDRRCNKTQQEIAEQLSGHWREDHLFSLQQALKMYDAVQERIAAYEQEILRQLEEMEEPGQGGETAPPLTNANKAKAIKRRGQEAKRQALYRMSGVDITQIDAIGVETVEVVLSEYGPDLSPFPTEKEFVAHVTLAPRVPRSGGKPLKKKKRNSASTRVAAALRMAALSLRHSQTALGAYYRKLAQRLGGDVAVFATARKLATLIYRLLRWGQPYMDEGIEAYEKRYRQQRVKSLMAKAKDLGYQLTPLNA

SEQ ID NO: 295943 - protein, 349 aa, unidentified
MDNETIEFEQVVARGCGLDVHKETVVATVSGTGIKKETRTFSTFTRSLKELKEWILSLGITHVAMESTGIYWKPVFNILEGSGLTILIVNARHIKYVPGHKTDKKDSEWISRLLLAGLLKGSFVPPKEIRQLRDMTRYRRKLQGAITAEKNRMIKMLEDSNMKLSTVLSKVHGVSGTRIIDALLEGQTDPVLLASLCHGKVKAEKEEIILALEGKLTEHHKFMMGIIRRDIQQTEALINELDVEIEKQLLPYAQEVALLSEIPGVGHQTAGDLISEIGVDMEVFATDKHISSWAGVSPGNNESAGKKKWENKPREQTSSIYPQRIGMGGISNQGKLSKFKIQKIGRQKR

SEQ ID NO: 295944 - protein, 355 aa, unidentified
MVMIGVDSHKRTHTVVGVDEVGRRLGERTVAATGDGHLELVRWVRRWPEVTFALEDCRHLTRRLERDLLGAGYRVLRVPTRLMAGARRAGRQPGKSDPIDAAAVALAALRHPDLPVAELDGPTRQVKLLVDHRRDLVAERTRMQNRLRWHLHELDPGLAVPSRGLKRYRVIDDLTAALDSFDGVVARIAGELLSRCRQLTAQINALEGELRSLVRVQAPALLALPGCGVLGAAMILGETAGAHRFRSKDAYARFTGTAPIPVWSGSSAGKVRLNRGGNRTINTALHMIAVTQARGVGPGKAYLDKLTCNGKTRTEAVRLLRRRLSDVVFAALRADEKSRSEQPAAAGEPDLLTAA

SEQ ID NO: 295945 - protein, 374 aa, unidentified
MRYLGLDVHKHYIHGYWFHPGQKGAHCRFANTPEGWRQLAAQITPETWVALEATGNAFQLYDLLVARAGQVAVAPPLLLKRFGSGRHTDRVDAERLAKMLALGTLPTVWVPPDEVRVVRALIQQVEACSRMARAWQNRAKSALLRAGWAVPARQPVAVWLAAHGAAVDEPTRIRVTSALTLAEQATAEADHLRGEILRRVQERPELAWLWSLPGVGPWVAVVLWATLGDAQRFHTARQVTRYAGLDPTVHQSGEADWRGHISRQGSPLLRRLLVEAAWWAVRSSDGPWAAQFAAWVPRLGKRRAIVAIARKLLIAAWRVWKDQRVAREVDVRRYQEKLRRIRTTFRRLPPYPLAERWAQWTGADSDPPPAVVPA

SEQ ID NO: 295946 - protein, 340 aa, unidentified
MTITTVGIDLAKNVFAVHCIDQNGKAVLVKPKVSRAALSELIAGLPPCVIGMEACSGAHYWARLFRQYGHDVRLMAPKFVSPYRMAGKTGKNDAADAIAICEAVQRPHMRFVPVKDESQQAMQCLHRTRQGFIQERTATYNRLRGLISEFGVIAPQSTDALRHVVSDQKETLPVQVRLCIDDLLTHVTNIEEKIAEYDRVLSRVAKTDHRSQQLMELKGVGPTTASALVASIGNAHDFKNGRQLAAWLGLTPSQYSSGGKSKLGRITKAGDAYLRTLLVQGARSVMVGAENRTDPFSRWVCSLIGRRGYWRAVVAIAAKNARLCWASLQGSAWKTENIPR

SEQ ID NO: 295947 - protein, 318 aa, unidentified
MNIIGLDISKDTIDATLHKTNGSIHYIKFKNNDDGLKQFRLWIKGNRIRKAYIGMEATGIYYEKAADMLSSYYTVYVINPLKIKGYGKSRFNRTKTDKADSNLIADYIKRHQDTLIPYQIPKNKALQKLINLKNQLHQHQKQIKNRLHSTEEDFIRNIHQDLIDTIQDKMEQVKIAISEQIKKQTDNNHYRNLQTIPSIGKDTASVLYAQLTEKHFKTANQFVSYAGLSPAIIQSGTSVRGRGRLSRYGNRRLKSTLYMPALCAYRFNAFPKLINNLKKAGKPKMVIIVAIMRKLAKLAYYIVKTGQPYDAERHRLNQ

SEQ ID NO: 295948 - protein, 400 aa, unidentified
MDLMYERCAGLDVHKRNVLVCTSTPDAQGQRHKEWRTFSTMTPELLRMRTFLKDLGVTHVAMESTGSFWKPIFNILEGHMEVLVVNAQHLKAVPGRKTDVKDAEWIADLLQHGLLRPSFVPPAPQRELRELTRYRTSLVEERSRIINRLQKTLEDANLKLASVASDLMGRSARDILAALLAGEVDPSVLAQLARGRMRAKRDLLEQALQGLLKPHHRFLLSEQLADIDALDEAIERMSTEIADRLRPDERLLQRLETIPGIKRRLAEVILAEIGPDMSRFPSARHLASWAGMCPGNNESAGKRLSGKTRKGSPWLRSALVEAAHAAIHCKDSYLAAQYQRLAIRTLLVIIYQLLSQDKDYEELGGNYFDEWDRQAVQKRLVRRLEKLGYQVTLEPTSRAM

SEQ ID NO: 295949 - protein, 421 aa, unidentified
MQVLFERCAAVDVGKDVIAVVARLPGDRPDGRLTVKRTFKTFYGVLAEAARWLSSLGVTHVAMEATGIYSMPVYHALIEHGRFTQVLVCNAGHVKNVPGRKTDLADAEWLAHLLECGLLRGSFIPPADIKAARDVLRYRTKVVQSRTSELQRLGNVLQDAGIKIDSVASSIATKSGRAMIEALIDGERRPKVLADLAKGKMRAKIPDLELALEGRFGDHHALMCRLHLDHVAHLDAMIAKLDAQIEAMMTPFRAARDLLTTAPGIGALAAAGVISEIGADPAAFFITAAHLASWTGLCPGNHESAGKRHHGRRRPGNQHLQSLLVECAWAAVRHDGYLRSLYHRHVMKWGGYRSPPAKKKAIIVVAHALIVIIWHILATAKPYHELGADYFTTRLDPERETRRLIAKLEALGHQVSLQPAA

SEQ ID NO: 295950 - protein, 342 aa, unidentified
MNLPIRIGMDTSKSVFQLHGVDENEGVVVRRQFRRAEMIRYFERLPPVLVAIESCGSSHHWARLLQSFGHEVKLIPPQYVKAYVKRGKNDAADAEALCEAVTRPSMRFVPVKSKERQAACMLMTVRERLVSVKSQLSNAFRSYAAEFGIVGPAGRQNVTALIKRVLEDDSLPEMARDLFRLQAEEYAAVQARLAKIEAKLMKWHREDDVSRRIATIPGVGPIGSSMLSMKAPPPETFRSGRDFAAWLGLTPKDHSTGGRQRHGGITKAGDSVLRSTLIVGATALLRHIRKGRHKPTLWLASLLERKPPKLVAVALANKFARIAWRLMISGGVYNQPVVAMPT

SEQ ID NO: 295951 - protein, 313 aa, unidentified
MEQVKTSTINAGIDVGKFKLDVAIGESAEAVTVNNDAAGIAQLVDWLTGHGVSRVGMEATGGYERAVRLALEAQGLQVVVHQPIEIKLYGRISRQHAKTDASDARLIAAATAAILRPAKPADPALVELGERLTAYEHVADQLMSLRTFRQSVSLIDLIELIDRQIDQLKAIKQTLCRHLLIAIKACVALRSRYELLTSLPGVGPVVAISLIVRMPELGQMQRGQAASLLGVAPHARDSGKWQGQRFITGGRARPRRMVYLAAMAARRHDSKLADFANRLTAAGKPPKLAIVAVMRKLIEAANLVLKRQAPWTT

SEQ ID NO: 295952 - protein, 406 aa, unidentified
MDIAEGTTGRFVIGGVDTHKDLHVAAVVDDHDRLLGSQSFPTTRHGYKQMLAWMRSFGPVQRVGVEATGTYGAGLLRYLQKASVEVLEVTTPDKGDRRKRGKNDDLDAQNAAHAAFTGRRTVTPKSRDGMIEALRVLKACRKTAVAARRVALQMIHNTLVCAPDDLRDQLRKLTRMELIRTLAAWRPDMTDFRNVVSAYRITLRSLARRYLELHDEIGDLDGMIGAIVDDLAPDLVAQNCIGHESAAQLLLTAGDNSERLHSEASFAALCGVNPVPASSGKTTRHRLNRGGDRAANSALHIIAIGRLRTEPRTKACVAKRIAEGHSKLEAIRCVKRYIAREVFSLISQRRREINQLPVPLDTTEGHPGQPIRLAAVRRRAAGGRSTHLDGRAWAVDGQRVHRAAMA

SEQ ID NO: 295953 - protein, 368 aa, unidentified
MEEVHAFVGLDVHKATITVAVADAGREGEVRHVGTIENNPEAIAKLVRRLGRRHGAVEFVYEAGSCGYNVQRQIAGLGFACRVCAPSLTPRKPGDRIKNDRRDAIALARLLRAGELTYVWVPDPLHEALRDLVRARHAATQDVRRDRIRIQAFLLRHDLRFEGKAWSSRHRKWMLNRRFVHPAQQIAFQFYLNALEHDEAHKVGVEAQIKELLATSPWAAQMQALQALRGVGPIVAATVLAEVGDFSRFAHPRQLVAYFGLAPGEHSSGSTVRPRGITKAGSSIARSVLCEAAWNYRTTPKVGQWMKEHRPPVPQDIIALAWKAQLRLHKTYRRLSARGKRSVVVIAAVARELLCFIWSIGQRVPLGA

SEQ ID NO: 295954 - protein, 333 aa, unidentified
MKKKWFIGIDISKKTLDVVIYDPTKKHADETNYKQVLNAQAGYESLFGWMKEKGIRSKQSVICLENTGIYGYDLCLFLESCNQDYCSFNPLDLKRSLGLVRGKNDRVDAGRIARYGYLHRDELVYSKLSGTTILLLRDLSSERKRLVKHLAENKGFITDRKGREPTSTSRRAEDMVRILEEQIQSVEDEMRRIISSDSAISLNYQLLNSIKGVGDINAINIIVHTNNFKGFETARQYACYLGIAPFGYSSGTSVRGKTRVCATGAKLLKADISQAARSAVVWDKELKEYYERKTKEGKEHGVVLNAVKFKLVCRMFAVVRRGTPFVDLITYKN

SEQ ID NO: 295955 - protein, 338 aa, unidentified
MVYGAIDLHMRHSQIRIVDEAGDVLRDQRVPTSRERLVKAFDGLGPMRIVVETGTESEWVAQALEAAGHTVIVVDPNYAPMYGDLQRRVKTDRRDVAALAEANRRGWYRAAHRTSARQRETRQVLRARRQIVQMRSGAVALVRSLVKQDGDRLPRCSAERVPARLAQLELPAARRAILAPLVEMIDTATEQIATLDHALERRAAADPVVQQLRTVPGVGLVVALTFRAQLDDVDRFAHAGQVSAAIGLVPREDSSAERRQRGHLTKTGSSELRSLLVQAAWACWRSKQSTTLRAWAEQLAARRGRRIAVVGLARRLSRVLYALWRDGTTFAVKRLAAA

SEQ ID NO: 295956 - protein, 403 aa, unidentified
MDHTTIEVIVGIDMAKGDHFAHAITMTGEELFARSLANNQADIEAAIKTASEHGTVALVIDMTASVAQLLLSVAAQQGVPVAYVTGLQMRRAADLYAGTAKTDPRDAFVIADFAQRNSDRLTWLEVSDELLTELRVLNGRDVDLAGDATRTINRCRDALVAVSPALERAIGGRLTKPGIRDVITKFPTPSALKAAGKTRISNAIKKRSPRLSTKVADEIWDALEAQSVTLPAEQAWGEVISDLLSDLERIQARRAELGTQIEKVFLSHPLGQVLVTLCGFGPRTGARTLAEIGDPSRFENGSRLASYAGLAPTDWRSGRSINGAFQHRGGNHRLKNAMFLAAFVATQHDPDARAYYQRKRDEGKKHNAAVICVARRRCDLVLAMLKTATPYDPSRHEELPIAA

SEQ ID NO: 295957 - protein, 378 aa, unidentified
MSQSTTLYVGLDVHKDSIDIALAEASRDAEVRHLSTVAGGNEAVTKALRRLVSAGHRLHIVYEAGPCGFALQRHLGALGWRCDVVAPSSIPRPSGERVKTDRRDAMKLARLARVGELVAVRVPDSADEAMRDLVRGREDAVREQRNARHRLKALLLRNGIAYSGRAAWSGAHLRWLAGVKLGHPAQQIAFQEYLHAVTEAGARIVRHEQALRDALSGWTLAPVVLALQALRGVQLIAAITLVAEIQDFWRFASPRQLMAYLGLVPCEDSSGPRRRQGVITKAGNAPARRMLVEIAHQYRLAARVSPSIARRQSDLELPKAVTDIAWNAQTRLCSRFRRLSARRLPHNKIVVAVARELCGFVWAIARQVTPEPSLPLAT

SEQ ID NO: 295958 - protein, 400 aa, unidentified
MAVMIGIDPHKGSHTAVAVGAAGEPLGKLRVRACPDRAGKLVAGAQAWPGRTWAVDGARGLGRLLARQLAAAGERAGDVQPKLAARVRLLEAGDTNKTDPDDARSVAVAALRSTGRQEVTADGHAVVLTVRAKRHRDLSRTRNQVVCRLHAVLCELIPGGVPDEITAGQAARIREQLAPAGAVAQARCELAAELPAGIGHLDAQRREVKKKLAAAVTASGTSLTEVSGAGPVIAATVIGDVITVARFPSRDHFAACNGTAPVEVSSGQRTIYRLSLRGSRRLNHAVPMAAITQIRHKHSDGRAYYQRKLAEGTTRKEALRCLKRRISDAIYARLRADARTAGPGGQPGNDTGSSVTGSHPGHRLFGQATSGPEPSLPAPATFTQATPAPEPSAKKIQRAT

SEQ ID NO: 295959 - protein, 369 aa, unidentified
MDHHSVAYVGFDTSKTKHAVALAEGGREGEVRYLGEIEATPAAVERLLGKLERKYKTLHVCYEAGPTGYGLYRHIRALGYACDVIAPSLVPKRPGDHVKTNRRDAVTLARLLRAGELTAIWVPDEVHEAVRDLVRAREAAAQDLRHKRQQVLSFLLRHGRIFTGHRHWSRAHLRWLAGQAFTHPAQQIVFQDQVDAVADAQARLERLDHQLAELVPTWSMAPVVAACQAMRGVSFLVAVTFVAEIGDVRRFESPRQLMAFLGLVPSERSTGDTVRRGGLTLAGNRRVRRALVEGAWSYRHPARITETIRVRLENLPKAVREIAWKAQVRLSARYRRLIAAGKKAPVAVAAIAREMAAFLWAIGRVVEPA

SEQ ID NO: 295960 - protein, 322 aa, unidentified
MSGFIGIDIAQSDFVVAREGMAGSRSYPNTERGHRDLIKDLSRDGEKVELIVLESTGGYERRLSAELGGAGLPVAVVNPRQVRDFARSTGQLAKTDQIDAHILADFAARIRPEARPLATDEQDELKELLTRHEQVMQMLTAEKSRLIQAEGQGRRQSLRRKIKTHIRFLERELNILDSDLDGTLRKSAIWREKDDLLQSVPGIGKGTARILLGFVPELGTVSSAEIAKLVGLAPFNRDSGKFRGVRHIGGGRARVRSILYMATLVATRFNPTVKAAYQRLLASGKPKKVALVACMRKLLVVLNQMIKTRTRWRESLTLAHTS

SEQ ID NO: 295961 - protein, 319 aa, unidentified
MTIVGFDVGKYTLVAVRIDRSVQSKETFTINNTKEEITVCLDMLKAKHRHLTIGSEATAEYHKTLALEAIKREIPFRLLHPITTKQFTRATVRKKKTDLTDALVIAKLIYQREGRLLSEKDFSNSKILFRTAVKLTMHSQSLILMKQHISDHYPEETKAIEILDNCINVIHDSVKGFRKGSEVELGQDQETLNLLRSIPGIGQTISQIILAEIGDINRFKNSSSLVAYAGIDPKVRQSGSILAKNTHLTKRGSPYLRRAVFMAASIGMRHDQDMKDYYNKKRKEGRRYKEAVIALSRKMINRIYAVWKRKTPYVKVQNT

SEQ ID NO: 295962 - protein, 344 aa, unidentified
MIIIGCDFHPSWQMISWLDTETGETGERKLMHATGEAKLFYEGLTGPVRVGLESTGNSHWFVDLLTELGHEVWIGDAARIRASQVRKQKTDRRDAEHILDLLVKDSFPRIWTPSRPERDQRQLLIHRYKLVTLRARVKNELQHLALNQGMQKGRSLWSKAGQKQLLDLPLQFWAGTRRKNLLELLKQMDQQLVVLDQAVKKAAEENEKARLLMTQPGVGPITSLAYVLTMGDVARFQRGKQVASYLGLIPREYSSAGKQHLGGISKQGNRFMRMLLVEAAQGAVRYDPEFRSEYLHRCHQKPKAVAKVAAARKLAIRLYWMLRTHTPYPEVVRIESSSRVPLDA

SEQ ID NO: 295963 - protein, 348 aa, unidentified
MMIIGCDFHPSWQQVSWLDTETGETGERKLVHAEGEAQQFYQGLAGPVLIGMEATGNSQWFIELVEDLGHAMWIGDAAEIRASYVRKQKTDKRDAAHILRLVVEGRFPRLWSPDREVRDLRQLVLHRHKLVLIRTRVKNELQHLSLNKGMQRKRKLWSETGMQLLRELPLKPWAACRREDLLGLLVMLNQQIGALDLAVQHAAEENPQAKLLMTQPGVGPNTALAFVLTIGEVSRFPRGKQVASYLGLIPREHSSGGRQKLGSITKQGNRMLRSLLVEAAQIAVRYDPGFCKQYLHRCHSKPKAVAKVAAARKLAVRLYWMLRTQTAYPEIVRIESSPRVPLVVRQSG

SEQ ID NO: 295964 - protein, 425 aa, unidentified
MPQSLNIGGFMASHLETNQYSAFVGIDWANDKHDICLQDPINNKREFSIIKHNVEDIETWALSLKKRFGGLIAVAVELTKGPIIYALQRYEFLVIVPINPTTLSKYRSAFKPSKAKDDPTDAEIALELMLRYPEIFTPLKIQSLNIRKLMYLVEKRKKLVNDKQRFVNKIINNLKQYYPQAIDWFPKKETNIFCNFISRWPTLQQAQKARRATLKSFFNDNHIRSHNKVKERINEVKSALPLTDDEAVIETHSMIVLALVEIISILMKHIKCFDKKIAELMKILPDANLFENLPGAGVCYAARLLVAFGEQRDRFSSANEVQQYSGIAPVTERSGNKCWVHWRWQCSKFLRQTFVEWAAHSIYSSYWANIFYQKKRESGSSHQAAVRALAFKWIRIVYRCWKDRKPYDEVKYLNALKQRGSPLLG

SEQ ID NO: 295965 - protein, 343 aa, unidentified
MELYIGLDVSLASTAICVVSSHGKVIRETIAASEPEELERALRSLSGSVVGVGLEAGPLSQWLHRHLTDAGFDTVLMETRQVKGALKAMPIKTDRRDAEGIARLLQMGWFRPVHCKSISAQEVRSLLSARKAIQQAIINLELSIRGVLRNFGLKMGRVAEGRFEDRVRELADGNAMLEAAANPILTARRALRTELADLEKLSRDHAKSDPVCRQFMTMPGVGAIVALTVKSAIDDPDRFRSSKDVGPWVGLTPRREQSGERDIMGAISRAGDVGLRTVLYQAAMVMLNKGCPSWLTTWAWTVAKRRGKRRATIALARRIGVILHRMWQDGTEFRFARAEEAAA

SEQ ID NO: 295966 - protein, 315 aa, unidentified
MEDSQVFVGIDVSQSCLDVAARPTGEVWQVPNDADGISDLAQRLVGMSPFLVVLEATGGLEWALTAELAAAGLPVAVVNPRHVRDFARAVGILAKTDILDAQVLARFGQAMEPEPRPLPDAEAKDLQAMVSRRRQLVEMITAEKNRPRTVIARIRPQVEEHIRWLEKSLTDLDQDLDGFIRSSPMWRTKERVIRSVPGVGPVLSATLLANLPELGELSRGQIAALAGVAPFNRDSGTLKGKRTVWGGRRRVRAALYMAALVASRYNPVIKDFYQRLCSLGKPKKVALTACMRKLLVILNSMVRHGREWQPNLQAP

SEQ ID NO: 295967 - protein, 337 aa, unidentified
MAKEYVGIDLHRRRSVIYRMDEAGERIDCVRINNDPVWFAQEVCKSPKGSHVVIEATYGWYWAVDLLQEHGYVVYLSNPHGNDWGKRRVKNDERDARDLADLLRLGRLAEAWIAPPPVRELRELVRFRYKLSGLRTGIKAQAHAVMAKNGILPIRKDMWGESGTAQFDSLELPYAFDHRLAVLRSLVHTYDEEIDRLDRTIHSMYKDDPGYQAVQAIYGVGRVFAAVFLAEIGDVHRFDSPQALCSWAGLTPTHRESDGKVHRGRITKQGSRLVRWAAIEAVARYHGGDAFTEKFRAIAERRGRTRANVAIARKVLTLVYYGLRDGEIRCLADTKAA

SEQ ID NO: 295968 - protein, 318 aa, unidentified
MNTNTLQNINVGVDTGKANLDIYIRPLDIFFTVSNNEKGIKDAIKTIKKHHPQRIVIEATGRLEMPFILACSKANLPFVIANPIHIKRFAGAIGRRAKTDKLDAQLIAHYSEVIQPKLSQLKPEIMRLMSDLVARRHQILTMQTMEKNRLQQLPKTLHSTINPIITAFKKQIEKIETLIVSLIENTPDYQNKNIILQSVPGIGKVSAAAIISNVPELGYINNKQAASLIGVAPMNRESGRYKGKRIIQGGRAQVRTVLYMAMMSAMQSNPVFKATYQRLHDAGKPKKVAIIACVRKMVVILNSMLRDGAMWDENIAKN

SEQ ID NO: 295969 - protein, 438 aa, unidentified
MSNKVIFNLDELFISVGIDVGADFSWMSIALPNQQFVGKPYKILHNSIDSLTTAVSKIKEAEELYSLESRIFLESTGIYHYPLFCYLRDKGFNCSVINPIITKNSTNINIRKVHNDRFDSKKAALVGLKPDLKVSLMPSDLALNCRNLCREYYDLIDNRSAYVNKLQGELRMAFPQYLGIFSKVTINTSLTLLETYTSPSAFLKADKQEIIDIIRSTARFGLTYAQNKYNAIIQAATDANQFGYIIDSNIKRIRLYISFIRKYDEEINSILESLHELVDANEDSDFVKQIHLIETFKGAGFLSAVSIMGEIGDFSAFSKPKQLFAYFGLDPAVKQSGKFEGTKVQMSKRGSAIARRVIHTLTLQSISISRNREAKNPVLREYYLKKCDSKPKLVAMGAVSHKVCNMIFAILRDNKPFKIIAPQEHIKQYNSAKCDIAA

SEQ ID NO: 295970 - protein, 337 aa, unidentified
MNNKFCCGIDVSKKKLDVVLLKEEKFHYKVFENSNEGVILLQEWIKNKLEKDSFVHFCMEATNVYHELVAFTLLENKNFKISVVNPRRVKSYSKSIVNTKNDKTDAKVLAQFCKERNPKQFTPQSKERRELRDLSRLMDNLVELRIMQKVRLQTFNTEAAARVVKSTIKSIENTIAETEEEIKYYYDNYPELKQEYELLNSIPSFGKRVSNVLISEIYKDEYGMYNSKKLTAFFGLEVRETESGSSVWNKPRITKFGNPRVRNMLYMAALVSIRHNLKMSDFYLRLVNKGKPKKLALIAVMRKLLVIACAILNSQNKYDENHISTLKTKKETLKISA

SEQ ID NO: 295971 - protein, 347 aa, unidentified
MLADQLDYVVGVDPHRDTHALAVVEVRSGAVVFEATTQADAEGYACVLRLVDRHAPGRRAFAVEGTGSFGAGLTRFLVAQRERVLEVGRLRRERQSGKSDALDAIRAARSVLGQTRPARPRAGGEREALRALTAAREGAVTAKRAGLCQLRGLLVSAPEPLRAELRSLTRAQLLRRLAAVRPERRQDPELRGTLLALRALAQRVQQLTAEERELAGEIETLTRKLAPQLLEQPGVGPLAAAQILISWSHRGRIRSEAAFARLAGCAPIPASSGQTIRYRLDRSGDRRLNRALHMILVTRRRAHPPTIAYINRRIQEGKSRREASRCLKRYLARNLYRLLEHGAPLAT

SEQ ID NO: 295972 - protein, 388 aa, unidentified
MHVYVGVDIAKELHYAAIMDSDGVVSKPFSFENNDKGFNLLLSHLAPYNKESILIGYESTAHYQENLAYFLKSLGYRTAEINPLQTAALRKANIRNTKTDSVDARLICLALMNHHIQGDQRDSVRLDDLYQLCKMRMDTMKKRTTCKIQFVAIMDRIFPELASFFDNNLHTNTIYRLIESFPLPSQIKKTRIDILTKLLHKASRGHFKKEKAQKLKDLADISVGIPSDIFAFQAQQLVHQIEFYTDQIQTIEERINTNPDVMSSPLMTIPGIGTFCVACILSAIKNINDFGAPCKILAYAGLDPVIRQSGKFTASHTRMSKRGNSLLRYALVWSAGNVVKNNHTFAEYYRHKTEDQGKSHYQALGHCAKKLVKSIYHMLKYNESFNLD

SEQ ID NO: 295973 - protein, 427 aa, unidentified
MNYTQNEKIMSITENTLVVGIDIAKQFQYARAFDYRGIELSKVKSFENTADGFKSFHEWLKLVAKENKKDNIIVGLEPTGHYWFTLGNFLKELGIKLVLVNPFHVKRSKELDDNSQTKNDLKDPKTIAKLVIEGRYSQPYIPEGIYSELRIAMGMRESLTKNLNIIKNKVDHWLDKYFPEFNDVFADWEGKAALMSLTEFATPEEVLLTGVQQIVATWRKEIKRAVGNQRAVRLVEAAKISIGIKEGLKMAKRELEANLEQYELYLKQNEQLEIEIEELAFQIPGVKEMVSIKGVGIMTAAGFISEVGDIKRFTHPSQIQKLAGLNLIENSSGKHKGKTSISKRGRSRLRSILFRVIMPLVSKNNEFKMLHEYYTNRKENPLKKKQSLILLCCKLIRIFFTVITKKVEYNPQKLISDTGFNLQLKVG

SEQ ID NO: 295974 - protein, 340 aa, unidentified
MTIVAGLDVHRAQITFDALDRDTGEVKRGRVRATPEAVREWAEAFAGAEVHVAVEAGTGWLFVCEALREAGAIPHLAEPAETSALRGPKRRAKTDRGDARWLRTLLCEGRLPEAWIPPAHVREWRTRTRLRKTLVDERTRWLARVQATLFHHGIAGVPDKLLSAKGREFLAGLELPDSARERIGVALALIEALDRQLAPLEAELRQLARRQPGCRALMRHYGIGELTAPTILCELGDVTRLSASRKAVRCAGIDIGVHRSGRRSRAGKLTKQGSPQLRWALYESAQAACRPTSPDRADYLALKQRGLSHPRASLTIARKLARRCFHTLRELGPDALEPVA

SEQ ID NO: 295975 - protein, 355 aa, unidentified
MSQEKYIGMDVHQATISVAVMDGNGKLVMECLLETKAETILEFVQGLRGTLSLTFEEGTSAAWLHDLLKPHVSRLVVCDPRKNALLKEGNKSDRIDARKLAELLRTNQLKAVYHGEHGIRTLKELGRSYLTLSKDVTRTMNRIKSLYRSWAIPCAGTSVYAPRHRAEWLAKIVEPGVRIRAERLYQQLDGLQSIRQQARRELLQESHQHPAVKLLRQIPSIGPIRSALLVALLQTPHRFRSKRQLWAYSGFAVETHDSGEYRYVRGKVQRNRERITVRGLNDNHNRDLKNLFKGAAISASTRPGPLHDFYVARVAKGMRPTMARLTLARKVAAITLTMWKKGVSFDPQQLSRQSV

SEQ ID NO: 295976 - protein, 420 aa, unidentified
MLFVGDDWAEDHHDVEIVDDTGRRLVRARLPEGIEGISRLHALLADHLPEEWADPDTGTVGGQVVVGIETDRGSWVAALVAAGYQVYAINPMSAARYRERHSTSGAKSDAGDAHVLAEIVRLDRAHHRRVAGDTPEAEGLKLVARTHQSLIWDRQRHVLRLRGTLREFFPAALAAFEAAGLDLTSPDALELLGRAPDPDRARALSRSRIAAALTRARRRDVEAKTGKIQAVLRAPELRQPAAVQRAYAVIVASQVRLITALIGDIAELEAVVAEGFGRHPDAEIYASQPGLGKILGARVLGEFGDDPHRYTDAKARKNYAGTSPITRASGKKSVVLARYARNKRLGDAVHQWAFCALTASPGARAYYDTLRARGIGHHAALRQLGNRLVGILHGCLKTRTTYNETTAWAHHTTEQSSTAA

SEQ ID NO: 295977 - protein, 327 aa, unidentified
MDQEGKVLAKSRVSTDRPAIQNYLKSLDGLKPTKAVIEAGFNWSYFYDQLAEEIEEVCLAHPLKTRLIAEARIKTDSLDSETLAHLLRSDLIAQAYAPSWETREVKNLLRFRISLVRIRTSLKNKVHSVLDRHQVEDNVFRGLTDKFGKTGMKIMRSLELRGNDRAILNGYLDLIEELSRRIAALNKQVKALVKEDEISSYLKSVPGFGDLLGLLLRYEIDNMERFASAKKLCSYVGIVPSTYSSGGKTWHGRITKEGNKWLRWAVIEAVHGAIITSPSLRRYYNSVKQRRGDKAATIALARKLLEIIYHVWKEKRPYYEKELAYTV

SEQ ID NO: 295978 - protein, 424 aa, unidentified
MKFKMQDKQNQLIERISDKHLVVGVDIAQQLHVARAVNFRGIVVGDPLAFENNEDGFASLLKWMDKLQRLNKLDAAIVGMEPTGHYWINLSKWLFKQGIEVVTVNPHLVKRNKENRDNTQSKSDKKDALVIADMVKNGYYAFVRNTSESFEILRVLMSNRDVVVKRLVSTINQLNRWVDIVFPELRQVFKDITGKGAIATLRLFPYPMELRSLKSHDVVSGWKSIMKRQPGLKKAQLLLQLARKSVGTRQALEAYKFHLEQLLEEYDLAVLQLERVEQEIKDVLKQIPFAKKLLAIKGISEISLAGILGEAGDLSGFSHGNSLLRHAGLHLAEASSGKWKGQIVISKRGRSRLRRFLYLATMSLVMNNTEFRAIHTHNVKVKKMKKMKSIMKLVGKLARIFVGIARRNESYCADKVQPITELVA

SEQ ID NO: 295979 - protein, 342 aa, unidentified
MKTVTTIGIDLAKNSFSVYGVDAKSKPVLSRTLSRASVVRFFANLPSCLVGMEACASSEYWARTIESLGHEVRRIHPRYVKAYLLGAKNDANDAAAICEAVQRPNMRFVPHKSPEQTDIQCIHRIRQGYVKSRTALVNQTRGLLAEYGIIIRQGICAVRNQLPALITDEKNELSGLMRRNLTSLYESLCFLDDRVHEQDKLLKVVAKENEACQRLMKVPGIGIMTATILLTIAGVASNFKNGREFAAFLGLVPRQNSTGGKVRLLGISKRGDCYTRTLLIHGARAALCRMISGYTPEYRRNLWAVELAARRGKNKASVALANKTARVVWSLLTQGGEYKHAA

SEQ ID NO: 295980 - protein, 401 aa, unidentified
MKESWCGLDWASRSHAVCVVEETGRVRARFEVSNTGKSFAGLIKRLRKLKVTGIGIERPDGPLVEAMLEAGLVVYVIAPSMLKAVRARFGAAGAKSDPGDAFVLADLLRTDHHRLAPLVPDGSATKGLRALTRTRKDLVEARVALTNQLEAQLHVCFPGAVGLFADLHSAVAAAFLRRYPTASRAAKLTEARLAGFLRRIAYSGRTPVPELLRRIREAPAATLGAEEDEARATCVLALIDAIETCQSRAKELEADVVERLEVHADAQIFTSLPRAGRGVRAASLLAEIGDVRDRFPDAESLISLAGAAPVTRASGKHRSVTFRWVCDKKLRQAVVDFADDSRRASPWAADIYQRAVDRGCTHPHAVRILARAWLRVIWRCWQDHTPYDVAKHRGAVMLVAA

SEQ ID NO: 295981 - protein, 403 aa, unidentified
MTTDHEFAVVASTTDVQKVFVAIELSKSTWVVAIQPPAVDKVSLFRIAGGEIERLFELFEQARRRAGQPIEICACYEAGYDGFWIYRALTARGVACTVLDSASIQVSRRARRVKTDRTDAESLVRVLMAIYRGEHQVAKIVQVPSPEEEDDKRLLRCRGNLLRDRIQHMNRIRGLLNLQGVRHIDPNRSNWENELVNLRTGDGRSFPRQLMNEVRREGKLLGTVVRMLKEVEAEIAGMIRDERKRRHPAQRGQNHPIARRLAEIHGVGPQTAGILATEVFYRGFKNRREVASYVGLTPTPYNSGTMVRDQGISKAGNRRARAVAVELAWIWLRNQPESKLSRWFRTRVGDSAGRVRRIAIVALARKLIVALMEWMPPPDGIAVCQGGDVCRIPGNEEGIHEKS

SEQ ID NO: 295982 - protein, 341 aa, unidentified
MQVTTVGIDIAKHVFQLHGVSATGEVLLRKRLRRAELLPFLQQLEPCLVGMEACGTSHHWARELTSLGHTVKLMPPSYVKAYVRRNKNDAADAEAICEAVTRPAMRFVPIKNMEQQAVLIMHRVRAVLVRQRTMMANALRGHMAEFGIIAPQGLKAVRDLARLIEDPSLSIPDLARATLKVLVAQLGSVEEGIRPIEARITAWHRADETSRRLASIPGVGPITASAIAATVPDPSQFRSGREFAAWLGIVPRQKASGMKNVLGGISKRGDRYIRRLLISGAVAILRYTRSSPTPERAWMKALLQRRPPKVAAVALANKTARIIWALMKRKEFYKAPMAATI

SEQ ID NO: 295983 - protein, 313 aa, unidentified
MQTSSLTYLGLDIAKLTLDLSPVTSPKGHSFTNDPAGHRRLIKFIRSAATPSHLILEASGGYERRLMDALHQALIPFTLINPRKARDFARSKGILAKTDRLDAKVLAEYGRVNQPAATPPLAPTRTRLKALVARRQELLVIITQEQHRSEQHQDPFVCRQGAALLRALKKHLVKLEAELATLELSEASLHHQVQRLSSVQGIGRRTAWLLLAALPELGTLARGQAAALAGLAPYNYDSGPFRGQRHILHGRVQARRALYMAALVAARCNPVLRPVYQRLRAAGKPAKVALTALMRRLAELANHLLKNPEFKLT

SEQ ID NO: 295984 - protein, 422 aa, unidentified
MKKRIYRRMPVNDFQPETISHADLGGKLVFAIDVAKVDMVAAIAAADGRVLQTICWKAPDQNLAVLSILRSFRAAGITVEAVMEPSGTYGDVLRHQLEKDGFPVFMVSGKRTYDAKEIFDGVPSLHDAKAAAIIARLHADGLSTRLAVEVPERRQLKAALAILDLYQERYLQLVHRLESWLARHWPELPTLLELTSSSLMALLARIGGPADVAAHPAEATKLLRGISHRLIADDDVAAIVASANSSVGVPLVGLERDALMAIAEDAYRAHRAFATAKTKVAQLADTTPAATLVPVVGHTTAAAVFAEVGDARSFHCTRAFLKAMGLNLKEKSSGTVHGQIKITKRGPSRVRQLLWLAIFRWIQKDPIANAWYQRKKQRDGGRASRAAVALMRKLAKGLYHVGRGGTFDSSKLFDTRRLQVAT

SEQ ID NO: 295985 - protein, 339 aa, unidentified
MMMCYAGIDLHATNSVLVVIDDADRVLYQKRLRNDLPLILAALEPYRVAVQGVAVESTYNWYWLVDGLMDAGYRVHLAHAPALPQYSGLKHADDQHDARWLAHLLRLGLLPTGYIYPKAERAVRDLLRKRSQVVRHKTRVVLSLQSLLTRLTRTRLSLPRLRQLTPEGVRALVPFPEQVQAVMSSMTVLQCLEQEIRTIEGTVREAGRTQPGYALLQTVPGIGPILAGTILLEAGDLQRFATVGHFASYCRCVGSEHVSNGKRKGAGNTKNGNKYLSWAFIEAAHFAIRYEAVIRNFYQRKQARTHPLVALKAVAHKLARACYHMLREQVPFDVSRAFG

SEQ ID NO: 295986 - protein, 351 aa, unidentified
MQVTFGIDVSKSTSTVCELIGESKNELTITNDRPGFIQLLKELSAFSKHPQIIFEATGVYSRRLQAFLEDYDYDYVILNPLKAKKEMDMGLRHNKTDKTDAYHLALIQRLHHHPVKKLQSQTYKQLNSLSRFYDQLTSDLVMAKNRLHQALQSTFPEIETLFCSAKGKNYWQILLHYPHCDLVRKNDKKQIINWLMQLKGVGFKHAQKTADKLITLAYKAYPVVSCDSVEVEQVQYYAHRLLSLSEHREKIIERMVQLAKSLPNHDLENLESIPGFAQTTAVRVLAELGDLRRFSNPNKINAFIGIDPGRYQSGEMDSNLSITKHGNAVARKLLYRAIVKLIMHQRPILVI

SEQ ID NO: 295987 - protein, 338 aa, unidentified
MQVYIGIDWSEDKHDVVFMNQAGVDVARMTIPHSLEGFVQLDAARRKLGLAHDDCTVGLETAHNLIIEYLWSQAYQQVYVIPPSVVKSNRSRFRQSGARDDQSDGYLLADILRTDRGRLQPWHPDSLLTRQMRAKVSWIHHLTRASTRLSNRLRAVLLRYYPATLQVFPDLSTQIALEFIRAYPTPQAAARLTLAELVDFARQPGYSHPKKLPSCYARLKRDYPPASPETVLIYQDEATQLARLLLQMTHTKVNVLRQLHALFRQHPGYPIFSSLPGAGELLEPALLVKFGDDRQRFPTPASVQALAGTCPVTDQSGKRKVIKFRKACDREWRSLSQA

SEQ ID NO: 295988 - protein, 343 aa, unidentified
MYVGLDVHKRYCYYAMVDGRGTVVKKDRFRTTGEDLEEFAGALPEGSQVAIEASASGSFVYEQLDEQGIDVHLAHPTMVKPFAKKHVKTDKIDAIVLAQLLRMEYLPESYVPGEEMRDLRTLVRHRAGLVRARTSLKNRVHALLTMEGVQPPAVSDLFGKRGREFLETVKIREPRRLAVDNYLKVLDVLSERITVVEEILEDKAKVTKEVGWLESLPGIGFHNAMLILSELGEVTRFSSPKGLVCYTGLAPKVAQSGDQIRYGHINRQSNGFLRWALIQSAWAAVRSSTPNRFQRIYRKVKARRGSKVAIVATARHLAESVYWVLIKEEAYREIKAGEASSLS

SEQ ID NO: 295989 - protein, 408 aa, unidentified
MKTLHRRCAGLDVHSDSVVACARVIVRTKVTHEVRRFSTATRDLLEMADWLAAQGITHVAMEATGVYWKPIWHILEGRFELILANAAHIRNVPGRKSDVNDAVWISDLLAHGLIRASFVPPAQIQDVRDLTRTRTQLAREIAQHIQRIQKTLEDANIKLTSVISDIVGMSGRRILKAMIAGETNAAKLAELGSTRLKCPRAELTAALDGRVTAQHRFLIAHHLSLIEDMERHIAAFDARIEELLVPLRDALAQLITIPGVSRVSAQVILAEIGGDMTPFPTSGHLLSWAGLVPRLDESAGKRRSTRVRKGAPWLKPVLVQCAWGAARAKGTYYQAQFFRLKARRGPKKAAIAVAASLLTAVYHMLKNGTFHQDLGADFLVKRDKARIATKLANRIKDLGYDVSFTPAA

SEQ ID NO: 295990 - protein, 435 aa, unidentified
MIAAEIERCAGIDVGKKWLAVCILVGPLNAEPRREIRRFGTNVADLEALRDWFRQEGITHAVMESTGSYWKPVFNILEGALTVYLVNPHQVKARRGHKTDNKDGYWQAHLLRHAMILPSFIPKRGIRELRDLTRRRKKLLGTASSEKNRVQKVLEDANVKLGNVLSDLFGVSGQLMLDALLRGKAQPQEIAQCAKRSARRKIPELIAALEQHGMSDHHRRVIRLSVDHMAFLEKQITELDEAIMAKIEEEDLVRQWELLQSVPGISPTSAATILAETGADMQQFGDEQHISSWAGVCPGNNRSAGKSKSSHTNKGNPWLRSALTECAQGAVRKKNCFLKDKFWRIATKHGGKRGPAVIAVAHTLLRFVFQVLATGQPYREQGASPLTPQQQERMIRHHIRRLGKLGVAVRVGPAPRTAPKPKVSRKRSAVVHANA

SEQ ID NO: 295991 - protein, 354 aa, unidentified
MTSVKYIGMDVHTESISIAVRNSTGKIVIESVIETKASTLVQFLDGLRGDLRVTFEEGTWAAWLYDLIKPHVTEVLVCNTRKNTSTGGSKSDRIDARKLSEQLYMNNIKSVYHGEHGLRTLKELARSYLTISKDLTRVMNRLKALYRSWGIPCAGKEVYAPRHRAAWLAKISEAGVRRRAEQYYQQLDALRPLRQEARRDLLLEAKKHKPWKLLRLIPGIGPIRAAIVIAVMQTPHRFRTKRHLWTYSGLALETHDSAQYRVAEGQLQRCKKPATVRGLNKDHNHDLKDIFKGAAMRASTAAGPMRDFYEALLAKGRKPTMARLTLARKIAAITLIVWKKEVRFDAHYLKPQAA

SEQ ID NO: 295992 - protein, 250 aa, unidentified
MDVGLLSHEGDILLHRHMKAAPEPFLKAVAPSREGLVVAVECLFTWYGLADLGAAQGIPFVLGHALSMKAIHGGKAKNDTIASPKIARLLRGGMLPPASGYPAEMRATRDLLRRRTHLMRKRADLLAHVQNTNSQYNLPEIGKKIAYKANRAGGAERFDAAAVPKTIAVALMLLTYDDALHKALALSILTTAKPQDAQTHSLSQTGPGMGKILRLVLLDAIHDIRRCPRVQDCASYARLVQCRKESAGKR

SEQ ID NO: 295993 - protein, 452 aa, unidentified
MTAGKDITMHYQKVLKMPESIPYLSVGFDVGADFTWMSIMLPNGILIGKPFKIIHSDPQSRELAISKIKEAQEMYSLESRCFLESTGIYHIPLLCFLRDKGFDCAVINPIITKNSTNMNVRKLHNDKFDSKKAAKVGLDASLKASIVPDDAIIDLRNLVRDYYYFKDLQSAIVLKLHAELKVSFPAYLNVFSKVTTQTSLKLLEAYPLAADMLAAPKDELVETIRSTARFGETYALARYDAICTAAKDAAVFGRALPSNALRIRLYIKMYREYQAHLDSILEELHQAVGKLEGTPDYDRISFIQTLHGVGFLSAVVLIAEMGSFDLFSSPKKLYAYFGLDPGVNDSGKFHGDRVHMSKRGSSLARRILHMVAINNLKVDKATKTPVNPVIYDYYTRKCASKKKSVAVGAVMHKICNIIFAMLRDNKPFELITPEEHRERYAAEHPESVNTAA

SEQ ID NO: 295994 - protein, 338 aa, unidentified
MLYHGIDLHKHSVVIGTVDETGKMLANRRLRTRRADLVRYFESMPGPHQAVVESTSGWYWLSELFRKHEIDLKLAHAYRVKAISAAKVKTDSVDAATLAQLLRVDMIPEAHMLDPELRPYRDLLRLRQRLVRKRSGALCSIQTLLEKYNQPSPEDLPPLPALEASMHAERIVLLKSQIKEIEKTLEEVLLPLAPVQRLLYIPGFGAKTALTVFLETGDAHRFATDRNYTSYCRVVPGSSNSGGKTRHRPSKQGNPHLKFAFINAAVRAVQWEPVVKAWYRGKLRKKPKPIAQTLVAKELARIAYRVLVDECDFNGTFKGVPVEKIKTSQWPRRASPVV

SEQ ID NO: 295995 - protein, 318 aa, unidentified
MSGHDVNSVLGIDVSKEMLDWHRSDGGESGQNPYDSKGIRAVVAAFRARPVDLVVCEATGGLERELVTALILAGLPLAVVNPRQVRDFAKSTGQLAKTDRLDAKAIAAFGLAVKPAVHIPKDEQTQALDDQLTRRQQLVMMRVEEMNRLERAPKAMRKSLREHIEWLKRRIAVLDDDIDGALKASPQWQAKLDLLKDFKGIGPVCRAALLAWLPELGKLNRKAIAALVGLAPFPHDSGKLRGVRLIRGGRKFVRDALYMPTLVATRHDPSIAAYYRRLVLKGKPKKLALIACMRKLLTILNAVFKTGRPYRAPDLIAS

SEQ ID NO: 295996 - protein, 315 aa, unidentified
MNERSVKFVGVDVAKDHLELFGPGLKLPTRLNNRPKTIAAWLRRLLASHPVIHVVCESTGGCENALLRACWQAKVPVSQLNPARVRAFARSQGLLAKTDAIDARVLADYGRLFTPAPTLEPSAQQVRLAELVARREDLKTQRVAESNRLSYLADVALRRMIKDHLRWLDRHIAQIEKLMEKTISEDPVLCHKREVLVATQGVGHLIAATLLADLPELGSLSRQAAPALAGVAPFNRDSGTLRGKRSICGGRATARKALYMAALVASRYNPILRDFYQRLLAKGKAPKVALTALMRKLVVHLNSQLKIHPPLPSPC

SEQ ID NO: 295997 - protein, 421 aa, unidentified
MKGLRTKKVNTIKEGTLIVAVDIGMVSNHGCCTTADGRSTKTFSFDNTREGLDILWNMVLASKTGFQCNEVIIGYESTGPYGEPLIHYLKQKPVTIVQVNPLHTKRMREINDNSPLKTDRKDPRVIADVIRIGHALSVVVPEGDAAYLRRLNNARERHTRERTALLNQLQQFVFLIFPEFTRIIKTIFCKTALHILKKYTTPAKVCSENIEKLGEEMRRRSRGKFGVEHAAALINYAKTSIGIQEGLAGLVMDIQHALVQLEMVDRLIAELEHEMETTLQRIPYSRKLLSIKGLGIVTVAGLIGEIGDFSKFTTQSEIAKLAGLDLYEVSSGKRRGQRRISKRGRSLLRKILFYAAMQTIRKNGIMHDYYQRLIGRGMKSMMALVAVSRKLLRIIFAIVRDDTEFILNHEFQRKEEMRKAA

SEQ ID NO: 295998 - protein, 370 aa, unidentified
MAKRSMFVGMDVHKESIDVSLAEEGRGGEVRHYGVIPGDLEAVAKVLRALRAPTRRLRFVYEAGPCGFGLHRYLTGQGEDCVVVNPSSMPKRSGDRIKTDRRDGAALARLHRAGELTAIYIPTSADEALRDLVRAREDAVGLSTQAKHRLKAFLLRQGRRYPGRAGWTRPYRRWLADLSFPLAPQHIALQEYRDTIDETERRVERLTDQLRQLTPAWRWAPVVDALQALRGVSFVTAVGLVTEVGDIRRFTHPRELMAYLGLVPSEYSSGPSVRRGGITKAGNPHARRLLAEAAWAYQGVPRIGRQMLYRQERLSKPVCDIAWKAQLRLTSRFRKLVARGKAKPKVATAIARELTGFIGAIAREVPAPPA

SEQ ID NO: 295999 - protein, 369 aa, unidentified
MTKTVYVGLDVHAETIAVATADDGRDGEIRFYGTIRNTADSILRLTKRLSSGSTTPAFCYEAGPCGYGIHRLLTKLGFECAIVAPTMIPRKTGDRIKTDRRDAEMLARLWRAGELTSIWTPDEEHEAMRDLIRTRKQAMEALKVAKQQLLSFLLRHGLRFDRPTRWTKIHWRWINELRKFRYPHQQLAFEEMKRAVRQIGERIAVLDGAISDTVVVWRFGPVVDALRALRGVNTTIAATLVAEIGDINRFSNPRQLMAWLGLVPSEHSSGNSVRRGRITRTGNALARTMMVEASWSYRHPAKEGHPYLKRSEHLPQHIREIGWKAQARLCKRFRDLSKTGKPQPRVLTAIARELAGFVWDIARKTPVSA

SEQ ID NO: 296000 - protein, 342 aa, unidentified
MESTTIAVDVAKSVFQVAVSCHPGKVSESHRLSRGKVLSFFAERRPALVLLEACGSAHYWGREIARLGHRVVLLPPGRVRPYVPRNKTDEADAKGLLEAHRNQEILPVPVKSLAQQTLAGLHRVRSARMADRTRRLNLARGLLRELGLTVPVGARQVVPRVLALAEPGGEIPEPLRLELHAICEEIRELEKRIHETERHLARLAAQLPLVKRLQTIPGIGLLTATALVAFVGDVVRFPTGRHFASFLGLTPRERSSGAIRRLGGINKQGDRYLRTLLVHGARSALFAARRLSSPDRLRSWALHTHQSRGHNKAVVALANKLARIVWAVWRQATDYQAAVSRH

SEQ ID NO: 296001 - protein, 401 aa, unidentified
MVSDFRKGRYNLMKIYVGIDIAKLNHFAAAISSDGEIIIEPFKFTNDADGFQLLVSKLESFDKNSLIIGLESTAHYGDNLVRFLVTELYQVCVLNPIKTCQMRKNNVRKTKTDKVDTYVIAKTLMMQDNLRFVSFFDLDMMDLKALGRFRQKTIKQRTRLKIQLTTYVDQVFPEIQYFFKSGLHQHAVYALLKEAPSPKEIASMHMTHLANLLKVNSHGHFTKEQAKELRVLAQKSVGANDSAISIQITQTIQQIELLDSQLEKIEAEMTDIMKFNDSVIMTIPGIGYINGGMILGEIGDIHRFSNPNKLLAFAGLDPSVYQSGNFQAKTTRMSKRGSRVLRYALVNAAWNVVRNNATFKAYYDAKRAEGRSHYNALGHCAGKLVRVIWKMLTDEVEFNLE

SEQ ID NO: 296002 - protein, 356 aa, unidentified
MSQQCNCAIAVIGIDIGKNSFHVVGHDLRGAIVLRQKWSRGQVEARLANQPSCLIGMEACVGAHHLSRKLQLLGHDARLMPAKYVRPYSKGQKNDFRDAEAIAEAVQRPTMKFVATKTVDQLDLQALHRVRERLVSQRTSIINQIRAFLLERGVAVRQGPRFLRAELPGILATRTDVLSPGMLRVIEALAGDWRHLDARIEGLSGEIETLAHQDQHCERLMTVPGIGPIISSAMVAAIGTGEVFSKGRDFGAWLGLVPKQISTGDRTILGSISKHGNRYLRALFVQAAWVVLVKLGPKQWERYGLKSWIEAAKKRLHHNVLVIALANKLARVAWAVLNKGRAFTCVKTDAMASRPA

SEQ ID NO: 296003 - protein, 320 aa, unidentified
MASRESLFIGIDVSKQTLDVAFGADPHAPRETIPSTDEGVQLLVTRLQRLQPTLIVLEATGGLERMVFAQLLQAGLPTARVQPRRVRALAHAEGRQAKTDRLDARLLARFAERVRPPHHQATDEQRASLRDLLVRREQLIQMRTAEINRLTAAAPNLRPGIQQHIDWLDQEIRALEQERDNEAERTDEVRRKRELRDSVPGIGAITARNLLLRLPELGTIKRTEAAAVVGVAPYANQSGAQHKPRHSSGGRRDVRSVLYMATLAATRRRLVRRAFDQRLCQAGKPRKVAIVAAMRKLLTILGAILRQQKPWDPAVHTSAP

SEQ ID NO: 296004 - protein, 414 aa, unidentified
MEDILECCCGLDIHKESIVACLMKGPIGEGRKPSSEIREFGTQLNELIALRAWLEEHGCHYVAMESTGIYWQPVYAVLEQSLLDEMHLLVVNARHMRNVPGKKTDMRDAEWIATLLRAGLLRGSFVPKQDIRDLRQFTRYRKALIRDITSQKNRIEKLLQSSGFRLSSFLSDIFGSSGLAIMRQLVEVGLVTSQSLESCLKGRARLKASKILSALNGVLSVPQRKLLKMQMDHLRDLQDNLQEVEDQIRSDFSKFERPIHLLDSIPGIDLTAAYAILAEISNNMASFPTAQHICAWAGLAPGSNQSAGKKKKQRITQGNNYLKAMLCEIAWVIASHKDQYLSGWYWRLKQRTDSKRAIVALARKLLVIIYAMLKSDQLYNEQKFIERKNAANQRHINRMVSELTRLGYAVSATA

SEQ ID NO: 296005 - protein, 343 aa, unidentified
MYFIGVDHHKQASQMTVLDQEGRELKMGRVLNLRRELERFLEGFHPFTAVIEAGRSSYVMADLLRELGGEVKMANALQVKAIAHARIKTDKRDSRVLAHLLRADLIPEIYQRGERNRQAQRILRARAYWVSKQTEIKNKIQSLLAQQTEEIRIEVDKRTGGLFSGRGIEFLLRLPLEGTDKMVLDDLVQGYQETQAHIKTSDGRVQVLSGTIEEASRIDTVPGFATTLAVLVAVEIADIHRFPSPAHLHSYAGVIPSTYASGERTYHGRITKQGSAWLRWAALEAVYPAIKKDLGLRVLYTRLAKRKGPNAAKIAVARRLLTIIYRILTENRTYLPDRNRSAA

SEQ ID NO: 296006 - protein, 341 aa, unidentified
MMIIGCDFHPRFQQIAFMDTETGEYGERRLNHPEEAERYYRSLLGKQVRIGVEATGNFRWFRRLIQELGFTFLLGDPSAIRAANPRRQKTDKRDARHILHLLVEDRFPAIWQPPAENEQLRQLLLHRCRLVRLRARLKNLLDCIAKNEGLVGSKGWSAKRRQQVEALPLAGWYGRQREDLLHLLDELDKRIEPLDESVAQAAEGNAEACLLMTHPGVGPVVSLAYVLTIGDWKRFPSSKHVSSYLGLIPAEESSADKRRLGHISKQGSTLLRWLLVQSAIKAQRCDVSWHRQYLRLSSHKHHGVAKVAIAHKLAVRLYWMLRSGQNYTQVKERGSHAGQSV

SEQ ID NO: 296007 - protein, 386 aa, unidentified
MKTVAGLDVHKDSVYLCILRENGEKIERVYGVLTPQLDSMRDFMAENKVSEVAMESTSVYWIPIWRVLVDSFELKLVNPYFIKQLPGRKSDVKDAQWIAECVMKELIRGSFIPSPLVQRLRLYDRRIFEINAELVRKYSKIDAILQRCNIRLSNYVSNTDCKSYKAVVKQISEGVTSPQELLRHVHKRIINKHGEDTILAALTGVVSDSEIDMLAQYVAESAILEDNKNKCIEKMREICNSEFKEQMKNLQEIPGVSERSALTVLAEIGPDVNAFPSAKHLVSWCGFNPRNDESNKKIKSNKITHGNRFIRIASVQCAWAASRTKDCYFSKFYAFHTQVRKKFKLKVVVAVARKILVCIWHILKFNVPYKDFEPQKSVTKDCIQFA

SEQ ID NO: 296008 - protein, 338 aa, unidentified
MTTGLAAGTYELFVGIDIAATTAEVSTQRPGAKAGRSFKIDQTPEGFHRLVHTLQATDNEPSHVLVVMEATGSYWMSLATRLVHEGFRVSVIHPSQAHHFAKALLKRAKTDAIDAQTLAQLAMVLQPAPWMPPPQIYYELQQRLAQRDDLLNLRQQVRNQLHALDQYPEVIASVRTRMERLLVLFQSQIDEVEGEIAAALNQDSAWAAAAERLQSIKGVGWVTAAWTLVTTLNFTTCDTVDALTAYAGLAPMPRQSGSSVWHRPSIGHSGNGRLRTAFYMATLTAARFNPAIKAFYNRLLEAGKPEKVARCAAARKLLHMAWAVVKKDRPFDPNYAQG

SEQ ID NO: 296009 - protein, 354 aa, unidentified
MSHQLNCAIAVIGIDIGKNSFHVVGQDKRGAIMLRQKWSRGQLATRLANLPPCLIGMEACVGAHHLGRKLRMLGHDARLMPAKYVRPYSKGQKNDFRDAEAIAEAVQRPTMKFVATKTAEQLDLQALHRVRERLVGQRTGIINQIRAFLLERGVAVRQGLRFLRAELPRILATPCDALSPRMLRVIEGLAGDWRRLDERIESLSSEIEVLARRDVGCERLMSVPGIGPIISSAMVAAIGTGDAFSKGRDFAAWLGLVPKQISTGDRTILGKISKRGNRYLRVLFVQAAWAVLIKPRSWDRHGLKPWLEAAKKRLHHNVLAIALANKLARIAWSVLAHGRTFEAQDSGRVIMQRA

SEQ ID NO: 296010 - protein, 371 aa, unidentified
MSTPTRIMYVAADDSKDSVTFAVLPEGNRECSEVKTLPNEPRRLRRFLDRVAREGEVRVCYEANGAGFALQRQIEAWGYVCEVAAPSLTPQRPGDRRKNDPRDARKLVGLYRAGELTLVEVPAEAQERVRDLVRCRETLQREVLKSRHYILKLLSRYGVVYREGRNWTGRFWSWLRQVKLPGEAQEALEEYVALLDYKLARRDELDRRIEVLALSQPFHKPVGRLRCFRGIDTQAAMVLVTETGDFRRFQSPRELMSYYGLVPSENSSGSRERRGSITKTGNARCRHVVVQAAWSYRHRPALSRDLQARQEGQPAAVVAHAWKAQQRLYKRLQRLRARKHPNVAVTAVARELVGFLWAVMQDPHAAPTLCR

SEQ ID NO: 296011 - protein, 337 aa, unidentified
MKYCGIDLHSNNSVVIVSDEEDRIVFSKRLPNDLGQIRAALEPHREDLAGVVIESTYNWYWLVDGLMDTGYQVHLAHPSAIKKYEGLKHSGDFADATYLAHLLRLGLLAEGYVYPREERGVRDLARKRLQLVRYRTAQILAIEGILMRQTGARLKGEAVKRLTAEQVDAFAFAPDVSLAVQANRAVSQTLSQQIEALEKRLQQRVILRPEYRLLKTVPGIGEVLATTIMLETGTISRFTRVGNFSSYCRCVESLKESNGKRKGEGNTRNGNKYLAWAFVEAANFALRCCPQARSFYDRKKSRSNRILALKALAHKLARACYHMLQDQKPFDVHLCFG

SEQ ID NO: 296012 - protein, 311 aa, unidentified
MNNDSIIFIGLDTHKSFIQVAVLQEQRGATPEHLGRIKSNKSALIKLTQQLQSKYPKATLHFVYEAGPCGYWTYRLLTSLGHCCCVIAPSLIPKKSGDRVKTDKRDAAKLAKLFKAEELTPIYVPESEDEAIRDLSRDRETAMKDLKDAKFQLKGFLLRNNVQATVNDNWSKKHLRWLTDLILPHHSQQIVLQEMIITISERMQRLQRLDNELLHQVKNWRYYPVVKAIQAMRGGGRLLVALGTIAELGDLRRFDHPRKLMAYVGLVPTESSSGGKTKRGSLTKCGNSRARRLLIEGAHTYKHKANISVEL

SEQ ID NO: 296013 - protein, 382 aa, unidentified
MVIDAQGKRLLSQRVANDEATLLKLISSVATMADGGEVTWAIDLNAGGAALLITLLIAADQRLLYIPGRTVHHASGSYRGEGKTDAKDAAVIADQARMRRDLQPLRPGDDIAVELRILTSRRTDLVADRTRTINRLRAQLLEYFPALERAFDYSTSKAALLLLTGYQTPDGLRRAGTARLAAWLGKRKARNADAVAAKALQAAHAQHTVIPGQQLAAAIVARLAKEVMALDTEIGDTDAMIEERFRRHRHAEIIVSMSGFGVTLGAEFLASTGGDMSAFDSVDRLAGVAGLAPVPRDSGRISGNLQRPRRYNRRLLRACYLSALYSIRSDPASRTYYNRKRAEGKRHSQAVLALARRRLNVLWAMLRDHTTYQPTTPTAAAA

SEQ ID NO: 296014 - protein, 416 aa, unidentified
MKKHSNLPVRSEQRSKQTKSRVPVQRDTKELMAELLGKLREKQDPKAISTGAGKEQKQGRLRPNLDRLTVGVDLGDRWSAYCILGLEGETLIEGQLQTTQPSVAQFFQGLPSARVVLEVGTHSAWMRELISGCGHEVLVANPRMMEGSKRRKRKNDRIDANKLARLGRMDPQSLYPIQHRSPEVRRDLVMLRARDALVAVRTELINTTRGLVKSVGARLPKCASPSFSKKVEESIPVEIREALLPLVELVAALSDSIQGYDEKIEKLGSEKYGHTALLRQVKGVGPITALAYVLTLEDPNRFAKSRDVGPYLGLVPNQEDSGDIQPQLGISKAGDTMLRRLLVGSAQYIMGPFGPDTDLRRCGLRLCERGGKNAKKRAAVAVARKLAVLLHHLWVSGEVYEPLRQGLSATMRQAAA

SEQ ID NO: 296015 - protein, 453 aa, unidentified
MNRKPSPALAQLPVLNLNAAGLDIGSAEIWAAVPPDRDPQPVRVFGTFTPDLLALADWLKACRIETVVMESTGVYWIPIFEILEARGFQVQVVNARHVKNVPGRKSDEKDCQWLQRLHTYGLLSGSFRPDGEMCALRAYLRHRASLLEHRAAHIQHMQKALLQMNVQLTQVLSDITGETGLAIIRRIVSGDRDPVHLAQLRDPRCQHREDEIAKALTGNYRPEHVFALKQALELYDAYTDQVRECDRELEQQFSGLKPRHDQAVLPPLDLSDKRDSHSKNAPDYDARTLLYRWVGVDLCAIPGMNESTVQQALTETGSDMSPWRTDKHFCAWLRLAPANDISGGRVLRSRTLKTHNRATQAFRLAAQAASRSRHSAFGTYYRRMRARLGPEKAMTALAHKIARTYYHMLKHRVPFREVSAEEDEKKASERELAHLQKKAARLGLTLVPRAVEA

SEQ ID NO: 296016 - protein, 347 aa, unidentified
MNFYHSTHRHYCGIDLHARSLYVCIIGQQGEVLLHKEIKARPEPLLALLEPFRDDLVVGVECMHCWYWISDLCEEHGIHFILGHALYMKAIHGGKTKNDRIDSFKIAMLMKGGNFPLAYTYPKEMRATRDLLRRRTRIVQHGAMLKAHVVNTTSQYNLPPNKANLKNIGAREQVRATFADRDVQHNIDLDLAIIECYHRELSKLEEHLERQAKQHDPTSLSVLRTIPGVGRILALTMLYEIGDIQRFETVQKFASYARLIKCKAESAGKVYGTQGNKIGNAHLKWAFSEAAVLYLRGNDKAQRYLQKLQKRMNKPKALSALAHKLGRAAYFMLKHQRVFDEQRFLKG

SEQ ID NO: 296017 - protein, 391 aa, unidentified
MERPMAKPNDLSRSLVPFEQSSTLVAVIEMSLSSWLVAGIVPGLDRHPLKKLGADEDALLRLLQRGRDKAVAAGCTITRVVVAFEAGRDGFWLARWLRAHDVETYVIHPTSVAVSREHRRAKTDRIDTALLKRAFLGWLRGEPDHCNMTAIPTPEQEDGKRPSRERETLIGEHTRIINRMKACLVRWGIRNFKPTLRQAPQRLEALRTPEGMPLPPNTLAEMRRDMARLHLIEDQIKAITEDRVRRLGQASADQPQAMIRMLARVIGVGIETADMLVQEILSRHLRDRRGVARYAGLTGAPDESGKRRREKGLARAGNARVRHGMIQLAWRFLRFQKASALAQWFHARTSDGRGSTRKTMIVALARKLLIALWRLVATGEVPQGVVLRPAS

SEQ ID NO: 296018 - protein, 348 aa, unidentified
MAHFVGLDVSVKETSVCVVDDAGKVVCERKVPTEPDDIAVLLTSVGGDYVRVGIEAGPLSQWLVNGLSEAGLPVICVETRHMKALLQAQQINKSDRNDARGIAQMMRVGLFKPVHVKTLAAQEQRMLLTSRKLVQRKLIDIESDMRGTLRNFGLKVGVVSTIGYEARIRQLVESFPRLAVIVEPLLTVRRVMRQQLATLHKMLLDTVRHDPVCKRLMTAPGVGPVVALTYRASIDQPQRFVHSRAVGAHLGLTPRRHQSGEVDYDGGISKSGDTMLRTMLYEAAQILMTQSRHWSWLKAWGMKVAQRRGMRRAIVAVARRLAVVLHRMWTDGTDFRWGSEPGTAIAVA

SEQ ID NO: 296019 - protein, 366 aa, unidentified
MKKISTVQVFGNEVFKEHQLTIGVDLGDRWSFYCVLDEAGKIILEQKVSTTPEAIKQTYGKMPRSLIAIETGTHSPWVSRLLTELGHEVIVAHAQKVELITKSNRKDDRHDARTLARLARIDPELLGPVRHRSAKAQIHLTVIRARAELVSARTALVNAARGLVKSFGQRLPKCGTDQVNEKLAEGLSAELRDVLVPLLREVESLSKRIQEYDERMEKIAKEVYPEVSLLQQVKGVGTQIALTYVLTIEDPYRFPKSRAVGCFLGLRPGRRNSGESEPQKKISKEGDRYLRTMMVQGAHYILGPFGEDSDLRRWGRKLAERGGKNAKKRAVVAVARKLAVLLHRLWVSGEVYEPLRNSQKAMRAVA

SEQ ID NO: 296020 - protein, 357 aa, unidentified
MASRSMAQLDHGVTVGVDTHGDGHVAAAFTSDLGRPLGHLDIPTTPAGYHRLLEWAHGLGSDPRFGVEGTGSYGAGLARFLVGAGCTVIEVRRPNRQTRYARGKSDPVDAEAAARAVLSGEATGLAKIDTDHIGMIRALRVARRSAMKMRTQSFQQMKALIVTAPAELREQLRSLSRDRLVDSAACMRPGPVTSVAAAVKLTLKCLAQRHQMLTTEIAMLDRDLDRLVLTVAPALCALKGVGTDVAGAVLVAVGDNPERLRSEGAFANLCGVAPLPASSGKITGRHRLNHGGDRHANCALWRVVIVRLATHQPTKNYMARRTQEGMSKAEIIRCLKRYVAREIYRELTPPAELAAAA

SEQ ID NO: 296021 - protein, 400 aa, unidentified
MDKDRIVAGLDVHKDTIYLCVMDNTEAVIFAKVYGTLTPDLELMCSEMVSHGVTEAAMESTSTYWVPVWNALCESMSLKLVNPYFIKQLPGRKSDVKDAQWIAECLLKNLIRGSFVPDKTVQDMRKYNRRIFDLNGDLTYNSNKQDAALQRCGFRLSNYVSRVNGKSSQKCVRAIITGITDPEELVKLIHGKTLRKYGRNIIKDAVTGDFHQADICLLKQYAELIGVIERQIEECRNALIAICQEHFPKQFKRLQSIPGVKERAASAIIAETGADMKPFEKATNLVGWCGLKPRNDISNNKVKSNRTTHGNRFLRQILIEISWVASRTRNCFFSNFSYVQCTQRHKNKMKIQVAIARKLLVAVWHMLTKDEDFIDVYLKRLEKEAEWQNDLQALESLLVG

SEQ ID NO: 296022 - protein, 410 aa, unidentified
MSLFCGIDWATEHHDVAVIDDDGRVVARRRVSNDAAGFAALLALLAEAGDSGADPIPVGIETDRGLWVAALRETGRTIYPINPLAASRYRARYAVSGAKSDATDAVLLANIVRTDPGAHRPLPADTEAAQAIRVLARAQQDAVWARQQIGNQIRDLLKDFYPAALVAFAELPDGGLARRDARTILAAAPTPARAAKLTPARLRRLLIKAGRKRYLDRDTARLREVFADAYLHQPRAVENAMGIHLTTLLGQFDATCTAADELAEAAIAHFEQHPDAEIITSFPGLGMLAGARVLAEIGDDRARFTDARGLKAFAGAAPITRASGKKTVVLHRHIKNRRLAAVGPIWALGSLRASPGARRHYDARRAAGDWNQQAQRHLFNKFLGQLHHCLHTGLLYDEHVAFPPPLKLAA

SEQ ID NO: 296023 - protein, 428 aa, unidentified
MSNQEIIRRRIYCQTVKQITGSDEYLVVGIDVAKQKHHAFMGTAKGKSLYRKLVFENDLDGFSRLLKTAEAVRSKNGLSKVVYGLEPTGNYHKPLARHLIRSGCNVVLVAGQAVKNNRKILNGRWDKNDTKDAANVADLASRGKCLYYDSPSQEIIDLRALLSLRRRLKREEHSLRMRIRNTLLAKYFPELDIYYTTCESESLAIIRWCLSPDKIASMEFDQFFKLVTRTRRGVAQKLRLHKIHQGAGSSVGCPMGQTAQFEADVLVEKLNHIRQYIRKTADLIEEISLDFPEYSYLLTIPGFGPYISSTVLAAIADPLRFENRKQVIKMSGYDLCANRSGKTSDKAVPVISKHGNSELRYALFQAAKVASARVDHFRSYFAKILHGRERERGIITKMRVKLAAKMLVIAWTLMKKREPFDPVHLNID

SEQ ID NO: 296024 - protein, 402 aa, unidentified
MNCVGIDVSKGKSMIAVMRPFGEVVVSPFEVRHTASELSELARLLKSLDGETRVVMESTGNYHAPVARLLHDAGLYVSVVNAMLVHDYGNNSLRRAKTDKKDAVKLANYGLDRWLTLPRYVPEEDTRLMLKTCYRQYQQYSKVQTMLKNNLISLLDTTFPDANRLFTSPPRADGSEKWVDFVAAFWHCECVCGLSEKAFTAKYQKWCRKHGYNFSEDKALDIYASACRHFGVIPKTDTAKLLVEQAISQLQTTSSALAALKQEMQSLAASLPEYPVVMGMFGVGPTLGPQLLAEIGDVRRFHSKKALVAFAGIDAPPYQSGQIDVRSRSISKRGSASLRRALFLVMGVILQCAPGDEPVYQFMNKKRSEGKPYRVYMMASANKFLRIYYASVKAYLDSLEHA

SEQ ID NO: 296025 - protein, 410 aa, unidentified
MEVFCGIDWAEKHHDVAIVDDRGQLVAKRRIGDDAAGLRSLLEMLAEHGDAAENLIPVAIETSRGLLVACLRATGRHVYAINPLAVSRYRERHTVARAKSDHADAVVLANILRTDAGHHRPLPSDTELVRAIAVLARSGQDAAWRRQQLTNQLRSVLREYFPAASEAFKDTKSGLASAEARVILAAAPTPALAAKLTKTRLRRLLIAAGRQRNIDVRVDRLHDLFAAEQLRQPPRMEAAFGEHARALIMQLDAACRAVEHLAQATEAAFTEHPDAEILTSFPGVGILTGARMLAEIGDDRSRFSDARGLRAYAGSAPVTRASGKSIAVMQRRVKNQRLAAVGYVWAFAALTASPPARALYDRRRAIGDGHAAALRNMFNRFLSQLHHCLATGQKFDPERAFPTHHDRVAA

SEQ ID NO: 296026 - protein, 415 aa, unidentified
MGAADEASPIESGLTDLAERGYTMKGYDVVVGLDVGKSFHHMRAITKGGEDLFNKQVLQHEARLIEAFTEMTEHGSVLVVVDQPKNIGSLAIATARRVGCDVAHLPGLSMRRAAGILPGDAKTDERDAYVIAMTALSMPQTLRPIPEENVSRADLRALASCDDDARCDMTREINRLRAHLVECHPAFEKALGDNADSPFVLKLLVRFGGPWSMQKTGKGAVMRWARSQKRPAMKLLERLLASLDEMTEAPAGSALREEIAIPACAKRIAEYVATRKDIERRAVALLKDYPTYRLLMDIPGVGIKTAMTFIIHVDIACFDSPDKLASYAGIAPRTYQSGTSIKGECAARSGNKALKNALWLSAFASIRSDPLAREYYDKKRAENKKHNAAVMCLARRRLKIMYAIVRDQIPYRLAA

SEQ ID NO: 296027 - protein, 316 aa, unidentified
MDDKHTVQGVDVAKAELMIGHGESETLLRIENTPQAIAAWLAQLPTGSWVAMEASGHYHQPLAHMAHAAGMVVYVLNPQLIKHYGRAVGMRGKTDRLDAQLIARYVLREHSKLRIWEPPSPGADALSRLLVRRQALVNARQMLAQSLSGLTELKAPRQALMASFKRMLAQVELLIRTEIARVPAMAALHRRLVSIVGIGTIVAAQLVASLTALRFTRADSFIAYTGLDPRPDDSGQRRGRRRLSKRGHGLLRCLLYNAGMAAARSKLFKPTYQQLRDRGLQSTEAIVILARKLARIAFALYQSGTTFDAQRHLKPA

SEQ ID NO: 296028 - protein, 385 aa, unidentified
MKPNSQMTLDKYFRQCVGIDISKDKFTACLYMYDMASDAGCCTESIDFPNNRTGFNQMVKWSRKESQKRFPLVYLMEPTGSYYEPLAYHLHKIGQTLYVVLPNKARKFCEYEGIKTKTDAMDARCLALMGCKNRKLRPWEPPLPIYRELRQLTRLRADLVKMQTQMLNHMESIDHMEDVAPEVRKSYEKLLDTIEKQLEKNEKDIAAKLAQDKELETKVKRIATAKGIRVGTVTCIVAETQGFHLISNRKQLTSFAGLDVKARQSGKDDPRHHITKKGNAHIRAALYMPALSAAHCNRQMAQAYGRICAKHPDVKMIGVTAIMRKMLLLVYSLWKSGEEYDETRDNTHTPRKKEPQPTNSPEDCLKPNADPPDWNAADKEGNPPF

SEQ ID NO: 296029 - protein, 413 aa, unidentified
MKVFCGIDWASDHHDVTVVDDTGTLLAKARIDDTAEGLAELLQLLAEHGDTAEDPVPVAIETSRGLLVACLRATGRPVYAINPMAAARYRDRHAVSRKKSDHLDAMVLANILRTDAAAHRRLPADSELAQAIAVLARAQQDAVWDRTQAANKLTSHLREYFPGFLAAVGIRREGVCHPIARTLLAAAPTPERAAHLTRAQLRSLLKKAGRKITLDAEADRLHTALRLSQMRQLPLVEQAMGHQTLALLRQLEAACASADDLAEAAVESFEKHPDAEIITSFPGLGALSGARVFAEIGDDRSRFADARGLKAYAGSAPITRASGKSVAVLARRVKNQRLAAVGYMWAFAAMSHSAGARAHYDRRREAGDRHTSAQRNLFNRMIGCLHHCLTHRVCYSEAVAFPVLSDVQLTEAA

SEQ ID NO: 296030 - protein, 347 aa, unidentified
MRFYTNQHPFYCGIDLHARSMYVCILSHDGEILVHRNMKAAPEPFLKAVAPYRDGLVVAVECIFTWYWLADLCAQEGIPFVLGHALYMKAIHGGKAKNDKIDSQKIAALLRGGMLPQAYVYPAEMRATRDLLRRRTHLMRKRAELLAHVQNTNSQYNLPEIGKKIAYKANREGVAERFDEAAVQKTIEVDLALITYYDQLLSDLELSILQTAKHHDANTLYLLQTVPGIGKILSLVLLYEIHQIDRFPRVQDFASYCRLVKCAKESAGKRLGTAGTKIGNAHLKWAFSEAAVLFLRNNPAGQRLLARWEKKHDKGKALSILAHKLARAVYYMLKRKVAFDKELFLQS

SEQ ID NO: 296031 - protein, 345 aa, unidentified
MEQITRIGMDTSKHIFQLHGVTAAEEPALRKKLRRKDMVTFFETLAPTVIAIEACGASHHWARRLQSFGHSVKLIAPQLVKPYVKRGKNDAADAEALCEAASRPTMRFVPVKTVEQQAALMLVGVRDRLIRNRTQLGNAIRGYGAEFGFTAAKGKAHLDPLLVRIQADESLPALARELFAAQAKDYAQLQAQIDEVDARLMAWHRADECSRRLAKIPGVGPIGAVLLKMKTPEPELFRSGRQFAAWIGLTPKDHSTAGKVRLGVITRAGDEGLRSVLVAGATAVIQHVRRGGRSSPWLTELLKRKSPKLAAVALANKMARIAWKLMVTGDNYAAKSAPAALAGTA

SEQ ID NO: 296032 - protein, 329 aa, unidentified
MMIIGCDFHPRFQQISFLWEETGECGQRRLMHTVEAEQYYRSLGGTKVRVGIEATGSYGWFRRLLSELGHELLVGDATQIRASNPRRQKTDKRDAEHILGLLIQDRFPAIWQPPAENEQLRQLLLHRSRLVRLRTRVTNQLDGIAKNEGLLVPGGWSGKRRMAIEALPLPGWYGERRKDLLGLLDRIEERIAPLNKAVSQAAANNVEACLLMTHPGVGPVVSLAFVLAIGNWQRFPRGKQVGSYFGLIPAEARALVAGGGGEHGAEVRRELASAVCAPVNDQASRRGQGGYRSQAGGEVVLDVALRGRLPARQGARFSCEAVRVPRWSQ

SEQ ID NO: 296033 - protein, 430 aa, unidentified
MTVSAPYAAVVGLDWEQTAHAICLWPADAEAPEASRLPHTPAAIAAWVADLRARFGGRLIAVCLEQSRGSVVSVLRQYDVLVLFPLNPKQLADYRSAVAPSGAKSDPGDAELLARFWREHHAQIPAGRPADQASRALQLLAEQRRKWVEDRVALGHRLRALLTAAYPVALELLQAGAIESDWFLTLLEAYPAQRELQRASPRQLARVLPRLARRSDDPSAEELQAALVTRIRAALPMTTDAAELEHSRLVIKHLVIQLRGLLAAIAECERQQAVRFAEHPDHELFSSFPGAGAALAPRLAAAYGTDRTRFPTAREMQQLSGVAPITRASGKTRVVQMRRACPRFVRQTFHEFANCSVKFSKWAQAFVAERKARGHRYQTILRALAFKWQRIIHRCWQTGEPYDEQRYLAQLRKKGAKFLAYLPPEPETEH

SEQ ID NO: 296034 - protein, 341 aa, unidentified
MKNKSFIGIDISKNVIDVSIFCEETPIKDFSHDVFNNSRKGFGEMCTWLKKNHVVLSNCLFGMEFTGSYSMELEKFLNARSYQFCMLSTHVVKHYPMGPKDKSDKIDSAKIADFLYRYNGTECVKPYNMPNKTMQRLKALMNERKFLVEQRTCFMNRRQLCITKEDAQLHDGYIKKFSRDIENIELEEQKLLATDDSLLSTYKNLLTIPGIGFVNAINVIVITRNFTAFETARQYASYVGVAPHFRTSGTSVKWRPRPSARCDGQAKADLSMAATVVVQYDAELQSFYNRKLGGKQDSDTKRKALNAVKFKLVLRMFAIGKQNRKWEPLDSKSSNEKLAIS

SEQ ID NO: 296035 - protein, 359 aa, unidentified
MEQKNKPARHVVGGVDTHKDLHVAAVVDDYDRVLETRSFPTTRNGYRLMLAWMRTFGELQRVGVECTGSYGAGLLRYMQAAGVEVLEVTTPDRHDRRRRGKNDDLDAQAAAHAAFAKRRTVTPRSRDGMVESLRVLKACRKTAVNARRIALQLIQNTIIAAPDVLRDQLRRMTRMQLVRLLAAWRPDLTAYRDVEAAYRITLKSLGRRYLELHDEIADLDMMIAAIVEDLAPDLVERNSIGHNSAAQLLLTAGDNPERLKSEASFAALCGVSPVPASSGKTTRHRLNRGGDRLANSALHIIAIGRLRTDDKTKQYVARRMAAGHSKLDAIRALKRHIAREVFGIIMRRQKQINQTRIVA

SEQ ID NO: 296036 - protein, 357 aa, unidentified
MVEGSWVGLDVHARSVVAGVLDAGSGELRTLRVAVGSEELVAWLRELPAPVRVAYEAGPTGYVLARACAAAGIACTVAAPSKIPRAPGDRVKTDRRDAERLARLLRLGELVAVRVPEPHEEAARDLVRAREDARGDLMRARHQLSKLLLRHGLVYEGSAWTLAHDAWLRRQRFASRPRSLAFDECYGVVLQSKGRRDTLDRAIAELASEPPFAEVVGRLVCLRGVSTLTALALTVELGDWCRFRPQSLGPFLGLTPSEDSTGERRRLGAITKTGNTHARRLLVESAWHQRRPLRTSVALERRRQGQPAAVCARADASGRRLHARWEALEGRGKRRTVVAVAVARELAGHCWALATMA

SEQ ID NO: 296037 - protein, 361 aa, unidentified
MNRSGLIAATTRVMAAVPASGQVKVAVEAAGHYHRPVLDHRWPEGWEVVELNPAHVAEQRRVQGRRRIKTDVIDLEAITELVLSGHGCSVVDRDVVIGELSAWAAHRSRRVATRSATKNQLLGQLDRAFPGLTLALPDVLATRIGRLVAAEFSDPARLAGLGVSRLIRFAATRDLQLRRPVAERLVAAARDALPTRDAMIARQILAADMNLLADLDDQIQSAEAALGELLPRSPYATLTSVPGWGVVRVSNYAAALGDPKRWPGPRQIYRASGLSPMQYESAHKRRDGGISREGSVALRRALIDLGMGLWLSEPAAKTYAHGLKDRGKPGGVVACALAHRANRIAHALVRDHATYEPTRWA

SEQ ID NO: 296038 - protein, 358 aa, unidentified
MAGKVTETAVVGGVDTHKDLHVAAVVDQNNKVLGTQFFSTTRQGYRQMLAWMTSFGALKRIGVECTGTYGSGLLRYLQNAGLEVLEVTAPDRMERCKRGKSDTIDSECAAHAAFSGIRTVTPKTRNGMIESLRVLKTCRKTAISARRVALQIIHSNIISAPDELREQLRNMTRMQLIRTLGSWRPDASEYRNVTNVYRISLKSLARRYLELHDEIADLDVMIAAIVDELAPELIKRNAIGYESASQLLITAGDNPQRLRSESGFAALCGVSPVPVSSGKMNRYRLNRGGDRAANSALHIIAIGRLRTDDKTKEYVARRVAEGHTKMEAIRCLKRYISREVYTLLRNQNRQINSIPIMA

SEQ ID NO: 296039 - protein, 349 aa, unidentified
MRFYTKNHRYYCGIDLHARTMFVCILSHDGEILVEKNIRTSPETFLELVAPFREDLVVAVECMFTWYWLADLCQEEGIAFVLGHALYMKAIHGGKAKNDKIDAFKIATLLRGGNLPKAYVYPPAMRATRDLLRRRLHLVRRRGNLLAHIQNTHHQYNLPAPTARITYKANRVGVAEAFADPDARKSVEIDFAMIEHYDQVIREIELHIERRAKQHDPQAYHRLRSVPGIGKILALTILYEVHDIGRFDRVQNFLSYTRLVKCEHSSAGKRLGTGGAKIGNVHLKWAFSEAAVLFLRNNPEGQKHLRRFAGRHGKAKALSILAAKLGRTVYLILSRERVFDMERFLARSN

SEQ ID NO: 296040 - protein, 393 aa, unidentified
MPQTSPTDRVVISVDPHKASWTAAAVDTALQPLEVIRVAVSAQGYRRLRRFAQRWNNHSWAIEGAAGLGAPLTQLLHADGIEVTDVPAKLTARVRVLSTGHGRKTDEADAISVGIAALTAARLNTASVNAAITALRALVEHRDDLVKTRTQTVNRLHVLLTHLTPAGAPRGLTADRAADILRQIRPREPAAKTLRSLAVDLVAEIRALDRRITKAAVEITAAVESSGSTLTELSGIGTLNAAKILARVGTIQRFRSADAFASYTGTAPIAASSGDVTRHRLSRAGDRQLNCCLHTMAISQISRDTPGRTYYRRKRAAGMSHREALRCLKRRLSDAVYRQLVRDADTLKGAGPAGHTGATPTSCAAGSHPITSTSDKSLTGPAKPHPTTGDHTT

SEQ ID NO: 296041 - protein, 452 aa, unidentified
MAKRKEKKIKSKVKALHVMEPNSAGIDVGATEIYIAVPDDRSEKPVRRFDTFTSDLHEAAIWLKECGIESIAMESTGVYWIPIFQILDSYEFKVVLVNARHVKNVPGRKTDVQDCQWLQFLHSVGLLRGSFRPDQEICAVRSLLRHRNNLVKASSTHVQHMQKSLTQMNLQIHNVISDITGRTGLAIIDAILSGQHNPNKLSKLRDPRIKADKKTIAKSLVGDYRREHLFTLKQALQSYRNCRHLIMDCDLEIEIYLKEFDSRKEIDESLLPPPKKTKTKPKGNRPDFDLRTHMYRLLGTDLSLIDGINDLTAHVFFTEVGPDLSSFKKSSHFCSWLGLCPNNKISGGKILSSHTRPGSNRMAQALRMAANSLWRSKSYLGEYFRRMRARHGAPKAITATAHKLARIIFYLIKNQKSFDETIFAEQEKCHQQRLKKRVIKQAKSLGLNIVPA

SEQ ID NO: 296042 - protein, 358 aa, unidentified
MAEHPAETHVIGGVDTHKELHVAAVVDHRDRVLGTETFPTTRHGYRLMLAWMNSFGDLQRVGIECSGSYGAGLLRYMQAAGIEILEVTAPDKLDRRRRGKNDDFDAESAAHAAFAKRHTVTPRTRDGMVESLRVLRACRKTAVQARRIALQMIQMTIVCAPDKIRDPLRSMTRMQLIRTLASWRPDLTAYRQVEEAYRISLKSLGRRYLELHDEIADLDDMIEAIVKDLAPELLAQAAIGLNSAAQLLLTAGDNPERLRSEASFAALCGVSPVPASSGKTVRHRLNRGGDRAANSAIHIIAIGRLRLDAHTQDYVARRIAAGNSKLEAIRCLKRYIAREVFGIIMRRHREISQSQIAA

SEQ ID NO: 296043 - protein, 322 aa, unidentified
MSQPNPLCVGIDVSKATLDIAASSDVAQFTVSNDSDGFNAIITGLRRHSVALVLMEATGGLEVAVACSLQAEGFEVAVVNPRQARDFARAMGYLAKTDRIDARVLTQMAEVINRHPERKRFIRALPDAERQALAAMVVRRRQLIAMLVAERNRLHPSHPQNKKSINTIIKALEDELVRLEKEMDSHIRNHFKEIAERLSSIKGVGTMTVSAMLAEIPELGTLSRREISTLIGVAPVNRDSGTMRGRRTIFGGRAGVRSALYMAALVATRFNPVIKTFYVRLLAAGKAKKVALVACMRKLLTILNAMLRKNEEWDESYHHVAP

SEQ ID NO: 296044 - protein, 424 aa, unidentified
MKNTAARKRKQVPEGYLVIGVDPHKKRHAAVAITQDFTTQAKFKFDNTGEGLEMMLDRARAEMVKSYCQGVIFAIETGGHYWRNIAYYLDERGIPFRFINQYTLKRRREGKDLNRRKNDYRDSEVAAQLLCTGEFVESVIPQGVYAELRTSHNAYQRLVKERTRITNLMKGLLDALFPEFTHVFKDPGGLTALTVLSACPIPGVIAGMTEDEFVAAMEARHKGRRLMRKKLRSLHYSARGSIGIQAGARSVSFEIAFLVDKLELIRQQIRIMEMTLVKLVDEAEEGKYLLSIRGLNYIAVAGLLAELGCFKLYRSAKQMIKMAGSNPTESESAGKKRSKTPMSKQGRPLLRYCAWTAVIPMLRFNEDFRAWAKQRRERPAHANPLNGREIVGAALNRLLRLAFALVKNQTYYQDVRPALIPVAV

SEQ ID NO: 296045 - protein, 384 aa, unidentified
MDSMQDTETVVIGGVDAHTDTHEAAALDQRGALLGTETFATTFAGYAALLDWLRDFGRIDVVAIESTGAYAAGLVRYLREHDIRVLEVNQPHAHTRRRRGKSDPIDAEMAARLALAGKATTIPKQTDGIVEAIRVLRVTRAGAVKARSAAMLRLAELIITAPQQLREQLNTRTTIRGKAALCRKLRPSVNAIHEPGQAAKLALRSLARRIDTLDTEIAELDEQLRALVARAAPRTTQLLGISTGHAGQLLVTAGQNIQRLHSEAAFAALCGSSPIPASSGRTIRHRLNYGGDRDANRSLHMIAVCRLRYCPRTQAYAARRTKEGKTKREIIRCLKRYIAREAYHALQADLADLSSPTPPPHRTAIAISCGAGPTGTHRRPIRRP

SEQ ID NO: 296046 - protein, 412 aa, unidentified
MEVIHARCCGLDVHKNSVVACVLITELDGQVERHVRTFKTMTADLLALGDWLNGLGVTQVALESTGVYWRPVDFNVLEDDARTLLLVNPQHMRAVPGKKTDVRDSEWIADLLRHGLLRPSFIPPAPIRAIRELTRYRKTLVQQRSDEANRLQKTLEGANVKLASVASDVLGVSGRAMLAALVDGERDPDVLADLARGLLRAKLPQLRQALLGRVQPHHVALIRRILAHITFLEESIASVQMEIEECMPSFDEPLQLLLTIPGIGPVAAAAILGEIGTDMSRFPSAGHLASWAGLCPSNKESAGKRMKGPMNRGNVWLRAIMGEVAWASVKRRATYFGAQFHRLARRRGRNKAIVAVAHSLLVVIYHVLRTRQPYSELGIDYFNQLDAARIQRHHVRRLEQLGYTVTLTPLVA

SEQ ID NO: 296047 - protein, 340 aa, unidentified
MNTTRIGIDLAKSVFEVAVSHTPGRVDERQRLARGRMHTFFAQREAAEIVMEACGSAHHWGRELEAMGHRVSLLHPGDVARYRDGNKTDRADAKALLEAARNEDIDRVPVKSVDQQALGALHRLREGYLRTRTARINALRGHLREFGVVISVGAKHVLPEARAALDRGVVPAYLLDALEEVLAEIETLKEKAEALRAELEQLAHRMPDAQRLMSVPGVGVLTATAFIAFVGDVCRFRSGRDFAAYLGLSPRERSSGFSRRLGSITKRGNTYLRMMLIHGARSALRAGKVAKEPDDLRTWALAIERRSGHNVAAVALANKLARVCWRVWRDQRPFERRLAA

SEQ ID NO: 296048 - protein, 346 aa, unidentified
MMIIGCDFHPSWEQVAWLDTETGETGERRLVHADGDAERFYRQLPTPVLIGMEATGNSHWLVDLVSELGHELWVGDAAQIRASYVRQQKTDKRDAAHILKLLVEGRFPRIWMASSEVRDLRQLLVHRYKLVIIRARVKNELQHLCLNKGVQRQRKLWTKAGQQVLRELPLKPWAGRRREDLLGLMAMLDQQIKPLDEAVKAEAQRDKMALLLQTQPGVGPITALAYVLTMGDVGRFPRGKQVASYLGLIPREHSSGGRQHLGAISKQGNRMLRMLLVEAATTTVRLDPGFRKEYLHRCHRKPKAVAKVAAARKLAVRLYWMLRTNVAYPEVVRIESSPRVRLVGEH

SEQ ID NO: 296049 - protein, 428 aa, unidentified
MSRRDCSKQAERRQRIKKTTLVVGVDVGSEFNAVALMSKEGEVFGEYPKVYNSREGFEYFLQVVEAVKRRKGLKEVFIGLEPTGHYWRKLAFFAKEQGYQVRFIRTTALKHQRELDESSSAKSDIKDALTIANITREGKYIDTVIEGGIFRQLRTLAKVREKTLKYSVSTQNTLGAVLDDYFPELKKIFHSMKTRSLWAVLKSCPFPQDVLRFDLSTISEIISKSSYRKVSAAKKARDLFAAAKESIGLKEVAEADRYRLKRCLEEAMRSEILLKEVGIQMKSLLKQIPCSEYLLSIPGIGPVSAAVFLGELGNPAHFSHPKQIIKYSGYDPQESDSGNRVGRKRISKKGRWLLRKILFFMTMKVVQECTFFWDYYQRKLENPNRFGQLLKKKEALCAVTLKLIKVIFALVRDKRGYQEEAPAFTLAA

SEQ ID NO: 296050 - protein, 391 aa, unidentified
MVCIGIDVAKDKHECCILDSEGTTLVDCFTIPNNMDGFKSLLQTIQDCSQKSDKIKVGLEATGHYSYNILGFLLDNDLPVYVMNPLHTNLYRKSLSLRKTKTDRVDAKTIATMLLSDVDLKSYTDTAYHNEELKSLTRYRFDKVQERAKLKQSVSRLVTILFPELEQLVSSIHGTSIYALLSEYPGAKQISEAHLTRLANILVKTSRGHYRKDKATHIRDAARTSIGSVMPAKSLELKHTIKLIQELTSEINEIEDAIRKIMDELKPPILSIPGMGFHSAAMILAEVGDFSNFNSPDKVLAYAGCSPSTYQSGKLTNCYAHMEKRGSRYLRYALYTATKYVCYWNPVFTEYLTKKQAEGKHYNVALSHATKKLVRLIYALQKSGKAYLAVT

SEQ ID NO: 296051 - protein, 348 aa, unidentified
MALTIVETRAVTGGVDTHADVHVAAALDPVGGLLGVGEFPATPAGYARLLGWLGGFGTVCLVGIEGTGSYGAGLARHMAAAGVRVVEVDRSDRQDRRRQGKSDPLDAVSAARAAQSGRARGEPKGRDGQVEAIRALMVAKRTARSERTQTINQARALVLTGPDDVRARFSRHTPAAMVAQLAALRPRPGDVVGYATRIALRELGRRAEFLDGQLERLDELTVPLVTARAPGLLTLYGVGPDTAALLLVAAGDHPGRLRSEAAWAHLCAAAPIPASSGKVTRHRLNPGGDRQANHALWRIVITRMSSHPPTRAYVARRTKEGLSKPEIIRCLKRYAARETYRHLRPGPG

SEQ ID NO: 296052 - protein, 316 aa, unidentified
MRNCIGIDVAKQSFDLHSLKTGQDRRMENSTDGIRQCVALCNKIRPELIATEATGGYERTLAATLQAEGFAVAVVNPRRIRDFARAAGQIAKTDKLDARIIAQFAATMEPMPTERISENTQILKALVARRNQLVGLHTAESNRLEHADGKEIRRSIAAVLKVIEAQLKTIDRQITEHIENTPQLRKRSEILDSVPGIGPTTAHMLVTELPELGRLNRRQIAALIGVAPMARDSGTFRGKRMTGGGRKKIRSRLFMPTLVAVRHNPILRAYYNKLLGRGKCKMVALVAVMRKLICILNTMAKNNQEWNPNLKKSLDF

SEQ ID NO: 296053 - protein, 422 aa, unidentified
MSNPLLVGIDPHRRTNTVCLMDGHGQELGRRFTVDNNRPGTETFVRSVAEAVQAGSFDRIEVASEATGWYWFLFFQTLSQDPVLNQWPLHLYPINPRLTAKFKQTYTDLDHTDPYDAFVTADRLRMGRDLPGPFRSDDTYLPIRFLTRYRYHVVHNLAREKAYCLSILYLKASEYTRQDGDEPHQDQRPFSNVFGAASRAVIQEFASIEEVAALPFEELVAFVDAKGKGRFADPGENARRLQRVARDSYHLPEALQAPIHLILKLSLQQITALEQQEKRLHVAISDLMATIPHTLDTIPGFGPVFSAGIISEIGDFSRFHGDVQAQVAKLAGFKWRKRQSGDFEAEDTKLTRARNRYLRYYFCEAANAVRMRDAEYAAYYERKHNEVRTHQHKRAIVLTARKLVRLVVRLLTTNQPYQPRRR

SEQ ID NO: 296054 - protein, 349 aa, unidentified
MSHKSAPPTVSTIGIDLGKNSFHLVGLDQRGAVVWQLKCSRAQLERRLANTPCCLIGIEACSGAHYIARQLATLGHDVRLLPAQYVKPFLKGHKNDYRDAEAIAEAVQRPTMHFVAIKTPEQMDLLALHRVRSRLVSQRTGVTNQIRGFLMERGIIVRQGVVPLRKALPDILSSNTPALSPRIVNLIAELVQDWRRLDERIAAVSADIESLVEQDEACQRVMTVPGVGPIISSAVVAAIGNGAGFTQGRDFGAWLGLVPKQESTGDRTILGKISKRGNKYLRTLFVQAAHVVLARRPSAAMRGLWPWIEQASRRLHRNMLAIALANKLARIAWAVLARGRSYQPRIVAI

SEQ ID NO: 296055 - protein, 343 aa, unidentified
MQAVTTIGLDIAKSVFQVHGVDCNGQVVIRRQLKRRYVLAFFEKLAPCLIGIEACASSHHWSRQLLALGHDVRLMPPSYVKPYVKRQKNDATDAEAICEAVSRANMRFVPTKTPEQQSGLVLHRTRHLFIRQQTSLINAIRAHCAEFGIVAPVGRQGVEELLNVIADAEDEQIPEIARACLSALGDQLHRIKAQILEFDRMIGAWHRSCEASRRLDEIPGVGPALATALVASIADPRTFRSGRDFSAWIGLVPKQSSSGGKPRLGSISKQGDRYLRGLFTAGALAVIRYAKIHGIGHRPWLTALLARRPTKVAAIALANKIARIAWAMMARGERYREPVALAA

SEQ ID NO: 296056 - protein, 342 aa, unidentified
MSIITVGIDLAQNVFAVHGVDDNGKAALVKPKISREHLLPLIAQMPPCVIGMEACSGAPHWARQLRQHGHTVKLMAPKFVSPYRMSGKRGKNDAADAAAICEAVTRPAMRFVPVKEEHPQVILALHRTRTGCVEERTATDHRRRGLISEFGIVCPQKIANLRRALMDHLEDLPGFVNRCVGDLLAHADRLDARIAEYDRIIAQAAREDARSKRLMTLPGIGPHTASAMRASIGGGGHDFKNGRQVAAWIGLTPGQYSSGGTARLGRITQAGDKYLRSLWVMGAKAVLSGLGDKQDRFSRWVRSLVERRGYWKAVVAIAAKNARLAWAVLRFGEDFRLKAAAA

SEQ ID NO: 296057 - protein, 429 aa, unidentified
MNYTQNEKIEQVTDSTMVVGVDIGSQIHYARAFDNRGRELTKRIFSFHNDLEGFNSFNLWAETLKTENKKTAVLIGCEPTGHYWFAFAKYVNDHQKRLVMVNPFSVKKIKELDDNSPKKTDSKDPKTIAKLVVDGRYSISYMPEGIYAEIRDLVYSRDRIMKQHNISANRIQRWLAIYFPEYLGLYTRFDAISGLAVLEKAPLPKDVIALGVNGIRKIWHDKKMRGRGVTEDRAKTLVEAAHNSVGLDGGIGTKSELYMLLEEHRLWTSQLEAVNKVLEEMILKVPHVEKLLAIKGVGSITIAGFIAEVGDIRRFDSPKQIQKYAGLELVENSSGKHKGRTRISKRGRRKLRKILYQVMVPLLARNKEFRGIYDYYVTRVKNPLKRRQAMVAVSCKLIRVFYAVLTKGVEYDRFKMMSDIHRKSDIIAA

SEQ ID NO: 296058 - protein, 345 aa, unidentified
MKKVVKQVVGIDVAQDELVCCFGQLYDDFTIELVTRHTFENKLPGFKKLTEWLEPLVKKEVQLRFVLEATGVYHQSFAYYLYDKSYNISIILPNKISNYKRTLDVKTITDKTMADAIAQFGLERNLDNWQPPKGIYRTMQQLTRERSQLIDEKVVIKNQLHAENAEAKPNKKSIDRCKKRLALIEKQVKEIIEEISELVRTDEEVQRIILLICSITGIGILTAATVLGETNGFELIRNKRQLTSYAGLDIKEKQSGSSVKGKPIISKKGNKHLRKAMHLPALSAIKHDERFRAIFARIVSKHGIKMKAAVAVQRKLLEMIYTIYKTGVIYDKEYFKKYNEVVEVI

SEQ ID NO: 296059 - protein, 341 aa, unidentified
MRKTLFCGVDLHSNNAMYVVTDGRDKALFTRRLPNQLPLILESLEPFRQRLKVVAVESTYNWYWLVDGLQEHSYPVVLAHPSEMKQYKGIKAANDLTDAAFLARLARLEVLPTGYIYPRQDRPVRDLLRRRMLLVQQRTGILLSLQNLVMRQSGRSVGWRDIRTLSGPERTALLGDHDCLTFVADQQVDLIEQFSKKIKRFEKKVLEHVQVQPAYERLQTMPGVGPILALTILLETGDIGRFETVGDYTSYCRCVRATHTSNGKNKDENNGRNGNAYLAWAFVEAVHHALRVCPKAKSFYDRKRAKRNGALATKALAAKWSKAAYYMMKRQEAFDLTRVFG

SEQ ID NO: 296060 - protein, 367 aa, unidentified
MDKGTTYVALDDSKRKVVAGILRPGETQPELRELPKEPPLIRRLFQRLRREGPVEACYEAGVSGYDLYRQITALEVPCQVIAPALTPRRPGQRIKTDRRDAAKLVRLFRAGELTAIHVPDEAEEAGRDLLRCREAVRRDVLRWRHRLLKFLDRHGRLYVTGKNWSQRHWGWIRGQHFDLPTLQRTFEATLFALEQARARLAELDKEIEALAETDLYREPVGWLRCFRGIDTLSAMILVAEIVDFQRFSRPRALMAYLGLVPSEYSSGTTQHRGALTKAGNGHARRALVEAAWHYRHRPGVGPHLTRRSEGQPAAIVTHAWRAQQRLHRRYRHLVGLGKRPPVAVAAIARELVGFIWAAMTIRREAAA

SEQ ID NO: 296061 - protein, 332 aa, unidentified
MFVGMDVHRNRTQVCVLDRKGNEVRNRNVANDRQALRKELAGLRRGTPVAFEAAYGTGWIAELLGDLGFEAHLAHPAGCRAIADAKLKNDRVDARTLANLLRTGYLAEAWLAPKEVREQRLLLRERARLVRIRTSAKNRIRAQIADEGVAAPGHGLWTKRGAVFLESLDLSPMHRWVVTDCQVLIEVLECRISLLEAEIRRQAKPDKRVDALMAIPGIGLLSAMTLVSEIGDITRFATARKLCAWAGIIPSMRNSDRTLHHGHITRAGPAAVRHVLAEAAQTAIRKEPYHSDFLATKRRRGTGIALIRVSRKLLTESFYALHALEDEQRQCS

SEQ ID NO: 296062 - protein, 442 aa, unidentified
MNTPSPAADPQFAAFIGLDWADQKHAWALQVAGSSRIEQGEVENTPEAMDAWVTELTQRFHCQPMAIALEQSRGNVIAKLVKYGNLVLYPINPKSSAAYRSTFHLSGAKSDPEDAVLLLELLTRHRDRLRALDPDTVETRMLRILVELRRDLVNQQTAYTQQLKDLLKQIFPQALQWLDKLHTAMACDFLQRWPTLETLLRARAQTVREFFQKHNSRNAERIEERIEQRKDAKPATEDRALLEPGIMMIQCLTKLLDQLRPSIEEFDAKIKAVYEAHPDFAIMQSFPGAGAVMGPRLVATVGSDRKRYASAVELQCFTGIAPVTVTSGQQEWIHWRWACSKFDRQTIHEWAGHSMKKCEWARQYYEGQRAKGKGHHAAVRGLGYKWLRILYRCWKDRTPYDEARYLESRGRHQSGTAKKSTGPVNILFKSCGGFSRPTAIST

SEQ ID NO: 296063 - protein, 409 aa, unidentified
MPDYERYVGIDWASQYHQVCVVDPTGQRLGEWQVAHSGVGLAQLVDDLTCRVSDPARVAVAIEVPRGAIVDTLLERGCHVFALNPKQLDRFRDRHTVAGAKDDRRDAFVLADALRTDQRAFRRLAVEAPVVIQLREMSRLHGDLVEEHSRLTNRLREQLWRFYPQALILCPAADEPWLWALLQKAPTPAQGQRLTRGALAAVLARHRLRRITAADLLGALRVPALQVAPGTVEAASEHIGLLVPRLELVHEQLTRCERRLDALLEAAAHADEDERREHRDVTILRSLPGVGRVVAATMLAEASRPLAARDYQTLRTHSGVAPVTRQSGKVRQVLMRRSCNPRLRAAVFHWARNSIRLDARSRAHYDQLRQRHGHARALRGVADRLLGLLIAMLTTRSLYDSARRPVLVA

SEQ ID NO: 296064 - protein, 400 aa, unidentified
MNAVGIDVSKGKSTVAVLRPFGEVVASPFDVIHNDNDLKRLVKLIRSLPGESKVVMEYTGTYFEPIAQFLHNNGIFVSVVNALLVHDYGGNSLRKVKTDKKDALKLASYALDRWTELDEYVPADEQRKILKLLNRQYNQSIKIQTTMKNNLISLTDSVFPGINRLFTSLERQSDGHEKWVDFLHAFPHKDCVAKLYLSAFKAKYKSWCSRNKYRYSESKAEKIHSYAKSVIAVLPLNESVKLIVTQVVSQLNTILETAFSIRTEMNRIASSLPEYDTVMSMFGVGKVYGPQLIAEIGDTRRFRNRRAITAFAGLDAPPYQSGQLDVSSRHISKRGSAALRKVLFQITEVFILSKPEDEPVYQFIIKKRSEGKHYYSYRIAAANKFLRIYYAKVNQILNAT

SEQ ID NO: 296065 - protein, 286 aa, unidentified
MKYYTSTTEFNCGIDLHARQMYVCLMDRQGKKLVHTNVKDNDFAYFLKLIEPYKHSLTVCCECMFGWYWLADACQAAGLTFVLAHALYVRAIHGGKNKNDRIDSEKLTHLLRSNLIPPAYVYPAQQRPLRALLRQRIFYVWRRAQLLARIHCHQLAHNRIPAKQSRWTRDDWEEQLLKAEIHPLRQLALSNDLAMIRHFDHQIFEVEKELYRQTKQVAGREYALLQTAPGIGENLGLTILYEIGDIHRFPTVKDFLSYCRLVKGTVASAGKIKGLRGAKLGNKAEP

SEQ ID NO: 296066 - protein, 424 aa, unidentified
MKVTYQTCCGVDVHKSFLVATIVKTTGGIEPSYQKERFSTFNNSILEFKQWLLDNDCHDVCMESTGKYWVPVFNLLEDDINVVIANPKWVKAVKGNKDDTKDSKWIGDLFRLGLVKGSYIPCKKVRILREYTRYRYKLVSCRSSEKNRYQNALTVCNVALDSVVSDIFGKSSTSIIDYLLEQSGSSINHEEIASKLLRSLKSKEDAVIESVEGYQMTDAQKYRMRLVRAHMDYITAEINDVDKMIENMISSNTDFENAVQFLCTIPGVKRDSAITIISEIGTDMSQFSSSRRLCCWAGLTPGSNESAGKRKSVRFTRAGVYLKPALVQCAHAAVKSDKSPYYKKKYESLVKRRGKKRAIIAIARMILTAIYQMLSTGEQWNPSDLYKIDMPVALVEKQKAKAIKQAKKLLQREGLLPPDEPLAS

SEQ ID NO: 296067 - protein, 409 aa, unidentified
MDVFHERCAGLDVHKEKIFVCVLIGRGSGYQKITFQYGTFHHQLVEMRQKLVELGVTHVLMESTGVYWMPVYDALEGFVEIVVGNAQHIMNVPGRKTDESDAEWLAKLLRFGLVKPSFVPAREFRELRQLTRYRRAVVQTRASEQNRVEKHLQISGVKLSSVASRVFGVSGTDMLNRIAEGTTDPGELAGLARGRLRKKMPQLRDAFAGSISEHTQHLISLQMEQMNRLESTIAQAELKIDEKVKPYEELLARLDDMPGLNLRSSIDVLAEIGTDMSPWATHRQIAAMAGLCPGNYISAGKRLKNRSRQGNPYLKSILVQAACSAINVDGSYYQAKFKGLKKRRGHKRALVAIAHAMLVAIYHMIKKGEPYRELGAKVVSDHELSRKKEYLVKQFQNLGFAVSLTPLTA

SEQ ID NO: 296068 - protein, 338 aa, unidentified
MELYGGIDLHSNNCVVVLLDEEDRTVLEKRLTNNLDGILLAMADFREAVRGIAVKSTYNWYWLVDGLMDAGHALHLTNTAAVKQYEGLKYAGDRHDARWLAHLLRLGILPEGYIYPKEDRPVRDLLRKRSQLVRQRTQNILSIQNLFARNIAMRITADDVRKMTPDDVDGCLASSDLAQAVKSTHAIYRCQCEEIRRLEKITRGRVKSRPEFKLLQSVPGIGDILAMTILLEMGTVDRFPSAGKFASYCRCVKSSRKSNGKNKGSGNRKNGNRYLSWAFAEAATFAVRFSSRIKKYHQKKKAKRAPAVACNAVAHKLARACYHILRDSVPFDIDRAFV

SEQ ID NO: 296069 - protein, 343 aa, unidentified
MEYGAIDLHTRESEIRIVSEDGTEVFARRVATRPDALARVFAGRAPLRVLLESGTESEWVAQSLEGWGHTVVVADPNYAPMYGARHRRVKTDRRDVAALAEANRRGWYRPAHRVSRAQQTVREALTIRRTLINQRTQLIAVVRTVVRRHGDRVPSGQAETFVARVRQRILPAPLQTAVAPLLIALEGLAPLIAAADQAATMQARGDTVARRLMTAPGVGPITALNYRAALDRVERFADAGAVASYLGLVPREHSSGDQQRKGRITKAGPREPRAMLVQASWTIWRMRRGPGVGLAAWAHRLAARRGRRVAIVALARRLARILFAIWRDDQPYRESLRHLASAA

SEQ ID NO: 296070 - protein, 372 aa, unidentified
MTSMPEPTPIDRAHDEREEVVLGVDTHKDLHVAAVLSGLGALLATRAFPTTTAGYRRLVAWARSFGALRRAGVECTGSYGAALTRHLQAEAIEVVEVNQPDKATRRKRGKTDAIDAEAAARAVLSGRATATAKTSNGPVEAMRVLRMARNSAVNASTKAINQLKAVLVGADPALRDSLAGLGPASLVRRCAELPDPTPGSGLSEVDRAVVFTLRTLAARIMALKAEAYQLHKQLRALIAAHVPELLERRGIGPDSAAALLIAAGDNPERLCSEGSYAALCGASPVEASSGKTQRLRLNRGGDRQANAALYRITLSRLRWDSRTQDYLQRRLAEGKTRREAIRCLKRYIAREIFTLITPKAATALANQSANAA

SEQ ID NO: 296071 - protein, 395 aa, unidentified
MFIVGIDIAKRSHEAIIIAEDGQVVRKAFSFRNNCTGYNLLLEQVRRLTLVKSQIVFAMESTAHYWLALYARLLKDGYAVMVLNPIQSHSLRELYIRKAKTDARDSLIIADLVRFGRCKASNVPQDKILALRELCRSRAYLVDMAADLKRKLIALLDRIFPEYESLFDSVFSKASIAVLSKYSTPQKVKNANLRKLTDILMESSNGHFGEWKAHQLKEAACSSFGIDDSGGVYSTLLGMFLEQILSLTAQADSLEKQISVFFQEFNNPLTSIPGVGTVLAATILNEIGDITRFSSADKLLAYAGLDPSVKQSGEFKSNQNRMSKRGSPYLRRAIWLASTVAVHRDPMFQTYYEKKISEGLHYMNVIGHVSGKMTAVIFAVLRDGQPYQPILQSAG

SEQ ID NO: 296072 - protein, 395 aa, unidentified
MFIVGIDIAKRSHEAIIIAEDGQVVRKAFSFRNNCTGYNLLLEQVRRLTLVKSQIVFAMESTAHYWLALYARLLKDGYTVMVLNPIQSHSLRELYIRKAKTDARDSLIIADLVRFGRCKASNVPQDKILALRELCRSRAYLVDMAADLKRKLIALLDRIFPEYESLFESVFSKASIAVLSKYSTPQKVKNANLRKLTDILMESSNGHFGEWKAHQLKEAACSSFGIDDSGGVYSTLLGMFLEQILSLTAQADSLEKQISVFFQEFNNPLTSIPGVGTILAATILSEIGDITRFSSADKLLAYAGLDPSVKQSGEFKSNQNRMSKRGSPYLRRAIWLASTVAVHRDPMFQTYYEKKISEGLHYMNVIGHVSRKMTAVIFAVLRDGQPYQPILQSAG

SEQ ID NO: 296073 - protein, 422 aa, unidentified
MKKRIYRKMPVNQFQPSSISRDEVGARLVVAVDVVKVDMVAAIADGDGRVLNTIAWKAPAENAAVLDVLRVFRAAGFLVEVVMEPSGTYGDVLQHQLAKEGFPIFMVSGKRTFDAREVYDGVPSLHDAKSAAIIARLHVEGLSKPACAPCPERRQLHAAITIMDLHQRRYLQLVGNLESLLARHWPELPALIELTAASLMALLARIGGPADVAAQRSAAAKLLHGMSHGLMAEDKIAAVLDSAGNSVGVPLVGLERDALMVIAAEAHRALRAFKEAKTGVEKLSAHTPAVALAPVVGKTTAAVIYTEVGDVRSFSSTGSFLKAMGLNLKEKSSGTIKGQLKLTKRGSSRVRHYLWLAVFRWIQKDPIANAWYQRKKERDGGKSSRAAVALMRKLAKALYYVGRGATFDSSKLFDVRRLGLAA

SEQ ID NO: 296074 - protein, 430 aa, unidentified
MEEVTDEPLYRDRVCGIDIGKAGMAATIRVPSDRDPARRASETRLFATTRQGVLALADWLCCWQVPAVVMEATSDYWKPVFYRLEAEGFECVLADARQVKNLPGRPKRDTTDSQWLTCCFERGSVFPCFVATPEFRIIRLHTRRRRDLTDERTREKQRAEKLLEDAAIKVSSVLTDLHGVTGREIMDRLIAGQRDPKVLAECARTRARRKIPQLREALEGAEFFTAHHARLLQSILNRIDTITAEIDELSAVIEDLLAPYEEQLQQAESQPGWGRRSAQDVIAETGVDMTRFPTGGHLASWAGKTPLDKQSGARKGQRRHKRGNKYISAVLGETAVAAGKTQTREGARHRKISRKRGKAKAVVATGNTQMKVLHALLSRPGTRYQDLGPDYYERRRDHNRHVSRLVGELGNLGYEVTLCRKPEPQDTPAA

SEQ ID NO: 296075 - protein, 318 aa, unidentified
MTSYIGIDVGKKSLHIYLPIADKSIEITNNQQGLAKLLSCCVEYYQHLSDIIIAFEPTGGYERELREFLKLNKVNFVTVHPNKVRSYAKAKGWLAKTDLIDSKLLSEYATVFSLLVKQDYNCKSQEDLHCFIQRREQLIAFKNQEIARLENHYNKVVIKSIKSHINQLDKQLIQVQKSIEELCNNDLAIKDKVSKLTSIPGVGIVAATTAICEIPQLGNIEFSQLTALVGIAPYARESGGYKGKRSIFAGRGNLRKVLYMAAVASLRCNKKLKEFYDRLLANHKPTKVALVAVMRKLLGFMHAVVKNNSFWNNNYVTP

SEQ ID NO: 296076 - protein, 347 aa, unidentified
MKILALDLGKYKTVGCAYESESGAHQFQRTFTAPADLERLVQEIKPDRVVIEVCSIAGWVCDLMGRLGVEVQVANPSDEAWRWRKVKQKDDRRDALKAARLSAVNQVREVYIPQITVRQLRALIAYRRHLVGRRTKIKNHIRDLLVREGQILARGSSCWTKLGQALLSSMARPLAEVGVAELWRGELWEELQQLQMVQVRIASVEEKLNAIGEADKRVQLLRTIPGVGPRLAEAIVALLDQPRRFRKANQVSGYVGMVPKAFDSGESERRGHITRQGSGLVRSLLVEVAWAGLRHNAWMRQTYQRLSGGGKKARKKIAIVAVGRKLLVRCWAMLRDNCAWDWQPQIT

SEQ ID NO: 296077 - protein, 342 aa, unidentified
MADIVKQTVGIDVAQDELVVSLGRMNHDTGTEIFASGTFANSPRGFSELLKWTDKLAAVGIGTGYVMEATGVYHEKLAYFLSDHGRDVSIVLPNKISNYFRTLEVKTVTDRTASQAICRFGLERKLEPWRRPKRIFRDLKQLTRERDQLVMDRTSLKNQLHAERSEAFPNQGSIKRIGMRIQMINSHELEIRTEIAGLVRTDTELSKKIDAITSIPGVGKLTAVIALAETNGFEHIRNKRQLVSYAGLDVRLKESGTSVKGKPRISKKGNRHLRKAMHMPALAAMRFNELHRALFVRLVSKHGIKMKAAVAVQRKILELIYIIYKTEKPFDRNYQNPPKDGI

SEQ ID NO: 296078 - protein, 406 aa, unidentified
MECPDAPAERPRLSPGQALSRSLVALDQDSTIIAVVEMSQSSWLVAGMLPGIERQPRKKLEPSAERLLGLLHRWRDEAVKAGRKITRIALAFEAGRDGFWLARWLRAHGVEAHVIHPSSVAVSREHRRAKTDRLDTELLKRGFLGWLRGERGHCTMARIPTIAEEDAKRPNRERECLVRERTRIVNRMKGTLARLGIRNFKPTLRKAAERVTTLHTPEGSALPPNVSAELQRNMARLGFVVSQIKEIEAARQKRLEQEPETEPHAMVRHLARVVGLGVETADILVNEVLSRPMRDRKAVARYAGLTGSPDESGAKRREQGLAKAGNARVRRGMIQLAWRFLRFQKESALALWYRARAAHRALALCHDGRDTGGRRLTSSGLKGLTGTSRPLSTIRRSYWVFGGLPN

SEQ ID NO: 296079 - protein, 428 aa, unidentified
MKESNLPRLEEFRQLKKEIRGSEEHLIVGIDVAKEKHYAYFGTATGKSLLRKLIFENNRKGFETLLHRAEAIMRQEGLTKVIFGVEPTADYHKPLGEFIINSGQPLVLVANGAVKQNRELLDGRWDKNDTKDCANAADLISQGKFLYYDLPGPEILNLRNLASLKRKLKAQEHSVRMRIRNHLVTQFFPELDEYYGHREGENLAIVKWCLNPEQIAAMEFEQFFQMVTKRNTGAAQRERLRSIQEAARRSIGCRVTESAMFEAKMLVEHLGRVREMIAETDARIAALCRQLPGYQSLMSIPGFGPVVTAEVMTALGTPHRFTSSKQVLKLAGLDLSASRSGKNSANAETRISKKGKAPLRYALYQSALIATTRNQEFLEYFSRLIAGRERERGIKTKMRVKVAAKMLVIAWTIWKNEEVFQGKYLLHQ

SEQ ID NO: 296080 - protein, 492 aa, unidentified
MHRKQSLDYFNQSFERVPVRSRSTNEFSFADAYFNASTIRLSQNGSNACLPTNADQLNTKKKPTPMNPNNQNQSFAAFIGLDKSDKKINVSLQRYGTAKIERSIIKGGAEALHAWVATLCTRFAHRQVAICLEQPAAGLIHGLMGYHFIVLFPINPMTLARYREAFTPSRAKDDPTDADFLCELVALHREQLKAWQPDDVCTRKLRHLTQARRRSVNMRTRFSNQLKALLKGYFPQALELCGDDLTTPMACALLQKWPSLQQLKKARAETIRRFYYVQNARRGDVIEKRLALIAQAAPLTNDPALIESSIITVQALTLGLRAVHTAISRYDREIARTFAQHPDASLFAALPGSGTAYSARLLAAFGSRRELFESAEVMLNFSGVAPVLKRSGQATLIHRRYARPLFVHQSFIEYANESIRHSLWARAFYQMHKAAQKSHWVIIRALAYKWIRILFRCWQERTPYDEIRYLRSLQKSRSPLLQYLAQPAIQTA

SEQ ID NO: 296081 - protein, 349 aa, unidentified
MSQNLNSAVAVIGIDIGKNSFHVVGLNDRGAIVLRQKWSRGQIEARFANMPPCLIGMEACVGAHHLSRKLKALGHDARLMPAKYVRPYSKGQKNDFRDAEAIAEAVQRPTMKFVATKTAEQLDLQALHRVRERLVSQRTGIINQIRAFLLERGVAVRQGLRFLRAELPRILATPPDVLSTRMERVIRDLAEDWRRLDERIDHLSSEIAVLARQDVGCERLMSVPGIGPIISSAMVAAIGTGDVFSKGRDFAAWLGLVPKQISTGDRTILGKISKRGNRYLRVLFVQAAWVVLIKPMSWERHGLKHWIEAARKRLHRNVLAIALANKLARIAWGVLAGGRTFEASKLQAA

SEQ ID NO: 296082 - protein, 346 aa, unidentified
MKILALDLGNYKSVACIYEMTSLSHRFTKVVTTPKGLHDLLVEEEPDRVVIEICPLAGWVSDLVRTLGIELEVASTTHDAWRWKNVKRKNDRQDGLKLAQLSALGQLTLVHVPEQGVRQWRALINYRHRLVSRRTKIQNHIRALLLRQAVAMGSGHRGWTRVGIAQLEALARPLNEVGCEELWRGELALELEGLKVLAEPLRQVEAKLDELGEVDERVQLLRTIPGVGPRGAEALAAVIDKAQRFKRGKELGAYLGLVPKQIQSGESNRLGRITRQGNRLLRSLLVEISWSGLRYNSWMRSVYERVRRGSKARKKIAIVAVARRLLVRCWAMLRDGTTWRLANSGA

SEQ ID NO: 296083 - protein, 382 aa, unidentified
MSAERVNDCYVALELSQRTWLIGFLLPGTDKVQIMTVAGGDAEALLSALGRIESLAGTRLPAECTMVSMRVCYEPVYDGFWLARYLIDRGIDTTILDPSSFLVSRRGRRVKTDRIDVEAMVFTLKAYLLGDRSVCRPVRLPSVAEEDAKRLSRERTQLKKERTRHVNRIRALLVLHGIRSVPGLWGGRWKEALSNIRTGDGRELGRFIFRELCRQFERLDLVHSQLKSLEKERIQACETEGAINDSGKIRVLKQLDGIGEVGATQLVAEVYHRTFKNRKHLASYLGLSPSPYSSGEVHRDQGISKAGNKQARVMLVELAWCWLKYQPQSELTRWYRARFSGHGSRSGKVGIVALARKLAIAFWRFIEDGVVPEGATLAVATK

SEQ ID NO: 296084 - protein, 430 aa, unidentified
MKSNTQNAKIEAITEKTLVLGIDVGSETHYARAFDYRGIEYSKKPFKFSNTEAGFVTFKEWILDLKERHEKDKVVPGMEPTGHYWFNLGKFLQDNEMKPVLVNPHHVKKSKELDDNNPTKNDRKDPKVIAGLVREGRYMIPYLPDGVYADLRTASNIRFQLQVELTRIQNRISRWFNIYFPEYKTVYGKPDAKSGMLILKAAPLPEDILTLGIDGVNQIWRDAKLRAVGKARAKTLIEAAEHSVGSKEGAVSARMEIRMLLEDYESRNIRFQEVMTLIEGLVKQIPMAEKLLEIKGVGIKTVSGFLAEVGDISRFNTPKELQKLAGLALVESSSGKHKGETTISRRGRKRLRYLLFEVAMSLVAKNPEFRELHNYYTTRRLNPLKKMQSLMAIAAKLIRVFYAMLTKGVDYDPKKMVSDIKRPVVYLQAV

SEQ ID NO: 296085 - protein, 356 aa, unidentified
MHDITPDAIVIGGDTHKDAHVAVAINGLGARLATASFPVTTQGYRQLADWAAGHGAVHTIGIEGTGSYGAGLTRSLTAMGMRVIEVGRVNRQLRRRHGKTDTVDAESAARSVLAGDAQGQPKTGDGAVEMIRHLKIARDTAFKARTQAMVTLKTLLVNAPQPLRERFIGITGKMTLIRGLAALRPGMPVSPTASAKMALRALANRWLMLDAEIKEHESVLELLVRAQAPELMDAPGISTGTIADMLVVLGDNPQRIRSEAAFAKLCGVCPVPASSGKTSRHRLNRGGNRRANAALYRVALVRMRHHPPTREYIKRRTVEGKSPREIRRCLKRHIAHEIYQRLCTDKRPAKQYAEEA

SEQ ID NO: 296086 - protein, 341 aa, unidentified
MCDYIGLDVSLEDTHICVVDGVGAVTARAVARTDPDELAKTISALAPKVKTVVLETGGQSAWLQQGLAALGLPAVIVDARQAKKALSARLNKTDCNDAEGLAQLARTGWYREVLAKRPATRRIRAVLMARELLVRQRRDLSSQVRGLLRGFGLAVGRIGHARFEARVRELAQAEPALLTALEPLLAVRRVLDRQLDTLTRQLGAIARDSADARRLMTVPSVGVMTALGFITAIDQPHRFVRSADVGAYLGLTSRRHQSGQVDWSGRISKQGDALARALLYEAATVLMTRVKRWTRQKAWAVRLAGRRGGAKARVALARKLAVTLHRIWVDGTTFNWANEPA

SEQ ID NO: 296087 - protein, 367 aa, unidentified
MQKVRFVGLDVHKESIAIAVADGDGNAPENVATIPNDTALVLKRLKKLGAGATLRCCYEAGPTGFVLQRALAAADVECVVIAPSLVPQKAGDRVKTDRRDAVKLARFLRSGDLTEVYVPEAATEAMRDLERCRDDAKRAERTARHQLSKFLLRHGRTYPGKTAWTGMHLDWVRGQVFEHEAHNRVLVDSVQAVDNATARVERLTKDIVELVESWSLRPLVKALQALRGVQVITAVILAAELGDFARFASAPALMAYLGLVPSEHSSGETQKRGRITRTGNGHVRRILVESAWSYRHRPTMSPEIRRRNAGVAPAVQAIAWKAQNRLHGRYKKLLGRGKNKQQTVTALARELAGFVWSIARQPQWLAS

SEQ ID NO: 296088 - protein, 347 aa, unidentified
MVTLGSDSHKQSHTLVAVDENGRRLAELRVAATQAGHVQALVWARQWPERRWAMENCRQLSRGLERDLLTVGEQVLQVSPKLMGRSRRAGRELGKSDPIDALAVARVALREPHLPVARLEGRSRELKLLVDHREDLVGERTRIQNRLLWHLHELEPGWVIASSGLTRGVVLEEVARRLQARHEVVAEIARELVERMAKLTASVNQLQRRIEALADDLAPSLLALPGCGGLTAAKLVAETADVRRFHSKDAFAMHNGTAPIPVWSGQQQRHRLNRGGNRQLNVALHRIAITQLRLGGQARAYIARRMSLGDSKTEAIRALRRQLSDEVYRRLRADVQEPVSESAALAA

SEQ ID NO: 296089 - protein, 314 aa, unidentified
MNTQGLVVGVDVSKDWLDVAMGGESLRVANAVAGINELIGRLHKIEAHLVVMEATGGYETQAASAIAGAGLRLAVVNPRQVRDFAKSTGRLAKNDRIDAQVLAAFGTAIQTKITRIPDEQMLELQALMARRSQLVGMRVQEVNRLGQMKGAMRKQIKAHIDWLDKAIDEVNTDLTARLRTSDAWREKDELYRSMKGVGPITSGTLMTSLPELGALDRRQIAALVGVAPFNRDSGTWRGRRTIWGGRAQVRHVLYMAVIAAIRHNPVIRSFYDRLIARGKPHKVAMVACMRKMLTILNAMARSNTPWTPTLCPRN

SEQ ID NO: 296090 - protein, 370 aa, unidentified
MDSITYVGLDVHKATVSVAVAESGRGGEVRHVGVFANRPEILLKLAARLSKGGHRLNFCYEAGPCGYGLHRLLTGCGHECVVVAPSLIPVKVGDRVKTDRRDGLMLARLHRAGELTPIWIPDAAHEAMRDLVRARATAGRILSKTRQHLQSFLLRHDQIYRGVRAWTLAYRRWLTTVRFAHPAQQIILQDYIHAVQDAEARLERLTRQIEELLPNWSMAPVVATLQAMRGVALVVAVTVVAEVGDFRRFANARQLMAYLGLVPSEHSSGASVRRGGITKAGNVLARRVLIEGAWTYRMPARVSRKLHDRNENLPPAVRDIAWKAQLRLCSRYRRLAAAGKPKVVVTTAIAREMVGFIWAIARIAQPTLQG

SEQ ID NO: 296091 - protein, 405 aa, unidentified
MNAVGIDVSKGKSTVTIRKPGDVVLMSPCDIPHTQSAINDLIKQIKSLEGETKVCMEHTGRYYEPVATWLSDAGIFVSAVNPILIRDFGDDSLRTPKTDKADSKKIARYTLDRWAKLKQYGIMDKTRNQLKTMNRQFGFYMAQKTAMKNNLIALIDQVYPGANDFFDSPARNDGSQKWVDFIHTYWHVDCVRSKSLNAFTEHYQNWCKRKNYNFSAEKAAKIYQISSDLIAVFPKNDITKMLIWQAVALLNTASKTVESLRSKMNELASTLPEYPVVMDMNGVGATLGPQLIAEIGDVSRFTHREALTAFAGVDPGKNDSGKHIQNSVRTSKKGSPYLRKALFQIMDSLIKRSPVDDPVYAFMDKKRSEGKSYYVYMTAGANKFLRIYYGRVREYLSNLSNNEII

SEQ ID NO: 296092 - protein, 347 aa, unidentified
MRFYTKQHPFYCGIDLHARTMSVCILSQDGEVRLHRNMQASPDALLKAIAPYRDAIVIAVAWILTWYWLADLCAQEGLPCVLGHALSMKAIHGGKTKNDKIDSQKIAVLLRGGMLPQAYVYPAAMRATRDLLRRRTHLMRKRAELLAHIQNTNSQYNLPEIGKKIAYKANRDGVAERFPDPAVQKSIEVDLALIGHYDQLLRDVELSILKTAKQHNAQTLYLLRTVPGIGEILSLVLLYEIHDITRFPRVQDFLSYCRLVKCTKESAGKRYGTSGTKIGNAHLKWAFSEVAVLFLRANPAGQKYLTKLEKKHGSGKALTLLGQKLGRTVYYMLQRQTAFDMGKFLNG

SEQ ID NO: 296093 - protein, 339 aa, unidentified
MNAVTLIGIDLGKHSFHLHAQDGLGRMVFRKKLSRQQLLRTLSNIPACRVVMEACAGSHWLARRLADMGHEARLISPQFVRPFVLGNKNDFGDAQAICEAACRPSMRFVSPRNEAQQTVSALHRIRERLVRDRTAAVNQIHGFLLEFGLSLPRGAALMSRLPAVLDHETLPPRLVALVVRLREHVYYLEEQIKQIEQDLVAALREDDKSRRLLEIPGIGPITASALAVELGDAQQFANARQFSASIGLVPRQYSTGGKPTLLGISKRGDRNLRRLLVQCARAVMQHADSRTDALGAWVKALSARRHSNVVACALANKLARIAWAVLARGTRYEAQAVAA

SEQ ID NO: 296094 - protein, 341 aa, unidentified
MNQQILACNVGIDISKSEFNACILVRYNDFSYANLGTNVFENNPKGFKAFFSWCNKAIDFENKTFTMEFTGRYSEKPASFLHEKKATVFLVSPFKSNRFRQSYDADVKTDQTDAYTLAVMGLERKLVQWQPDSEFFANLKIIVRERYGLIKQRTAIKNKLHALHYAAASTLPTVKRLKEQMKLINRQIREIDKQVEEYLKTDESVWQKVESLQTIPGIGLTTISTILVETDGFRKTKNVKELTAFAGYKVTINESGIYKGRSHISKRGNKFIRHALHMPILCVIQVNPLLKPKYLSLKARKAKPIIATTAIERKTLILMYSMYKNNTSFDANYLKSNTLMN

SEQ ID NO: 296095 - protein, 393 aa, unidentified
MICVGIDVAKDKYDCFILSSEGEVLADVFTIPNNAEGFDTLLQTIRRCARPEDKIKVGLEATGHYSYNILGFLLNEGLDTYVINPLHTNLYRKSLSLRKTKTDRVDARTIAAMLMSDVDLKPYTDTAYHNEELKSLTRYRFDKVRERAKLKQSVSRLVTILFPELEKLVPSLHLASVYALLIEFPGAKQVAGAHLTHLKAILSDASKGRYGRDMAVTLRDAARCSVGSVMPAKSLELQHTIRLIRKLDAEIEDIETAIQSMMDEMQSPITTIPGIGVRMGAMILAEIGDFSRFDSPDKILAYAGMSPSTYQSGQLSLSGPYSHMEKRGSRYLRYALYNATKYVCLWDPAFAAYLAKKRGEGKHYNVALSHAAKKLVRLICALEKSQQSYRNAA

SEQ ID NO: 296096 - protein, 376 aa, unidentified
MKQFNDIYVGLDVHKDTIAVAVARGLRTKAVYFGEIPNTPAAIAKLPKQLSPDGEVLNFCYEAGPCGYEVYHQLTKLGQSCAVVAPSLIPRMPGVRIKTDRRDALSLAKLHADGSLTAVWVPDKEQEGIRDLSRAREDFKQTETKARQRLGAFLLRNGKIFTGKSKWTVAHWRWMETLTFETPMQHIVMQEYVEALKEASRRLLGMEKQILLAVRGWSLEPVLNSLMAMRGVNTITAVTLLAELGDITRFDNPKQLMSYLGLVPSEHSSGGKRQQGAITKTGNGHVRRVLVEAAWNYRFVARKSRTIEMRAEKTSERVQAIAWEGQKRLCGRYQKLLSLGKLKQKVCTAVAREMVGFVWAIACEASGRVHGSRATA

SEQ ID NO: 296097 - protein, 339 aa, unidentified
MNITTIGIDLAKTSFSLAGSNKHGKIVLRKTVNRGKLLSVIAQCPPCLIGLEACSGAHYWAREFEKLGHQVRIIAVKFIEPYRKGSKNDNNDAEAICEAVRRPNIWYVPVKSADQQAALCVHRVRQGVVRERTAWINRVRGLLSEFGLVMPKGRYSVQSAIPAILGDQDNGLPELARQMIHDLWLSIQHANEQILSYDRALARLAREDETAKRLLTIPGVGEQIATGVVASVPDPRLFKNSRQFAAWLGLVPRQYTTGGKIRLGRITKRGDKYLRMCLVHGARAVIAKLGDKQDHVSCWVRDLIERRGYLRAVVALAARNARLIWTLMVKREDYRAIDA

SEQ ID NO: 296098 - protein, 364 aa, unidentified
MDELTHIGLDVHKDTIAVAVLRSATTTCDERVIPNTPEAVRKLFARYPDRSVLRTCYEAGPTGYDTQRLISSLGIACDVIAPSLIPRRSGVRVKTDRSDARNLARLHRAGELTAVRVPMPAEEALRDLVRAREDLKNDRRIARQRIRSFLLRYGKRYPSPGARWSFRFEVWMRALRFDEPASQAAFDHLVSAYSVRDAQLAAIDKQIEEATLCDPLAGAVARLRAFRGIDTLTAVTLLTETCDFQRFATAGSFMAFTGLVPSEHSSGASRHQGSITKTGNAHVRRVLVEAAWAYRHRPAVRGAHAKRLEGQSPEVAAYSWAAQCRLNSTYRKLAARKGPNKAVVAVARELSGFVWGAMTERMAV

SEQ ID NO: 296099 - protein, 335 aa, unidentified
MKHYAGLDLSMESTQVCIIDEKGRKLASEKVESTAEAIAVLLERFSPIERAVIETGRMSPVICLGLRQLNVKLVCIDARQAYQSLKAMRANKTDHHDAAGLAQLARTGFYKEVHVKSPAAHGVRSVISARSHLVDARLRLDNMIRGLCATFGHRLGSGKGKAFLEGITKAVHIAGLGDAIASLLSVRTELVEQIKEMDRRLRVIASQSQACEILMSIPGVGVQTSAAFAAAIDEAGRFRQSRNAGAYFGLVPRRHQSGELDWTGRITKQGDGTVRKLLYEAANSILTRSRERFALKTWAMRIAKRRGLNKARVALARRLAVIMHAMLRDGTLFQV

SEQ ID NO: 296100 - protein, 369 aa, unidentified
MNKNILFIGMDVHKESIEIAIAEGQSQEVRRYGKIGGTHDAMRKTLRKLVSQGKTLHFCYEAGPCGYELYRYLVSEGHDCWVIAPSLIPKKAGDKVKTDKRDAVQLARLFRAGELTPVYVPNREDEAIRDLSRAREDAMLVQKSARQRLKSFLLRHDIRYQGKTSWTEAHLRWLADEVCCPSAAQRIVFQEYVNTVTETQQRLQRLNEQIEIFVKQWRLYPAVEALMSLRGVQMIVAVTVVSELGDLSRFDNPKQLMSFLGLTPSEYSSGPRQSRGRITKTGNGHVRRILIEAAWCYRYPAKVSREIQKRQAALPLAIRDIAWRAQLRLTQRYQHMQRKGKPHNVTVVALARELSGFMWSIANEVKYPR

SEQ ID NO: 296101 - protein, 489 aa, unidentified
MKLGAARDQSRSAWRLVVIEVVADSATFSYRLDRNKLRQTRSREGRYLLRTNLVEDDPNKLWSHYLLLVAVEEAFKNLKRCYGASGERNGIIVAATKPTGCPMPQPNDLSKSLAALDENSTLIAVIEMSQSSWLVAGIIPGVERHPAKKLNPDEGGVLRLLHRWRGEAEKAGRNISWTAVAYEAGRDGFWLARWLRAHGVEAYVIHPNSIAVSREHRRAKTDRLDTALLKRAFLSWLRGEREHCSMAAIPSLEEEDAKRPSRERENLVGERTRIGNRVKSTLARLGIRGFKPSLRTAAYRLERLRTPEGEPVPAHTLAGLRREMARLQLLAEQIREIETARLERLERQPNRGAHPMIRMLAQVRGLGIETADMLAHEAFSRSLRDRRAVARYGGLTGAPDESGARRREKGLAKAGNARVRRGMIQLAWRFLMFQKDSALAQWYRTRTADARGATRKALIIALARKLLVALWRLVTTGEVPHGVVLRPAS

SEQ ID NO: 296102 - protein, 338 aa, unidentified
MNKITTIGLDLAKDVFHAVCCDARGKIVSKRMLKRSQILEYFGNRERCLVGMEACASAHHWGRELEALGHEVKLIPAQYVKAFVRGNKNDYNDALAIAEAVVRPEMRFVTIKTPAQQDVQALHRLRKGCVGMRTALCNQIRGLVGEYGRVAPKGVAALRRRIPEWLEDGGNGLSDLFRRLLSESYVRLQELDTHIAFYTKEVEHQSKQDEACQRLQTIPGFGPIVSSVFHSQIGNGEAYRRGRDASAALGLVPRQHSSGGKDTLLGISKRGDSYLRSLLVHGARAVVSRAEHKDDRLSLWINKIREKRGFNKAVVALANKMARIGWAVLANKTVYQAA

SEQ ID NO: 296103 - protein, 395 aa, unidentified
MQTLFVGIDVSKDSFSVAGLDAQGGTAFSLTAGMSRSGFSELFKAISSHSVALSDVVVAMESSGCYHLNLFSFLSSKGLRTLVINPLVIANFSRLSLRKTKTDRKDAFTIARFILSHRDSVEQFTILQAHQDLKDLAREREFTLKMISSIKNEIKRLLQSTFPELEHLGNVFSDTMLQFLSVFPSARLIRMAEPQAIRQAFEQRDKRKRISVPPETIRRAARDSIAAVSPAKEMILPGKIETLLHLEERLAQLTKMLVKLCETTMQEDLKILTSIHGINNITAAPFLAEMGDWRGFRSYKQLIAFAGIDPSIHQSGTIQGVSRLSKRGNRHLRRLIWLMTFCAIRMEGPFKAYFTRRKTEGLPFRKALFATAHKLVRVIFSMLNNRTCFVAQPTA

SEQ ID NO: 296104 - protein, 325 aa, unidentified
MFAVHGVDEHGKPALVWPKVTRDQLHERVAALPPCTIGMEACSGARHWARLFGDLGHTVRLMAPKFVAPYRLSGQRGKNDAADAAAICEAVQRPNRRFVPIKRVDPQARLTPHRPRQGCVEQRTATLDRIRGLLSEFGVVLPLKAATVRREAAAGLEALPGWARLAIGDLLDEVRRLDERVVEYDRHLAHMAREDERARRLMRLSGVGETTATALLATVGNGHDFRCGRQFAAWRGPVPGQYSSGGKARLGRITKTGDPYLRTLLILGARAVLALAKTKTDPISRWAAVLEQRRGYWKAVVAIAAKNARLAWAVLAKGEAFKMPA

SEQ ID NO: 296105 - protein, 337 aa, unidentified
MKRYLGVDLHRRQFVVCTRWENGEQEIRQWRIAELTKFVEQLQPEDQIAVEAMGTTMRFHDAVVGRVGRVVVVNPHQFKVISESVKKTDRKDAAALALYLEKDLLPEVRVKPKQNRELMHLAETRDLLVKQRSALKGKINNLLAMQGIELKREALSSKIALERVLAQPVSGMVQLELRILVEQIRSLSESIAELDERLEEEGQQLPGYENLTSIKGIGALSATVLLTVIGKISDFADENKLAAYLGLVPKIANSNESERSGRITKQGNKLARTALVQCGLVAKRYSPYLQRFYERIKQRRGGGKAKIALARKLVKIVYDTLKNQWVFEDFPSFTLAA

SEQ ID NO: 296106 - protein, 350 aa, unidentified
MPQRNMPRPAAVYGIDIGKNIFHVVGLGSDGVPVQKVRFRRDTLLQFFERAAPAIVGMESCAGSQWIARKIQALGHKVRLIPAQFVKPYVKSNKSDIIDAEAIAEAATRPTMRFAALKSEEQADLQALHRVRDQMIGTRTRLINQMRAFCLEYGIALRQGAGLFKVDLPHAVEDQSNDLSSAMRKLLADLFADLRQLEQRIGDVTREIEAIASREDVARRLMTIPGIGALGATALLAAVGNGRQFQKARDLAAWLGLVPREYSTGGKQKLLGISKRGNRYVRKLLVHGARSCFRHLDRTRDRLGNWLDGLQARMHPNKAVVALAAKMARIVWVVLTKPGALYERRDPAFT

SEQ ID NO: 296107 - protein, 409 aa, unidentified
MDLVVERCGGLDVHKDTVVACVRVPGAGRRREQTIVTFGTTTIQLLALRDWLVANGVTLVGMESTGVYWKPVYFVLEEAVECWLLNAQHLRNVPGRKTDVADAAWICQLIEHGLVRPSFVPPRPIRELRNLCRYRRSQIEERTREAQRLDKVLQDAGIKLSSVATRILGLSGRAMLNALVAGTRDPEVLAELAKGTLRKKIPQLRDALEGRFGAHHGLLVGQILAKLDFLDEVIANLSVEIDRMIAAYEPQVALLVTIPGIDRRTAQELIAEIGVDMSRFPTAGHLASWAGMCPGHHESAGKRRSGHSRPGSKWLHRSLREAAKAAGRTKNTYLGAQYARLRGRRGPAKATTAVGHSILVAAYHMLRDGVTYNELGPDWFDRLSPDQHARRLARQIEALGFTVTISTAA

SEQ ID NO: 296108 - protein, 388 aa, unidentified
MQDVADQSAAPTTIGTDLCAIFVSLELSRSTWLVTSLSPGRGEKMSKHSVSAGDIAALLARFSELRRKACARTGKSFPIVVIQEAGLDGFWIHRVLLSEGIESHVVDAASIATSRRRRRAKTDRIDGETLLRALLAHKRGEPRVCSMVRAPTPEDEDRRRICRERKVLIMERVQHVNRIKGLLFSQGASGYEPLRRDRRARLDALQTGDGRRLPQHLKAQVCRELDRLELLLEQIKAVEAERDALLDAEQTEASTPPPMLLGVRGVGPEFASVLWSEGLSRHFDNRRQVAAYAGLAPTPWQSGSVNREQGISQSGNSRLRTTMIQLAWLWLRHQPRSALTLWFEDRMERNGSRRRKTTIVALARKLLVALWKYVTAGVVIEGAMIRAA

SEQ ID NO: 296109 - protein, 416 aa, unidentified
MSLALPEALFFTGIDWAEVTHAVCVMDAAGKIAAEFTIEHSAEGIAALIRRLARYGDPAGMPVGIERPNGRLVDLLLEAGYPVVPVSPNAIKTWREGEVLSGAKSDAGDAAVIAEYLRLRQHKLRVATPYSGETKALRTVMRTRDDLVAMRVAATSQLSALLDAYWPGARAVFADVESPISLAFLSRYPAPALAARLGEKRMTAFLVKNGYSGRRPAAELLARLHAAPAGTADETLTEALRDAVLALVAVLTALNTGVKDLDRSAAAHLGEHPDGKIFTSLPRSGQVNAAQMLAEWGDARQAYDGPDAVAALAGCTPVTRQSGKHRDVTFRWACNKRFRKAVTTFADNSRHASPWAAKVYADARASGKDHPHAIRVLARAWIRVIWPCWLTGTPYDPARHGAAAALAERASSQFAA

SEQ ID NO: 296110 - protein, 356 aa, unidentified
MTKVKTNFSYHRVDVGLDVHKRSWNAAVFLDGIYIRNIHQPPSPKALHTFLTSYFPGADYRCAYECGKFGFWIQRQFRELNINCLVVNPADIPSTHKDEVYKNDCRDARGIGDALAKGQLKPIYVPSPEQEADRHLVRMRKKIWRDLVRCKNRVKGFLDYVGIPIPEQYDNPNWSHNFITWLQQLPLDFSASRLTLNYQIREVQLLRRELLSICNDVRKLMRSKKYKDIYYRLRTITGIGPLTAAALITEIGDMKRFASFYHLNSFIGLMPMEHSSGEKIMKGRITVRKHKQLRSDLVECAWAAKRNDPALALYYNQQLQKNKNGKAAIVKVARKLLSRIRYVWLSGQPYQIAVVQ

SEQ ID NO: 296111 - protein, 342 aa, unidentified
MYYIGLDVHKKTISFCVKDAAGRVYQEGKIGSTRNELDAWIRTLPQPRTIAMEATIFTGWIYDHLLPHAEAVKVAHPLMLRAIAAAKKKNDRIDAGKIADCLRCDFLPECHIAPTPIRDRRRVLRYRNLVQRQSVQMKNRISGLLMETGVSYNKLRLHRMGYFQQLLSTSVEIGDNVRPLLQLCREHIDRSIRLDRTLLRSLNEDPMLSERLERLRTVPGVGPITALTWVLEVGDTSRFRSIKQAISYCGLCGAEKSSADKVLRTPISKQRNKHIQRMLVEAARLAPRCSDELALLYERERQRGNANRATLAVARKMVAHMLAVDRRKTDFIPKGKHRLTAA

SEQ ID NO: 296112 - protein, 340 aa, unidentified
MEIKRIGLDLAKYVFEVHAVDNDENAVLRKTLRREAVAQFFADLEPCVVGMEACCGSHYWARVLTDLRHEVRLISPQFVKPYVKSNKNDRNDAEAICEAVGRPSMRFVPPKSPEQLEIQAAHRIRQRVVANRTRLVNQVRGLLGEHGVVVPRDINRIRRTLNEIVDGQSGGFGELFVDMLRDIRAELVELDTRLAGYNRRIKSLFRSNEMCQRIGQIEGIGPITATALVAAVGDKSCFKNGRQFAAWLGLVPKQHSSGGKARLFGISKRGDRYLRTMLIHGARAVLGRSAGKTDTRSQWVNRMRERRHPNVVAVALANKNARIVWSLLSTDQEYRRGRTV

SEQ ID NO: 296113 - protein, 408 aa, unidentified
MNPLFVGIDVSSRNNVAYLMKPDGSKHSSFSVQNNLGGAKILSERIVSALESVPLSDLVIGLEATSIYGDSLVYALREDGSLGRFQRKIHVLNPKQVRKFKEAYPDLPKNDWVDAFVIADHLRFGRIAKEVYMDDYRYQALRTLTRSRFDIIQNLTREKQRFANYLFLKCSGIAQAKDIQNTSATTIALMERFETVDDLANADLDELTAFIAETGRGRFADPDAAAKAVQSAARGSYRLPKTVNDTVNQAMAVSIASMRALKEQVKVLDKAIEQQFEIIPNTLTSIPGIGKVYSAGIIAEIGDIHRFDSQASVAKFAGLVWHRNQSGDFEAEHSQMIKSGNRYLRYYLLEAANSVRRCDSEFRRYYDLKFKEVNKYQHKRALALTARKLVRLVFRLLKDNRLYIPPEG

SEQ ID NO: 296114 - protein, 490 aa, unidentified
MRFGSKTNPQKPSVTRLYYKAFAESKSCRSARDVLPKGSSTNVSTLKSAEEQKPSYAARIGLDWADQKHFWTMLTAEGKRTRGELKHTPEAIEIWAVELARSFGGRPIALALEQKRGALVAILSKYAHVHLFPLHPTKLAHYRQSVCASGAKSDPSDADLILDYLVKHPEWLPGLMPDTVETRSLQFLVEERRKLVDQHTSQLQILIYWLKQVFPQMLVWFDDMSTPLVGDLLQRWPQLPALKKASKKTLRKFFDQHNCRSEERIQQRLDEIGRAVPATTDVALLNTADLCIRITVQVLAALRAGIAEFDRRIEAIYQTHPDRFVMASLPGAGPALEPRLVAALGTNRERFSSASSMACCFGIAPVTESSGNSRWVHWRWACSKFVRQTFHEWANCSVRTCEWARKHYDQQRSKGKGHHASIRSVAFKWIRILFRCWRDRVPYCEQRYLEALQKHVSSTPAVIVATSTPAVSAVQWTTCGGFSKLAEVSS

SEQ ID NO: 296115 - protein, 351 aa, unidentified
MMLIGVDYHPSFQQIAFLIEGTGECGDQRLNHEGGEAERFYRDLKRRCLSVRVGMEATGFSRWFERLLAELGFELWIGDPAEIKAKRVKKQKTDREDARLLLRLLREDHFPRIWMPSPENRDVRQLLWHRHRLVQMRTRIMNQLQALAMNENKCWKARLWSELGRVELAKLPLAPWASRRRQELSELLDQINPIIDELTTAAEQEARKCPEALRLMTHPGVGPLTALAFVLIIGMPTRFTCSKEISSYVGLIPSEDSSGGKQRLGHISKQGNSLLRFLLVEAAQAAVRCNPEWRRRYRHLVMRRQRNIAKVAMGRRLAVRLYWMWRNDCEYSPSFEFGSHAGKLGTGNGVR

SEQ ID NO: 296116 - protein, 419 aa, unidentified
MTQREDSRIIGIMHPICCGLDVHKETISACVIFPDKDGVDQYDIKVFGAFTDDLMRLRSWLLDHGCPVVAMESTGIYWRPVHNVLEDSVQVVLVNARDIKNVPGRKTDIGDSKWLAGLLRHGLLRGSFIPMKEVREWRDLTRLRKKYVHTVGDYRKRAHKLFESANIKIDSVVSDLFGVTGRNLMNLLVSDRKASTLADIHQCVRGKLKGKEEELYRSIQGFFSDHHRFILKRLLHTIDLLEEEISMFDAQIRHLMKDQNALLDRMKKAAGIADVSSREILAEIGPDLTAFPTGEAMISWSGLCPGNNESAGKRKSGKSPVRKHHLKTIMIEVAWAAVKKKGSYFKDKYYRLKARRGAKKAIVAIAHRILLGLYYVIRDGVEFRDLGEDYLAQRNKAQKMSHLRKQAQLLGFNLVPQTM

SEQ ID NO: 296117 - protein, 368 aa, unidentified
MEEVRAFVGLDVHKATISVAVADNWRGGEVRHVGTIENTPDAIGKLARKLARRHGVVEFVYEAGSCGYNVQRQLAGMELSCRVCAPSLTPRKPGERVKNDRRDAIALARLHRAGELTFVWIPDELHEALRDLVRARHAACQDVRRDRIRIQAFLLRYDLRFDGKPWSTRHRKWLWNRQFAHPAQQIAFQAHLNALDHDEARKRELEQQVGELLAESPWAKQMRALQALKGVGPVVAATVIAEVGDFSRFAHPRQLVAYFGLAPGEHSSGSTVRPRGITKAGSSLARAVLCEAAWNYRTTPKVGQWMNERCPPVPQDIKALAWKAQLRLHKTYRRLTARGKRSVVATAAVARELLGFIWSIGQRVPLGA

SEQ ID NO: 296118 - protein, 331 aa, unidentified
MFPVGIDVSKNTLDLCMLYDGIKGRIKTRNIQNNRHSVENILRWLRLQHCCPEDVHVVMEATGVYHERLATELHDAGFRVSLANPHRSREFARGMGIMTKTDKVDAYMLACYAFLKKPHRWEPPAPEIRYLGALLRRRDVLLGDALREENRLEKYLSTDTPADIISSCRRMAQLLREEVSNIERQIKAHIKASPALRRDYTLLTSIKSVGPQLGMHMLVVLRSHNFVSAEQAAAFLGVVPIEKRSGTSVRSRPRMSKIGPPQLRAKLYMSALCGKIYNKRMRNIYDEMCLRGKPKMVAIGALMRKLVHWCYGVLKTGTVFNDESLKQVLST

SEQ ID NO: 296119 - protein, 340 aa, unidentified
MAIVGGMDVHRNQITFDYLDTETGEVSRGELRPTTRSKLRVWLQRFQGRDAAFALEATTGWRFVVEELEAAGVEAHLAEPADTSTLRGRKRRAKTDRADARLLRELLQTGRLPESWIPPEHIQELRTLVRLRKTLLDERTAWQHRIQAQLFHQGQPAQPRLLRRDRQTWLADLKISPASRQTIDLALRMIDHLNEELEPIERQLLQIARHQAGCRALVQQHYGIGPFTALAIVSEYGDARRFSSSRKAVRHSGLDVTVHQSDTKRARGRLSHQGPPLLRWALYEAAMCAARPTSPDLPYYLATSSRIGKNRARLAVARKLLRRAHHTLRQLGDQALAEAS

SEQ ID NO: 296120 - protein, 356 aa, unidentified
MATYYIGADVHSNNIEIAIQSRKKIVKRYTVPAGISAVVQVLDSLPGKKHMAIEEGPMAGWLYRNLHQKVERFVVADPRRNKLISSDGDHDDRIDSVKLAMLLAGGYLREVYHSDSDQRAELKHWVSLYHDRVRDAVRNINKIRARCRMYGITIPRKVLRQPEHRDTWLSKLKRPALAKQLLMLWIGYDATAKQARMAKQQLINLSKKYPIIHPWKKLAGIGVIRTVTIFAYLDTPWRFKKKNKLWKYCGIGLQRTASGTDKNGKPKPARLQLPWAANRILKNAILGAALTAINQKQNTFKDDYERMVQNGIIPGNARHTVARKLLTVMWGMWKRSCQFDQANATLSEPVEECVCV

SEQ ID NO: 296121 - protein, 408 aa, unidentified
MDVVYSHVCGLDVHKKNVVACIITPDHKEIRTFSTMTEDLLALIDWIKSHGCTHVAMESTGSYWKPIYNLLEMEQIETLVVNARHIKNVPGRKTDVKDAEWIAGLLRHGLLKGSYIPSRPQRELRELIRYRRSLMDERAREIQRIQKVLEGANIKLSSVASDIMGKSGRLMIEAIIAGETDAAVLSELAQRRLKAKKADLQKALHGLIGPHQRLMLKTQLRHIDELDKLIEQIDAEVKKRMDPFEEDLERLDTIPGVGRRSAEHILAEIGTDMDQFPSAAHLCSWAGLAPGNNESAGKRKSGKTTKGNQKLRTALIESARAAARCKDTYLSSLYHRIAARRGANRAAVAVAHRILTICYHLLKNKQTYIELGPHYYEERKRTHVARQAIRKLEILGYKVVVEEMDQTA

SEQ ID NO: 296122 - protein, 353 aa, unidentified
MPVYVAVDFHAREQTISWCDTADGEVHRTKLRHQHDDVRKFYEQFSGEVIVAFEASGYSAWFEQMLAELGHTVWLGNAAEIRRKAPRKQKNDRRDADLMLELMLKSDFPRVHTFSAESRTVLRQLRYRHKLVKVRTIAKNSVHAIGLNAGLPLRGRLLTQTGLEQLQALPLSPVLSQQRDEWLALIRLMNKQIGAVEESLAQRAQDDEAVELLRTHPGIGLLTALALRYTLDPIARFTSTRCVVGYAGLDCVEEQSSERRRMGSISKQGSRLLRFLLNEAGQTAARKDPQLKQFYRRLLRRRDKPKAKVAVARKLLVRSFIMLRDQIDYAEFVRRGVAARVARETHSPKVTDL

SEQ ID NO: 296123 - protein, 355 aa, unidentified
MLNTNYIGMDIHKETTSIAVMNAAGKVVMECVIETKANTVLQFIHGLRGDLHVTFEEGTWAAWLYDLLKPHVTEVLVCDPRKNALLKQGSKSDKIDARKLAELLRLNHLKPVYHGEHGVRTLKELARSYLTITQDLTRVRNRLKALYRSWAIPCSGTQVYSLRHRSEWLGKITEAGVRRRAEHFYQQFDALRPLRQEVRRDLLTEGQKHKAWKLLRQIPGIGAIRATLLIALIQTPHRFRTKRQLWNYSGLGLETHDSAQYCVVEGQLQRSKKPVMLRGLNQNHNHDLKAIFKGAALEASSGAGPFHDFYEVLLTKGRKPSMARLTLARKIAAIALIVWKKEVRFDAKHLKQQAA

SEQ ID NO: 296124 - protein, 373 aa, unidentified
MALRLFGWQADVMDTSHLTASECQTEVLTSVPRGGVHMNIKRIGLDLAKQIFQLHAVDHHERVVLRKTLRRSQMLTFFTRLEPCLIGIEACGSSHYWARELTRLGHIVRIIAPQFVKPYLRGNKNDANDAEAICEAVSRPGMRFVAVKSEAQQCMQAEHRVRARLIRDRTALSNEIRGMLGEFGLVLPVGLPALRRALPEILSQQEQWDNRFIRLLCELAEELQALDERLKRYDRRLKQLAQEEARIRRLQEVSGIGPVTASALVAAVGDAGQFKNGREMAAWLGLVPRQHSSGGKSRLGHISKRGDSYLRTLLIHGARAVLNACGHKEDRRSQWLKSVAERRNRNVATVAMANKNARIAWAILSREEEYRVM

SEQ ID NO: 296125 - protein, 400 aa, unidentified
MTSAFRFLEKKITRQQIKQSPEALNQWIGYLRNRFRNGPIAVCLEQSKGALINFLICHDLFVLYPINPKTLAKFREAFRPSGAKDDPDDATKLLEIVANHRNQLTPWKPAEEIVRIIDILARNRRDAVDRRKQVINQLRSVLKAYFPQAIDLVSEDICSPLTWDFLMKWPTLQKLQKVKDATLRKFYHDHHCYKKKVVETRLQLIRQTQPLTSDEAILKTSPIEVKLLCQLLKQYTQSIAEYEQQLKELYPQHPDAEIFRSFLGAGTVHSARLASAFGADRERYKSPESLQKYSAVAPITISSGKSKVALARYKCPKHLRQSFIECAGQSLQYSLWTAAYYRMQIEKGKTHNVILRALAFKWIRIMFRCWQDKIPYNELNYLQSLTRKGSKILNYMTAAT

SEQ ID NO: 296126 - protein, 350 aa, unidentified
MIIIGCDYHPGFQQIAFVDTETGELQERRLQHREEAEKFYRDLAAQGKKVRVGMEASGHARWFERLLAELNFELWIGDAAAIARKRERKQKTDRQDAQHILQLLMENRFPKIWVPSWENRDLRQLLWHRHRMVQARTRIMNQLQAVALNEGLRCKKKLWREKGRKQLEAIGLAPWASRRREDLLQLLDGLNPTIAELTQAIDLEVEKCPEARRLKTHPGVGSLTALAFVLIIGRAERFQCGKQIAAYLGLVPLEDSSGERRRLGHITKQGNSLLRFLLVEAAQVTVRSLPEWRSKYCHLTMRRGRKIAKVAMARKLAVRMYWMLRKGWDYGQLTKFGSHAGQPGTGDGVK

SEQ ID NO: 296127 - protein, 452 aa, unidentified
MAKKSKRRCDTLPVLHPDAAGIDVGASELYVAVSADRDPHPVRSFPTFTRDLHALADWLEQCGIHSVAMESTSVYWIPIYQILEARGLEVYLVNAQHVKNVPGRKTDVSDCQWLQYLHSVGLLRASFRPPGFICAIRSLWRHRSSLIQMAAEHVLHMQKALDQMNLQIHRVLNDITGVSGLKILDAILAGERDPLALARLCHGGVKNSEDTIAKSLEGDYRPEHLFALRQSLAAYHYYQKLVLEVDQEIKLQLGDLQTAATAEKTTPARTKASAYQRRRYEPKTFDLRGELYRIFGVDLTNVPGISAITAQTILCEIGTDVSRFRNASAFASWLGLCPEKKVSGGKVLFTKSRRVRSRVATALRMGAQSLHHAKDYLGEFFRRITRKLGRPQAITATAHKLARIVYHLLGTKEAYNESVFHKSEADTIRRAEYRLRRQAAQLGFQVIPAENG

SEQ ID NO: 296128 - protein, 339 aa, unidentified
MRCVGADLHKKSITLCVVEVVAGKTVVKNRQRLLCRDVERIERVLAAQRPFHLVVEATIGYEWFAALAEKQAERLVLAHPGKLRVIAESTRKTDKIDAFVLAEFLAKDMIPEAWRPTPRVRQHRSLLRRRCKIQNRITSIKCTVRGILTRYNADQKNLFTKLGWEAAQRHDLLEQERWLLIDLWEELHQQRQRLQKMDARLVEFAAQAPLREAEARAILASMPGVGPVTIETVLAELGDWERFHSADAVVAYAGLNPGVRESDGHRKDLRLTKTGSPLLRWIMIQLAHRLKRTTTRWRRLFEQLSKRAGKKKATCAVARRLLLVMYAMLRDGRAYRMPA

SEQ ID NO: 296129 - protein, 419 aa, unidentified
MDIVHERAAGLDISKRDAKVCLRLPGHRAGTFTSTVTTWGATTGQILALRDVLEREHVTTVVMEATSDYWKPFFYLMEDTLPVILVNAKAARNIPGRKTDVSDAAWLAQLGAHGLLRPSFVPPEPIRELRDLTRARSIATRDRTREIQRLEKFLEGSGIKLSSVVSDLTGVSSRAMLEALINGERDPEVLAGLAKGTLRSKIPELVNALTGRFKAHHAFMARLHLDQIDAQSRIIDALTGRIEEAMEPFRAAREFLATIPGVSLKIADVIIAETGADMSRFETPGRLASWAGVCPGSNESAGRIKSAHILPGNKYLKAVLGTAALSASRSRNTYLAAKYRRIAARRGPMKAMVAVAHSILNAVWHLLADGECYADPGADHFTRLDPIRAKNNAIKKLNSLGFDVTITPATADGPTLLSY

SEQ ID NO: 296130 - protein, 328 aa, unidentified
MKNYQEVIGIDVSKNKLDAFAYNRRLHREFSNDVLGYKSLLKWAKSNELKVFFCFENTGHYSLKLALYLSSKNAVYVQENPVVIKRSSGVIREKNDVVDAMMIARYGWLHREELSASELKDKELLEVGRLLALRDQLVRSRTGLKSTLSELKKLLNSSSTDTCCKTLVSSIAHLTSQINKIEKQLKSVIKDSEALSQNYRLITSLKGVGLVVGAQILYHTNNFKRFDSWRQFSSYCRTAPFGHSSGTSIHKRRKCHPMGDRQMKSLLSMAACTAIQHDSELRRYYKKKLEEGKLKMIALNNVRNKLLSRVFAVVKRGTPYVELHKFAA

SEQ ID NO: 296131 - protein, 423 aa, unidentified
MYIKNTLYVGVDVSLKSLTTCILDTLGSVIFKPANFSNDPSGVDSLFAKILELANKHDVEDIFIGAEATSVYDCHLLYAIADNAELNKFNVSSYCFTPKLINNFKKSLGDLPKNDKSDSFIIAQKLKSGHLPNECYINFKQLALQRLTRFRKHTMDSITREKGYLTSLLFLKFSTMAQQNILSDEFGSTGEAILTEFCSVEDICNKPIEELIDIIVSASQNHFKEVYNVAIKIQEAAKSSFKLPGDMNDSITFVMKNSFEIISSLQKSIKHTDKTISDLLDKNFKNESIILQSIDGIGPVISAGIIAEIGNIKRFDSDAALAKFAGLVWSQYQSGEFEAEDTHLKKTGDQYLRYYFCLAASAMKMHNVRFNEYYSRKYREASSHKHKRALVLTARKVVKLVFALLRDNKLYIPTKKGGLPIED

SEQ ID NO: 296132 - protein, 341 aa, unidentified
MKNKSFIGIDISKNVIDASIFCEGAPIKDFPHAVFNNSHKGFGEMCTWLKKNHVVLSNCLFGMEFTGSYSMKLEKFLNAKKYQFCMLSTHVVKHYPMGPKDKSDKIDSAKIADFLYRYNGTECVKPYKMPDKTMQRLKALMNERKFLVEQRTCFINRRQLCTTKEDALLYDGYIKKFDHDIENIELEIQKLLETDDSLSTTYKNLLAIPGIGFVNAMNVIVITRNFTAFETARQYASYVGVAPHSHTSGTSVKWRPRPSARCDGQAKADLSMAATVAVQYDAELQSFYNRKLGGKQDSDTKRKALNAVKFKLILRMFAIGKQNRKWDPLDSKSSNEKLAIS

SEQ ID NO: 296133 - protein, 361 aa, unidentified
MLQEGDAMSVKTKALSFAGQTFYLGIDTHKSNWKVVIRSNQVELKTFSMNPAPEELVSYMRKNYPGGRYRSVYEAGFCGYWPDRALRRLGFENIIVNPADVPSTNKEKDRKSDGIDGRKLSRERENHSLTGIYVPTPQVESHRSVSRLWRQYSERGAQIKNRIKCFLNFTGIPIPEGHEGAYWSNNYLTMLSKLVFEESYNRTVLDMHLEELRHIRQQRKVLLREIRAIVKDVPIIPLLRTVPGVGQIVGFVLYAELIDIQRFKNLDDLLSFIGLVPSEASSDTTVVKRGITSRHCRHLRPMLIESAWMAIRNDPAMTAAFAHLVKRMSKQRAVLRIAKKLVNRIRYVWLHQKPYVTAVVA

SEQ ID NO: 296134 - protein, 412 aa, unidentified
MQVVYERCAGLDVHKRTVVACATTPKADGQPQKERQTFSTMTVEICQMRDWLKSLGVTHVAMESTGVFWKPIYNVLEGHFELLVVNAQHIKAVPGRKTDQKDAEWIADLLRHGLLRASFVPSAQEREVREFTRHRTKLSQERSRVINRVQKVLEDANIKLAAVASDVMGKSAHAMLQALLQDDVDPATLAELALGKMRAKRDLLEQALTGLLKEQHRFLIREHLEHIKTLDQAIVRASHEIAERLRPFEAQLRRLETIIGIKRRLAEIILAELGTDMGRFPSSRHLASWAGMCPGNRQSAGKRFSGKTRKGSPWLRTALVEAAHAAARSKNTYLSAQYHRLAIRRGAKKAAVAVGHSLLVIIYHVLTQENDYEELGGNYFDERSRQAVEKRLVRRLENLGYQVSLTQTAPTP

SEQ ID NO: 296135 - protein, 479 aa, unidentified
MARKSKSQSKPRDGASASGANPLLSADANPKSGQRRGRRGKSAAFRLAHPNAAGIDIGGSEHFVAVPADRDERPVRQFTSFTDDLEKMADWLAACGIDTVAMESTSVYWIPVFEVLERRGFTVYLVNARHVKSVSGRKSDVLDCQWLQQLMSYGLLAGAFRPGGEICAVRAVMRQRTMLLRMQARHVQHMQKALTQMNIQLANVISDVVGETGQRIIRAIVAGERDGHRLAKLRNSRIKASEAEIARSLVGTWREEHLFALAQAIELFDAYAAQIAACDSKLDAMLAALATRDDNPGPDKRKGHRQKNAPRFDARTRLYRLTGVDLTRIDGLDASTALKVVSEIGPDLSRFKTVKHFASWLKLCPGTRISGGKVLSARTGRSGNQAAQALRLAAAALRNSQSALGAYYRRLAARLDTPAVITAVAHKLARLVYSLLTRGAEYVDKGVAFEEARHRDRQLRNLTLKAKALGFDLAPRPVS

SEQ ID NO: 296136 - protein, 292 aa, unidentified
MTKTQPAVEVFAGIDVSAREIKVARIQCQEVNPTLATFANNASGHKALLAFLLQKTERVRVCLEASGNYSLDPALALQAHRQVEVSVINPRRARKFAESLGERSKSDPVDARVLCQYAARMPWESWQPPSSLALRLRAITRAIESLSVMHTQENNRAHALGSSQALPALVLREKQRHQRYLENRMKQLRREARRLIVRDAELDRRYRLMLTVPGIGETSALQILGELVVLSDTADARQWVAFSGLDPRIFTSGSSVEKRPRISRGGSRHLRRALYMPALVALRREPHLRPFL

SEQ ID NO: 296137 - protein, 364 aa, unidentified
MQQNRTSVGLDVHARSIVACGLDGQTGRLFERRLCPDHTEIISWVRSLPGPVAVTYEAGPTGFGLARFLTAEGIDCLVAAPSMLQRPAGDRVKTDVRDARHLARLLHLGEITAVAVPSVEQEAARDLVRAREDVRGDLMSARHRLSKLLLRHGIVYYGGRAWTGRHDQWLRAQRRSAVFAAPALGMAFDIAYDTVLAAVARRDRLDAAITAMAAASEHTPVVRRLCCLRGVATLTAFGLAVEIGDWHRLTGRGMGAYLGLVPSESSSGASRSQGSITKTGNGHARRLLIEAAWHHRTPLRPTVALRRRQDAAGPAARDRGQRANRRLHARWIAFDARRKQPAVANTAIARELAGWCWSLAVLKD

SEQ ID NO: 296138 - protein, 347 aa, unidentified
MNITTVGVDLAKIVFQTHGVDERGKVGLRRQLKRAQMMSFFANLPPCLIGMEACASAHFWARKLTELGHTVKLMAPQFVKPYVKTNKHDVADAEAICEAVGRPNMRFVAVKNAEQQALLGLHRARQSFVGARTAQANQIRGLLAEFGIVFAKGIGWVTKKMPEILEDAENGLPGMSRELFSRLLTHFRELDRQVKELEGQIQAWHRDDAASVRLQGIPGIGPITASALVASIGDASAFKSGRQLAAWLGLVPRQSSTGGKVQLLGISKRGDTYLRTLLIHGTRSVLRHLKSGGTPTQRWLERLLTRCHPNVAAVALANKNARIAWALLAHGRDYQSGYVTARTAAAA

SEQ ID NO: 296139 - protein, 403 aa, unidentified
MEGPLISLDVSKGKSNYRFFENETDRKGKKGVIRHDIQGFDSIRDEAEKMEERLRIKPSVIFESTGVYSDVVEKYFTDKGFDVYVISPLLSASMRKEGVRPAKNDSLDTLSIAKVFYSRDDLRKCSENDKKAERLREMSYELDMMNRRIRPMKCQFLRLLDKVWPCLDEVSDYSSRFMLDFIIAFGHPENIKTVKGVLSVIRKSEMGTAGRKDKIAQDLFDYCHTHLSAVSKDSSYVELLKRMAIELKAMAKKKSELIDRMAEEARNKDEFVRLLTIPAVAKTTALKIMARVGDISRFRNAGALVAYCGLDPRVYQSGKMTGEHRTITKKGDCILRSTLFLAVKLMVMLYPDTKVARFVAAKAKNGLPYKQAVVAGSAKLARIIYSMLTHHENYVEFNADIVA

SEQ ID NO: 296140 - protein, 347 aa, unidentified
MKTLKQAVGIDVAQKELVVSIGRLLENLSTELYASKVFPNTKKGYHALIEWTKKNSDSSVTVQFVMEATGIYHEALAYSLVDRSCCVVVVLPNKISNYFRTLKVKTINDHTAAEAIARFGLERKLEDWHRPDPTLKKLKQLCRERDQIIQVRTIAKNQLHAEQTEAEPSPSTVKRLKQHILFLNKQVVLVKKEIDVLIKSKEELAHAVKLVTTIPGVGVLTAATVLAETNGFELIRNKKQLTSYAGLDVREKQSGTSVRGKATISKRGNRYLRKAMHLPALAALRDDPKFKSLFIRLVEKHGIKMKAVVAVQRKLLELIFTIYKRKEPYQANFEYLSKKEKQPGINT

SEQ ID NO: 296141 - protein, 354 aa, unidentified
MNTTQNSTKSKIVKVIGVDLAKDHCDVIGYDENGKICLRLDGCSYAKLREILANLPQAVVLMEACKGSMFHARSIADLGHEVRLVKGTDVKALRNVNHKNDLRDAAYIANLYFVPGIKYVYIKSQQQQSLQFLQNEYKSLQELRIQVGNQIHAGLEEFGCPVRKSSKFIKTRMVAHLEKHAELIPEDVMASFMRRREIWLNLLQQEEEAKRRLEQVATTDANAKRIMTVPCVGPQTAVGLLVHVGVDFGRFKNSRQFAASLGLVPKQNSTGGNNTLNHITKCGPKRLRSNLVQCAQLVLMYAEKWKGNFGDWVRKMRDSGKKHGVIVCAIAAKLARIIYRLMKDKVDYTPILSC

SEQ ID NO: 296142 - protein, 436 aa, unidentified
MRGCRCSMIMGFTKPIEHFNLLRKKVITMNTLYVGIDVSSKSNVIYLMLPNGDKHSNFSVANSHEGSTQLVKRIHSALTSHSLDTVLIGLEATSVYGDNLVYFLREDATLAPFNRKIHVLNPKQVKKFHDTYNDLPKNDYVDSFVIADCLRFGRINKEVYMGDYRYKALQNLTRARFFAVQNLVKEKQRFMNVLFKKYSTMTQEKVFSDTFSTTALAVYDEFESAEALANMDLHELTDFIIEKGKNRFPDPDAVAKAIQKAARSSYRLPKTVNDSVNQVLSISITSMKALESQIKEFDKAIKAQMELLPNVLISIPGIGPVYSAGIMAEIGDINRFNSQAALAKYAGLAWKQHQSGGFESEVTRLIPSGNRFLKYYLCEAALSLVRCDKEYSDFYHLKYKEVNRCQHKRALALTARKFVRLVFRLLKDNRLYCPAK

SEQ ID NO: 296143 - protein, 340 aa, unidentified
MPLYGGIDLHANNSVIVLLNEQDEVIYRKRLANDLPTILEQLAPYHTEMKGLVVESTYNWYWLVDGLMEADYRVHLANPAAIQQYSGLKYTDDHSDARWLAHLLRLGVLPEGYIYPKAARAVRDLLRKRAHLVRQHTANVLSVQNIMARNTGARFSVKRIQELTKQELTTLLAEETQVLAVTSSLVVLDCLRQQIKMLEQSVHKRLHHTPSYEQLLTVQGIGTILAQTITLETGAISRFPTVGNYASYCRCVDSTKLSNGKRKGTGNVKNGNPYLAWAYMEAAQFAMRFQPEAQRFYQRKLAKSRNNTVLARKAVAHKLARACYYIMRDLVPFEATKAFG

SEQ ID NO: 296144 - protein, 402 aa, unidentified
MNCVGIDVSKGKSTIAVMRPFGEVVVSPFEVCHTASELSELARLLKSLDGETRVVMESTGNYHAPVAWLLHGAGLYVSVVNAMLVHDYGNNSLRRGKTDKKDAVKLANYGLDHWLTLPRYVPEEDARLMLKTCYRQYQQYSKVQTMLKNNLISLLDTAFPDANRLFTSPPRADGSEKWVDFVAAFWHCECVCGLSKKAFTTKYQKWCRKHGYNFSEDKALDIYVSACGRFGVMPKTKTAKLLVEQAISQLQATSAALAALKQEMQSLAASLPEYPVVMGMFGVGPTLGPQLIAEIGDVRRFHSKKALVAFAGIDAPPYQSGQIDVRSRSISKRGSASLRRTLFLVMGVLLQCAPMDEPVYQFMNKKRSEGKPYRVYMMASANKFLRIYYASVKAYLDSLEHD

SEQ ID NO: 296145 - protein, 412 aa, unidentified
MKDLLEISCGLDVHKEKIVACILTGPLGKPTRSEIREFSTLIPDMIALRNWIVSKNCHHVAMESTGIYWMPIYEILEDAFYGDITLLVVNARHMKNVPGKKTDMRDSEWISTLLRAGLLNGSFIPEKRIREFRDLNRYRKSVIRDITSQKNRIEKFLQSSGFRLSSFISDIFGASGRNIILHLIEHGQIDKTALDSCLKTKTRNRIDEILMSVNGTLSEHQKAFLMILMTHYDSLKKHLAEIETSLEEDMAPFALQVEQLNSIYGISTTASCAIIAEIGIDMKPFKTAEHICSWAGLCPGNNESAGKRKSTSVTKGNPYIKSMLCEIAWVIAGKRNTYLSAWYWRIKQKKGAKKAIVALARKLLVIIYTMLKQGTLFDESCFETRRKHCEQKQLSRYIRELEKHGYHVEAQS

SEQ ID NO: 296146 - protein, 294 aa, unidentified
MTNHNQFRGFTFIVGIDIAKSVFQAYTCNVQTGEITNEQVKRADLLERFADRGKCLIGMEACGSSQYWARKFQVLGHTVRLMDVKLVKPFVQHNKSDRADAEGIFNAVMQGVREVAIKNETERDLQTMLTMRAKIVEQCTANINHVRGLLAEYGQVIPRSTTQFSKKVDECINALEGDAVQLVINTLRDTVRQIREATERLVALKREITRLAHETKHSKYLLSVPGVGPIIMAYMCVLLSDPSVFSSGRQFAAYLGLAPIHTGSGGKTINTSVPGRCDKRLRALLVEGAQAGHA

SEQ ID NO: 296147 - protein, 342 aa, unidentified
MQIAVIGIDLGKTLCSLAAVDASGAVVKRRRLRRESIVRFSKDLAPCIIAMEACCGAHHLGRQLAAQGHEVRLMSPEYVRPYVKAHKNDERDAEAIAEAATRPTMRFVELKAAAQLDMQTLHRARDRLIGTRTALINQLRAILLERGITMPRGRRKLQRQLTLLLEDCGLPISSRMMALVEDMRAQWAELDRRLADLDDEMVQSARTDEAARRLISVPGIGALNATALLAAIGDGGTFARARDLAAWLGLVPRQVTTGGRPRLVGITKRGNSYLRRLLIHGARAALPGLAASETPLGTWLQGLLSRTHKNAVVVALANKLARIAWAVLRRGERFHDGRVAAA

SEQ ID NO: 296148 - protein, 356 aa, unidentified
MNKRSKLNFSGQAIYLGLDVHKKSWSVSIFTQHGEYKTFSQPPEAEALIQYLQRHFPGAQYYSVYEAGYCGFWIHDQLRERGIENIVVNPADIPTQDKERRNKRDRIDCRKLARGLRVGDLKGIYTPARWRLEDRSLIRTRLSMGRKQARCKNQIKSMLLFYGVSIPEQREMGHWSRRFIRWIEEIRMERSSGDVALKLHLEELCHLRQIIAKLNRSILVLARTEEYRLWISLLKTIPGISTLTAMIVLTELYEISRFRSLDQLCSYVGLIPDTQSSGEKEHVGGITQRHHSSLRWLLIEASWIAVRKDPVMMEAFNEYCKRMRKTKAIIKIARKLLNRTRYVLKNQAEYVTGVIE

SEQ ID NO: 296149 - protein, 381 aa, unidentified
MKKIRFVGLDVHAETIAVAVAEPERNGEVRSLGSIPNRPESVQKLVKKLGPVDQIRACYEAGPTGYVLYWQLTELGVKCEVVAPTLIPVKAGDRVKTDRRDAEKLARSYRAGDLTPVWVPDAAHEALRDLVRARLAAKRDQLRARHRLSKFLLRHGRRPASGVRAWTAAYLNWIKKGVQFDQPAQKATLTDYLHEVEHAQERIIRLEQAIDDAIKTIPEKMRAVVEALQSLRGIAKISAVTIMAELGEVSRFETPRQLMGYSGAVSSEHSSGERTRRGGITKTGNTHLRRIVVEAAWAYRHRPSIGATLKARQKTASQEVKDIAWKAQNRLHRRYYQLTAKGKIPQKVVTAVARELLGFIWAIAVEVEQGYSTSQQKRTAA

SEQ ID NO: 296150 - protein, 346 aa, unidentified
MTIAEDARVITGGVDTHAGAHVAAALDRLGGLPGVREFPATAAGYAGLPDWLAGFGTVALAGIEGTGSYGAGLARHLAAAGVRVVEAVRAGRQDRRRAGKSDPLDAVSAARAALSGRAAGAPGGRDGAVEAIRALMVARRSARAERTQAVNQARALLVTGPEELRARFAAHAAARLASELAAMRPRPGDVPGYAVRAALREPGRRALFPDAQITRLDELIIPLAAARAPGLLALPGVGPHTAALLLIAAGDHPGRLRSEAAWAHLCGTAPIPASSGKVTRRRLNRGGDRQASHALWRIVICRMSFHPATRAYAARRSAEGRSRTEIIRCLKRYVAREVCHCLRAGA

SEQ ID NO: 296151 - protein, 370 aa, unidentified
MIVIGVDTHKRSHTLVALDAATGATRGQLTIAASDDGTVDAIRFAGKLDSERVWAVEDCRHVSGLLERGLLATGDRVLRVAPGLTETSRRAVREPGKSDPIDATAIARAAIREGLDTLPAAFLDERALEIRVLNDYRDQIIIERVRVINRLRWHLVQVAPEAEAEIRPAGLIGPQIRARLARKLGRLPQSPQLRIAKALLRRINEIYREELELLAEIKTLIEAHCPALLEEHGCGPVTAAIIIGHTAGAQRFSSEAKFARHTGTAPIPASSGNTQRHRLHRGGDRQLNRALHIIALSRARTDPATRAYLDRRHSEGKTKREAIRCLKRHLARRIWHVLYTATPTPTPAAPPPRPLNTVAVSAPSVMPCNR

SEQ ID NO: 296152 - protein, 391 aa, unidentified
MIFVGIDVAKDTHYAAVSDDYGAVLVKPFAFQNNAEGFCLLLKKLSEFDRSKLLIGLESTGIYSENLICFLYESGFRLAVINPIQTATLRKTAIRKTKTDKVDTMLIIKSLMVNSYRLYSQRDADSLKLRTLCRFRQNLKKSKARLKIQLAGYVNLVFPEFGKFFKSGIHIAASYALLKKHSSPKEIAALRTSTLCTLLSKASHGRFGKDTAEALKSLALSSVGVKNPYISIQIAQTIAQIELLEQQIKDLNSAIEEAMESINSVLMTVPGIGAVNAACILGEIGDIKRFSKPCKLLAYAGLDPTVRQSGQFTAKSTRMSKRGSALLRYALINSAWQLTLNDTTFKAYYDLKRSQGLNHYGALGHVAHKLTRVIFKLLTSDTPFNPAKLVA

SEQ ID NO: 296153 - protein, 417 aa, unidentified
MSNPLLVGVDVHRKTNTVCLMDGQGQEVAPRFTVENNRPGTEDFVRQVAAAVAAGDYDAIHIAAEATGLYWWHFFQTLAQDPFLNQWPVELYPLNPRLTANFKKTYIDLDKTDPIDAFVIADRLRLGRDLPAPFRYEERYFPLRCLTRYRFHVVHNLAREKAYCLAIIYLKASEYTRQDKRPFSNIFGAASRAILQEFASIEEIAAIPFDELVEFIGLKGKRRFPDPTENARKLKLVAQDSYPLPETLARPVNLILRMSLKHISFLERQEKRLASAIAERMETIPHTLDTIPGFGPVFSGGIIAEIGNLARFDYHQAKVAKYAGFKWRKIGSADFEAEETRLTRTGNRYLRYYFCEAANQVRMRDPEYAAYYERKYREVRKHQHKRAIVLTARKLVRLVVRLLTTNQPYRPRRRWQR

SEQ ID NO: 296154 - protein, 332 aa, unidentified
MLYLGVDLHKRSCWVTVLDADGHLLESRQLGTGRRELVEYFRKVRQPAQVAVEATFNWYYFLDLIEPLGLELHLVHPWKTRAIASARIKHDRLDSRILAELLRTGFLAEAWIAPKAVREQRQLLRHRARTVQGATRAKNGVHGVVNRQGIRPPLESLFGPKGRAFLAELDLAKMDRWEVDDQLARLDLLEAQIGKLDQEIRRRSRASRVAKALEEIPGIGPFIALLLLAEIGDIQRFPTPKHLASYTGLVPSLYASGQHRWGGAITKQGSTLLRWALVQAAHQAARSARFSPYYQQQRERLGPGKATVALARKLAVISYYRWRAAESRPCGR

SEQ ID NO: 296155 - protein, 389 aa, unidentified
MIAVGIDVGKRSHEACFLGPDGREVGRPLRFASNAAGARLLEERLGALGEPAAVALEASGRYWLGLQRRLAAGGVAVQVVNPLQVDAFRGTAIRRAKTDRRDAFVLADLVRIGRTRPNDVPDDLILQLRELTRFRWGLADRLGETKQRVLAVLDRTFPEFADQFVDPFGTSARALLGRAAAAAEFAEIPLDELTALLERASRKRFGADKAVALQRAAQDSLGLAALGPAARLELDALLAQVALLQAQIAQADAAVAELLARTEQHLTSIPGVGPVLAATILAEVGDVDRFPRPAALVAYAGLDPSVFESGQFQGRRQHISKRGSPYLRRALYLAAHSAQLRDPELAAFLRKKLDEGKPYKTAVVATARKLLLRVHAVLKEGRPYEPRGV

SEQ ID NO: 296156 - protein, 338 aa, unidentified
MPLYCGIDLHAKSSYLAIIDEQRKRIFKRNVPNDRATVLGFIAPYKSDLAGVVVESTFNWYWLVDAITEEGYTVHLANPSAIKQYAGLKYVDDKHDAFWLAELLSLGILKEGYIYPKEQRPVRDLLRKRGHLVRLRTSLLTSLQNTVVNTFGTKIPAHRIKGKEDHVTTYDFGNESLALMGQVSKTSIDMLTRQIEAIESHVYQRCRLAAAYNPLVSLPGVGRVLGTTILLETGSIARFPAVGNYVSYCRKAETIWTSADKVKGKGNRKNGNRYLAWAFSEAAEHARRFDTASRNFYNRKLKERNSPVAHNALANKLARAAYYIMRDQVPYEEGKLFG

SEQ ID NO: 296157 - protein, 362 aa, unidentified
MATKRIAQHEAVRVTVGVDTHKDTHVARAKDQLGRRLGERTVPTTPAGYRDVLAWARGLGQVETFGLEGTGSYGAALARHLRGEGEAVVEVIRPNRQARRRNGKSDPADADAAASAVLAGDAAGPPKAGDSTVEMVRALRVARSTAIKARTQAINAMDALVVTAPEGLREALRGLSKTKLVRTCARLRPGGDLRCPTTATKTALRSLAVRHEALEAEVKALDGQIVPLIAKAAPRLVALFGVGPDTAGALLVAAGDNPERLRSEAAFSMLCGSSPVEASSGKVTRHRLNRGGVRQANAALYRIVVVRLRFDQATKDYMERRTAEGKSRKDVIRCLKRYVAREVYAVLTAVPSPAGDAVDAVA

SEQ ID NO: 296158 - protein, 374 aa, unidentified
MQSIVYVGMDVHVDNYTFACYEENKGIYAQNQIKDADWKSVIKYLEKIQKERPGEDIHFVCGYEAGCLGYSLYNELLKAQTKVSLDCIIMAPTTMAVQGNKPKTDRRDAAMIAKNLCYGTYSKVYVVDDADNGVKDFIRMRDDTKARCKSIKQQVLALCLRHGKRYGESTNWTIKHREWLRKLDLGEKNANRALQEYLHQLAKVEEDLERYDREIEEIAQGEKYSEKISQLKCLKGIQTVSALATIVEIGDFHRFATAERFASFLGLVPGEHSSGGTIIRTPITKHGNSHLRRLIVEAAQSCSRGSICQKSKKMKSKQAGQDQDIIDYCDRQNLFMGRKYHRLCAKGKNTNVAKTAIARQLACSIWGIMTGNIA

SEQ ID NO: 296159 - protein, 320 aa, unidentified
MTYIGIDVSKDSFVAAYPEKSGFTTKTFKNTSSGVHLFIQSLPAECHCVMEATGNYSMLLLYLLQQANVAVSMENPQKIKHFARAMLSTTKTDEIDAKLIAMYGEKMEPAPYKIPSESIMLLKQKRTVLRQLKKQLTMMKNLQHSLSILPKQDSTAKVATEQTIKFLNKQISKLEDEITHLSNKEFKRQMDLLTSIKGIGENIASALIMATGGFTYFSSAKQISRFLGLCPTYQQSGTSVNFKGHINRNGDTHLRSQLYVIAFSSIRFNAACRETYERLRARGKSGKVAIIAVANKLIRQAFAVVTNNRPYVDGYVSALP

SEQ ID NO: 296160 - protein, 388 aa, unidentified
MYLVGIDIAKYKHQCFIATTHGEVIKEFSFDNNSNGFKVLLEHLQALDHSYEIKIGLEATGHYGNTLKHFLSANSYTFVEFNPYLTKQFFKSTTIRKTKTDKIDARMLARMLASVDYKTLHTKYYHINELKSLCRTRNSLIESRSNTLVQITNALDIIFPEFKRHFNNHLGLTALFILEKYTSPKKIAKLNKNHFEKLYKLSRGKFTYPNFRKLKELAKDTVGIESKSNELKLKLYTKLYHSYNTKIKILEAEIEEIMSYTTSYIKTIPGVSLMSTANILGEVGDFTLFSNPAKLIAFVGYDIAVYQSGESKSYGKLVKRGSSLLRKTVWNIVLGCIREVPVINDYYYKKKNEGKHRNVIFSSIARKLLRIIYYLETNQVSFDQNIIR

SEQ ID NO: 296161 - protein, 341 aa, unidentified
MAEYVGLDVSMKETALSIRRDGKRVWRGKCASDPKLIAEVIRRRAPGVARVVFETGPLSVWFYHALTAEGLPAICIDARHAKAALDMAPNKTDAHDADGLAQLAEVGFFREVRVKGFDSMLGRTLVAARNRLVQITTELSNQIRGLMKTFGLVVPAGKGSRFEAHVRALLADQAGLAPILLPLLDAWRAVRVRAAELGGQLVASARQSEACQILMSVPGVGAVTATSFATAVEDPENFRRSRSVGAWLGLTTRRYQSGEVDYDGHISRRGDTHLRGLLYEAATVILTRTSAESSLRTWGLKLKERIGFKRAAVAVARKLAVVMHAMLRSGQLFDRTAGVAA

SEQ ID NO: 296162 - protein, 431 aa, unidentified
MKSSPVPVAGVDVSKEFSDMCILSPDNDVFERVKVYHDKTSMTLAVKALARAGAAFGRRPVIVMESTAHYHRTLQQFLTRHKYQVITINPLQSSALKNVTIRKVKNDPTDAYRLALAYRTQALRPNLVPSDKIENLRLLTRQHFDLKQDVTAYVQRLQCILDQVFPGFRKQFERLNSETSLKILEQYPTPEALKRARTASIARVFQTTARRSADYCRKRAKALKAEAERALDICIHRESAAILIQSYISVLRSLDRTIRQVDAEIHRIIQSDPTLLADAELLSSIPGVAEFTAAVILAEIGDFSNFRKAKQLVAFFGLEPSVHQSGKYIGKNNQLSKRGSRFMRRILHMIVQTNIAHMPGKPDVYRNPVISEYYKKKCESKAKLAACCAVMHKLVNIIFAVLRDRKPYEIRTPEEHKKLMQARCATAVSVA

SEQ ID NO: 296163 - protein, 348 aa, unidentified
MSAESMHYVGLDVHERRSSLHILDDHGKRVKALEVRGGWPRVMDEVTRSVPRPFAVCYEASCGYGYLYERLAPLAARVAVAHPGQLRLIYRSKRKNDRVDAAKLAKLLYLDLVPRVHVPKADVRAWRALITYRHKLMDKRVGVKNQVRALLRGLGVADVPAGKRLWARKGIAWLKALPLADAADALRRDLSVGELDDVNARIRRVDKELDRRAAAHPGVTLLRTIPGVGVRTAEAVVAWVDDVARFARNRQVGTYFGLVPCQDASAGANRLGHITRDGPPAVRKLLCEAAWQAVRRSPALRASFERVMRGDPDRKKVALVATAHRLARAMAAMLRTGEAWRETAATPG

SEQ ID NO: 296164 - protein, 346 aa, unidentified
MGKSITDLSAITTVGLDLAKHVFQVHGIDALGRVVVAKAIRRNRLLEFFASLPRCLVGLEASGSAHHWARELSRLGHETRMMPPSYVKPYIRRQKNDASDAAAICEAVTRPSMRFVGVRSLENQAALMRHKAREMLVSQRTQLLNALRGHLTEVGVIAPQGLRCARELAELIEACDETIPFEVCEALAPLVAQLRNLDEAIARLDRIMAKLAQKDETARRLMSIPGFGPITASAMAATIQDASSFAGPREFAAFLGLTPKQNSSGGKQKLGRISKMGNRNLRKLLVVGAHAVLFHRKPHTDPLRMWAKKLIERKPFKLVAVALANKMARIAFAILRSKTVYREIPA

SEQ ID NO: 296165 - protein, 475 aa, unidentified
MEKKQKNKRDQVIHLLQKQRINNVKDLDSYKLSICHPASAGIDLGSREIYVALNPGIAAELDLPIVHVFDTFTSGLLACRDLLRDCGVSSVAMESTSVYWTTIYSILEDSGIEVCLVNPKKFRMVPGRKTDILDCQWLQTLHLYGLLRGSFHPEEKISQLRSYMRERDNLIKDRSRYVQRMQKALIKMNLLLPNVVDDITGKTGLLIINAILRGERDPHKLASYRDERCNKSEEEIAGSLQGFYKDDQLFLLKLNHEFYTFFNNNLGSIDNQIADLLDTFPLKEEATKPCPASGKSKYIRKGKNDLRTRQNLRDTLYHITGTDLTAITGLQANTILQIISEVGIDMGKFPTADHFASYLGFVPHQKITGGYVLSSRTDRIKSPAAQAFKKVVPSISQGKSALGAFYRKIAPRIGKAKAIVAVCRKLAIIFYNTLKYGTTFIEKGQEDYRQKQEQREKALLIKLAKKHDMLLKPCS

SEQ ID NO: 296166 - protein, 350 aa, unidentified
MIIIGCDYHPGFQQIAYANTDTGELSEARLGHKEQAEQFYRELGRRGVRVRIGMEASGHARWFEHLLSELQFELWIGDAAAIRTKRVRKQKTDRQDAQLLLQLLLENRFPQIWVPDAENRDLRQLLWHRHRLVQMRTRVINQLHVVAINEGLRRKKALWRPAGRAELERLSLAPWASRRRQDLLDILDQLTPKIQELNGRLEQLVELRPVARQLSTHPGVGPLTALAFELVIGTPERFACAKQIASYLGLVPAEESSGDRRRLGHISKQGNVLLRFLLVEAAQVTVRSDPQWRNQFFHLAMRRGRKIAKVAMARKLAIELYWMWRRGWNHKERQQLGPHAGKPGNRHGVQ

SEQ ID NO: 296167 - protein, 392 aa, unidentified
MRISVGIDIAKEIHWVTAIDADGAVQIDRKLPNTPADIATLSDELTALRGTVRIGLDVIGGIAGLAQAMLAEAGFALVHVPGIAVNRARQGTVGGENKSDPRDARTIADQVRTRPDLRPIEPATELDLEIRLLVSRRGDIVQAQTQRLSRMRDLLVGVFPGLEACLDLKTKGPLHLLTKFVTPAELRAAGKKRLVRHLQAAGGLPKVEDLAGLVLTVAAEQTVAVPAERMTARLIRELAIEALASRTRLSELDRELEALLQRHPDAALIRSLPGMGAVLTAEFIAEAGSLSRFRSADALASAAGMAPVLRQSGRTRFLRRPSGGNKGLKRVFYQSAFCSLNHDDSRAFYERKRREGKRHHQAVIALARRRVNVLWAVLNSRTPFQTRFKAAP

SEQ ID NO: 296168 - protein, 499 aa, unidentified
MPSTKVAAAPILGAMKRKNIFRNESQKLDAAFIEAGLPERVLLVPLDFAKITHYACFCDGRGTYVRKAFTVKNTQEGIDYLVDQIERTRVARSIKSKRHVIIGGEDSASYTRNFMDRLYELGYLTVRLDSKEVHRQAESVDSSTDKTAVRAIAKTMLNRDARQTGGSDLYAQLRGLTRQRRRIVHLSTAVKNRIHTHADCLFPGFLAKDSAVAAFSQASLELMSHNFSAAILARKSEKTLTRMLSRQGVRGALEVAAKLKEQARNAICADDATVRLSAQLIESELSLFKTLQSNLAGLDKEAARILLRLPEAFAVSIKGIGITLASSIFAEIGSLSQVQRCDQINAFAGIAPKVKQTGGPESPARIGGKRRNFNRILKDYTLQAGNHLYLHGPEELLHDAARRKLAGKAVDTAMARRFLRIARALAKGHCIYLPSHLRTGQTGTEAEAEARAQYIVKIWPDLLLKWKRIGLHEEAFAPETPLGNWRIIVQEIYDIKLPL

SEQ ID NO: 296169 - protein, 457 aa, unidentified
MRRHRKQPQWESLPRVHPHAAGLDIGAREIWACVPSDRDPEPVRRCGTFTPDLVALVDWLIECGVDTVAMEATGVYWVPIFELLEARGLKACLVNAQHLKRVPGRKSDFLDCQWIQKLHSLGFLAASFRPDAEMCALRTYLRHRAQLIQHRAPHILHMQKALHQMNVQLTQVLTDVTGVTGLAILRAIVAGERDPVKLARLRNPACKSSEDEIAKALTGTWQPEHVFALQQSLELYDFYTQKVAECDTAIEQHFAALRPRWVTTNEPGLPRTKRGSKSKNRPALNVRAHLYHLTGVDLVAVEGISESIAQTLLSEIGTDMSKWPSEKHFASWLGLAPHNDISGGRVLRSRTLPTANRAGQALRMAAQSVARSDSAFGAFYRRMKSRAGPEQAITATAHRIARTVYFLLKHRAAYCDIGAEAYNQRQGEKTIASLKRQAAKLGFMLTPHLAEPAPAGD

SEQ ID NO: 296170 - protein, 408 aa, unidentified
MKTLLRRCAGLDVHKVEIVACLRLVEKGKVARRVRRFPTTTQGLLELVEWLEGAGCSHVAMEATGVYWKPVWHILDGHFALILANAMHVKAVPGRKSDVNDATWLADLLAHGLIRASFVPPTPIQELRDLTRTRKQLTREIVQHVQRIQAVLEEANVKLSSVISDIMGPSGRRILTAIIAGETDAEKLAALGSERLGCGRAALSEALRGRIREHHRFLFAQHLRTIEQLEESVAAFDARIAGALAPFREVVERLNEVPGLGRIAIETIIAEIGTDMSRFPTAGHLVSWAGLAPRLDESAGKRRSTRIRNGAPWLKPALVQAGWAATRKKNTYLQAQFLRLKSRRGPKKALIAVAASILTIVYHMLRDGTFYRDLGPEYFARRSPAKLAANLANRIRNLGYHVEISAAT

SEQ ID NO: 296171 - protein, 304 aa, unidentified
MIGIDVAKDKLDVSDATGKIKKEVNNSIKSIIKHIVRKIDQPEQTFVVCEATGGYERTLVKALQEAGVPVCVANPFQVRQFGKGIGVLEKTDPIDAHLIRRFGEVVDLQPTAPKTPEHEQHEALVRRREQLMLMINQEQNRLAQTIDQEVIRMIDSTLTVLKSQQNAVDRLIEGFLKKEAETNPAVVVIQSVPGVGTVTTSTLISDLPELGALNRSEIAKLAGVAPIANQSGTRDRKRSIFGGRSHVRRVLYMATLVATRLNPVIKKFYIRLLASGKAKKVALVACMRKLLTILNDMVHNNEPW

SEQ ID NO: 296172 - protein, 367 aa, unidentified
MSIANSASSRISWVGLDVHKDSITSAVLAPGAEVPLVDRWFHDEPSVRRFVATLGSPARVRLCYEAGPTGYELARLLQRLGVATEVIAPSLIPVTPGAKIKTDKRDARRLVQLYRAGELTSVHIPSPGEEAIRDLARTRADLVIDRTRCRHRLSKFLLRHGEVYRGGVQWTLTHDAWLRQVHFDDAALAQTYSHYRAIVTGFDAHLAAVESDLKIYLTKGPFAEAVARLSAYRGITELGALTLSAEVCDWRRFPRATSLMGFCGLVPSEYSSGNRISRGSITKAGNTHLRSQLVESAWSYQHRPAVGPRIKKRQEHCSPETIARAWTAQLQLCGKFRRLAERKSSRNVVATAIARQLTGYLWAEMAA

SEQ ID NO: 296173 - protein, 347 aa, unidentified
MRFYTQAHKYYCGIDLHARSMYVCILDQAGNILIHRNLPADPQKFLTIITPYREDVVVAVECIFTWYWLADLCAREKIAFVLGHALYMKAIHGGKAKNDKIDAHKIAAILRGGTLAQSYVYPPKMRATRDLLRRRNHLVRKRAELLAHIQNTNSQYNLPEFHKKLGRKSNREGISERFTDACVRKSIELDQALIDVYDEKLHALEYHLEKTAKAHDPEAFFRLRSMPGVGEILALVILYEIETIERFPKVGNFLSYARLVKCARASAGKRYGTGGAKIGNVHLRWAFGEAACLFLRNNPEGQAYHQRLVNQHGKSKALSILAQKLGRAVYILLKRRETFDMKKFLKG

SEQ ID NO: 296174 - protein, 307 aa, unidentified
MTGHGLDASTGEVWQRKLTPDPAGILAWVSTLPGPVKVTYEAGPTGYGLYRYLTSRGVGCVVAAPSKLHRPSGDRVKTDARDAELLARLLKLDEIVAVVVPSVEQEAARDLVRAREDVRGDLMRARHRLSKMLLRQGILYTGGSPWTGVHDVWLRSQRFDLAGRQLAYESAHETVVLTTDRRDRLDAAITTMAADSEFTSLTRRLCCLRGISTLTGFGLAVEVGDWTRFSGATIGAFVGLVPTEHSSGAAGPRARSPRPGTPMPGGCWSRPPGTTPSPTAPQARRCGTGGSWPRRPPGSAATKVTGG

SEQ ID NO: 296175 - protein, 351 aa, unidentified
MDYRIGCDAHKHYSQFAVLDEEGRLLHQARVDHQPGAIRTFLEAHPNGTPVALESVGNWYWIADEIEEAGCVPLLTHAAKAKLMMGHVDKTDKLDARGLATLLHNGTLPTVWLPPGAVRDQRELPRTRMALVRIRTALKNRVHSTLAKYALAPEGEIDVFSQKGRTWLQADLCRLPAQTAICLTQELELLDQVQAQIVTLEGRIRQAIEDTPAMQLLKTLPGVGNILAVVIEREVGSIERFPSAAHFASYAGATPTVHSSGGKTHYGRMRHQANQYLKWGFIEAANVVARHRTSPGWRSKHVVRLYERIRSRKGHAIAVGAVARHLAEAAYSILKKGERYRELPSSGRARA

SEQ ID NO: 296176 - protein, 343 aa, unidentified
MEAYAGKQFVGIDLHRRRTVIVRTTEAGEVLEAVRIVNDVQRLASVMARAGQCPEVVLEATYGWYWAVDALQAGGASVHLAHPLGVKAFEYRRVKNDFRDAQDLADLLRMGRLPQAWIAPPPTRELRELVRHRAKLVGLRSHCKAEVHAVLAKCGVQVLMSDLFGLAGTELLDRLDLPAPYAARIASLRRVMDDVDFEINVFAGIIRGRMAYEPGYTAVQKIPGIGPTLAAVLVAEIGDIARFASASKLTCWAGLTPKHHESDTHVRRGRITKQGSRLVRWAAIESVKTISKTSEVGVLRERVADRRGRNIGSVAAARRQLELVFYALRDGHVRALEHLPAAA

SEQ ID NO: 296177 - protein, 423 aa, unidentified
MNRLHYELHVGIDLGQWLHQACVVDANGELLEERGFEHSVDGLGTTLAWLLSLAGKDAERIAVAIEKPHGAVVETLLESGVAVFAINPKQVDRFRDRHSMSGAKDDRRDAFVLADALRTDGHRFQRLQLPPPEMVALRELLRTRDQLVKNHVALSSQIRDLLARCWPHLVTLAPKDKALDAFFCELLQLFFDHHPTAELSLQNIQKLVHQHHIRRLQPEHILEVLRKTPLRVAPGTTEATSAHLNLLLHQLLLVRQHRRDSDQHLERWFKQLQPTSDQPYSDAAILASLPGVGAVVLASVLSYAHDPVRLRNLDAFRSLGGIAPVTKKSGKRGQQRPQILMRRARSLPLNNALHHWARIAVLTDPHFKDHYDRLRAKGHNYARALRGVMDRILAIAVAMLRDQTLYDPSKRANFNKGAKKVSS

SEQ ID NO: 296178 - protein, 405 aa, unidentified
MFYVGIDWATDHHNIFIADESGARIDSFCIPHNPKGMSLLRDKLRDLVTPKEQILIAIETPKNLLVEFLLNEGYTIYPINPKSVDRYRDRYRPSGARDDSFDAMVLANIIRTDKEQFRAILPNSALARELKILTQDEQHLIHLKTRLVNQIQACLKDYWPTALELFSEIDQQVTLDFLLKYPRPEIIPIAELKEFLQKHRYPLSEQKAKEIHKKLSRPQIFVEDFTVRAKSRLLITLVGQLKALITQLDEYQREISKLFNEHPDCPVFKSLPGSGPKNGPRLLAEMGDNRQRYSEAKNVQCEAGTAPITDASGKSKIVRMRYSCRKPFRNVLYQFAFSTLTKSIWARKFYDTQRAKGNTHTEAIRALGNKWLKVIFRLWKDGTTYNEDQHLASIMRYQLNQRSAT

SEQ ID NO: 296179 - protein, 427 aa, unidentified
MGAMSESEVQELQFAALVGIDWADQKHAWCLQAADTTQRENGEVQHTPEAIEAWVGQLCRRFDNRPIAVAVEQVKGALVFMLSKYGSLHLFPVPPTMSAKMREALYPSGSKDDPRDADLLLELLLQHRDKLRRLSPDSEATRRVQNLVDERRNLVDEKTAQINRLTHPRKIYFPQMLEWFEQLDTELVCALLERWPTLEELQKVPPERLRTFFHKQRCRYPELIERRLVGIRQAIPAIRDRAVIEAKSAVVKVSAQVIRSLVRGIADLDSKIEEAAAAHPDFFIFESLPGAGAVLAPRLLAAFGSQRERYASAEEVQTYSGIAPVMKRSGKKKWVHFRWACPKFVRQSFHEWAGHSIAHSQWARSYYQQQRERGKGHHAAVRGLAFKWIRIVFRCWKDRAAYDESRYLMTLAKRNSPLTAVPGGTML

SEQ ID NO: 296180 - protein, 320 aa, unidentified
MDQDYKRLFGRRQPNDLNNVLKVLEPFKADLEGVIVESTYNWYWLVDGLQEHGYTVHLANPSAIKQYEGIKHTDDKWDSFWLAHMKHLNILPEGYIYPKEQRSVRDLLRRRLFFVRHRTANILSLQSTITRNLGIKMSSNEIKKLNMDDACDLFDSSNLVFMAQNNISTIKHLGKIIKGIEKEVKSQGKLRKEFVMLTTIPGIGLILGLTIMLEIGDIGRFFKVGNYSSYCRCVGSKRLSNGKKKGENNKKNGNKYLAWAYVEAAHFAKRHIPKAQRFYQQKMAKANGAVATKALANKLARASYFIMRDQVPFDEDMLFK

SEQ ID NO: 296181 - protein, 426 aa, unidentified
MKSITQNAKIAAITEKTLIIGIDVGSETHFARAFDWRNYEYSKKPLEFSNTEEGFETFRTWIGNLAEKHGKTNVIPGMEPTGHYWFNLGKFLQDHGMKPVHVNPHHVKKSKELDDNNPSKNDRKDPKVIAALVNEGRYSYPYIPDGVYAEIRVLSGLRVQAQSEITRLKNRIARWFSIYFPNYKDVYRNVHAVSGQMILKTAPLPEDIVKLGAEGINRIWRDAKLRGVGLKRAKTLVTAAEHSIGSREAPGAARIEIQILLSDYERQTAREAELMAMITEKIMEVPYVDKLLEMRGIGLKTVVGFVAEVGDIRRFDNPKQIQKLAGYAIVNNESGKHKGESHISYRGRKRLRYVLYEAAVSVVGHSPEFRSIHDYYTTREKNPLKKMQSMIAISCKLIRIFYLILRTGKSYNPTRMMADIRRPAAA

SEQ ID NO: 296182 - protein, 315 aa, unidentified
MEYLGIDVSKRSLRLALLRRDGKYRDRTLENSPQGHQQLRNWLEQKATGPVHVCLEATGPYGEAVAEFLHEAGYRVSIVNPARVKAFAQSEGLRTKTDKVDARLIARFCQALDPEPWSPPPPRLRRLQALVRRLDALQQMRLQEEGRLEGAHSCVEPEIRRHLEYLEKQSQQLLQQIQDLIDDDPDLRQQARLLSSIPGISDLTSARLLAEIRFQQYDSAREVAAYTGLTPREFQSGTLRGKPRLCKRGNVHLRKALYMPALAAIRCNPQVRALAERMRKRGKKGKVIVIAAMRKLIHIAFGVLKHQTPFQPAGT

SEQ ID NO: 296183 - protein, 455 aa, unidentified
MTSAKKAKKIHTKTGVELKIVNPNAAGIDIADTEMQVCVPADRDGENNRRFGSFTCDLKLISEWLQACGITTVAMEATGIYWIPLYFKLEEDGFDVLLVNARDVKNISEKKTDEADAEWLMLLHSYGLLKPSFQPENSARQVRNLCRHRNNLLRAAAKEVQHMQKAMEQMNIKLTNVLRDIVGKSGKAIISAILSGNHDSESLAQLADRRCKRSKAEIALSLEGTWDADHLFELKQSYELYEFYQKKVEECDWEIEKLLKQFTAKIEVSKTKLVRCNKKICKKNTIGFDVESYAYGIWGVNVMQIPGMSANSVLQLIGELGSDFIEKFETPAKFCKWCNIVPNNRISGGKLISSRVPKRKNPVGQVFRMCANATRDMKNPMGFYFRRLKSRGGHMSAIVATAHKMAEIFYIMVKNKVAYDENKVGLSEEELLKRKIERAQKTLETLNAKLYGTAS

SEQ ID NO: 296184 - protein, 333 aa, unidentified
MSKTDPAGIEISAKELVVGVKRQGTLCRLRTFPNNSIGHRTIVRWLSRRGVTTRVCMESTGLYGLDLALALDQAAGLELMVANPRAVRRFAEACLQRSKNDRIDTAVLVEFAARMKFQSWQRPAPESLQLRALTRRIQASVESATAQKNQLHAAGLSRVTPKIVAREIKRLIAQIERSIERLEAAALALIRAQPALDRDFALLVSAKGIGKRSALLILAELCCMPRDLDKRQCVAHAGLDPRHVQSGSSIHYQTGISRQGNKYLRRALFMPALSAIRTEPHFRAFYDTLVDKGKAKRQAQVAVMRKILVVLWTMLQNNQPFDPDKLAQHPQTA

SEQ ID NO: 296185 - protein, 428 aa, unidentified
MKFNTQNTKIEAITETTLVLGIDVGSETHFARAFDYRGIEYSKKPFKFSNTEAGFVTLKAWILDIKEMHGKDKVVPGMEPTGHYWFNLGKFLQDNEMKPVLVNPHHVKKSKELDDNNPNKNDRKDPKTIAALVNEGRFSYPYIPTGVYAEIRSLSNLRLQAQEEITRIKNRIARWFSIYFPEIKDVYKNPGAVSGLMILKVAPLPKDIVKLGVDGVNQIWRDAKLRAAGLKRVKTLVTAAKHSIGSQEACDSARIELKILLNDYEIYHQREEELMELIEEKLSEVPYIDKLLEIKGIGMKTVSGFVAEVGDIKRFDNPKQLQKLAGYAIVECSSGKHKGESHISYRGRKRLRYVLYEAAISLIARNEEFKEVHRYYRTRKENPLKKMQSVIAVACKVLRIFYTILTKGVTYDGAKMMQDIKRPQMLAA

SEQ ID NO: 296186 - protein, 344 aa, unidentified
MDHFAGLDVSVKQTSICIVDDTGRIVREAKVTSEPEALLAVLKNLAFHFKRIGLEAGPLSQWLYSALAEAGLPVICVETRHMRAVLKAQINKTDRNDARGIAQMMRVGLYRPVHVKTLRSQKLRMLLTHRKLLQSKAIAIDNDLRGTLRNFGLKVGMVGTVRFEARIRELVENLADLATLIEPLLIVRRTLREQFCILHRRLLAIVRDDEVCRRLMTTPGVGPVVSLTYRATVDVPARFRKSKSVGAVFGLTCSKYQSGEVDWSGRISRCGDEMMRVMLYEAAQSMLRSKKWSWLKAWAMQIARRCGMKKAIVALARRLAVIMHRMWVDGTEFRWTREQAAAAA

SEQ ID NO: 296187 - protein, 344 aa, unidentified
MEHFAGLDVSVKETSICIVDDTGKIVREVKVASEPDALLQVLKNNAYHFKRIGLEAGPLSQWLYSAFAEVNLPVICVETRHMRAVLKAQINKTDRNDARGIAQMMRAGLYRPVHVKTLRSQKLRMLLTHRKLLQSKAIAIENDLRGTLRNFGLKVGIVGKLKFETRIRELVENLPDLAVLVEPLLVVCRVLREQIAVLHRRLLVIVRDDDVCRRLMTVPGVGPVVALTFRATLDVPARFRTSRAVGAALGLTPGKYQSGESDHTGGISRCGDEMMRVMLYEAAQVMLVRSTRWSWLKAWAMQVARRRGMKKAIVALARRLAVIMHRIWVDGTEFSWSRQEAAEA

SEQ ID NO: 296188 - protein, 342 aa, unidentified
MKIVMLGIDLGKNLCSLAGLDETGAIVLRRRLKRESLLRFTVRLEVCTVAMEACCGAHHLGRQIAAQGHGVRLMSPGYVRPYVKAQKNDERDAEAIAEAATRPTMRFVELKSEAQLEVQSLHRVRGRLVAERTALINQLRALMLERGITAPQGRRKLGGLLPEILADESNGLGSRLRRLIEDMRSEWRGLDERITAFDDELAVRARADEAARRLVTIPGVGVLTATALVAAVGDARAFPCGRDLAAWLGLAPRQATTGGKPKLLGISKRGNRYLRMLLIHGARTALPSLARSDTPLGRWLKGLLVRTHRNVATMALANKLARIAWAVLAHDRRYVALQTVAD

SEQ ID NO: 296189 - protein, 326 aa, unidentified
MFVLGIDVSKEKLDCYLASDIEEKPKHANLFQVENSYDGFEKIALRLIKKGLSFEALTVVLEPTNTYHVELIYWLNDKKAKICLANPKDVHHYAKSLGRDSKTDRLDSFALAQFGLTRKKLHFWQPPSKIVRQLNALIRLRNCIVQDRVREQNRLDTLPNEELRFVGNYLQQQIELLRQQETCINAEIQQLISKDEGLKPISARLRSIPGIGPVVTSLMIVLFSNRDFKNGAQAASFCGLIPKEYQSGSSIEGKPRLTKRGPGYIRAGLRMAAAAVLVTKKSSSLKAYYERLIQSGKSKASALGALMHKLVVVAFAIWRDNVDYLY

SEQ ID NO: 296190 - protein, 350 aa, unidentified
MFSVGIDVHQKRSSVCILDQQGKKVKEFEVVGSWDNLIEAVAKLPRPMAVCFEASTGCGWLCDKLAPLAARVEVAHPGQLRLIYRSKKKNDRIDAKKLATLLFLGEVPRAYIPDAAVRGWRGLVEFRCRTVQKRTRTKNALRTLLRGCGILGLHPRKGLWAQKGVALLRELELPTGQDRLRRDLLMEELDQLNRQVKRIEAELDRLADDHAGVALLRTIPGVGPRTAEAVLAYVDKPERFDRNKQIGAYFGLVPCQDASADKNRLGHITRQGPATVRGLLVEAAWQAVYRSGTLKAYYERIRQGKKERRKIALVATAHHLVRVMLSMLKSGEVWREEAAGATPQAAETAA

SEQ ID NO: 296191 - protein, 343 aa, unidentified
MYYTGIDLHKFTSFLTTVDESGKIIKQQNIKNLSHNFIQYFSDLGSENISTVESTMTWYWLNDLLSSLNIPLVLAHAKYVKAIAYAKVKTDKVDSHTLAQLLRMDYIPVAHKISNEHRLLRDALRARLKIVQRHTSVTNSMHLLLAKYNLDSPDHLQGVARFQFDQLVEVEQLLAEQILDLEKQLYPSLIPNDDIQRLLWIPGIGKMNAFTIFLEVDDINRFASLKHFFSYCRLAPSARNSGGKSKQRSSKDGNRYLKMVSSDAAIHAIQHYPEIRALFLSLSRKKNKFIAKSIIAKEIVSIVFYVLTHKQPFNNVFMGRELSQTKSLQWPRIASPVCLTGYV

SEQ ID NO: 296192 - protein, 367 aa, unidentified
MKKISTVEAKQIRNFSQPKLTIGLDLGDRSSWYCVLDESGTVLLEQKLSTTPKAMREVFGSMPRCRIALETGMHSPWVSRLLSELGHEVIVAHARNVRLIGESRKKDDRLDARTLARLARIDPQLLCPVKHRSAKAQADLTVIRARAGLVRSRTALINTARGLAKSYGERLRGCNPRNVNAEKAQGLSPELQAALEPLLAATEALSERIQEYNQQIAKIAQESYPQVARLEQVKGVGTLIALTFLLTLEDPHRFRKSRDVGCYVGLQPGRRNSGQSEPQMHISKEGDPYLRTLLVQGAHHILGPFGADSDLRRWGLKLAERGGKNGKKRAVIATARKLAVLLHRLWVSGEAYEPLRNSHPIPMPAAA

SEQ ID NO: 296193 - protein, 309 aa, unidentified
MKQSVVYIGVDVAKLHLDVAWAAECRRFPNDKRGQAALVAWIKPSLTAVQLICEASGGYEQGLLESLERSEVKFTLVQANRVRQYARAAGILAKTDKIDARVLAAFGAAMQPSPSLPHSAEQKRLRQYDAHRRHLSVLLVAEQNRLAQLNCAELRALSRSLINKIQKQIDTLDARIGDLIAHDQQLRAKAQKLISITGVGTRTAALVLAQMPELGKLNRRQTAALGGVAPFNHDSGKVHGQRTIFGGRRALRSGLYMAALCAARHNPILSSFYQRLRAKGKPHKLALTAVMRKLLIALNSCLKPQPILA

SEQ ID NO: 296194 - protein, 408 aa, unidentified
MNAVGIDVSKGKSMVAALRPMGEVALLPQEFLHTEVGLEQMAYAIIALGEDTRVIMEATGRYHEPVAAALHEYGIYVCVLNPLFIKQSGGGSIRKVKTDKADAMKIAKYGLDNWVDLREYTPMDTVRQQLKLCSRQYNLYMKTVVSLQNNLISLTDKTFPGVNELFSSPERADGHQKWVDFVMTFYHCDCICRVSENAFAERYQKWCKRKGYHFSAEKAQDVYLGSCGHFTTLPKNDNTKLLITTAAQQLLAGKMTLAALRTEMTRLAKQLPEYDIVRAMYGVGETTAVQLMAEIGDVRRFPRRSSIVGFAGVDPAVDQSGKHSAKSVPTTKRGSPHLRKTLYQIVCTYLKKSPVDEPVYQFLDKKRSEGKPYFVYMTAAQNKFLRIYYARVKECLEAFDVQQDTSQR

SEQ ID NO: 296195 - protein, 353 aa, unidentified
MTDIATHNDRIATIGMDLGKRSFHLIGMDARGNVIMRQQLSRGRLERHLANLQPCLVGVEACAGAHHIGPRLSALGHNVRLIPGQYVKPFRKGQKNDYRDAEAIAEAVQRPTMRFVPIKSAEQLDLQALHRIRSRLVGHRTAVINQLRSFLLECGVIVPQGPARLREILPSVLAQRTDVLSPRMIRLIEELADDWRRLDDRVDAVTSEVQALARQDECCRRLTSVPGIGALTASAVVATIGNGAAFTKGRDFGAWLGLVPKQLSTGDRTILGRLSKRGNKYVRTLFIIGARAVLAKPGSWVKFGLQGWLAAAAKRLHHNVLAAALANKLARIAWSVLYHGRSFARDFEPQSVS

SEQ ID NO: 296196 - protein, 455 aa, unidentified
MAKKGKKHTRTLENMPILHPHAAGIDVGAEEHWVCVPADRDAQPVQKFSAFTCDLHRLADWLTTCRITTVVMESTGVYWIPLFQILEARGFEVALVNARHVKNVPGRPKTDRFDCRWLQKLHSYGLLAPSFRPPEDICQLRSLLRHRDNLIQMTVKHIQHMHKALDQMNLHLHHVISDVTGVTGLRILRAIVAGERDPRTLAQYRDYRIKSSPDTIVKALEGDYRPEHVFTLTQSLALYDFTQQQIAACDQEIERVLGTFASLIDLDAHPLPPPTTAHRQPQRHEPAFDLRAHLYRITGVDLTQVPGFQALTIHTILSEVGLDMSKWPTDKHFASWLGLCPDNRISGGKVLATGSRRVQNRASRALRMAAQSLRKSPSYLGAFYRRMRSKLGPAKATTATAHKLAKILYHMLQEKTPYQERGAEAYRHKEHERQLRQLRKQAQHLGFALVPQTSN

SEQ ID NO: 296197 - protein, 458 aa, unidentified
MSPHHKSKKKIPSVAKTTPSLPVFHPHAAGIDIGAREIYVAVPPDRDPKPIRVFATFTEDLLALRDWLKARGITSVAMESTGVYWIPLFQILEAAGLEVCLVNARHCKNLPGRKTDVQDCQWLQYLHSVGLLRGSFRPPETVCAVRSLLRHRDGLVRAAATCVSRLHKALTQMNVQLQHVIADITGVTGLAILEAILAGERDPRTLAKLKDGRIRATSDVIAKSLRGDWRSEHLFTLRQCLDTWKHYQAQITACDAETARLIQGFAPKVDVAAQPLPPRTSTHKSPQRNEPRFEAREELYRTCGMDLTQVPGIQSGTALVLVAELGPDFAERFPTAKHFGSWLGLCPDNRITGGKIMSSSTRDVKSRAATALRLAAQSLNKAQNYFGDLYRRWKARLGTPKAITAMAHKLARILWHLFKYRQPFDPDVFKKEEEKMQRKKLARLHNTAAALGLKLVPN

SEQ ID NO: 296198 - protein, 349 aa, unidentified
MQAAVDRPEALSAIRTDLGAIFISLELSRSSWLVTSLSPGSGEKMSKYAVRGSDVAGLLERFAQLKEKARARTGRVFSFVVIQEAGLDGFWIDRVLQNEGVESHVVDPASIATSRRRRRAKTDRIDGETLVRVLLAYKRGEPRVCAMVKAPTPEEEDNRRLCRERKVLTAERVLHVNRIKGLLFCQGISGYEPLRRDRRERLEELQTGDGRPLPQHLKAQVDRELDRLELLLKQIKAVEAERDALLVAAHTPAAVPASMLLNIRGIGPEFAAVLWSEGLFRHFDNRRQVAAYAGLAPTPWQSGAVDREQGVSKAGNPRLRTTLIQLAWLWLRNQPHSALTLWFHERVKP

SEQ ID NO: 296199 - protein, 427 aa, unidentified
MREEKIGLEPEFVAFVGIDWADRKHVWCLEAAGSRKRETGELEHQVEAVEAWVAELGRRFGHRPIAVAVEQVKGALVFLLNKYECLHIFPVPSTMTAKMREALYPSGAKDDPRDADLLLDILRQHRDKLHRLSPDDEVTRRVQNLVEERRKLTAEKTAQSNRLTSYLKIYFPQMVEWFEKLDMPLVCDLLERWPTLEELQTVSTEELRTFFRQHHCHRGLRERRILAIGGAIPAGGDRSVIEAKSTVVKVIVQLIRSLLQGIAELDRKIEESAAEHPDFFIFESLPGAGAVMAPRLLAAFGSQRDRYSCADELQTYSGIAPVTERSGKRKWVHFRWACPKFLRQSFHEWAGHSIAQSAWARAYYQQQRDRGSDHHAAVRSLAFKWIRIVFRCWKDRVAYDENKYLAALAKRGSQLGKLVVVGMGTSL

SEQ ID NO: 296200 - protein, 342 aa, unidentified
MEITTIGLDLAKSIFQVHAIDAAGTTVVGKALRRAQVLPFFAKLPPCLVGMAACGTSHHWARELAKLGHEVRLMPPAYVKPYVKRGKTDANDAAAICEAVTRPSMRFVPVKTVEQQAALALHRTRDLLVKQRTQLVNMIRGLLAEFGIEMARGLRHALELAARLSAGEANEMPSLAQRVVTGLADQIGALQVQLAKLEKELLAWHRSSELSQRLATIPGVGVISATALAASVTEPERFGSGRQFAASLGLTPLQNCSGGKERMGRISRMGDRYLRRLLVVGMTSLIRRARSAPTSVDPRLPAMLHRKPARVVTVAAANRTARVAWAIMTRGGTYRAPLVAAA

SEQ ID NO: 296201 - protein, 343 aa, unidentified
METVTTIGLDIAKSVFQVHGVDAVGQVVIRRQLKRRYVLAFFEKLPPCLVGIEACASSHHWSRELQSLGHTVRLMPPAYVKPYVKRQKNDTTDAEAICEAVTRPNMRFVPTKTIEQQSCLMLHRARHLFIRQQTAVINSIRAYLAEFGIVAPVGRRGVEQLLEVVADAADRRLPEVARVCLAALGSQLRRLKSQILEFDRRIMAWHRSNATSKRLDAIPGVGPALATALVASIADPKAFRSGRDFSAWVGLVPKQNSSGGKDKLGNISKQGDRYLRSLFTAGALAVIRYAKIHGTGHRPWLTGLLARRPTKVAAIALANKLARMAWVMMARNERYKEPAALTA

SEQ ID NO: 296202 - protein, 356 aa, unidentified
MQSKAISFKGQKVFIGIDVHKKTWSVTTLLEVGMPKTHSQKASAKELFDFLNRHYPEAEYHAVYEAGFSGFSTYYALKEFGIECTVVNAADVPTTQYESVMKSDPIDSDKMARALRAGMIKGIYIREKDNLDDRGLVRLRKSIQQDLTRYKNRVKHLLHANGVEIPELFDRSPNWSKAFINWLRDDVVLLSSTRASLDMLIEQVESLRQNLLTVTKKVRNLRLKDEYAEKYDALTSMPGIGPICAITLLTEIYDVKRFRNERQFASYLGLVPTCHSSGEKASFGEMTFRGNKHLGPLLIEASWVAIHWDDALSVAFTNYRRKGLMPQESIIRVARKLSNIIFSMLKTGNNYAPANA

SEQ ID NO: 296203 - protein, 324 aa, unidentified
MIDGILGIDVSKNTLDASLSSRNRVRARSVANASDGWRDLLDWLTSEKIRRVHACMESTGRYSLGIACALYEAGHIVSIVNPAQIRDFARTKLGRNKTDEVDAAHIREYCELFKPQPWAPPSEAHRRLAELQTIRSGIVAGLTEWKNRKGSGMVDSVAQSLADVTISHFSSQLEAVDEAIAQTIDNDSGLRRKRDLLLSISGVGETLAGVVLAELPGPDVLRSSAEVVAYAGLNPRQHQSGTSIDRVTRISKIGNAVLRAALYLPAMSAMRYNPAVVALVARLKSRGRLKPKQIVVAAMRKLLVLCFGVLKTGKPFDPAIAMGC

SEQ ID NO: 296204 - protein, 353 aa, unidentified
MLLSDTVWFPSITIGFDLGDRKSHTCEVDERSRVIRTAAVPTTRSAVETYFGGRERCRVVMEAGTHSPWISRQIAELGHEVVVANPSELYGGRRRKKRNDRTDAEYLARQGRADVKLLHPVQHRSARAQAHLELIRARDQMVRVRTKLINHVRGAVKAIGGRVTICSAEVFAGRAADQIPCELRVVLEPTLAVITDVTQRIKAMDRQVEQIALEYPAAARLQQLKGVGALTALAFVLLIEDPKRFKQSRDVGPYFGLVPRLDDSSDSTPQLGITKAGDELGRRLLVSAAQYILGPFGPECDLRRFGSAIAARGGKNAKKRAVVAVARKLAVLLHRLWVTEATYDPDRQSKRAA

SEQ ID NO: 296205 - protein, 429 aa, unidentified
MKIIYPRVCGIDVHKKFIVAVICISESVEPVYLKKRFSTFHNDLIRFRDWLIQNDCQNVCMESTGKYYIPVYNVLESHISNIVVANPKWVRAVKGEKDDDKDAKWIADLFKLGIVKSSFIPQKDFRILRELTRYKYKLVNMRSSEKNRYQNALTSGNCKLDMVFTDIFGKSASNIIDLILSNNPYTDEDILSKVHKNCKASPDMILNSINGTDLTSIQKSRIELVNNHIKQLSSNIQRLDKLIDLMIEPYEDYISFLCQIPGVSRNSAIIILSEIDVDMNQFTSTRRLTSWAGLTPSSNQSAGKKKSVRISRAGVYLKPCLVEVAHAAVKDKNHPYYTNKFNTISKRRGKKRAYIAIARKILVAAYHMLLTGEIWNPADLAEVETPVEQRIKYVKNNLKSDIKQLLDIGLTVEELTLMIQQNANNIATQ

SEQ ID NO: 296206 - protein, 347 aa, unidentified
MNFYNNLHPYYCGIDLHARVLYVCIIDQAGQTRVHKEIPASPDPLKILLEPYLGNIVVGVECMHCWYWVSDFCEDLGVDFILGHALYMKAIHGGKAKNDRIDSFKIANLIRGGNFPLAYTYPKEMRATRDLLRRRTKIVRHGAHLKAHVSNTTSQYNLPPNKVNLKNVGAREQLKVAFPDRVVQRNIDLDMAVLDCYAKELSKIECFLEQQAKRHNPVHWHLLKSISGIGRILALTIIYEIGHIDRFESVQKFASYARLVKCKAESAGKSYGTQGNKIGNAHLKWAFSEAAVLFLRGNEKAQKYLLRLQRRMSKAKALSVLAHKLGRCVYFMLKNGTVFDEKQFLKG

SEQ ID NO: 296207 - protein, 346 aa, unidentified
MELFIGLDVSLASTAVCVLNSHGIEVNEVTVASEPEALVEFMRGLSGRVAAVGLEAGPLSQWLHRHLTEAGFETVLMETRQVKGALKAMPIKTDRRDAAGIARLLQMGWFRPVHCKSVSAQEMRAVLTARKSIQQACVNLELSIRGILRNFGLKIGKVSRGNFEFRVGELVEGNSMLKAAADPILRVRAVLRSELAALDKLTRDRAKVDSVCQLMMTMPGVGAVVALTVKAAIDDPERFRSSKDVGPWVGLTPRRTQSGQRDIIGQITRAGDTSLRTALVQAATIMLNRGRPNWLTAWALRVAQRRGKRRATVGLARRIGVVLHRMWLDSTEFRFTRKPDMLAGVS

SEQ ID NO: 296208 - protein, 353 aa, unidentified
MNEYNTVIGMDLGDKHHYYCTLDATSGEVVNEGRVLCTKAALQRLFSSMPPALVAIETGTHSPWVSRLLAELGHEVLVGNARKLRAIYTDKQKSDQRDAEMLARMARMDPKLLSPIRHRGEQAQADLAVLRSRDTAVAARTKLINHVRGSVKSYGQRLPASSAPYFHKKVANAIPAALRPALAPLLGLIETLTKTIHDYNKNIARCCQDQYPETELLRSVPGVGPITALCFVLTLEEPHRFKKSRSVPAFFGLTPARSQSGNADPQLHISKQGDGAMRRLLVSCAQYILGPFGPDSTLRQWGLQLAEGGAPAQNDAPWLPSRASSPCCYTACGSTAPTTKHSPTPTPHYKRTL

SEQ ID NO: 296209 - protein, 414 aa, unidentified
MKVIYPVCCGVDVHKSFFVATIISTTDGVQPHYQKKRFSTYNKDIRSFADWLSVNDCPDVCMESTGKYWVPVFNVLEERGIRVTVANPKWVSVVKGNKDDVKDSQWIGDLFRLGLVPGSFIPPKTIRVLREFTRYRAKLVAMKSSEKNRFQNAFTVCNVALDSVVSDMFGKSASAIADYLLSDEVFNSQHCVSLLQRSLKSKADAVVNSIEGFSISPEQKYRMKIVRSHLDFIESSITMIDCAIDSMVAQQEAAISLLCTIPGVDRKSAIIVLSEIGTDMAQFGSSKRLCCWAGLTPGNNESAGKKKSVRISRAGVYLKPALVQAAHAAVRSNSSPYFRLKYEHIAKRRGKKRAIIAISRMILTAIFAMLSTGETFNPCDLYKVDVPDTLNLKQKDKALTQAIRFIQAQGLSVT

SEQ ID NO: 296210 - protein, 350 aa, unidentified
MLIIGCDYHPGFQQIAFIDTETGECGEHRLPHREETEKFYRDLAAQGMKVRVGMEASGHAHWFERLLAELNFELRIGDAAVIRTKRVRKQKTDRQDAQLILQLLMEDRFPRIWVANWENRDLRQLLWHRHRMVQARTRIMNQLQAVALNEGLRCKKRLWREAGREQLESFSLAPWASRRRRDLLEVLDRLTPTITELSQAIEQEAEKCPEAQRLMTHPGVGALTALAFVLIIGRADRFQCGKQVACYLGLVPLEDSSGDRRRLGHITKQGNSLLRFLLVEAAQVTVRSIPEWRTKYFHLALRRGRKIAKVAMARRLAIALYWMWRKRWDYEQVKKFGSHAGQPENRHGVK

SEQ ID NO: 296211 - protein, 329 aa, unidentified
MKIQHIIGADLSKKSIDLVCHLQNTHIQIENSFPGFKSLLQWLEQQEINLSETMIVMEHTGLYSFCFEKFLHQYQIAFCKVNALAIKRSIGLVRGKTDKLDAARIAAYGYEKRDKLVVDVPTSDALKRLQILYSTRERLVKQRASLTCAVKEYKNIGIPEKDIIMQTQLQLIKKFDTQIERLMNEIESIINEQETMKQNFHLLQSIRGVGKIVAITTIIKTHNFTRFANARKFACFCGTAPFEHSSGTSIRKKSRVSHLADKQMKSLLDLSAKSAIQYDKELREYYLKRTEGGKSKMSTINVVRNKILYRMFAVIKRQTPFTENYLQAA

SEQ ID NO: 296212 - protein, 317 aa, unidentified
MANVTFPQLIQRACGIDVHSKVVVATIQGDGLQRETRTFNTFTSSLTELKEWLLFNEVTHVAMESTGVYWKPVYKVLEGSIPNVWIVNARHIKNVPGHKTDKMDSEWICKLLLAGLLKPSYIPPKEQRQLRDLTRYRNKLIQQIASEKNRMMRVLEDCNIKLSCVVSDTTGSTATSLINMICDGKTLTLEDIKSVYHGKLSASPEELLEACTGFVEEHHIYLLQMIRKDIAKTQELVNELSERIKSILSKYENAIELLKEIPGFSTKVVEDLVAEIGLDMSHFPSEKHLASWAGVCPGNNESAGKKKAEESLTETSK

SEQ ID NO: 296213 - protein, 403 aa, unidentified
MNMNAVGIDVSKGKSMVAILRPYGEIVSTPFEVKHTVSGIRSLIEHIQAIDGESRIVMEHTGRYYEPIVRELSQADFFVSAVNPKLIKDFGDNSLRKVKSDKADALKIARYTLDSWTELRQYSFMDEIRNQLKIMNRQFDFYMKHKTAMKNNLIGILDQTYPGANTYFDSPAREDGSQKWVDFATTYWHVDCVRKLSLNAFVDHYQKWCKRRKYNFSQSKAVEIYEASKEIVSVLPKDDLTKLIVKQAVEQLNMASQTVEQLRAMMNEAASKLPEYPIVMAMKGVGRSLGPQLMAEIGDVSRFTHKGAITAFAGVDPGVNESGSYEQKSVPASKRGSGTLRKTLFQVMDALIKTKPQDDPVYLFMDKKRSQGKPYYVYMTAGANKFLRIYYGRVKEYLSSLSK

SEQ ID NO: 296214 - protein, 317 aa, unidentified
MNTINNQNEINVGVDTGKTQLDIYIRPLDIYFTVENNQSGIKHAIQILKKHPVTRVTIEATGRLEQPFIIACAEANIPFVIANPVNIKRFAGAIGQKAKTDKLDAQLIAHFGEAIKPPLSSLKPEQMRLMSDLLSRRRQLMDMQTMEKNRSQIMPKTLSSLIKSILTALKNQIDKIDLKLQKLIEECDEYKAKNAIIQSVPGVGNVVAFNLLSDMPELGYVNNKEAASLVGVAPFNRESGVYQGKRMIRGGRPKIRTAMYMAMMSAIQCNSKFKDLYQRMVKAGKPKKVAIIACIRKLVVIINSMVRDGAMWDPKMV

SEQ ID NO: 296215 - protein, 418 aa, unidentified
MRRWWGGIDWSSQLQDFVILDDDGAIVTHLRVQESPDGVREILAALRGLNPTSHRFSRKQVPIAIEDGGRLLAVELRRRGQPVVVIPPAVSARHRGRRGAAVSKTDRGDAALLADIIRQQPGQRRTMPETSDEAAAVAVLARAQSSAAHNVRESAVRLQSHLALYFPAALKAWAGMQQGLRRPEARAVLTLAPTPAAAAALTKRRLYDTLATAGRARLLDQEAARLREVFTDPSLRQSAATERAMGERTRVLLTLLDAACSAADGLAEMAEEQFSAHPHSGIYRSFPGVGRLGGPRLFAEIGDDPGRFATARGLRAYAGTAPITWSSGTSHVVTHRTVCNRALRVAVHQWAFVSMQHSPGCRGLYDERRERGDGYAAALRRVGGRLLTGLHHCLRTGALYDEEKMFPCRPGGRAVGNA

SEQ ID NO: 296216 - protein, 343 aa, unidentified
MDHFAGLDVSVKDTSICIVDDTGRITREVKVASEPGALLAVLMNASHRFKRIGLEAGPLSQWLFSALAEAGLPVICVETRHMRAVLKAQINKTDRNDARGIAQMMRVGLYRPVHVKTLRSQKLRMLLTHRKLLQAKAIAVENDLRATLRNFGLKVGAVGAVKFEARIKELIDNFPDLLALVEPLLVVRRVLREQISILHRRVLAAVRNDEVCRRLMTVPGVGPVVALTYRATVDVPARFRKSKSVGAVFGLTPARDQSGESDRPGAISRCGDEMMRTTLYEAAQVMLLRSAKWSWLKAWAMKIARHRGMKKAIVALARRLAVIMHRIWTDGSEFRWTRGAAAV

SEQ ID NO: 296217 - protein, 413 aa, unidentified
MVNVGIDLHKTQFTVCVRGRNGNEFGKYPTTPEGYQAFLEKAAEWQRKGEAVRVGVESTGNTRYFKSRMEGAGIVVVVINTLKLKVVTESVKKTDKHDAATIAEFLEKDMLPEARLCSRESEQLRRLLKARGMLVKTEVVMKNQIHALLTAEGMEDVKGSLQSKRGRKQALDTLKACENGLVAQPLIEMIDRLEEDINGIEKELRGLTEGDRMVELLMSIPGCGEIGAWTIRAWTDDINRFANPKKYAAFAGLAPWVQDSNETVHHGSITKRGPKELRTALVQVVMGLRRMKEKTLVWRFMQRYEVLKKHKGSGRVIIATARKVAMMVWHMLSEDVEFDLTKMVDKNLAKKSEAMRAVAGAKEEAPVEKEEKEEVVTAVTKGKKKDEGVRKNRKDTGVASKKGKKMTKVLFGG

SEQ ID NO: 296218 - protein, 403 aa, unidentified
MNSVGIDISKGRSTVAVMRPFGEVVISPFEVHHTDSELSALARRLKSLNGETRVVMEATGNYHAPVAKLLHDAGLYVSVVNAKLVHGYGNNELRRVKTDKKDAVKLANYGLDRWLTLPRYVPEEGARLLLKNCYRQYRQYSKVQTVLKNNLISLLDTVFPNVNRLFSSPIRGDGSEKWVDFVAEFWHCRCASEKSERAFTSKYLRWCRKHGYNFREAKAHTIYAEASGHIGVMPKSETTKLLVKQAVSQLRATSTALAALKQEMQSLASVLPEYPVVMDLFDVGPTLGPQLIAEIGDVRRFYSKKALVAYAGLDAPPNDSGDVTGRHKSMSKIGASSLRRTLFLVMSVYLQTAPLDEPVCQFMDRKRAEGKLYRVYMMAFANKFLRIYYATVKAYLESLEHTA

SEQ ID NO: 296219 - protein, 366 aa, unidentified
MQKISTMRRCGNKISKKSPLTIGLDLGDRSSSYCVLNENGEILLEQKTATTPAGMQHTFEKMARSRIAMETGTHSPWVSRLLTALGHEVIVAHAQKVRLIVKSRRKDDRLDARTLARLARIDPELLSPVQHRSAQAQLHLAEIRARAALVSTRTALVNAARGLVKSYGQRLPKCHTQQVHREMASELSTELREALAPLLREVESLNERIQEYDQRIARMAKEQYPETALLKQVKGVGDLIAATYVLTIEDPLRFRKSRDAGCFVGLQPGRRNSGESEPQLHISKEGDEYLRTLLVQGAHYILGPFGEDSDLRRWGQKLAARGGKNAKKRAVVAVARKLAVLLHRLWVSGEVYEPLRNSHPAMGTAA

SEQ ID NO: 296220 - protein, 385 aa, unidentified
MRHIDPETTRTGTAVFVAMELSKSTWVLAAQASPSGKTSSHRLDGGDIGGLLALLRRLAAREQGAAGEKVEVVLGYEAGYDGFWLHRRITAVGITCWVMDPGSLQVDRRARRAKTDRLDAVMLLRALMAWCRGDRAACHMVQVPSVEREDARRTHRERQRLITERVQHVNRIKGLLATQGVHDYLPLRRDRRERLAELRTGDGRALPPCLRREIEREFLRLELVLEQIVAVEAERDTAVAAPAANDADAAKVALLAKLGGIGTELATVLVREALYRPFANRKEVAAYAGLTPSPFASGDRHREQGISKAGNPLLRKSMVELAWLWLRYQPDTALARWFTRRVGEIRGRIRKITAVALARKLLVAPWRYVTTGLVPEGARLKPSAT

SEQ ID NO: 296221 - protein, 413 aa, unidentified
MAVFCGIDWAEDHHDIALVDQDGTLLTTRRIGDDATGFAALLQLLVEAGDDPDAPIPVAIETSHGLLVACLRATGRPVFPINPLSVSRYRDRHSVARRKSDAGDALVLANILRTDLAAHRPLPADSELAQAIAVLARAQQDAVWARTDAHNKLRSLLREYYPAILLAFATKRGGLLRPEARALLRAAPTPRAAARLTLSQLRALRHRAGLQRGIDTEALRLQQLLRADYLHHPTLVEEAFGRQALALLRQLDTACGNAEDLADAATEHFAQHPDAAIITSMPGLAALTGARILAEIGDDRARFADARGLKAYAGSAPVTRASGKTTAVMHRRVKNQRLASVGYVWAFAALTASPGARAHYDRRKAAGDRHVAAQRNLFNRLLGCLHHCLHTRQTYDEATAFPTTSSTPAERAA

SEQ ID NO: 296222 - protein, 335 aa, unidentified
MKHDMHVLGIDIAKRVFHAVGMDDRGNIVYRKRLSRHDLIPYIAQLPPVRIGIEACGGAHYWARRFRAHGHEVKLMAPQFVKPYVKSNKNDSRDAEAIAEAVTRPTMRFVPIKDVDQQDLQALHRVRERLMGARTALVNEVHGLLHEYGIIISKGVAKFRQAVVGKLESEKDKLTSLSREMFWKLVDEFALLEKQLAYDQEKRDTVATTHPECQRLMTIPGIGPFTATALVAAISDASAFKNGRQCAAWLGLVPRQHTTGGKERLLGISKRGDTSLRKLLGHGARTTLRWVGRKTDRRSQWMRQLLERRGKNRTAVAVANKNARMVWALLTSHQD

SEQ ID NO: 296223 - protein, 406 aa, unidentified
MPTWFAGLDWADQHHDIVIIDEAGRQLGSRRVAHSPEGFAELQSFLLSITSPDRKTELACIIETNHGLLISFLLEIGYPVFPVNPKTVDRRRSPSGAKTDQIDAYLLAKYGRSEFADLRRLEPDSPLIAELKALTRDQDGLIQMQTRLVNQLTACLKAFFPTALSLFSKLQQRSTLTFLQSYPTLEAAQAATVEQFTTLLKQTAHSNPKKAAPKLFEILHQPQLQADEVTIRTKSRLMLALVRQLLPVVEEIAAYDEEIERLFLTHEDNEVFSSLPRAGKRLAPRLLAEIGDEPSRYANAMSLQALAGTSPVLYESGKYSKPHRRHACIKPLRNAIHQFAWQSTQQEAWARDYYDRKRKEGKSHTVAIRALANVWARILFAMRQNGACYQTATFEESQRLHVKRVA

SEQ ID NO: 296224 - protein, 339 aa, unidentified
MKLYTGIDLHSNNNYLAIIDDNDSRVFKRKLPNHPETILATLAPFREQVEGVVVESTFNWYWLVDLLREAGYHVHLANPAAIQKYKGLKHSDDNHDAFWLAHMLRLGILPVGYIYPKDDRPVRDLLRKRGHLVQLRTALINSLQGIISRNCGCSLNTNKIKAVKEDFITPLLAGQSDLQLSGAVSKDCIDFLTGKIKEIERSIKSSMMEKTSFQALQTIPGVGNILALTILLETGDISRFAKVGCYSSYCRKVPSQWTSNSKNKGKGNTKNGNKYLAWAFSEAAELAKRYSDSAKAFYNRKMARTNRMVAHAALAHKLARASYYIMRDGVAFEEKKLFA

SEQ ID NO: 296225 - protein, 349 aa, unidentified
MDKITAVGLDLAKQIIQVHAIDVTGRVVLRKVVRRERLLSLLAQFPRCVVGMEACSGAHHWARELTQLGHDTRIMAAEFVRPFRKSLAAKNDANDAEAVCTAMLQSNMRFVTNKSVEQQALLCLHRVRQGLIEERTASLNRLRGLLAEFGQVAPQSAPALQRALSVLLAAEDARLPALVRRCTQDLREHVRAVEGRIAALDREIAQHAQGSESARRIAALCGVGPNTASAVVATVGNARDYRNGRQFAAWLGLVPKQYSSAGKTKLGRITKRGDAYLRTLLIQGARSALQAALRRAPAKRDRLGAWIVQLAQRVGYHKTLVAIANKHARIIWALLAHDAAFDRAYAGTQ

SEQ ID NO: 296226 - protein, 305 aa, unidentified
MSGAIGIDVSKASLDVAIHGDSQQKSFPNTPQGHRQLGKWLVKLTPRQVVLESTGSYDQAVVDALYEAGLPVVRMNPRQVRDFAKATGQLAKTDRLDAFVLARMGHVLELPRYAPKAQWQRRLAEWVHRRTQVVDMLVAERLRLETVHDPLLRRMARRQIRQLEQARAQLEQGIGQQVREQPELQVLRSLKGIGPIMQATLACELTELGRLSGKAIAKLVGVAPLARDSGTLRGRRTTWGGRPQVRAPLYMAALTAMRLDPHLHAFYRGLRERGKAAKVAIVAVMRKMLVILNARMRDHLAATTA

SEQ ID NO: 296227 - protein, 342 aa, unidentified
MTFVGCDLHTRMQQVAVLDTETGEISERQLPHDGMAVEEFYAALPRPVTIGIESTGYATWFHTLIQRLGHTLLVGDAAKIRAMVVRKTKTDRRDALHLLDLLRHDRFPTVWVPDPATRDLRALLAHRMRLVRIRTMVKNGLHAIALNYRLARGSKLLRQAGLVQLHALALPPHTAQRRDQSLELLAGLTTQIRTLDDAITTAALAHPDGPRLITHPGVGALTALATIVVLGPVARFHDSKHVVSYVGLAPALNASADKHHFGHITKQGSPLLRFALGQAAAHAARMDADLERTYFTLVHRRGRPKAKVAVARKLLVRLFIMLRDQIDYDEFCRRGRPAPVSA

SEQ ID NO: 296228 - protein, 405 aa, unidentified
MRIWCGIDWSERHHDVALVDDEGVLVAKRRIPENAAGFRQLLELLAEHADGSEQPIPVAIETAKGLLVAALRAAGYQVFPINPLAVSRYRDRHVVSRAKSDPGDALVLANILRTDSAVHRPLPADSELAASIRVLARAQQDAVWERQQAANKLRSLLREYYPTFLATFDDLASPDARATLAVAPTPAAAAGLRRATLRAALIRGGRRRNLDHQVERILASLRGEQFRQPALVEQAMGQQALAHLRTLDTAVGNTVELEHALAEAFHQYPDAPILTSFPGLGTVLGARILGEIGDDRTRFSDAKALKAFAGTAPVTRASGRKRSVTMRVVRNRRLCQAGYLWALPLLTHSPGARAHYDHRRARGDTYSAAARHLANRYFGILFHCLQNRLTYDEDKAFPTSITIAA

SEQ ID NO: 296229 - protein, 372 aa, unidentified
MEKFSKYVGLDVHKDTIAVAIAAEDSEVRFYGEIANNPTAIIKLVKLLSKEGELVSFCYEAGGCGYKIYRQLTAMGKDCIVVAPSLIPRKAGERVKTDRRDSINLARLYRAGELTPVWVPEDEQEALRDLTRAREDMKHFERQAKQRLLAFLLRHGWMYSGKARWTHAHYRWMETVKFDRQAQQIVFQEYKDIVNSFGTRVEEIENQMQIHAKESLSWPVIESLMALRGVNFITAFTLIAEIGDLQRFASAPKLMAYLGLVPSERSSGNSVRRGGITKTGNSHVRRVLIEAAWTYRFAARRTPIIQRRMDKVPAAIQEISWSAQKRLCQRYKTLQTNGKLKVQVCTAVARELTGFIWAIGQATPMMKNTPTN

SEQ ID NO: 296230 - protein, 313 aa, unidentified
MNVTQSDFVGVDIAKETFDVFISPSGRFLHLENTPAGHQQLLEQLASLHVRLVVMEATSRYHNLLAATLELKGIPVAVVNPRQVKNFARALGTLYKTDPNDARVICEFGRRMEPDVRPAPDEQTQRLAMMVARRRQLVDNRTMEQNRYGTCDDELIRVGIKRHIDWLNAEIKDTDEDIDRQIKVMPLWREKVKLLEEVKGIGRTTMAVLLSMLPELGTLNRRKISALVGVCPYAHDSGKMKGKRCIWGGRSAVRAALYMAALSAVRFNPTLKAFFERLREKGKVFKVAMTACVRKLVTILNAMLRDNKRWAVD

SEQ ID NO: 296231 - protein, 347 aa, unidentified
MRFYTKQHKFYCGVDLHAKTMYLCILDQEGEIKLQRDIKTDPEIFLRTISRYREDIVVGVECIFTWYWLADLCAREKITFVLGHALYMKAIHGGKAKNDKIDAHKIAALLRGGMMPMAYVYPPEMRSTRDLMRRRMHLVNKRAELLAHVQNTNHQYNLPEIGKNIARKCHREGVAERFPDVGVQKSVELDLALIDQYDQLLHRVEHEISLIAKKHDADSYFRLRSIPGIGRILSLVILYEIHDISRFERVQDFVSYCRLVKSARESGGKRLGSSGKKIGNVHLKWAFSEAAVLLLRRSPEVVKYREKLAKKHGKGKSLTILAHKIARAVYYILKRKEVFNIEIFFAK

SEQ ID NO: 296232 - protein, 358 aa, unidentified
MRQFYAGMDVGSSVCEISVEDQDGQEVYHKKFPTGERHLLEVIQEAKECCRGKFHLAIEEGEMAQWLAGILRPLVDRFVICDPRRNAWIAKDRYKNDRIDARRLAKLLRGDFIKEIHHTEDVDRVEFKRLVQHYHNITRTESILKCQIKSRLRAHGVIIKEDRDAHPDSREANIARIPSLHGQQVLRQLYAFLDSALQAKENAKKLMVSMGRKFPEIALLQSVYGVGPVWACTFSAYIQTPFRFKDKHKLWKYCGLSITDRSSNGLPLGFHRLDRSGVSMLKNLSYNVFMSNMIADTDFKKSFKESLDRTQDKTHARLNTQRKILAVLWAMWRSMETYRSQGGAQKAARYQVKYLAAD

SEQ ID NO: 296233 - protein, 423 aa, unidentified
MKVTFLTCCGVDVHKSFLVATIIKTTGGIEPSYQKKRFSTFNNSILEFKQWLLDNDCHDVCMESTGKYWIPVFNLLEDEINVTIANPKWVKAVKGNKDDTKDSKWIGDLFRLGLVKGSYVPCKAIRILREYTRYRYKLVSCRSSEKNRYQNALTVCNVALDSVVSDIFGKSSTSIIDYLLEQPGTSVNHEEIASKLLKSLKSKEDAVIESIEGYQMTDSQKYRMRLIRTHMDYITAEINDIDSSIEKMISSNPDYENAVRLLCTIPGVKRDSAIAIISEIGTDMTQFCNSKRLCCWAGLTPGCNETGGKKKSVRIMRAGVYLKPALVQCAHAAVKSSKSPYYKKKYESLVKRRGKKRAIIAIARMILTAIYQMLSTGEEWNPCDLYKVDMPAPLIEKQKTKAIKQAKKLLLREGIISESQLVS

SEQ ID NO: 296234 - protein, 369 aa, unidentified
MTIIPDTERRSQPRQPIFAGVDTHKEIHVAALIDPAGTVLGTRSFSTTRAGYRALLAWVRGHGDLIRIGIEGTGSYGAGLTRHLAKHDVVILEVDRPDRSDRRRKGKDDDLDAINAARAALHERRTTIPKSRDGAVEALRILRVARAQAVRERRNALQLLRMSIVAAPDEVRDQVRDLTRMQLIRHLAAWRPDISNTTDPVVAYRVALKSFGRRYLEVTDEIADLDDLINPIVEALAPQLLERVGIGIEVAGQLLVTAGDNPDRMRSEAAFAMLCGVSPLPASSGMTQRHRLNRGGDRQANRALHLTVISRLRLDPRTKAYVAKKTAEGHSKMEIIRCLKRYLAREVYFLLNPGIEHIAPNTKRPQIAA

SEQ ID NO: 296235 - protein, 392 aa, unidentified
MTYFIGIDLAKYKHDCFIMDENGEVIRDSFSFNNDKEGFNTLLNVLNSLDSNQEKRIGFESTGHYGSNLKIFLERNGYSFMEFNPLLVHRHFKSETLRRTKNDKVDARKISSYLYTREYKPNPNSSYHLNCLKSLTRTREALIKDRTRHIIHMINVLDKMFPEFKLQFGNQGLNAASAMYLLENYGSPSKMSNMTRASYDKMKSELRRTISYAKFLRIKELARNTIGNEDEILVFELNTYLELFKELDKKILKVEDKITKEFSIMKCHIASIKGIGIITAAGILAEIESIDRFDNPGQLCAFAGIEPSENQSGTHDGGGKMVKHGSPHLRNYLMQSAGYMLIHNPVLYEYYLKKRNEGKRHTVALSHVAKRLTRIIFYLEKNDTDFNIDKMR

SEQ ID NO: 296236 - protein, 559 aa, unidentified
MAGVRCSARLTLSAVCDRSSTKVNRGVSRVRSRYDGKAVAGLPAVVSLVLDARRLAWPERPWPHHWRRATPQTVASIPSGRLLRPRSPSRLAAAWNPSPTLTVATAMSRRKPSIPAKADAATLLVVHPHAAAVDVHSDNHVACIGPEQVRTFGAYSADLATLADWFTQSGITTVVLESTGVYWIPLFELLEARGFEVFLIEPSQASHCGARPKTDRLDCQWLQRLHTFGLLRPSFRPPEAVLALRGYWRQRQMLVRYASHHVQHMQKALEQMNVKLTEVVSSITGVTGSAILTAILAGERDAAKLAELRHEKCARSEAEIALALEGTWRAEHLFALKQAWELYHHLHRQIDECDLKIAEELERLPDRRGDAPIASKPRRRGRKSNDVRFDATAKLTRAIGVDLTAIERIDVTTALVILAEIGVDVGRFPDEKHFASWLGLCPRTSRSNKTERRRTPRKGKNRVAQALRMAAQAVGRTQTALGQFYRRIKSRIGGRGAITATAHKLSRLVYRMLRHGTEYVVRSLAEYEAQMREKLERSLRRKAEALGFDLTPKAPVISP

SEQ ID NO: 296237 - protein, 341 aa, unidentified
MEHTTIAVDLAKSVFQVAVSHRAGQVSLERRLPRTRFLSFFAQQPPATVLLEACGSAHHWARQLQQCGHDVRLLPAHDVHRYVRRNKTDRGDAKALLEAARNDEIRPVPVKTVDQQMIASLHRLRSTWLATRTARLNTIRGLLREFGVVIPVGAQHVVPIVRALVDDARVPALLQPVLATTADEIRTLEATIHGIDQQLATLARQLPDATLLQTVPGVGVITATALLAAVGDIRRFPTGRHFASFLGLTAREASSGEQRRLGAISKRGDTYVRMLLIHGGRSVLWSAKGKAGTDGLRAWALRTEQRRGHNVAAVAVANKLARIVWAVWSRQLPYAGGLPSP

SEQ ID NO: 296238 - protein, 366 aa, unidentified
MTSVASAGERIYLGMDVSRDKIAVAVLQPGADVPAVEQISSDGEMVRRLIGKFADRSVLAACYEAGPGGYELYRLLASMGVACDVVAPALVPKGAADRVKTDRRDCVRLALSHRAGLLTAIRVPSEQEEAVRDLVRTRADLVDDRKRMMQRINALLQRHGRTWRAPRWTYQHRAWLDRQSFTEPALQAALCTYLAALDARDAELAVLETQLRGCWASVDPLASMVRRLGCYRGIAELTGLTLAAEVADFRRFGSAPAFMGFTGLTPSEYSSGARTRRGGITKAGPQLIRSTLVEAAWAYRHRPAIGATLKRRQAGQPAQTLARSWKAQQRLHATYAKLTRRGKIPPVAVTAVARELAGFVWAEMTS

SEQ ID NO: 296239 - protein, 323 aa, unidentified
MSVFVGVDVAKKSFDIATPLPNGKTRTKAKLSNDPGGFKQFCDWLERHAEPGAWILMEATGTYHEALAEHCHNQGYRVCILNPAVIAKFADVELRRVKTDKADAKVIAAYGQQKAASLRQWEPEPPAQRRLRALVRRLDDLKEMRQMEQNRLDVAQDAVQQSIQDVIGHITEELEKTRKAIEQTIDDDPDLRKRRDLITSIDGLGDTTATLLLAELGDPLKYQSPSAIVAFSGLNPVVQQSGEFIGQSPISRTGASRLRAGLWMSGTVSIRHNPVVKAMAERLNSRHKAYKQIVCAAMRKLLHLVYGVVKSGIPFDPKIALAG

SEQ ID NO: 296240 - protein, 405 aa, unidentified
MNSVGIDVSKGRSTIAVIRPFGEVVSTPFEIRHTASELRDLACSLKSLSGETRVIMEHTGRYYEPVAQTLSSAGIFVSAVNPLLIKSYGNNSIRKVKTDKADALKIARYGLDNWSQLREHTVMEKHREQLKILNRQFNLYTKNKTALKNNLIALLDQTYPGVKNFFDSPVRDDGSQKWVDFAADFWHVDCVRDSSEKAFAKLYQKWCKRHGYNFNQSKATTVYENSKELVPTLPKNDYTKILVCEAINQLNAISRTVEVLRIEMNRMAQQLPEYPVVMALFGVGASLGPQLMAEIGDVLRFAHRGALIAFAGVDPSPNQSGDYERKSNPASKRGSPYLRRSLFLVMTVLLQNAPDGDPVYQFLDKKRSEGKPYYVYMTAGANKFLRIYYGRVKEYLNSLQTAALS

SEQ ID NO: 296241 - protein, 345 aa, unidentified
MIVIGADIHKRSHTLVAVRAQSGELIGELEIKAEEAGHRRALRWARELGEERVWALEDCRHVSRRLEGALLGAGERVVRVSPRLTGSCRREERRVGKSDRIDALAVARVVVREGPERFPAAFLDQRAMEIRLLADHRRNLIAERTRAQNRLRWHLLDLCPELEAELPAGSLDRAVRLGAIAKSLEGIESVRARVARELLERVSALAQEAKRLEAEIAELVRAHRPALLEETGCGPLSAAILIGHTAGAERFAGDAQFARMAGVAPIPASSGKTQRHRLHRGGNRQLNHALHVIALTRSRLDPETRAYLDRKRAEGKSNREAMRCLKRHLARRFHRLLLDPSPSSS
